United States Patent Application Publication US 2026/0103690 A1 - sequence listing, part 25

SEQ ID NO: 111026 - protein, 451 aa, unidentified
MSKRQTVKPAPVAAPAPEFAARIGLDWADQKHFWTMLGGDGKKTRGQLDNTPEAIQVWAAELAQRFGGRPVALALEQSRGAVIAVLSKYAHLALFPVHPTSLANYRKSFSPSGAKCDSVDGDLILDYLVKHPEQLRCLRPDTVETRSLQFLTEERRKLVDAHTAVLQSLIHWLKQVFPQMVRWFDDPATPLVADLLLRWPTLQELQKVQPKILRKFFHAHNCRSEERMQERLDQIREAVPATHDPALLQTGTLSIQNACRILTSMRQGIAEFDQQIAATYQAHPDHFITESLPGAGPALEPRLIAAVGSQRDRFASAYNMVCCFGVAPVTESSGNSLWIHWRWACSKFVRQTFHEWAACSIRTCNWARAYYDRQRAKGNGHHAAVRSLAFKWIRIFFRCWRDRVAYSDQRYEQALRTRAAKSKLPQTDTGVAPTVGWKSCGGFSKLVKVSS

SEQ ID NO: 111027 - protein, 361 aa, unidentified
MTTISAERPDTEVAVILGVDTHLDFHAAVAVDHLGRRLGEASVPTTVKGYERLLCWAEGFGPVRCAGVEGTSSYGAGLARHLRAREIEVLEVERPKHRRRSSRSNVEKSDPSDAERAARAVLSGEASGVPKSGDGRVEMIRALRAARRSAIKARTQAGNQLQGLRVTAPEELRNRLCGLSTKELVSVAARFRLGDGPRNVPTATKFALRSVARRYEVLSAEIAELEAHLDRLVAQVTPELLSLPGIGTENAATLLIVAGDNPQRLRSEASFASLCGVAPIEASSGKVVRHRLNRGGNRQANRALYMICLARMRRDPRTQEYLARRTAEGKSKREIIRCLKRYVAREAYRVLIHSISGSSAA

SEQ ID NO: 111028 - protein, 345 aa, unidentified
MTQYKRIGIDTSKAVFTLHGIDQQDRPVLRINLRRAQMISFLRKLPPTEIAMEACGGAHHWARELIALGHEVHLIPPQYVKPYVKRGKNDRNDAEAICEAAGRPGMHFVPVKSVTQQAQGMVLKVRETLVGQRTLLVNTLRGHAAEFGVIAAKGLRQIGPLLTAIEQDTAIPPEAKDMAALLGRQIEELDTRIKEIDVKLTAAHKSNEVSQRLATIPGVGPVTALTLAIEIDPAAFESGRHLAAWAGLTPKEHSTGGKQRMGGISRAGNERLRVLLVAGATSVINAAMRPGSQLMTDWLRALLQRKPRKVVAVALANKMARVAWALMTRGEVYRRPAAVKGAAVA

SEQ ID NO: 111029 - protein, 412 aa, unidentified
MTATNQFAAHVGLDWADKKHDVCVQFKNGERTFHVIEHTPEALDVWLTELHQKVKGRIAIAVELKKGPVVYALQKYPFITVFPVHALSLARYRQAFSPSGAKDDPQDAELALELMLRYPQKIKAIEPDNADIRLLQQLVEQRRQLVEDKRRFVNRIINTLKQYYPQPLEWFSHRGSLLLCELIIRWPSLQQLKRARRDTIRNFLNAKGGRAMALTEQRVASIDNAIPLTTDPSVIEANALMATALATQIKVVSEIIKTYDERIEALFDTLPDAELFKSLPGMGPCMGPRMLAALGDNRDRFNSAEEIQNYAGIAPVTERSGQKSWVHWRWQCAKFVRQTFVEWAAKTVNSSYWARLYYQGLREKGKSHQSAIRALAFKWIRIIYRCWKARTCYDEAKYLLALEARHSPLLKP

SEQ ID NO: 111030 - protein, 523 aa, unidentified
MAAKFKSKRARKSRSHSVHKPLGVIHPRVRAVGPEHFAFVCVDCAKSRSKMMVADFFGWVLIEPTIIEHDRFQFEAVLKQVRDTLKRHGIKDQTAVIERTGRYHGPVQRAFVKAGIEVRILHPYTTKQYRQPADPGNKTDDTDLSAIHRAAVNGFGLLEHEPDPIYVHLQLLARHRRRLVHKNVMLRQQMLEHLHSYMPGYSSCFKDIFDSELLLWVPKHMGSAAEILQAGVEGLDQRLRKANVRSHRPTLKKIVAWARSAPSADEPVSLHRRFFTEFDTVRLATLQLIGAVESDLVEPLSQTPYVLLLSIPGINVVSAAEFAGEMGPIEYYAMPRAITGRAGLCPSRYQSDEVDHPNGPLVRLANHDLRRAILIIADNLIRCNEHFGVLVAGWRLKNADARDIRVRVGSRFCRIAFHMVSGRMTFRHPCTQQRDYVLKKLIQFALGHAIAPDQLLRNLDAAAVQLPPSDEREEAESLAKELAQVRNKRGSGPKAIGEILPAILVKLGVHLISSSESGEAELT

SEQ ID NO: 111031 - protein, 478 aa, unidentified
MIKSVGIDLAGAGEHKVRCLDEEAQLCDGFGFETSPEGLAKLEERVFRDGSNPVIVFEPTGLAWFVIAIYIRARHPDCHLVRTQARNVVALRKYLRRSAKSDRIDALTLAKMPFVDIERLNEVYLPPAKVNAILRLARQRQRLESDIAGRKKRILSIIDGYLPGVRQPFSNLWSPQGREFLRTQLNPLAMVRAGEKALHRFLTQARVRGKKVANESHWVYRAYQNIAAIYDMSRSSGAVDDEFFADLQDEIARELRLMESEEAESDVIAQRIEILYRDLHPSDNLRTIPGVGELTAPVFLAVVGDPTRFRSQSAFANYNGVVPDSRQSSDTEAKGLRMTKAGPSIMRWALYQASQIGRRYDPQLASIYYREMVHNGKNHKQAMGAVMSHIGARILAVLQENKPYELRDIQGRPITWEEARKLVLTNYQVPEEIKRARRRRRTVGNSAKSHKNRREMVAHRAHEAAEAPQPVMTTASPG

SEQ ID NO: 111032 - protein, 319 aa, unidentified
MFIGIDVAKAELVVAVHPGEKRWTVANDERGVRTLTERLRAAPPTLIVLEATGGYELLCVAALAAAELPVVVVNPRQVRDFARATGQLAKTDRLDADILARFAEHVRPALRPIPGAEAQELDAMLTRRRQLIEMLGAERNRLGQVFGKGKRAVKKSLKTHIAFLERELRIADTDLGDAVRRSPAWREQDDLMQSVPGVGPVLSRTLLADLPELGRLSRREIAKLVGVAPLSRDSGTFRGRRFVQGGRAAVRGVLYMGALVAARRNPIIRTFYLRLVAAGKPKKLALVACMRKLLTILNVMVRTKTRWLRQAAAPTLVEA

SEQ ID NO: 111033 - protein, 358 aa, unidentified
MKKLLKQAVGIDVAKDELVATFGKKYEDLSYQLVSTTVFSNTKSGMVKLRKWTDKLKQLDKPVFYVMEATGVYHELLAYYLVDNLQTVNIVLPSKISNYVKTLEIKTVNDSTSSSAIAQFGLDRKLDVWQKPKPVYKKLRQLTRERDQIVEERTIVKNKLHADTKEADPNSSGLKRMKARINLLNIQETQIKKEIDVLIQSNDELIEAIDNISSIKGISKMVAAIILAETNGFELIRNKKQLVSYSGLDIIDKSSGTSVRSKPRISKRGNKYIRKALFFPSIVSVKWNKTHINLYERISVKSGIKKKGLTAVQRKLLELSYILFKNKTKFDDQYEIKQLQKKEGEKFQPSLQPAIKAT

SEQ ID NO: 111034 - protein, 316 aa, unidentified
MQTPLDIGVDVAKDEIVVACAANTFAPHAIANRPAELRAWLKALPKGSRIGLESTSTYHELLADLAHGQGFSVFVLNPRDTHHYAKGVGARAKTDRVDAQIIARYLAREYAQLHPYQPPTADQRRIDLLLKRRAKLTTIRAMLRQSLKGLQSCDADVKAVFAKLNALIKKIDLTLARLSTACPDRFQIQQRLQSVVGIGPIVGMSLANLLQRVPFRNADALVAFLGYDPRPEDSGQKRGRRRLSKRGPAELRRLLFTAAMAASKCNAWKPLYQHYRNKGLSTTAALCIIARKIARTAWSIFKHKTTFDPKRLACQP

SEQ ID NO: 111035 - protein, 388 aa, unidentified
MNYVGIDISKYKHDCFIMTDLGEVINDGFSFTNNAGGFAMLQRELELCGKGNVRIGFEATGNYGINLKLFLERIGYDYMEINPLLIKEYIRGRTLRRTKTDKLDASAIARYILAVGYRPHRTSFYQTFALKQLTRLRSSLVSQRSRYLVQLTNVLDCIFPEFKPLFGNKFSVTALYILANYPSPQAIANMNTRSFEILRRKSRGKFTMDKFVKLKTLAKNTVGVYEDCYRLELDTLLNLYSQLDSKIDELESQITEIIEVLNPPTLSIKGVGSVSAAIIISELGDISRFKTPDKVLSFAGLEPGFFQSGTTEYNGHMVKHGSAPLRCALMNCSRSIRLHNETFAAYYQKKINEGKPHYVALSHVAKKLVRLIFALETKGDRFDPSRLR

SEQ ID NO: 111036 - protein, 377 aa, unidentified
MTKLQFVGLDVHAETIAVAVAETGGEVRSLGVIPNRLESVRKLVHKLGPIQHLRVCYEAGPTGYVLYWQLTQLGVACEVIAPSLVPTKAGDRVKTDRRDAEKLARCYRAGELTAVWVPDAAHEALRDLVRAREAARKDQMKARHRLGKFLLRHGRRPPEGTKAWTQKHREWIKSHVRFEQPALETTLADYLEEVDHMAARIVKLEKAIDEAVSQAPAEIRAVIEALQALRGVAQTTAASIVCELGSLSRFPSPRELMGYSGLVPCEYSSGSRVQRGGITKTGNGHLRRVLVEAAWAYQHRPNVIGFLLRRQKTLAISEEAKKIAWKAQQRLHKRYQAMAARGKNKNQIVTAVGRELLGFIWAIAVAAEKQHQLAQAA

SEQ ID NO: 111037 - protein, 417 aa, unidentified
MIEDEVWFVGIDWATQSHSVCLLDAEARRVAQREFAHGGAGLTELRDWLLEKTRAAAGQIAVAIEMPHGPVVEMLLEHGFAVFAINPKQLDRFRDRFTVAGAKDDRRDAHVLAGSLRTDRAAFRQLVSDAPVMIELREWSRMADELQQERTRLANRLRQQLWRYYPQAAKLTDDVADEWFLALWQKVPTPVSAAKAREKAIARILSTYRIRRLDAAAVLRTLREAPLFVASGTTEAACAHIRSLAARLHLVNRQIREAQQNLDRLCDQIEGEENASGQGSEQCDVTILRSWPGIGRINLATLLAEATEPLRRRDYHALRALAGAAPVTRQSGKQRFVVRRLACNRRLQSAVYHWSRVAMQHDAATRKRYDALRARGHGHARALRSVGDRLLFALCTTLRRQTPYDADYNSEKTPATG

SEQ ID NO: 111038 - protein, 430 aa, unidentified
MNTVNDIRLQQFCQFKNEIRGSTEYLVVGLDIAKEKHNAFFGTATGTTLYRGMFFDNTQEGFQKLLAQAEKLKAENGLSKVVFGREPTANYHRPLAEYLIKRGHLVVLVSPLSTVKNRQLLDGRWDKHDTKDAGNVADLVAQGKCLYYDYPEAAIRNIRNLLSFKKRLKKEEQALQVRIRNQLLAQYFPEMDRHFRTAVGLSVVQRCLDPSVIAGMEYDEFCRTVAPGKLNLKQQRVLQRIWQSAHQSIGCRVGETVSFEAQAMVTSIHHVREMIKAVNEKIEALCLPFPEYSCLLSIPGFGPEVSSTVLGAIGDPYRFSCGRQVLKMAGFDLSASRSGKNALNIVPVISKRGKVDLRFVLYQAALVASNTNHYFIMYYGRKYLRRQHEQGAGTKLRVKLAAKLLIIAWTLMKKKEMFDPNCLNLGEAKV

SEQ ID NO: 111039 - protein, 340 aa, unidentified
MDAESGELRSCRLSGETARVVEFCAGLPGPTRVAYEAGPTGYGLARALHTVGVQCVVAAPGKIERPAQDKVKTDQRDAERVLRLLMIDALHPVRVPTVEEEAIRDLVRAREDVRGDLMRARQRLSKLLLRHDILYEDTASTWTQRHRAWLRAQDLGGGAQATLLDYLGAIDTLELRRDQLERTISELVPGSPHAQTVARLRCLRGIDTLSAVGLVAEIGNFERFPRAGQLMSYLGLVPSENSSGETRRQGAITKTGPRHARRLLVEAAWHYRKNPARGLTLQRRQDGQPAHVITISWHAQRRLHHLWRRLADERGKRRTIVAVAVARELAGFCWALARAD

SEQ ID NO: 111040 - protein, 388 aa, unidentified
MYHAGIDISKFKHNCFIATDAGVRVKEFIFDNNKSGFTELTDSLKALGKPREIKIGFESTGHYGTNLKSYLSNLGYTYVEFNAYLTHMFSKALSLRKTKTDKVDAKVISSMLGSVDYETLHTKFYHINDLKELVRQRNVYLNHRSKELIKLTNLLDKTFPEFKPFFNNRLGIGARFVLKRFKTKARIAKLSMSDFDLIKSKMMGRFTYPKFNCLKQLANDSIGVSSKAYDLLIQTAIKQYEHLNETLKIIDTEIITLYKQTDSKLLTIPGLGIITAATIYAEVGDFKNFSNPTKLIAFAGFDVRIIQSGTQEHYGKLVKHGSSLLRNAIWTYALPAVKFIPTINDYYHKKRSQGKHHKVVLTHICRKLIRMIYFIEYHNVSFDSNLSR

SEQ ID NO: 111041 - protein, 344 aa, unidentified
MKITTIGLDLAKSIFQVHGIDATGQVVVRKSLRRAQMLPFFAKLPSCLVGIEACGTSHHWARELIKLGHEVRLMPPAYVKPYVKRGKSDAADAEAVCEAVRRPTMRFVPVKSPEQQAALSMHRTRDLLVKQRTQMVNMIRGLLAEFGIDIAKGLGRALLMARRIVDGEAPDVPIEAAKMVGMLSQQALDIDARLRQIDRDLLVWQRGNDVARRLMTIPGIGPVGATALAASVTDPHQFRSGRQFAAWLGLTPLQKSSGGKERLGRITKMGDKYLRKLLIVGMTSLVSRAKSRPEKIDPRLANLLARKPVRVATVAMANKTARTIWAIMTRGEIYHAGHRPVLAA

SEQ ID NO: 111042 - protein, 341 aa, unidentified
MSQSYLGIDLHKRRSYVVLMDEGGDVLDERALPNGDMAEYLAERVPRATTAVMEATFNWPFMYDLVSEHVERVLLAHPQKVKLIAEATVKTDKVDAHTLTHLARTGYLPESYAAPKWLRELRRLMRHRQNLIADRTRHKNRIHSVLHSYNLSSPLSDLFGSKGRAFLAELLCDPAGPLTPSACQVIEDSMAAIDFYNERIQGLDQAFSAYARTDPAIDLLRSLPGVGLISAITIRAELGEVERFRNGHQVARWAGLTPKVLISDQMVRHGSITREGSTYLRQAMVSVALRAVRFSPSMRAFYQRLAKRRGSGIARVALARKLVILSYQLLRTGQPYREGDR

SEQ ID NO: 111043 - protein, 362 aa, unidentified
MVQVRSWAGLDVHARSVVAAVADSESGELVVRRLAGATREVVEFCAALPGPVRVAYEAGPTGFGLARALEAANVECVIAAPGKIERPTSDRIKTDRRDAERLVRLLMIGALQPVRVPSPSEEGLRDLIRAREDARGDLMRARHRLSKLLLRHDVRFDETAGAWTQRHRQWLATLELEHRGAQVTLADYVGAIDALVVRRDALEAAITGLLPDSPWAETAARLRCLRGIDTLTAVGLCTEVGNFTRFERAGHMMSFLGLVPSEHSSGQTRRQGQITKSGSGHGRRLLVEAAWHYRRRPNRGTSLARRQAGQGAHVPAISWHAQQRLHRTWQRLDSERGKRRTLVAVAVARELAGFCWAIANAD

SEQ ID NO: 111044 - protein, 322 aa, unidentified
MHGVNEAGKPELLRPSVPRAKLHALVAALPPCVIGMEACSGAHHWARLFAAHGHTVKLMAPKLVAPYRMSGKRGKNDGADAAATCEAVQRPNMRFVPIKTEEQQSRLMVHRARQGFIAARTATINRIRGLLSEFGIVLPQKAEVVRREAAAQLEDLPGWANTVIGDLLSEVHHLDERIKQYDRHIRTMARDCTAAQQLMRLMGIGETTATAIVAMVGRAAEFDSGRQFAAWLGLVPGQYSSGGKARLGRITKAGDGYLRSLLVLGARAVLNAAANKTDSLSRWAVKLAERRGYWKAVVAIAAKNARMAWAVLTKGEAFKLPA

SEQ ID NO: 111045 - protein, 316 aa, unidentified
MDTIIAQTVGVDISKDMLDVHLYPDNLARRFTNDSKGFTALIDWLAQQHKAQRLIFEPTGAYHHAFERRLGQTGLPMIKVNPLQARRFAEAIGSRAKTDAVDAAMLARFGALGELQARPPVSQSLDDLKELLVARRALIKDRTAATNRDHVSRAPLLKRLANQRLRQIERQLEAIDAAMQSLCQADTDLKARLAILVSIPGIGNATALALLIEMPELGTIENKCVASLAGLAPIARDSGQTRGKRFIRGGRAHLRQALYMPALVAVRFNAAMKQKYEAFVAAGKPKKIAIVAVMRKLIVLANALLRDHRHWTPNNA

SEQ ID NO: 111046 - protein, 329 aa, unidentified
MKKEVLGIDISKLTIDVYLHVNQSHELFNNNPAGFRKLISWLKKGKINIKDLLVCFEHTGMYSFELANFLTIKNIDYVMESAIQIKRSMGIVRGKNDKIDAQRIADYAYRRRDKLEFSVLPSKMIFKIQKLLSLRETMVKHRSSYKVTIQENSRILVKSEYKCFFEAQNKLVKSLTTQICKVEKEIKLIIASDLKLKNIYNLITSISGVGFIVAAYFISTTSCFTKFKNGRKYACYCGTAPFEYSSGTSIHFKTRVNPMANKKMKSLLNMSARSAITCDPELKEYYHRRVEQGKNKMSTLNIIRNKIIHRVFAVVNRGTPYVILQNHLS

SEQ ID NO: 111047 - protein, 369 aa, unidentified
MDEASTTFVALDTHAASISIGAAEPGRELPRYLGTVGTNCAELKKALRKVGPPSKLLIVYEAGPTGFTLARQLTDAGYTCEVVAPSRVPHAPGDRIKTDRRDALTLANLARAGALTQVYVPDERDEAIRDLSRARIDAVRARLKARQQLQALLLRHGKRYTGKTSWNAAHERYLATISFPHRAQQIAFEEYRQAIAQADARVQGLTQALIQELPQWRLRPLVEALMCLRGFDHVAAMSTVAELGDLKRFPHPRELMGYLGVVPTEHSSGARRRQGGITKTGNTHARRILIEAAWNYRSPPRISTALQRRQEHQPSAIRDIAWRAQKRLSHRYRQLKARNLPHKKVCVAIARELTGFIWHIGQLVSPAAV

SEQ ID NO: 111048 - protein, 352 aa, unidentified
MSKGITSGLTIGLDLGDRFSEGRVLDESGEVVEAFRVRTMEPALRARLSSFPPSRVVLEVGTHSPWVSRTVTSLGHEAIVANPRRVRLIAENDSKSDGVDAELLARLGRVDPSLLKPIVHRGEVAQRDRILIQTRDGFVRARTQLINEVRGFAKALGTRAPSCSTEAFAKRVRETLPRDLFPGLKTLLETIEQLTKTIRRMDGEIERLCEKRYPETALLRQVRGVGAITALYFVLTLEDPGRFAKSRSVGAYVGLRPKQRDSGEQSPQLRITKAGDRLLRSLLVRCAHYILGPFGPDTDLRRAGLRMAERGGSAAKKRAIVATARRLAVLLHRLWLAAEVYEPLRSEASKAA

SEQ ID NO: 111049 - protein, 355 aa, unidentified
MTGTKYIGMDVHKESISIAVRNSVGKVVMECVIETKASMILQFFDGLRGDLHVTFEEGTWAAWLYDLLKPHVTKLVVCDPRRNALLQDGNQNDRVDARKLSDLLYLNKLSAVYHGDHGLRTLKELGRSYLTITRDQSRVMTRVKAMYRSWAIPCSGKQVYGSRHRAEWLAKLHEPGVRRRAELYYQQLDALRTLRQEVRRDLLAESKKHKVWKRLCEIPSIGPIRAAELLGILQTPHRFRTKRQLWTYCGLGVVTSSSADHEMSKGQLRRKKKHVQIRGLNENYNHDLKDLFKGAAVVASIKPGPLAEFYETLVSKGMRPEMAKLTLARKIATIVLIVWKRGVCFDANHLKPQTA

SEQ ID NO: 111050 - protein, 360 aa, unidentified
MKTYYIGADVHSNSTELAIEHNGKIVRRHSVPTAIPAIKEVLTSLGGTIHMTFEEGPMAGWLYRNLKDTVEEIIVCDPRRNNYIASDGDADDTIDSGKLAALLRGGFLRAVHHSDDEGRAEFKQWVRLYHDRVRDAVRMINKIRARCRMYGIAIPRNVIRDKLQRPQWLAGIQNKTLAAQLEVLWIGYDATALQVRRTKRQLGTLSKNYPIIKIWSELPGIGSVRAVTAFAFLDTPYRFKHRNKLWKYCGVGLQRSASGTDKKGKPKPARLQLAWAVNRLLKNVILGAAHTAINQNKNTFKDYYERMLYDGIMPSNARHAVARKMLTVMWGMWKTNSRFNEKLVKEVSLAAGSSLSATRR

SEQ ID NO: 111051 - protein, 308 aa, unidentified
MAQNYIGVDLSSDWIDIHDPIRGTSRIANSNAALARWMGAFAPEDFLIFEATSGCDRAILQEAEARGITMRRINPLHGWHFGRSLNLPKTDRVDARMLARYGAERQPEPQAPSSPARLALAELETRREQLKVMEVQEKNRLRKATLEAVRADHLTMLRNLAARTAKIETHIRDHLKAHPDLARAAHLLQSIPGIGSVAATVLIAHLPELGTLDRRAIASLAGLAPKARESGKWHGNRPIGDGRRHIRRALYMAALSALRSSSCFAKSVAALRAKGKPGKVIAIAMARKLLVIANAIISKQEPFRAAKQ

SEQ ID NO: 111052 - protein, 309 aa, unidentified
MNEELVYLGVDIAKAYLDAAIANEKRRFSNDAVGHRRLIQWLKQIEGPVQVICEPSGGYERALVRALVAAQIKVSLVPANRVRQFARAGGILAKTDRIDAKLLCAFREAMKPGIISASQLEQEQLRELESQRRHLTHLLVMEQNRAARVSEVCVRKMNRRLITQIKKQIEQLDLLIQEQIAASRELATKAEKLTAISGVGARTAALLLAHMPELGQLNRREVAALVGVAPFNRDSGRMRGKRAIYGGRRSVRHGLYMAALVAARHNPILRGFYLRLRAAGKPAKVALTATMRKLLIALNSALKPNLNYA

SEQ ID NO: 111053 - protein, 351 aa, unidentified
MNYVGVDIHKRYSVLVAVDERGRELGRSRINGNTAFGFAQFFGGLDGKSKVVLEACWNWGRIYDLLSEIEQVEEVVLAHPLKTRLIADAQIKTDGLDAHALATLLRGDLIARAHVPAKPTRQRKEVLRQRLYWARLRTRIRNRIHALIDRQRELKMPQCSDLFGRKGLTALNKLVLSEPNATLLREELGLLELIQGQIKAQEARIVEFNSNDEMTLRLQSILGMGKILAAVAAAEIDSIERFSSAAKLCAYAGLVPRTHASGAKVYQGHLLKSRNKWLQWAFIEAAWVAVGCSAYFGGLYRQHRARGKNANIAITIIARRMCQICWTLLKERRDFIETFPGRSAVRLTAAA

SEQ ID NO: 111054 - protein, 520 aa, unidentified
MHQTKYRGIITEAGSLTFSPWEPAGPLLAKPLRKSVSPFGGDLCFGWLGSPRLYLYEPLGCVSAFWKWMPARKDKNMQYQKVLKMLENIPYLSVGLDVGADFSWMSIMLPNGTLTGKPFKIVHSDPQSRELAVAKIKEAQEAYSLESRCFLESTGIYHIPLLCFLRDKGFDCSVINPIITKNSTNMNVRKLHNDKFDSKKAAKVGLDASLKTSIIPDDAVIDLRNLVRDYYYFKDLQSAVVLKLTAELKVSFPAYRNVFCKATTQTSLKLLDAYPLAQDLLAAPKELVVEMIHSTARFGEKYALAKYDALYAAAEDAAVFGRALHSNALRIRLYIKLYREYQEHLDGILEELHKAVDRLEGTPARNRISLLQTLPGIGFLSAVVLLAEMGSFDLFSSPKKLYAYFGLDPGVNDSGKFHGDRVHMSKRGSSLARRILHMIAINNLKVDKRTKLPVNPVIYDYYIRKCASKKKIVAVGAVMHKICNIIFAMLRDNKPFELITPEEHCEQYLAAHPDKAPNAA

SEQ ID NO: 111055 - protein, 351 aa, unidentified
MPHKSTVHAVTAIGIDMGKNTLHMIGLDLRGAIVLREKVLRGRIASRLANLQPCLIGIEAGMATHYVARELAALGHDVKQVPPTYAKPFRQGHKNDFRDAHAVAEAVQRPTTRFVPAKTNEQLDLQALHRVRSRLVSERTAVINQIRGFLLERGIIVRQGLRFLRQQLPDILAKRTDVLSPRMVRIVTDLAGDWRQLDERIETVTDEIETLAKSDDNCRRVMTVPGIGPIISSAMVAAIGSGAAFARGRDYSAWLGLVPKQMSTGDRTILGRISKRGNGYLRTLFMQAARVILLRPANWPKHGFGAWLIRAAQRLHPNVLAAALANKLARIAWTVLAQERSYEARVTKAAA

SEQ ID NO: 111056 - protein, 403 aa, unidentified
MDTGKTFHVLVAQGPDGRRTPSHRVEVSRAAFARADAQLRTWFPGVRCEQMLIGLEFADHHGFTFARYLAGRGYYVVNVLPAHTKRAKELEDNSPLKSDSKDAATVCGLLGHGIFVRFPFLERPYLELRLLTTHRQRLTVEATRFKNRLQSLLDLAWPEFVAQFSALEKATPLAILGRWPLPRDILAAAPPTVRLHIHAASRGHIGPDRVKALLISARETIALPDAAEERRLEIRNLLARWTLVREQLADLDARITALVAICPEAKVLLSVPEVSAVCAGTIVSELGTPADFDHPRQVLKLAGMNLVSASSGQRDQARVPKWQSKRGRPALRRQFFLLAGRWCQQDGLYRADYEALLARGSTRTKAVCSIARKLVPLLLAVMRSGEAFDVDRWLAHRHQRAAA

SEQ ID NO: 111057 - protein, 411 aa, unidentified
MEAIIERAAGLDVHQGSVVACVILGSPGRRPSRETRTFGTMPRDLAALRAWLLELGVTHVGMEGTGVYWRPVHAALEGAFTLIVGNASHMRNVPGRKTDVKDAEWIADLVRHGLVRASFVPPPEVRVLRDLVRHRKALAGTLAAERNRTLKLLESAGIKLAGVMSDVFGVSGMLMLEALADGTATPAAMADLAERRLRRKVDQLALALEGRLAEHQRLLLRLHIRRLGEIGRDLAELEAAIGAAMRPFAAQQALLVTIPGVDALTAAAIIAEIGADMGAFGSARRLAAWAGLCPANRESAGKRKGHGTRKGDPHLKAALVTAAVSAARAKGTYLRDKFHRLRARLGAKKAAVAVAHKILVAVFHILERAVPFADLGADYLDRLDKHRTAERLVRRLGALGYEVMLRPKAAA

SEQ ID NO: 111058 - protein, 284 aa, unidentified
MKLHVVGIDLGKTVFHLVGLDSTGRAVIRKKCSRKQLLAFTANLEVELIGMESCSGSHFLGRALREQGHEVRLMPAQYVKPYVQTNKSDLLDAEAIAEAVQRPRMRFVPIKTEEQLDLQALHRVRERWVMRRTAVVNQIRSLLLERGLTLPKGRRYVDAQLPRILEDAELRLSDSVRVLLAQLKLELEQLTARIEEMDRVIQKTAKENEDCQRLTEIPGVGPVTATALIAAVGNASAFRKGRNLAAWMGIVPGEYSTGGKQKLLGISKRGNKYLGKDQHRDHDS

SEQ ID NO: 111059 - protein, 355 aa, unidentified
MQSTMPTIGFDLGDRFSAFCELDRLSREVVERGQARTTRPKLEQFFRSRPRSLVIMEAGQHSAWVSRLAEGAGHEVVVANPRMLPLIYKNARKCDDLDAENLARLGSVDLKLLAPIKHRREETPLALGLFRARDALVGSRTDLVNMVRSVAKSHGVRIRSSSTKCFHQKAREDLPPKLLSFLGPAVDIVESISLTIRGYDQQIEQLGREKYPETVLLMQVNGVGMLTALAFRLTLEDLLKFGKNRAAGAYLGLTTRRDQSGSSDKELGISKQGDPFVRRLLVQSAHYILGPFGQDSDLRRWGLGLAARGGKAAKKRAIVAVARKVSVLLLALWRTGEVYEPLRNSGPGELKSAAC

SEQ ID NO: 111060 - protein, 466 aa, unidentified
MKSFYLGIDVSKGYADFVIIDQQKKAVVENFQLDDTFEGHSQLYEIVSRFLADHPQTTLYVAVESTGGYENNWYNELTKFQASLSIQSARLNPLAVMHNSKADLKRNGTDKISAKSVAEYLVAHPEKVLYQQQDPLAGLRKQWGFIRMLTKQCTQIINQLHSLLYTAQPQLLGFCRDGIPAWMLKLLLQYPTAAELKKARAKSVAKIPYVSMQRAQQLIADAKRSVASATDPVTAQLVSATVGQVLHLKKTIATQTDMMAAQCDLPEVQLLKTFPGIGDTSAIGLMIELQSAARFKTVKKLASFWGLHPVYKISGDGSGAFKMSKQGRIQPRRILFTVALSAIEHNPLIKPLYQYHLAQGREKMDAIGICMHKILRIVFGMLKNSTAFDPKIDRANRLRMISTKPIDPKKDKDRRFQGYDPKAPISRRQNKKRLEREQSQSVNNTKSGIRAPVPIANIISDMLLKL

SEQ ID NO: 111061 - protein, 369 aa, unidentified
MKHSIIFIGLDVHKDSIAIALADDGRNGEIRLYGTIGGDLASLDKAIRKFRRSSVELRFVYEAGPCGYEIYRHLTSQGFHCDIIAPSMTPKRSGDRIKTDRRDAVTLARLYRAGELTPVYVPREDDEAMRDLVRGREDAVNATRKARQRLSAFVLRHGFRYSGRNPWSVAHLRWLAAIKMPHPAQQVTLQEYIHSIEECSERIDRLTEQILKLIPAWRMAPVVAALQALRGVATVVAVTMVVEIGDLRRFENPRQLMAYLGLVPSENSSGQTTKRGGITKTGNGHARRALIEAAQSYSHPARVSRELRKRQEGLPREIKEISWKAQVRLCGRFRMLMARGKNRNRTVTAIARERSGFMWGIAKEVPMPA

SEQ ID NO: 111062 - protein, 454 aa, unidentified
MRKPRVIPDEDHEVVYERVAAVDVAKASGVVCMRLPDPARPGRYANQIWDNVPAARARITELGRELLRHQVQMVTLESTSDYWRIWYYVLESIGLAVQLVSASQARNLKGRPKTDKLDAMWLARLTQWGMLRPSFVPPAAIRQVRDFTRARTDLVHERTRVLQRLEKLLEDAMVKITSVVSDGMKAKSAVAMVAALVAGERDPRAIADLAKGSLRGKRDALAEALDGMFDSHHGVIAQALLDQVAFLDQRITQMEAGAIAALAQVTESWGVDADGETGPGRGTGPDSRVLAAVYRLAEIPGVSVWLAIVIIAEIGLNMALFPTPAHLVSWMGLCRSAAQSGTRRGKGKPKKGNSYARAAAGQAAIGAAGTATFLGERYARIARRRGGAIAQVAVARSIMIIVWHLLADPAARYRDLGPDWHAAHVNRDKKIRNHIRGLQTLGLTVTVTDDEHAA

SEQ ID NO: 111063 - protein, 351 aa, unidentified
MSQNRNSEVAVIGIDIGKNSFHVVGLDDRGAIVLRQKWSRGQVDARLANMPPCLIGMEACVGAHHLSRKLKAFGHDARLMPAKYVRPYSKGQKNDFRDAEAIAEAVQRPTMKFVATKTAEQLDLQALHRVSERLVSQRTGIINQIRAFLLERGVAVRQGQRFLRTELPRILAAPPDVLSARMVRVIEGLAADWRLLDERIEKVSGEIEKLAQRDAGCERLMSIPGVGPIISSAMVAAIGTGDAFAKGRDFAAWLGLVPKQISTGDRTILGSISKRGNRYLRTLFVQAAWVVLVKIKPIRWESHGLKRWIEAAKKRLHHNVLAIALANKLARIAWSVLARGRAFAANKLQAA

SEQ ID NO: 111064 - protein, 397 aa, unidentified
MYIVGIDIAKRKHEAAVIDGEGTVIIKPFSFTNNCSGYNRLLAMLAKAKLPLDEVSFAMEATGHYWLALFTRLQKEGFRVQVINPVQTNSIRSFYIRQAKTDPRDALLIAEVIRFGHFSESTLHPENIYELRELCRGRHAIVSMQADVKRKVVALLDQVFPEYETAFTNMFSDTSMAILQTCPTPKELSEIPLEELCHLIEVSSHKRFRMAKARELQELARNSFGFAMAGDVFSTMIRLYAKHLDFLKQQVREMDRKIAEIMDTLDTPITTITGIGPTLGAYILSEIGDISRFSSAAKLAAYAGIDPTMRQSGEYNGVRNRMSKRGSPYLRHAIWLAASSAVLHDPALKLYFQKKRDEGKPYMASVGHACRKMVSIIYAVMRGNKAYTPCIPNEISA

SEQ ID NO: 111065 - protein, 420 aa, unidentified
MERKAKSKATHSGMVVVNPNAAAIDIGATMHMAAVGADRVSDPVRSFGTFTGDLHRLADWFAECGVTTVVMESTSVYWIPIYELLDERGFEVFLVNARDAKHVPGRKTDVSDAQWLQRLHSYGLLRASFRPKGDIIELRTYLRQRERLLETAASHIQHMQKAMTEMNLQLHHVVSDITGATGMRIIRAIIAGERDPAVLASMRDTRCHSSVEVIEKALTGHYRAEHMFVLEQALALYDVYQQKVAACDARIESVLKELSSVRGRKEDARADGPGSPRRGSRQSNGLAFDAAEALHSLLGKDLTRIHGIGPYLALKLVSECGDDLSAWPSAKHFTSWLCLAPSNKISGGKVLSSRTRPSGSRAASLLRLAAVTIGRTETALGAFYRRLSARIGKAKAVTATAQDCRAILQCFASRHRLRRS

SEQ ID NO: 111066 - protein, 329 aa, unidentified
MEQEYIGIDLHKAFFQVCAMGASGERLWETRWPTTDEGIAALLTHCGPQSHVAVEASSPTWAFVDRVVAHVGAVHVVDTRKTRIKAGYAAKTDRLDAQRLADALRRHSVVGIYYPPAAIRDLRELCRQRTQLARLQASLKQRLHALLLRQGVTLPRVTDLFGVRGTAWLDALTLDGWAGASLATLRQLLRDVQAQLGPVQTAIRERAAADPIARALDARPGFGPVFSLSVRAEIGTITRFPDGRHLASYAGLVPRVEGSAGRHWTGRITKAGSPWLRWTLIEAALHNVRRQDDFGRWARRLAVKKGLMKTRVAVARALCDEIVQTWPKA

SEQ ID NO: 111067 - protein, 385 aa, unidentified
MDQSNILYVGLDVHKDSIDIATADPGRDGEVRHLGSIGGDLAALDKALRKLISTGRPLQVVYEAGPCGFVIWRHLSVQGIECEVVAPSAIPKRSGDRVKTDRRDAMMLARLSRSGDLTAVRVPGAGDEAVRDLVRAREDAVRECRNARHRLKALLLRNGITYAGKAAWTAAHLRWLATLKLEHPAQQIGFQEYLHAVTEATARIARLEQALRDVLSEWGLKPLVQALQALRGVQLIAAMTLVAELQDFLRFDNPRQLMGYVGLVPSEHSSGPKRRQGSITKAGNSAARRMLVEIAWHYQHSPRVSPIIATRQDQVPKEVTDIAWKAQLRLHAKFKRLVARRVLKNKAVVAVARELAGFVWAIGREVQTSGWQGIKPEPAGSSTAG

SEQ ID NO: 111068 - protein, 327 aa, unidentified
MMFIGIDISKEKIDLSWLRDQLTNKIKTKVFKNKRQDFLAIEKWLLNTTKSAASELVITLEPTGVYHEALMYFLHEQGFNIILANTGKAKKYADALNIIHKTDKSDATMLAHYGCAKHAVVDYWQPEALEVRELKALIRRLDALESNRQREANRLEASEFSNVSARVRQSIKVTIAFLDDEIKQLKSDIDDHIDNEPGLKRNRKLLESIPGIGPVLSRELTYLFAAKKFNKAKEAAAYCGLIPRHNESGKLKGRTSISKLGPARIRCKLYMAAIVAGQWNKRIKRHKLTLINNGKTPMQAVCANMRKLIHICFGVIKNQEAFKLQKS

SEQ ID NO: 111069 - protein, 360 aa, unidentified
MRIIGCDLHARQQTLAMLDTETGEVVNRTLMHEGNQVREFYSELPRPVLVGIEAIGPMQWFLDLLAQLGIECRVGDAAKIRAAEPRKQKHDRRDAELILKLLVEKRFPAIWMPSKELLDRRALLLHRHQWVRLRTQVQNALQAIALANGLRRGPSLWSYDGQAKIAFLPLPPHASLRRSSLQAMYGHMEEEIEKLTVQVAEQAEHRAAAQLLMTHPGVGPVTALATDVFLGDAQRFADGKALASYVGLIPEERSSGRRRRLGRISKQGNPLLRFLWNEAGAHAARRDPELRRFYRRKVVQKGLGKARVAVARKLGIRLWIMLRDEIDYEEFCRRGQKQSGAVCAGMPEVGNGANRHRPVE

SEQ ID NO: 111070 - protein, 404 aa, unidentified
MFYAGIDWADQKHDGLVLDEAGRKLGSIHVPHTPEGLDKLDAWLSSTLGGQGKEQMACIIETNHGLLISFLLEHGWPVYPVNPRTVDRKRSASGAKTDAIDAYLLAKTGRADFADLHRLTPDSEKVAELKGLTRDQDGLIQMQTRLVNQLTACLKAYYPVALDLFAKLQQHSTLVFLQTYPTMEAAQTASVEQIRQVLTSAGHTTASNVAPKIFEQLHQPSLRANAVTIRTKSRLAIALIVQLLPLVEQIAQYDKEIEQLFLSHEDNGVFSSLPRAGKRLAPRLLAEIGDDPARYETAASLQALGGTSPVLFQSGNYSKPHRRLGCIKPLRNALHQFAWPRTLQEDWALAYYERKRAEGKSHSVAVRALSNIWARIIFAMLTSHQLYVSDTFETARQLHAVKAA

SEQ ID NO: 111071 - protein, 385 aa, unidentified
MPKLNDLSRSLTHLDPDGTLIAVIEMSQSSWLVAGIVPGLERQPLKKLAIDESALLKLLNRWREEAEKAGRKIERIAVAFEAGRDGFWLARWLRARGIEAHVIHASSVAVSREHRRAKTDRLDTELLKRAFLGWLRGERDHCKMVAIPTMEDEDTKRPNRERESLVGEQTRIVNRMKAALSRLGIRGFNPKLKKAAERLEDLRTPEDKPIPPNTLAELRRDMERRRLISDQIRQIEDARLERLEGMPNEGPHAMVRLLARVIGVGIETADMLVQEVLSRTMRDRRAVARYAGLTGAPDESGAKRREKGLARSGNARVRRGMIQLAWRFLIFQKDSALAQWFRARTENARGTRKTMIVALARKLLIALWRLVTTGEVPPGVVLRAA

SEQ ID NO: 111072 - protein, 336 aa, unidentified
MDKMKFVIGIDISMDVFHVCFKEKNMDNSVKIKGSKTFKNNYKGFQELIEWAKTRTKFDGNESYVMEATGCYYEDLAYFLFSKSKNVHVILANKIKHFAKSLNVKTKTDKVDATIIAQYGIERIMDSWKPMSKDFKKLRDLCRELLSIKKEKSRAMSQLHAMIHAHEKEQSVLKIKTEQIDFYKKQIDIIESEIKKSVNSDFELKNRIENITKIKGVKLITVITVLCETNGFELFKNIRQVVSYAGLDVAFKESGKFKGQTKISKKGNARIRQCLYMPALSATNHNEKIMELYERIIERNPMIKMKGVVAGMRKLLILIFVLWKKNEAYNPQYVWN

SEQ ID NO: 111073 - protein, 355 aa, unidentified
MKRTAKYAGLDVHQATTVAVVREETGRVIARAILPTDATALPAFFRAMRGRVVVAYEEGTQAQWLYDLLVPLVARVVVCNRREIRRRGNKGDWQDAEELAALLHRGALRAVYHGGGARGAELKELARTYVTLVEDATRVMTRVKALYRARAIPTKGRAVYHARERATWLAKLPAGGVGFRADVLYRELEVLQALRAQAKTALVRAAHEDPAWAVLRTIPFLGPVRVALLLGILKTPWRFRTKRHLWAYAGLAVVTRTTAEYTLEGRTPVRRHRAPLTRGLNRNHHPLIKMLFKSAATAATARPGALQEFYQRLLGRGMREELARLTLTRKLAALTLRLWKTGEAYDPVQLTRSAG

SEQ ID NO: 111074 - protein, 342 aa, unidentified
MKIHTIGIDLGKTSFHLVGLNERGEVIVRKRFSRAQLLRFTANRKVHVIGMESCGGSHFLGRALQEQGHEVRLIPAQYVKPYVKTNKNDYVDAEAIAEAVGRPTMRFVPIKSDDQLDLQSLHRVRERWVMRRTAVINQIRGLLLERGITVRKGRRYIEAALPGILEDADAKLSGTLRLLLAQLKSELDQTALRLEEAEALIEQTVLKNEACQRLVKIPGIGPVTATAVIAAIGNGAAFRKGRDFAAWMGVVPREYSTGGKQKLLGISKRGNRYLRKLFVQCARAVLQQKTKQTPGLKVWLEKLTARTHRNVAGVAVANKLARMAWAVLATGEAYRAPLPAAA

SEQ ID NO: 111075 - protein, 360 aa, unidentified
MEEGKRRFVGIDLGKREYTMAILGKNGKMSIHQGKTSLQGRQALYKKLEKGDKVALEAGNLSFIMAREIMERVGSEVRVLNSAKLPFIWDAPTKTDKEDAMKLAHLIEERRDEKLPVVPLPSEKEMARRKLLANYSREMKGRTRYINLLHALFVHQGHTTVVKKNLATAERRHQAVELLQGQEREEAGWLLKHLELYELRIKELKGKIEQEAKTDEDMKLLQTIAGVGPVVSYAYVAYVGDGSRFSSGSQVSNYLGFVPRLYYSGTIERQGHITKRGNGYLRGLIVQAAWSMVRCRKGGSLKERYEYLTVHQGKSKKKTIVSIGRRMAELMYSVLRTKNKYEVRRWEGVRDISSVQIMCA

SEQ ID NO: 111076 - protein, 429 aa, unidentified
MPRKPLDILEANDTRGSGRGGFIIPGRCLTASAGFGAEPQGVHRRLRHGCCGKEFGRPGIARRASGTSSPWESTWHVWLPVCLNTEQLLVGACRKAVTSYLQGWPEMNASELIFVGIDVAKETLEVAVDDKSKTRCIANAGREIEALVKELIPLSERIGVVLLEATGGFERQAAAALCAAGLAVMVVNPRQARDFSKSMGYLSKTDAIDARVLSHFARTLHQSAQRERLLMKRPDPNQEALEALLIRHHQLVGMRVAEGNRLAQSHPSQHKSIKAVLKMLERQIASVDNDMSGMLKAHFADKLALLKDFKGIGPCTQASLMGALPELGQLSHAQIGKLVGVAPLNADSGRHKGKRITWGGRTAVRSALYMAALSAVRYNPVIKAFHQRLIAKGKPKKVALVACMHKILTILNAIVKSGSPWNPEHHKSA

SEQ ID NO: 111077 - protein, 376 aa, unidentified
MPRYFGLDLHKRYVHGCEWLVEEQKGRHFRFPNTDDGWATFIRQLDAECWVALEVTGNAFEAHDMLSPHVGKVLLANPLELKRLGSGRHTDRVDAERLAKMLALGMLPTVWVPPQAVRGVRRLLQYRDRLVRNRRRYLAQAKAVLRRHCLHVPRNVNPRRWLEREAVQQLPEVDRIILLSSLRQLTSVDAEIQAIEAEIARHVVDEPGVQLLLSITGVGLVTAATLWAYIGDPTRFRTAKQVTRYAGLDASIHQSGEQERHGRISRNGSKLLRTVAVEAAHSVARHDMGPLGLFYHRKRRQIGHHKAVVALARKLLVVAWRMLLTGEPYRAAKPSLIEQKRRQLVRWLDTASDWDALLQQLWCVTEETGRLTTEAA

SEQ ID NO: 111078 - protein, 381 aa, unidentified
MSRHQNGAPAEAHYRTILVVFELSKAKWKLGVMLPGSQKLSRYTVEGGDVAAVWSLLAQARAKSGDGARIVSAYEAGYDGFWLHRWLQAQGIENRVLDSASIQVSRRRRRKKTDKLDLEQLMRVLAALERGEPKVCQVARAPTPEDEDRRRLSRERERLVRERGAHVNRIKGLLHAQGVRGLEPIRKSFRAELEQARTGDGRRLGPRLLAEIERELQRLELLAKQIAEVEAEARSLLAATPGAASAKVARLIELNGIGEKSAWPLVNEVFYRRFDNRRQVGAFFGLDGTPYDSGESRREQGISKAGNRRARALAIELAWLWQTHQPNSDLSRWFQQRVGQAKGKVRKIAVVALARKLMIALWRYLEAGLVPNGAVLRSARG

SEQ ID NO: 111079 - protein, 350 aa, unidentified
MNRYIGLDAHSSSCTVAVVGPSGKRLQSQVIETNAQALINFLLTVPGNRCLCIEEGTHANWLYEVLSPHVQEMVVARVRESREPKSDQIDAFDLAEKLRVGAIKTRIYKKRATFERLAELSHAYTVLVSDTVRVKNRIKGLYRSRGVNVGGTGVYAPAAREDWLQKLPVKARYRGELLYQQCDALSELRQRVEKKMLGEARKHAIYRVLKTCPGMGRIRTAQMLPIVVTPFRFANKRSFWAYSGLAVVMRSSSDWVRTRDGGWVRAPVQQTRGLNRTCNRTLKAIFKGAATTVIQCAKDEPLYGHYLQLLEGGTKPNLARLTIARQIASIILSMWRSEEVYDPRKLKRKT

SEQ ID NO: 111080 - protein, 337 aa, unidentified
MKGNFFIGIDVSKEKFDACVLHSGQTVLNAVFENNPKGVKQMLKHLKQLSDFELTDAVFCMEHTGYYCNHLLEVLHQQDATIWLENAVKIKQVNKFNRAKSDRIDSQMIAFYAYRNHEDLKKWEPKREAVRQLKYLFALRSRLILQKNQLLVPLKEATEYVSKDLQKIEKRLMQDAIKGIEKALEKTEKEIDILIGRDEHMCHQFKLLTSVDSIGRITAIYMIIVTNEFKDFKCPKKFACYSGVAPFEHTSGSSIRGRTRVSHYANKTIKSLLHLAALSSVGHSREMRDFYLRKVAEGKNKMSVINAVRNKLVLRMFAVIRDNRMYEKGQKLDLAKS

SEQ ID NO: 111081 - protein, 375 aa, unidentified
MEGAPMLDTTTFVGLDVHARSIKAVSLDVMTGEVRCATFGYDAGAVAEWVRSVDPGARCVYESGVTGFDLQKRLSGLGVDCVVGAVSKMIKPSADRGRKNDRNDAEFLARMLSVGNVVEVWVPDDECEAARDLTRALEDARDDLSRSKQRLSKFLLRHGLVFDERTPTGRRKGNWTRAHWSWIESIRFAEGADNDVLAYYVDAVRRAAEEKARLEGLVEAEARKPRWRKRVDSLRCLKGVDTASAADLVFEAGEFSRFRNARSFAAWVGLTPSEHSSGESDRRGAITKAGNKHLRKTLVEAAWHYLTCSGRPKDLAKGQAPDPAARRHAAKGVRRLVERRGALLARGVHSNKANVATARELACWVWAVGLMAEEA

SEQ ID NO: 111082 - protein, 479 aa, unidentified
MKRSQKRRSSALKSTSETAGGIDPHQNPHAAGIDIGARELVAAVPPQSTTGPAVRTFPSFTSDVEALRDWLLDCGIKTAAMESTGNYWITAYDLLEEAGIGVFLVNARHVKGVPGRKTDVQDAAWLQQLHAAGLLRKSFRSAQEIVSLRYLMRHRQTLVSAAARQIQAMQKIMTEPERSGGSQRSLVEICWQMNLKIQHVFSDADGVSAQAIITAIIAGERDPAKLAALRDRRCRSSLADIKSALAGNYREEYLFVLKQCQSTWQRIQDDIAACDEQIAILTQRVHAEAPGPLPDPLTGHQHKASKNSPQIDIFEEAWRYYGVDLSAVPGVSTGLLSVLMSELGTGAQILTSFRSGSAFASWLGLCPDNRISGGRILKAKTRQVCNRVANALRMGVFGLHRSQTKMGEYTRRMKGRLGKAEGITAGAHKLARIIYALIATRKAYDESEAFKITPRSLERQHAQLFKQAQSLGFQLVPAA

SEQ ID NO: 111083 - protein, 343 aa, unidentified
MQIRSVGIDLGKTTFHLVALSAAGKVLLRKKFTQKQLITFTANMQISLIGMEACSGAHFLGRVLRQQGHNVKLIPAQFVKPFVKSNKNDFLDAEAIAEAVDRQNMRFVPIKTDDQLDLQAMHRVRDRLIARRTSVINQLRAFLLERGMTFAKTPARLKDAMPEILEDADANLTPRMRNLISLLWSEWKDLEQQIAAMNAEVEQIASTDPACQRLRQIPGIGPLVATAIVAAIGNGAAFQKGREFASWIGLVPRQHSTGGKARLFGISKRGNSYLRKILVHGARSAVLRVKRERSPFGGWLDALEQRAPINVVIIAAANKLARIAWAVLSSGQDYRTATSMPSV

SEQ ID NO: 111084 - protein, 354 aa, unidentified
MIIIGADFHPEFQQIAFVNTETGEFQEKRLQHREEAERFYRELAAQGAQVRVGMEASGQAGWFERLIAELQFELWIGDAAEIQSRRGRKQKTDRQDAELILKLIVKDDFPRIWIPSWENRDLRQLLWHRHRMVQARTRIMNQLQAVALNEGLRCKKRLWRKHGREQLESIRLAPWACRRRRDLLELLDRLNPTIAELTQAIEREAEKRPEVQRLMTHPGVGALTALAFVLIIGTPERFGCGKQVASYLGLVPLEKSSGNRRRLGHITKQGSSMLRFLLVEAAQVTVRSDPRWRSKYFHLMMRRGRKIAKVAMARTLAVRLYWMWRKQCNYEHLSSVRTQDSPDIAMVCSRTPRN

SEQ ID NO: 111085 - protein, 400 aa, unidentified
MQLVERAWAGIDAGKGHHHIVVIDPDGKRLLSRRVANTEPDLLELIDAVQALATQIAWAIDLADGPAALLIALLLQRVQSLVYLPGIAVNRATGGYRGEGKTDAKDAAVIADQARMRNDLRVLQIQDDTIAELRMLTAHRADLSADRVRAINRLRGRLTGIFPALEGNLDFANQGPLVLISGFQTAEAIRAIGAQQLERWLRSRKVRRADKLAAAAVEAADSQQTRIVGEQLEGALIARLAATVLELDKELAEIDTLISERFRSHRQAELITSMVGIGDLLGAEFLAAAGDTMTAFASADHLAGYAGLAPAPRDSRKRTGNLHRPRRYNRQLQRVFYTSAQISIQHSPASKAFYDRKRAEGKRHRQAVLALARRRVNVLWAVLREEAAYQEPLATLSNAA

SEQ ID NO: 111086 - protein, 355 aa, unidentified
MVSPILAQWTTLSEDFVLLGAIMDTVSLIGIDLGKHCFHLHAQDGSGRMVLRKKLTRNQMFTLLSNFPSCTVVMEACASAHFWARKLQTLGHTVRLMAPQFVKPYVKTNKNDVADAEAICEAVARPNMRFVPIKNVDQQAVLALHRARQGFVRARTAQANQIRGLLGEFGLVMPRGITSIAQHVPQLIEDASNELPGSFRLLIQRLTDHLKELDRQVAEIETQIKAWHHASDASRRLAEIPGIGPITASALVASIGDGKCFSNARQLAAWLGLVPRQHSSGGKPTLLGISKHGDTYLRTLMVHGARAVVRYCANKDDAFSGWLHRLLTRRHKNVAGASMYVGGDRSDYLTAPIPI

SEQ ID NO: 111087 - protein, 367 aa, unidentified
MTSVALPAGPIHLGLDTSKDAILVGILRPDEVSPDAEKIFNDEGSIRRLIDRFGDRGQLRVCYEAGPTGFGLHRLLTSMGVACDVVAPSLVPRAPGDRVKTDPRDCRRLARLHRAGELVAIRVPTGAQEAVRDLCRARADMVTDRTRTRHRLSKFLLRHDRIWRDGKQWTVKHEQWLLGQRFDEAALRAAYTHYRAMLIARDAELAAVEADLAYWYTHGPFTDAVARLGAYRCIAQLAALTIASEVGDWRRFATARTFMGFTGLVPSEYSSGQSVHRGHITKAGNAHLRTQLIESAWAYQHRPTIGVQLRTRQHGLPPATIARSWAAQQRLCARFRRLDARKTSRNIVTVAVARELAGFLWAEMTTN

SEQ ID NO: 111088 - protein, 422 aa, unidentified
MVMEEITEEPGALIERAAALDIGKATLTACIRVPHEDKPGARRQEVRTYATLTPSLLELRDWLVCQGVTLVVMEATSAYWKPPFYLLEDDIECWVVNARDVKNVPGRPKTDKLDSVWLCKLAERGMLRASFIPSRPQRQLRDLTRYRRTLTHERTREKQRAEKLLEDAQIKLSSVISDIFGKSGRAMLDALIAGQRNPRALAALAYKNMRAKTSVLQEALTGHFTDHHAFMLGMMLARIDALTTQIDTLTARIGQAIAPFAAQVAQLDEIPGIGITAAQDLLAEIGTDMSRFPDAGHLVSWAKFAPRARQSAGRSKAASTGKGNPWLGGTLGEAAASAARTKTFLASRYRRLARRRGKQRALVGIGNSILTIIWHLLCDPAAHFTDLGPDWHDRLTPLRRKRQLITELERLSGKKVTLQDTV

SEQ ID NO: 111089 - protein, 342 aa, unidentified
MDEVSIIGLDLAKTVFQAHGAAADGAVVFRRKLTRPQVLRFFAAQPNCVVAMEAFASAHHWARAIGSLGHEVRLIAPLYVKPFVKRQKNDASDAEAIAEAASRPTMRFVAPKTEAQQAAAMAFRTRDLFVRQRTQTINALRGHLAEHGIVVPSGPAHVGRLAALVQGRDGALPSPVVELARMLLHHIGTLTEQIAIFEKDLRERTRHDATAARLMTIPGIGPICASAMTTFAPPAETFAKGRDFAAWIGLTPLQHSTGGRERLGRTSKMGQRDLRRLLIIGAVAVVRWAARRGAPRGSWLERMMARKPRMLVAVALANRMARIAWALMANGGVYRDPATAVA

SEQ ID NO: 111090 - protein, 373 aa, unidentified
MPRYSTAFGMDVHLRSTTVCALDAETGEAVTRRFRGNPWGEVAEWMSGFPGPSLAAYESGYLGFAPQRELSGLGVDCVVAAVSKVPRSAADFSSKNDRNDAARMAKAILSHDISPVWVPSPEIEGLRDLAGAHDAATARLAAAKQRLLAFLARRGYAYGGTTPAGNPRRYWTYGFLRWLDKVRPADDGGIRALAALRNEVEAADEAREALLAEYRAAVAAGPLSAEVEALQSIKGCGFVLAAAFASEVGDFSRFRSGRQVTAYFGLAPKQRSSADSVRLGGISGAGNALVRRLAVEGSWRYAQAGHQPKLMPKGSGVPLEIRMHGRKGSERLLRRREEMLERGMPQAKANAATAAELVRWLWALGAMCREATE

SEQ ID NO: 111091 - protein, 323 aa, unidentified
MEQKLPTTPEAMKETFSRIPRCRIALETGTHSPWVSRLLTPLGHEVIVAHAQRVQLITKSSWKDDRHDAQTLARLARVDPELLGPVRHRSVQAQIHLTVIRARAELVSARTALVNAARGLVKSYGERLPQCGTYQVSGKLAEGLSAELREVLVPLLREIESLNERIKEYDERMEKISKEVYPQVSFLKQVKGVGTQIALTYVLTIEDPYRFPKSREVGCFLGLRPGRRNSGKSAPQKHIRKEGDRYLRTMMVQGAHYILGPFGEDSDLPRWGLQLAERGGKNARKRAVVAVARKLAILLHRLWVSGEVYEPLRNSQKAMRAVA

SEQ ID NO: 111092 - protein, 341 aa, unidentified
MVKTPAITGGVDTHADVHVAAALDGIGGLLGVSEFPATPSGYAQLLGWLNSFGTVCLVGIEGTGSYGAGLARHITAAGIRVVEVDRSDRQDRRRKGKSDPLDAVSAARAAQSGRASGAPRGRDGAVEAIRALMVAKRTARAQRTQTINQARALILTGPDGIRARFTRHGPAELVAGLAALRPHPGSMVRYHTLLSLRELGRRAQFLDGQLERLDVLIIPLVTARAPGLLKLYGAGTGTAAMLLIAAGDHPGRLRSEAAWAHLCATAPIPASSGKVARHRLNRGGDRQANHALWRIVITRMSSHPATRAYVQRRTAEGLSKKEIIRCLKRYAAREIYPHLRG

SEQ ID NO: 111093 - protein, 365 aa, unidentified
MNNKTITGNGISQASLVNYVNRVLNLGLDVHYRQVTVAMQEDGGRIKSAGKMGHLDFLNWVQKKLQEGWQIYSCYEAGASGYWLHRDLVKLGVKNLVVVPKAMGQGGKKQKTDKRDAGELCDCLDRYLRGQDKALSVVAVPTEEQEEKRALIRYHRQIMADRGRCEARGKGLLCAQGIEVHGRWWHGKAWLEVQSDPRLKDWMKEQLIGWRNKLLSTEEEQGGLRERIAALAPAILPKGVGAYSAAVLEYEMRGFERFTNRRQVGSMTGLCPGIHQSDGRGKEGSINRCGIGIVRWTLVEMVWRLMIWQPQYPPVRRLAAGLVKGKRARKRLVVQAARRLAIDLWRLSTGQTTPEKLGLIMHSAK

SEQ ID NO: 111094 - protein, 409 aa, unidentified
MLFVGDDWAEDHHDVEIVDETGRTLARRRFPEGLEGITRLHALIAEHLPEPSGPADPAPQVVVGIETERGPWAAALVAAGYRVFAINPMSTARYRERHSTSGAKSDAGDAHILAEIVRLDRAHHRQVAGDSALAEAVKLAARTHQSLIWDRTRQVLRLRSALREFFPAALKAYSELDAADTLQLLRLAPDPDRAARLTKRQVLTALAKANRRNPEVVADGILTVLRAGELRQAPPVQAAFAAIVAAQVEVITTLNDQIDTLGEVVADHFGHHRDAELITSLPGLGVILAARVLGEFGDDPSRYVDAKARKAYAGTAPITRASGTKKVVMARYARNKRLGDALQQWAFCSMRGSVGAKAYYKTLRARNIGHQAALRQLANRWVGILHGCLKTGQPYNETLAWNHHASAAA

SEQ ID NO: 111095 - protein, 349 aa, unidentified
MKHQRRRDNITIGLDLGDRRHRFCVLGRTGEVVEEGSLVNERAHLSALIGRYRAALVVMEAGCHSPWISRYLEQLGCEVIVSNPRKVRAIYQHERKSDQRDALMLARIARMEPALLYPVEHGSEEAQQDLLRIKLRDNLVRARVAVINSIRSTIKSLGYNVPNPSSERFHRIINAALPPTLTEVISPSVQALEELSLRIKVLDREISALARTKYPATAWLEQIPGVGPITALYFILKIEDPTRFAKVRDVGAFIGLCPRRDQSGESDPQLRISKRGDAYLRRLLVSAAQYILGPFAPPSALRQYGLTLAAEGTSRAKKRAVVAVARKLSVLLLTLWKNQRSYMPFPQLA

SEQ ID NO: 111096 - protein, 405 aa, unidentified
MNVIYERCCGLDIHKKLIVACFRNGRKAELRKFDTLTESLKELCQWLLVNNCQMVAMESTGSYWKPIYNILELNGIEVMVVNAQYIKNVPGRKTDVKDAEWIAELLQHGLVKASYIPDKEQRELREIVRYRKNLVEERSREINRLEKTLEGANIKLSSFVSDITGKSSRKLLREAMYGQVTADNIDDLIHSSMLKKKDVLLKAMDGVMSATQKHLVKAILSHIDDMTRRIDDMSDFINQKMQDYTDEIKRLEEVPGIGKITAETILAEIGVDMNRFPTAMHLSSWAGLCPGNNQSAGKRKSGRTNHGNKNLKSMLIQAAKSAVKNKNSFFYAQYQRLVVRRGYNRATVAIAHSMIIAIYHMLKNNTVFKDLGVDYYTQFNKEQKARYYLSKLHELGVPLPVSTAV

SEQ ID NO: 111097 - protein, 415 aa, unidentified
MIDQRRWYAGVDWASESHHVFVTDGDGLKIGEKIFKHSGEGLAEMAAWLMVASGAGDPSQIHIAIEVPHGPVVETLIERKFNVHAINPKQMDRFRDRFTLAGAKDDSRDAEVMASALRTDPRCFRSLAAADPVIVELREWSRIAENLGAERNRLTNRMREQLWRYFPAILELDSDLSAEWLLALWEAAPTPAKAVRIREATFAKLLKRHRIRRFNAAYVRDVLRQTPVTVAAGTTEAACAHIATLIARIRLLNRQITQAHDRLDALIAQLTSAAQVELEGKQHDAEILASLPGIGRIILATLFAEAFDALQRRDYTALRSLTGVAPVTKKSGKSRIVIRRHACHRRLSNAMYHWARIAVQHDRISRAKYAALRQRGHSHGRALRTVADRLLNVACSMLKTGTTFDPSLAGEKKTC

SEQ ID NO: 111098 - protein, 330 aa, unidentified
MNGTKVKVSKATNHNSGCFVGIDVSKDKLDIYIRPTGGSWTQDNCDFDELCDKLEAMDPQLIVLEPTGGYELGILNALIRRGLRVSREHAYKIHHHGKASGQLAKTDRLDASVIAHYAECYGGEIEPMMEPLGDQELLHQLTTRRRQLVVMRGSEKTRLGQPWLSEGIRGSCERVMSVLGEEIEEIEMQIREAIKEKDEWREKGEILESAPGVGVKTASLLLARLSELGQLNRKKIAALVGIAPYQNQSGKFRGQQRIKGGRSEVRAALYMSVLSAKKHDPVMRAYYEGLIERGKKKKVAITACIHKLLRILNAMMSKRERYQLCTGKTN

SEQ ID NO: 111099 - protein, 448 aa, unidentified
MTQRNRSSTRAAPLALTHPNAAGIDIGSASHFVAVPPDRDDEPVREFRSFTADLERLADWLGECGIDTVAMESTGVYWIALFELLDARGFEVLLVNARHVKNVSGRKSDVLDCQWLQQLMSYGLLRGAFRPGDAVCALRALVRQRAAILRTQSRTVQHMQKALVQMNIQRATVIADVAGASGQAILRAIVAGERDGHALAALADVRVKAGADEIAASLQGHWRGEHLFALKQALAAFDFCGTQLAECDAEIEAQLAALQATEAEPAKGKKRSKARNAPKFDLRSRLFKMCEVDLTRIDGIDVSTALVVVSEVGADMSKFPSDKHFASWLGLCPGTKITGGKVMSGKTARVANRASQALKLAAAALRTSQSALGAYYRRLCARMDKPKAVTAAAHKLARLIYAMLTKGEEYTDRGQAYYEERYRQRVVANLNRRAQQLGLQVVPVAAPA

SEQ ID NO: 111100 - protein, 356 aa, unidentified
MTITKYIGMDVHKESISIAVMNAAGKFVMECVIETKASMLLQFIDGLRGDVHVTFEEGTWAAWLYDLLKPHVSEVLVCNPRKNALLKDGSKSDQIDARKLAELLRGNHLKPVYHGEQGLRTLKELARSYLIISKDVTRVMNRLKALYRSWGIACAGTQVYAPRHRSEWLGKISEAGVRRRAEHCYQQLDVLRLLRQQVRRDLLLESRKHPAWRLLGLIPGIGPIRAALLIALIQTPHRFRTKRQLWTYCGLGLETHDSAQYRVVEGQLQRSKKSVTLRGLNQDHNRDLKDIFKGAATKVSSSNSGPFHDFYEHLLAQGRKPTMARLTLARKIAAITLIVWKKEVRFDASYLKSQAA

SEQ ID NO: 111101 - protein, 374 aa, unidentified
MDHDTTFVGLDAHKNSIVACALFPGSDEPRRWELLNRPRPVQRMVRRLMEETNGKVSFCYEAGPSGYALQRQIRKQGAACNIVAPSLIPRKPGERVKTDRRDAFKLAEYDKGGLLTYVHPPDPGQEAVRDLCRCREVTMQDAQRCRHRITKLLLRRGLHFEDGKRPWTQKHRQWLHSVSFDQEEDQLMFCSYLLALEQTEERQWGLEQHLERIASSEPYQEVVAWLCCLRGIATLSALTLAVELHDFWRFPSPAQLASFVGLVPGEYSSGSKRRQGAITKNGNAHVRRVLVEAAQHYRHVPGMSRGMRERRAGQPPWVVALADRAQSRLHRRYVRLQAAGKPHNIAVVAVARELIGFVWQIMYTHAAIIPDQES

SEQ ID NO: 111102 - protein, 429 aa, unidentified
MRAESTPGARGPVFCGVDTHADSHWLCVLDWRGRKVLSRRFPADAAGYEALAGAIAAAGEPACVAMEGTSSYGAGLTRHLASLGVPVREALSPARTQRRRPGQGKCDEADAERAARAAMSGSRLGTPKSQDGWVDGVRCMLAARSGAVKARTSAINTARSLLTTAPEGLRSRFRGMGGPRLMEELPSVRSEGALGAALGALADLWAAARDAALDMERAIEASLEENCPALLAMYGCGPVSAAKLAVAAGGNPGRLRSEASFAAICGACPIPASSGKTVRHRLNRGGDRQANSALHEIARQRVMRDPETAEYAERARARGKSDREVMRCLKRYVAREAYRALMRPHEIRRPEDASELVAARRAAKVSQVRAASILGTSEKYISMLERGQRELKPIRRAYEAWVEAGLPLDWDRQAFEAERKMDSKKHLAK

SEQ ID NO: 111103 - protein, 353 aa, unidentified
MEYIAFDAHKHYTLASVALPDGQLVREQRIAHERGALQQFLERCERGSPVAVETVGNWYWIVDEIEAAGCVPRLVHARKAKLMMGEINKTDKLDVRRLNQLQRTGTLPTVWIPPGELRDQRDLPRTRMVLVRQRTQLKNRIHSTLAKYALHDIEVSDLFGARGRALVRQRLELLPPCTAYTTRHLLEQVERLDHQVREFEQHIRTLFKPTPMIQHLLTLPGVGLTLAVVIALEVGDVARFPTAEKLAAYAGTTPRAHASGGKTRFGPSRPDVNRYLKWAFVEAANAICLNRGRTPRRHVTRLYERVAQRKGHQTAIGAVARHLAEATYWVLAKQQPYREPKTAAVSSTGDKRG

SEQ ID NO: 111104 - protein, 345 aa, unidentified
MLYVGVDAHKATSQVTVMDSGGNILRQKRIVSSAIAVRQALAGYDEPLKAVLEASYCWAPMYDWLGKVADEVVLAHPLKVRAIAEARIKTDKIDSETLAHLLRADLIPRAHASSQDVRARRRVLRQRMFLIRLQTMVKNRIRALLVQHLSEQPKVSDLFGKGGRDWLRRVELPDPDGRLLNEDLGLLEFLQQEISKTDRLIAELAQGDEAVQFLASIPGIGVFLSVLIRWEVDIMERFRQAKKFASSTGLVPSTYASGNRIVHGRLTKQGNKWLRWAFVEAVSPAVRSSAYLHSYYQRIKLRRGVKDARIATARKIAELAWTVWTERRRYQERLPRSLRTATEER

SEQ ID NO: 111105 - protein, 342 aa, unidentified
MMIIGCDFHPGFQQIAYVELETGEYGERRLNHPTEAEQFYRSLAGKQVGIGVEATGGLRWFRKLMHELGHELLLGDASAIRASSPRKQKTDMRDARLILRLLVENRFPAIWQPPMENEDLRQLLLHRCRMVRMQTRIKNQLDMMAKNEGLVSSRSWSKKRRQQIEALPLSGWHVQRRKDLFELMEELDKRIEPLDKAVLEASKQSPEAVLLMTHPGVGPVVSLAYVLILGDWRRFPRGKQVGSYLGLIPAEASSGKRQQRLGHISKQGNTLLRWLLVQAATKAQRHDPSWHRQYLRLSIQKHHGVAKVAIAHKLAVRLYWMLRSGQDYKQVKERGSHAGQSV

SEQ ID NO: 111106 - protein, 339 aa, unidentified
MYYTGIDLHKKTSFITTIDERGQVVKRANLKNVTNEILNYFDDLVDDTRVVIESMSSWYWLYDLLTEKGLKVTISNPVKTKAIASAKIKNDKVDSHMLAQLLRADLIPESHVSSMDTRKLKELLRHRSRLVRDTGRMKNRIHALLMKNNLQQPCSDLFGKKGLSFLYEDIDLPDYHCEQLKTYLSLYESIKTEVDHLTKRIYSMAKIDPVANLLTTIPGIGPLVAMIIVAEVEDIKRFPSYQNLSSYAGLVPSLDSSGSKEKTGRITKQGSPYLRTALVESAQVIARLKSCRLNIFFRKRIIRSGYAKAVTATAHKILQIVYYVWKNQTPYLEEYNGCG

SEQ ID NO: 111107 - protein, 356 aa, unidentified
MNKISKLDFEGQQIYLGMDVHKKSWSISVLTDEFEHKTFTQPPEVSTLVNYLKRNFPGASYKSVYEAGYCGFWIHDCLQEHGVQCLVVNPADVPTKDKERRKKTDRVDCRKLAKSLRSGEIEGIYVPCRPKVEDRTLIRTRHSMVMKQTRCKNQIKSILQFYGIQIPEELADSHWSKRFITWIEAIRMERASGNFALKAYVEELNNMRKIIAELTRGIRSLANAEEYRQNVCLLKSVPGISILTAMTILTELYEISRFKNLDKLCSYVGLIPDTHSSGETDRDMGITKRRNAQLRGILIESAWVAVRKDPALLMTFNTLCKKMPKNNAIVRIARKLLSRIRYVLKNQQKYASAIVQ

SEQ ID NO: 111108 - protein, 410 aa, unidentified
MAERFVGIDVALREHRIAVLDRDGEAVGQSFTIAASQDGVATLLRTLAARAATAAQTLIGLEASGHLWENLEAALVGAGYRVIVLNPLQTRRYRDVVRRKAKTDDIDAHVIAGLLRSGAAQASYVPDEPIQSLRELARLRARLMADRQDYLRRLVAQLDVVLPEHHAVLGDLLTARARGILAQFPTAQHLAHATPRAIRRAAADAGARGFSLDDATGVRDRARRSLYSGKAAAARAHVVRTLVSQLERLTSAIDEVDCAATTLLPPSEPGTGPSDAELLQTIPGIGPQTAATLLGELGTLTRFTDARALVAYVGFYPVINQSGDRAATPRLSRVGSRLARHSLYLAAVNAVRRSGEWRTIYLRKKSQGKTGKQALVVVAVKLLHAVYAMLKHRQPYNPSRLLVASATIGT

SEQ ID NO: 111109 - protein, 470 aa, unidentified
MQDNNRKENAAQKRQIEGLPVVRRNVAGIDLGSERHWACAPSVDGTARERADFGATTPELIRLAEWLQARGVESVAMESTGVYWIAPHEVLEGRGLQVLLVDTRQLARVPGRDKKTDASDCEWIQRLHSCGLLRGSFRPAEQVCMLRTLARDKANLVAESGDWVRRMQKSLDQMNVRVHRAVSDIDGVTGMAILRAIADGERDARKLAQLRDPRCRKSEQEIAEQLSGHWREDHLFALRQALKMYDAIQQRIAEYDQEILRRLAAMQREDFRDQPPPKVKNKQKAQAIKKRGEEPMREALFRMSGVDLTAIDALGVQTVQVVLSEYGPDLSRFPTEKEFVSHVTLAPRRAMSGGKPVKKKKRNTASTRVASALRMAALSLRNSSTALGAYYRRIARRIGADVAVFATARKLATLIYRLLRWGQPYVDEGAEAFEKRYQEIRMTALKAKAKELGYELLPSLQAPVEGEVTG

SEQ ID NO: 111110 - protein, 418 aa, unidentified
MTAIYSTASTLLAAIDISKHRHEVLIGIPGKKRRRRLTITNTLEDFRRLVATLSAYELPVWIGFEATGNYHRPLAHHLGQAGFDLKLVSSVGLARTREALHNSWDKNDPKDAQVILHMLEIGAVQFFHDPLVTGIADIQELSKTHEIVSRSKTELWHRILTHYLPLYFPEAERFHRSSRTDWFLAFLEKYPTPHMITAMSRDVFIADAWQVVGRKVSKELLLSDIYATAVGSVGLPVHPDSDAVRMFRLVLAEGRSLIRQRNEIEARAVELLSDLPDYQLLTTIPGIGPVNAMTILAEAGDLRRFRHHRQFLKFCGMDLATVQSGMFRGQSKISKYGNARLRRTFWMAGQVAVLKRTNSFRDKFERYIARDRHNAHLRRKAYTAIAAKMARTVHAVVKHGEPYRPFFEGVRPSGRTLL

SEQ ID NO: 111111 - protein, 353 aa, unidentified
MRTYYVGMDVHRATIAIVVLNGAGKVVEQLVVETSATRVRCYLKQLQGRVYVTFEEGTQAQWLYDVVQPLVTEVIVCNPRHNKLLKAGNKSDRIDAHKLAELLRNGSLKAVDHRDHGVRALKELVRNYDCLVSDTTRVMNRLKAMFRQQAIACGGHEVYRQDRREVWLAKLTERGAKARASSLYRQLAALKALRHEAKLAMVREARRGAAYLWLMSVPRLGAVSVAQLLAVVGTPHRFRTKRQFWSYVGLAVVTSSTADMEVVDGVLRRSRRPVATRGLNRNHNHLLKRVFKNAATSACQSAPFKQHYERRLQQGMDPALARLTVARQLSAITLSLWKRGEKFQAERMKRQAA

SEQ ID NO: 111112 - protein, 312 aa, unidentified
MMTDNSIGIDISKDFLDAHRLSDGAAERFHNSPAGFRTLSTWLGDGMPTRVVFEATGAYHRSFERAFSGKIPLVKVNPLQARRFAQACGTRVKTDEVDARMLASFGSALALEPDQPIDGKQFELKELFSSRAALIKDRTRLINRLQTQTLALVKKQTKARIDQIKSQLKTFQQDINTRLQDCPGRARTNTILRSIPGIGEVAAATILIEMPEIGTLQKKKAASLTGLAPMTRQSGKWRGKSTIQGGRKQLRDALYMPALVAARHNPDMCHKYQAMIKQGKPQKVALTAIMRKLIELANTLVKADREWVQNGA

SEQ ID NO: 111113 - protein, 387 aa, unidentified
MQKPHDDSKMCPAAFQQDSTLVVVVEMSLSSWLVAGLIPGVNREPLKKIDPDPERLLRLLYRWRDEAVAAGSKINRIAVAYETGRDGFWLARWLRNRGIDAHVIHATSVAISREHRRAKTDRIDTAMLRRGFLGWLRGEPGHCSMAVVPSVAEEDAKRPHRERDTLIHERTSIVNRMKSILIQFGVRNFNPVLRKANEKLDAVRTPEGIPLPANAVAALRRLMDRLRVIKEQVKAIEQTRLQRMQRNPADRMNAMVFLLVRIIGMGVETAEQLVREMLFRNFHDRKAVARYAGLTGSPDESGSKRREKGLSRSGNGRVRNILIQLSWRMLQFQPDSGLVIWYKKRTESARGSRKPMIVALARKLIISLWRYVNTGVVPEGFELRSAA

SEQ ID NO: 111114 - protein, 407 aa, unidentified
MRTGGDRHCKARNAALIEYPDGKRQRFQFRHVHEDYDRLVRLLQSTGSSCWVAFEPTGVYHRTLAYRLLQEGFHVCQVSSVAGARYRDAMFNSWDKSDPKDGQVILELLKQGVTQQYHDPLVNGTHDLEEISKTYELISRARTKLRHGIITHYLPLHFPEIERFWYSSRNDWFVRFLLQFPTSAAVGALGREEFVAAAWEVVGRKVDKRRQLEEIHELAQKSIALPLAAESIAVETFRLQLSRYDALNQQRNALEARAHALLKDRHDYQRLCEIPGIGPIIALVILAEAGDLRRFAHHKQSLKYCGLDLAKAQSGVSRGHERLSKRGNARLRCALWQASISAIRMRENAFRDKYTRYIAADPENRDWRRKACTAVTAKLARVAYSLVKFDKPYRGRFEVGLPSGSIS

SEQ ID NO: 111115 - protein, 344 aa, unidentified
MSEITTVGLDLAKRVVSLCGEDASGRVVVQRTLRRETVLTWFVQRAPCLVGMEACASAHWFARELTALGHTARIIAPEFVRPFRLSGKNDANDAAAICAAVRQPQLRFVTVKSAEQQARLVVHRLRQGWQEERTAGLNRLRGLLGEFGRVYANSAAAILTGARAALPDETLPAALRRGLARQLAHLRELDVHLADCDREIAQHAHEDPRAQRLVRLSGVGVLTASAVAATVIDPWQFRCGRQFAAWIGITPRQYSTGGKPRLGRITRRGDTYLRGLLVQGARSALQAALRVAPPRRSRIAAWIFATYQRIGYHKTLVAIANKHARLLWVLLTRDEPLYAHAAAN

SEQ ID NO: 111116 - protein, 398 aa, unidentified
MLSIGIDVSKGKSTVCGMKPGGEIVYTPFEIQHTREGMSELVSLLRGSGEEVRAVLESTGSYHCPVVAALLENGIFVSVVNSLRMKRFCSQSIRKVKTDRIDAMQIALYGLAYWQELQPTRLPEDTYRELQLLARQYYQMTSMLIKAKVDFNAICDQVLPGMQELMSDHAGRHKLSDFVLRYRHTTHILEMGETRFRKDYCKWAEKKGYRNCERMAALIFATAQNGIPVLPNAPSTQIVITEAIRVLHTVEASRDAILTQMQALAKTLPEYSLVREMPCIGDTLAPRLIAEIGDVRRFHSKRALIAYAGIDAPPYQSGKFSANNRHISKRGNRYLRKTGYEVMQSYVMHKPANDPIFTFIEKKRSEGKSGKLAMVAGLNKFLRVYYGKVTELYRSLPQ

SEQ ID NO: 111117 - protein, 338 aa, unidentified
MKTYAGIDLHSNNNYIGVIDAKDKRLYSKRHDNRIEDVLRVLGKFKASLQGVVIESTYNWYWLVDGLMDQGYRVHLANPNAIKTYDGLKHTDDKWDSFWLAHMLRLGILAEGYIYPKHQRSVRDLLRRRLMFVRQRTSQILSLQSMITRNRGLNFSGAQIKRFRDEFIEKLFSDRHLVFTAKRNIETIRFLDRIVSEIEIEVKSQIKLKKEFACLLTTPGIGNILGLTIMLEVGDIHRFAKVGNYSSYCRCVESKRTSNGKKKGENNKKNGNRYLAWAYVEAANHAMRNCAKAQKFFQRKMAKSKRVLATKALANKLTKATYYIMRDQIAFDSQKLFG

SEQ ID NO: 111118 - protein, 358 aa, unidentified
MPTLAQLVDGVIGVDSHRDTLAAAALNPVGGLLGQTAARADTAGYRELLGFARSHVPGRRCWAIEGAGSYGAGLAAFLGANGERLVEAARPKRPPRRSRAKTDAIDAVRAARDALGQEPHELAAPRQRGDRQALRVLLTTRRTAMAARTAAVNQLKALLVGAPEELRAELRSLPTRRQIAVCAALRDRPTRSLEHQMTVRVLRSTARRIQALQAEAEELHGQLQRLTAAIAPWLLELFGVGPVSAAQLLVSWSHAGRFRSEAAFAALAGASPIPASSGKVTRHRLNRGGDRQLNQALHTIALVRLRDDLETHAYATRRTTEGKSPRDVKRCLKRIIARQLFRLLERYDQPGVEVLMAA

SEQ ID NO: 111119 - protein, 419 aa, unidentified
MLTARWFVGIDWATEAHEVCVLDPEGQVCDRRSVPHSATALQAFVAALLERAHGDASTVAIGIEVPRGALVDVCVERGFGVYAINPKQLDRFRDRFTAAGAKDDRRDAHVIGDSLRTDPQAFRRVRLDHPLVIQLREWSRVDEDLAGDLTRMTNQLRDLVYRIAPGLLTLCPAADERWLWTLLRDAPTPADQRRLSLRRLERLLRDHRVRRLEAAQVREVLQKPSVYTAPGVVDAVAAHIQLLLPRVDLLAGQRRDAEKQLERLLDALDAQEPAAGDQREHSDVAIVRSMPGIGTRVAARMLAEASQPLVERAYHVLRATMGVAPITKQSGRRRTVSMRYACNARLREAGYHWARTGAQKDPASRAYYAQLRARGHSHGRALRSVADRLLRVLMTLLNHGQLFDLTHGQHAPATIGAGA

SEQ ID NO: 111120 - protein, 339 aa, unidentified
MTELKLIAMDTSKHVFSLHGVNERGEVVLRRELRRQQLDAFFRKLPPTEIVLEACGSSHHWGRTLAALGHRVRLIAPQYVKPFVKRGKNDRIDAEAISEAALRPNMRFVPVKSVEAQADAMILSVRELLVKQHTQLVNALRGHASEFGVIAAKGTGHVEGLLERIAADPAVPAPAQAMFVELGERIDELRTRLAELDRRLAALHKANPLSRQLAEVPGIGPIGALTLALTVDASQFHSGRHFAAWLGLTPRQNSTGGKTRLGGISRQGNERLRQLLVLGATSVVRLTKPDYRHANAWLLALLQRRPRKLAAVALANKMARVVWAMMTSGEAYRPQPAAG

SEQ ID NO: 111121 - protein, 452 aa, unidentified
MSSKYQYFNGLKFTRDDKTGYYLNSTIEKRMHRYVWEFYNGPIPKGYDIHHKDEDKANNDISNLEMIKAGKHQSMHSQKWHDEHPGEGRKNFAKAVVGMEPTGHYWKAFANWLEKQEGITVVLVNPYATKQAKELDDNSQTKSDKKDALTIAKLVKDGRYFELYLPHDVYAQLRGLSTTRTGLNKRKNAIKNTITAVMDEYFPEYEEVFKCPLSGKASRHILKTCPFPKLILGLGEDGVTDEIKRAVKKTVGRKKAVQLVEAAKDSIGVDYGEEAARLKLRLMLEELELLEKQTEELERQMEDTLRQTDYADFLLSIKGIGIVTLATCLGELGDPTRFDDPRQMSRMAGYNLVEDSSGKNKSGTKISKRGRKNLRGVLYQMALTMVATNDEMKQLYHYLKTREKAPLRKMQALIVVSKKILTLIHTLAKKKESYDPEKVFGHVRREQLKAAA

SEQ ID NO: 111122 - protein, 486 aa, unidentified
MAGRKKSTFERLTRGRLNRKQRRELERRLTAEDPGLEIVHRNVAGVDVGNESHFVAVPPGRDPQPVQEYGSWTADLERMARWLKSCGIETVVMQSTGVYWVPLYDLLEARGFKICLANARHTKNLPGRKSDVQESQWLMKLHTYGLLRGSFHPPDEIRALRSLWRLRDRHVKEAARTVQHMQKALITMNVQLSNAISDITGVTGQAIVRAIVKGERDPWKLAKFRDWRVKASEEEIARSLEGNWRDDMLFELGQALDAYDFIQKQIAQCDQRLKTLLEALPVRPAPIGETEADTGAGGAGEVKPPKKPRQQKQKNTPAFDLQKELTRICGVDLTRIDGIDVMTVQTFVAEVGVDISRWPTENHFASWLTLTPNRDISGGKVVKQEPRKSKNRVAAMLRTAATSLLRSDSYLGAKYRSLRTRLGAPKAIKAMARHLACLIYRMLKYGQAYVDQGTQYFQQKRAQRELSSLRRKAAVLGYQLVQPASA

SEQ ID NO: 111123 - protein, 448 aa, unidentified
MPLDCCQESTRVCVLAEVPPDRRCEAMVASRAERGRDAMEVLFDRVAGLDVGKETLTVCVRTPGPRGGRRSQTRTFKTTTGSLRVMRDWLVEAGVSIAAMESTSTYWKPPFYCLEEVMEVWLLNAAHMKAVPGRKSDVRDAEWIAQLLEHGLLAPSFVPPPQIRRLRMLTRYRMQLMGDRRREIVRLELMLEDASIKLSSVASSLKTVSARAILTAMINGETDPLRLADMAKGRMRRKIPDLAQALTGTFDAHHAQLARSMLRRLELVESALAELDAVIAAACQPWQHQIDLLQTIPGVGPKVAQVIVAETGADMTRFPSAAHLAAWAGLAPAMHESAGKQTPAGKRHGNKWLTAMLVEAAGSVGRMHGKNYLAAQHARLLKRRGMGRTQVAVAHSMLVSAYWMLKRDEPYHDLGADWHRRRNDEAHTRRLVAQLEHLGHTVTINPAA

SEQ ID NO: 111124 - protein, 322 aa, unidentified
MEITTIGLDLAKSIFQVHGVDAAGKVVVRKALRRSQVLPFFTRTPRCLVGIEACGTSHHWARELIALGHEVRLMPPAYVKPYVKRGKTDAADAEAICEAVTRPTMRFVSVKSRDQQAALSMHRTRNLLVKQRTQVVNMMRGLLAEFGIDIPKGLERALMMAREIVDGAAPDVPPEAVKIIGTLSQQALDVHVRLREIDRDLLVWQRSSDVARRLMAIPGVGPVGATAFAATVGDASQFRSGRQFAAWLGLTPLQMSSGGKERLGRITKMGDKYLRKLLIVGMTSLVRRAKYKPNTVDPRLADLPRASRFGLQPLPWQTRRRA

SEQ ID NO: 111125 - protein, 334 aa, unidentified
MDKVTTVGIDLAKSTFSIHGVDANGKEAVRKTVSRAKLVAFIAQLPPCLIGLEACSGAHEWARRFQALGHEVRIMAPRFVAAYRRSGKNDGNDAEAICEAVQRPSMRFVPIKSVEQQAILTMHRVRQGFIEERTAAINRIRGLLAEFGVVLPARAIEVKRRARAAAEDLPLMARSSIEDLISHLAVLDERIASQDRQLEALARSDETVKRLMTVPGVGPLGALATVATVGHAHEFKDGRQFAAWLGLVPRQWSTGGKPRLGHITKRGDAYLRTLLIMGARAVLQMAAHRNDKLSRWAVALKERRGYHRAVVALAAKNARILWALLTRGSEFKAA

SEQ ID NO: 111126 - protein, 394 aa, unidentified
MRLWVGFDVGKAFHWVCVLDDEGEVLLSRRVEATERDIERCCEQIAALGGPGERRAATDLLGGPAALLEAVLLGRGERLFHLPGMAVNRARDGYRGESKSDARDARVIADQLRMRWRSLQEVRPREDEAAELRALVAYRRGLVEDQARVITRLRALLLEVFPGLEATLDLSTDRALLATTRVATPSAARRLGTSRLARWLKDRGVRRSEELAGKVIVAAKEQRRELPAAQAKAALVSEMAAEVLRARGRVAAVDARLEELMAARPEAEVVRSMPGMGPLFTAEFLSEVGDPSRFASADALAAAAGLVPATRQSGGASFQRRARRGNRTLKNLLYRSAFSCTVHHAPSRAYYLRKRAEGKPYHRAVIALARRRVNVLWAMLRDGKLYQEPILDAA

SEQ ID NO: 111127 - protein, 482 aa, unidentified
MAKRKKSTFERLQSSSPNRQQRKKLQRQFDADSAELIVVHPNAAGVDVGNPSHFVSVPPERDQTPVREFGSWTADLRRMAEWLKACGITTVVMQSTGVYWIALYDQLEQAGFEVYLVNARGTKNLPGRKSDVQECQWLRKLHTYGLLRKSFRPTEQIREVRTLWRLRGRVLEDSSRAVQHIQKALTTMNVQLANAISDVSGVTGMAIVRAIVQGQRDPHELAKLRDPRIQASEEEIAHSLEGNWQRDVLFELQQVVDAYDFHRQQLAIIDTELQKYMTALPTREPVGEVSAGISKLSAKLRKKLKANRKSKDNRPAFDLGAELTRLMGVDLRLIDGIDVMTIQTIYSEVGADLSNWPTEGSFASWLELAPRNNITGGKVIKKEKRPSNNRVTTALRNAAESLVRSDSYLGARYRHFTGRLVGLKGVKAMARYLACLVYRLLTKGPAWVDRGAAYYENKRRDRELVGLHRKAEAAGMKLVPIT

SEQ ID NO: 111128 - protein, 422 aa, unidentified
MLGVGIDWAEAFHLVALGRPAEGVIEIRRVEHTPAAVDQLIAQIATLEPDPAEVRVVIETRHGLLVERLVDAGYVVLPVNPDLVARRRGPARKKDDAEDARIACLLALDRHLTLRPLIPHGEAAAELRAIARDDERAARDQRRLLNRLRQDLLSTFPAALAIAGDDLGAPTMLRLLERWPTGDQLASASHQELVAFARAGRHGWPDRFADRIAQALAADHFTPRAWLVRAKADTIRLAATQLQAIGTQRRVWEQRMAELLLGAPRHGRAHQPREDNQGQAFPGGKVYRSFPGLGDRLAARVAGEIGDHIDQYQSPNALACYAGKAPVTRRSGKSELVVATRLACNRHLANAVQQWAFCSLNRSGWARELYDAQRARGKTHHAALRALGNRWLEILWHCLMRGQLYHEATHVANRNRALGKAA

SEQ ID NO: 111129 - protein, 366 aa, unidentified
MKKPSTKMVRRMGTQQDQQLTIGLDLGDRSSFYCVLNGAGEVILEAKVATNPEAMKKTFAKMAPSRIALETGTHSPWVSRLLSELGHEAIVAHARNVRLIGESRRKDDRLDAQALARLARIDPRLLSPIQHRSAQAQADLSVIRGRYALVRARTALVCSARGLTKSFGERIRGRNPKAFRPEMGETLSPQLQAALAPMLSTLEAITAQIRKYDAQIEKLAEESYPDVALLKQVKGVGTLIALTYILTLEDPRRFRKSRDAGCYVGLQPGRRNSGESERQLHITREGDSYLRMVLVQGAQHILGPFGEDSDLRRWGLKLAQHGGKSGKKRAIVAVARKLAVLLHHLWISCEAYEPLHNTQKRRLAAA

SEQ ID NO: 111130 - protein, 345 aa, unidentified
MDHYVGIDVSLERSSVCVVDATGRIVREAKAASEPEALAAFLAGLGVAVSRVGLEAGPLSQWLHDGLAAAGHEVVLLETRHVKAALSAMTVKTDRKDARGIAQLLRMGWYRPVHRKSAPAQEVRALLAGRKLLQGKLLDIEGAIRGMLRGFGLKVGATTKLRYAARVRELVAGHPVLERVAEPMLRARDALRTEFAVLHRQLLAMVREDATCRRLMTAPGVGAVVASTFTSAVDDPGRFAKSKSVGAHFGLTPRRYQSGETDATGGISRVGDAMARTALYEAAQSLLTRTARFSALKRWAMEVAKRRGMRRAVVALARKLATVLHRMWVDGTEFRWGKDPAAAAA

SEQ ID NO: 111131 - protein, 339 aa, unidentified
MKRYLGVDLHRNCFTVCTLGEDGKSELKKWSIHSLGDFAQGVQATDAVAVEATGNARHFCQALKERGCRLVVVNPHQFQVISRSVKKTDAHDAKTLAEFLAKDMLPEVRLKEDLPAEMASLLQTRDKLVKLRTVLKNKINNLLSARGILLPKESLSTEKGLEQVLQAEVGALPRVELLVLVEQIRHLNQGIAKLEAAIKKQGPKLPGYENLKSIKGVGDIGGSTLLSAIGDINDFANEGKLAAYFGIVPRVANSNETERSGRITKRGNKLGRTALVQCALIAMRYSPYLANYYVRLKAARGTGKAIIALARKFLGIIYKTLKNGWVFEDFPGFVIAASG

SEQ ID NO: 111132 - protein, 349 aa, unidentified
MTEQRRSYAGECVYVGVDVHKETYTVTCVCHKQIVKTATVQAEPASLAASLRRWFPEATLASAYEAGFSAFVLHRALTKAGISNIVVNPASLAVAANDKVKTDRRDSKRLAVDLADGRLRGISVPTEEEELARLLPRTRAQLVEHRATLARQIKAKLHQFGLIAPSSRRMLSHRYVREIESWTLPPELRASLKLLAEQWRFVTRQLLEMRRLLREQATAQAAIDKVYRSVPGIGEVVARTLATALGDMTRFANERALFSYTGLTPSAYSSGASVRRGHMSRQGSSRVRHLLVETAWRALPYDAVLQTMCERIAATRGKKRAIVAIARRLIGRMRACFRQGTMYAVGTLA

SEQ ID NO: 111133 - protein, 355 aa, unidentified
MGSAKYVGLDVHKDTISIAVMNSAGKLIMESIIETKAITILQFFQGLHGDVYVTLEEGTWAAWLYDLLKPHVTQVVVCNPRKNALLLKQGSKSDQIDARKLAELLRLGALSAVYHGEHGLRMLKELSRSYLTISKDLGRVMNRLKALYRSWAIPCAGAQVYAPRHRAEWRAKITEAGVRRRAELYYEQLDALRSLHKQAKKELLSEGRKHSATKLLRQIPGIGPLRATQLVALMQTPHRFRTKRQLWNYSGLGLETHDSAQYCMVEGQLQRSKKPQQLRGLNDNHNHDLKNIFKGAAMRASTAAGPMRDFYEALLAKGRRPTMARLTLARKIAAITLIVWKKGASFDAKHLKQAA

SEQ ID NO: 111134 - protein, 353 aa, unidentified
MQIKSQIKSQIKSIGIDLGKTTFHLVALSTHSRVVVHKKFSRQQLLTYTANLPACLIGMEAGVGSHFLGRALRAQGHQVRLIPAQFVRPFVKSNKNDYRDAEAIAEAVERENMRFVPIKTEDQLDVQALYRVRERLVSRRTSVINQIRSFLLERGISFRKGPASLRRQMPEILENAEEKLSTRMRRLLDFLWQEWKHLQLQIESLNEDVEQIASQDEVCARLQQIPGVGPLVATAVVSAIGNGAAFHKGREFAAWLGLVPRQWSTGGKAKLLGISKRGNPYLRKMFIHGARAAVLRVKRQGSCLGQWMSGLETRAARNVVIVATANKLARISWAVLSSGEDYHPMHRAVSSAS

SEQ ID NO: 111135 - protein, 373 aa, unidentified
MPKYSTAFGMDVHLRSTTVCALDADTGEAVTRRFRGNPWGEVAEWMSGFPGPSLAAYESGYLGFAPQRELSGLGVDCVVAAVSRVPRSAADFSSKNDRNDAARMAKAILAHDISPAWVPSPEVEGIRDLAGAYDGATARLATAKQRLLAFLAKRGFVYGGTTPAGNPRKYWTYDFLRWLDKVRPEDDGGVRTLAALRNEVEAAAEARADLLSEYRAAVDASPIAAEVAALQSIKGCAFALAAAFSAEVGDFTRFRSGRQVTAYFGLAPSQRSSGDSVRLGGISGAGNALVRKLAVEGSWCYAAARHQPKLMPRDTGVPLEIRMHGRKGSERLLRRREEMLARGMPAAKANAATAAELVRWLWALGMMCREGAE

SEQ ID NO: 111136 - protein, 336 aa, unidentified
MYSGIDLHSNNSVIAIIDDGDRVVAQKRLPNDVTMIVGFLVRWQEQLAGVVVESTYNWYWLVDGLQDAGFHVHLANTAAIKQYEGLKHSGDETDAQHLAHLLRLGILPTGTILPREHRVVRDLARKRMQLVQSCTTHVLAVENIMARQLGGRMTSNQIKRLTDDTINSLPLEGDVGLAIKANVAVIATLQSQIEVLEKRLQERVKPRPQYGLLTSVPGIGQTLATVIFLETGPIDRFAQVGNFASYARCVDSVHTSNRKKKGEGNVKNGNKYLAWAFVEAANFARRFCPEAKRFYERKKAKTNNVVATKALAHKLARASYHILKEGKPFDVTRCFA

SEQ ID NO: 111137 - protein, 312 aa, unidentified
MENHKATAGRPEPGECGAGKATSLFLALYKWLGQSTMPDIHACLEATGDYGTSLATFLYENKIKVSVVNPARIKGFGASELSRTKTDKADSKLIARFCKAAVPDGWKPTPAPVRKLQALVRRISALNGMLRMECNRRENADANIQASLDRIISLLKTEIEVVRQEIKDHVRSDDELKKQDALIQSVPGIGAVSSNLILSFMSGKGFRKAKEVTAYLGLNPRHHQSGSSVRGKTRMSKMGDARLRSALYMPALVALRYNPDIKAFGQRLLLAGKPRMLVVGAVMRKLIHIVFGVLKSGTAFSSRIAVHSVVTS

SEQ ID NO: 111138 - protein, 340 aa, unidentified
MTIATIGIDLAKNVFAVHGVDHNGKTVLVKSRVTRATLPGLIAGLPPCVIGMEACSGAHYWARLFRQYGHEPRLMAAKFVSPYRMAGRSGKNDAADAQAICEAVRRPHMRFVPVKDESQQAMQCLHRTRQGFIEEKTAAYNRLRGLISEFGVIAPQSTDALRHMVSEQKNSLPLQVQQCVDDLLEHVDRIEANIAEYDRILSRMAKTDHRSQRLMELKGVGPTTACALVASIGNAHDFKNGRQLAAWLGLTPSQYSSGGKSKLGRITKAGDSYLRTLLVQGARSVLIGAEKRTDSFSRWVCSLVERRGYWRAVVAIAAKNARLCWASLHYGDDFRLYSAS

SEQ ID NO: 111139 - protein, 312 aa, unidentified
MNHFAGLDVSVKETSICIVDDTGRIVREVKVPSEPEALLKVLGNQAYRFKRIGLEAGPLSQWLFSALAEAGLPVVCVETRHMQAVLKAQINKTDRNDARGIAQMIRAGLYRPVHVKTLRSQKLRMLLTHRKLLQSKAIAIENDLRSTLRNFGLMLIVRRALREQIVILHRRLLAIVRDDEVCRRLMTTPGVGPVVALTYRATVDVPARFRKSKSVGAVFGLTCSKYQSGEIDWSGRISRCGDEMMRVMLYEAAQSMLRSKKWSWLKAWAMQIARRRGMKKAIVALARRLAVILHRIWVDGTEFRWTRETAAA

SEQ ID NO: 111140 - protein, 419 aa, unidentified
MTSSTDEVFHARCCGLDVHKETVVACVRISEPGRRPQHTVRTFTTTTRGLLELGDWLAAEGVPVIAMESTGVYWKPVWNLLEGRATGEGELMVPMLVNARHVKNVPGRKTDVKDCQWLAQLLCGGLLKASFVPERPQRELRDLTRQRVQLIEDKTRVANRLQKVLEDANIKLASVASDVLGASGRDMLRAIIDGKSSPQQIAELARMRLRSKIPQLIEALAGGVTDHHRFMLKTLLAQVEYLEGQIELLDRRIEEVMSPLELEAVRKLDEIPGFDRRSAQNVLAEIGTDMSRFPTSGHLATWAGMAPGNNQSAGKRRSGRITEGNKWLKRALVQTAWAASHTKASYFRAQHKRLSYRRGVKRATIAVGHSQLGIIYEMLNNGTTYADLGADYFEKRDTDRIKHNLVSKLQRMGYAVTLA

SEQ ID NO: 111141 - protein, 457 aa, unidentified
MSKRRKSAKSKSFNLQSLPKQLQHINLNAAGIDIGSERHMVAVPEGRDGVSVREFGTFTADLISLADWLQQCGVTTVAMESTGVYWIPLFELLERRGFEVKLVDARHVKNVTGRKSDILDCQWIQQLHTYGLLAGAFRPADELCVLRSYLRQREMLTQTASMHIQHMQKALQQMNLLLHNVVSDITGVTGMKIIKAMLEGERDPQVLAKHRDNKCHHDSATIAKSLVGNYRVEHLFALRQAVDLYEIYQTKISDCDQAIVTQVSTQPDVTDEPPPPEQKRTSARDRQRGGVNVRDLLFQKSGVDLFAIPGLAADTLLVLSSEVGFDLSPWKTEKHFSSWLSLCPGTKISGGKVLSRRVKRNPNRAAQAFRMAAATLSRSKSALGAFYRRIKARSGGKQAITATAHKIARIYYALLTQGTTYVELGQQAYEQKFEQRRLKHLMAQAKSLGFQLVPSRT

SEQ ID NO: 111142 - protein, 338 aa, unidentified
MKLYGAIDLHSNNNVIVIIDERDQVVYHRRVRNDLSVILPQLAPYRGDLEGIAVESTFNWYWLVDGLMDAGYKVHLVNTNAVQTYDGLKFTDDQDDARHLAHLLRLGILPEGYIYPKAERSVRDLLRKRAQLVRQRTVQILSVKNLAQRNVGCVLSRGSVEELRDEQIQALCGDDHRVLAMKSSLAVIRCLDGQILSLEKAVFSQVKLRPEFQQLLTVDGIGRILALTIMLETGDIRRFPTVGDYASYCRCVNSRKLSNFKKKGQGNRKNGNKYLAWAYIEAAEYARRYSDRVRRFLERKKAQTMGVIARKATAHKLARACYYVMRDQVPFQVERAFA

SEQ ID NO: 111143 - protein, 356 aa, unidentified
MTKVKTNFAFHKVDVGLDVHKRSWNAAVFLDGMYIRNIHQPPSPKALHTFLATTYPGATYRCAYECGKFGYWIHRQFTNLNIQCLVINPADIPSTHKDEVYKNDCRDARGIGHALTAGQLKSIYVPSTEQEADRHLVRLRKKIWRDLVRCKNRVKGFLDFNGIPLPEKFDNPNWSHNFIIWLQQLPLEHNASRLTLDYQVREVQLLRKELMSISNDIRRLMRSKKYKNLYYRLRTITGIGPLTAAALITEIGDMHRFSSFYHLNSFIGLMPMENSSGEKIMKGRITVRKHRQLRSDLVECAWTAKRNDPALALYYHNQLKRNKNGKAAIIKVARKLLSRIRYVWLSGQPYQTAIVQ

SEQ ID NO: 111144 - protein, 464 aa, unidentified
MTAGKQLWRNRKEKKEWARRLQSEDPGLEVVHPHAAGIDVGNSTHYVAVRPDRDPEPVRRFECFTADLHRLADWLQSCGVKTVAMQSTGVYWIPLYESLEEHGLEVYLVNARHTKNLPGRKSDVQESQWLLKLHTYGLLNNSFQPVSEIRVLRTYWRQRGEHVRGAATCIQRMQKALTQMNVQLANVISDISGLTGQAIIRAIVAGERNPLKLAMLSDPRVHASHEEIAKSLEGNWRPELLFVLHQEVDMYDTYQKRIAECDQRLQKHLASFTRPLPIQPPTQKLKTKKPAAKNAPRFDLSSELQRVTGVDLTRIDGIDVMVAQTLLSEVGLDMSRWITESHFASWLGLCPDNRISGDKVLSRGTRRVVNRAATALRQAANTLMRSRSYLGAQYRRLRTKLGAPKAITAMAHRLARLVYRMLKYGQTYVDKGTEYYEERFRQQQIQLLRKRAAKLGLQVAEIHA

SEQ ID NO: 111145 - protein, 421 aa, unidentified
MNGVRAKRVRTVKEGTLIATVDIGVTSNTGYYTTLDGRGTGSFRFDNSKEGFEKFWGMTIAGKNRFGCNEVLVGYESTGPYAEPLVHYLANKQVKIVQVNPMHTKKMKEVNDNSPLKTDDKDPRVIADIIRLGRALSIVVPEGDAASLRRLNNARERHVGEQTALLNQLQQLVFLIFPEFKTVLKNMKGKTAQHILKRYTTPERIGTLSKEGLGEEMRKRSMGKFGIKEAESLIGLARETVGIKEGLAGIFMDIRHILMQLEAEVRFISEIEAQMGATLKRIPCSLRLLSIKGLGTVSVAGLIGEVGDFSKFSTQSEIMKLAGLDLYEISSGKRKGQRRISKRGRSLLRKILFYAAIQMIRKNGIMYDYYVRLTGRGMERMRALIAVSRKLLRIIHAIVRDNRDYVGQYQTPERRVIKMAA

SEQ ID NO: 111146 - protein, 372 aa, unidentified
MGHHSEAFIGIDTSKSGNAVAIAEGGRGGEVRYLGEFPATEAGTHKLVGKFAAKYNKLTFCYEAGPTGYGLYRVIKSLGHECIVVAPSLTPRKPGERVKTNRRDAVSLARLSRAGELTAVWVPDERHEAMRDLSRARQAAKKDLQGKRQQISSLMLRLGRCYPGKKTWGPAHMTWLRSQKLKQREQRTALEELLEGVRQEGERVERLEQAIREAVPEWSLAELVTAVQAMRGFDLIAAAGVVAETGDLSRFQKPREFMGYLGLVPSESSTGDRVNRGGITKAGNGRARRLLVEAAWAYRHPARVGRVKQAKVAAAPRRVREIAWKAQTRLCRRFRLLERKGKRRPVVATAIARELAAFIWAINREVMQGRQA

SEQ ID NO: 111147 - protein, 393 aa, unidentified
MICVGIDVAKDKHDCFILSSEGEVLADVFTIPNNAEGFDTLLQTIRRCARPEDKIKVGLEATGHYSYNILGFLLNEGLDTYVINPLHTNLYRKSLSLRKTKTDRVDARTIAAMLMSDVDLKSYTDTAYHNEELKSLTRYRFDKVRERAKLKQSVSRLVTILFPELEKLVSTLHMASVYALLSEFPGAKQVSEAHLTHLKAVLYDASKGRYGSDMATTLRDAARCSVGSVMPAKSLELRHTIRLIHELDAEIEDIEAAIQSMMDEIQSPITTIPGMGVRRGAMILAEIGDFSRFDSPDKILAYAGMSPSTYQSGQLSLSGTYSHMEKRGSRYLRYALYNATKYVCLWNPTFAAYLAKKRAEGKHYNVALSHATKKLVRLIYALEKSKRPYSTAA

SEQ ID NO: 111148 - protein, 421 aa, unidentified
MPVSTLCVGVDVHLNELVLRAVDKTDGHEVLKRFRVTNNLPGSQAVITTLTDTAQRLGYAHLEMGWEATGLLWLPFHQQLVHSPALQSLAPKLICFNPKLVANFKDGLVLRHPKNDERDAWDVAARVRIGELPVSYVPNDFWQGVRRLTRYRYHLARDLQREQLRFQANAFLKCSDWQRVKPFADLFGATSLALLSEFTAADLKAMSPVELVDLITRRGHNSFADPAATARAVREALSSSYPIDPQLDALLTTTLAVSAEHLRMLRRLIQRLDQQIAHAIALVPNPLLTVKGLGPVITAGLLAEIVDITRFPDHPQLAQYSGLTWERRATGRFVSQDTRLTKVGNVYLRYYTILGADRLRQLDLGFQAYYWRKYQEVPKHQHKRALVLTARKLIRLIHALLTKNVPYTVRPQTPIQPEEVH

SEQ ID NO: 111149 - protein, 341 aa, unidentified
MKKTVVVGIDFSKRTMDVTYFIVGAMQDHSHRQFPNTEQGCLELITWIRERHSITSEWLICGEYTGIYSMTAAMVFNDNNLDIWLENPNQIKLSSGMSREKNDKIDSYQIALYAARFMDRVKLYKPQSKVLLQVRELVRFKDRLTKVKTQLSVAAGELKSVRKDWKETDYIYESSKTLIDQINTQISDTEKEMMQLLNTDPELKQMYKLINSVVGIGMQTAIYLLIHTWGFKAFEDPRQLACYCGIVPFAKRSGTSLKGRPHVSHMANKKLKTLLHMCALNAVKYDPYLKLYYQRKIEEGKHKMNILNNVRNKLIHRICAVITSGQEYDKNYYMQNWKVAA

SEQ ID NO: 111150 - protein, 377 aa, unidentified
MRKVALDLGAKKTTYCEVADGRVEQRTTVTQVESLEPLLGPAQPPATVAIEACREAWYVHDLLSSWGNQVLLVDTTRSKQLGVGRHGRKTDRIDAEVLARAVEEGRIPLAHVLTPERRELRRLLNIRRYLVEARAQGVTTARGVARESGVKLPNCDSANFSAHVRNRMKTEPQLQVVESVLMTLDVLSEQLANVEIGLARLLGMEPVIQKLSTVPGVGPVVAAVFVSVVDDAKRFQRAHQLESYLGLVPGENSSGGKRRIGAITKKGNPYLRAMLVQASWSLARTASADDPLRVWYEATAERRGKRVAVVALARKLAGVLWALWRHDTVYDPQSHCQRAARGLRSHAEQLQFHADALAHAGRKRLRSRIKREAAQPN

SEQ ID NO: 111151 - protein, 451 aa, unidentified
MKRKRAGKGGAVPSLECIEPNAAGIDVGATEIYAAVPPDRDPNPVRSFQTFTEDLQALAAWLLACRIRTVAMESTGVYWIPVFQILEARGIQVCLVNSQYVKHVPGRKTDVADCQWLQYLHTVGLLRGSFRPDDAICQVRSLLRHRDGLVEMAAEHVQHMHKALSQMNLQLHHVLSDLTGQSGLAILDAILAGERNPTVLAELRDGRVQASPESIVKSLVGDYRREHLFTLRQSLKAYRHYQTLIADCDEEIEKYLKEIDSKIDVDQHPLPPEKHRHKPRKNEFHFDMRTHLYRILGVDLTAVPGLNALTAHTLLSEVGPDLSRFRNASAFVAWLGLCPDNKISGGRVLSRKTRRTQNRVNRALRLAAQTLYRSQSYLGTYFRRMRARLGAPKAVTAAAHKLARIIFHLLTTQQPYDESIFAMEEQRNHLRMENRLRRQVKQLGYQLVPLP

SEQ ID NO: 111152 - protein, 350 aa, unidentified
MVLGADLHKSSHTIAAVDGSTGELLGGKTIQVGARGFATVLEWARGLNAERVWALEDCRHVSGSFERFLIGRGERVVRVAPRLMADSRRALRDRGKSDQIDALAVARAALRERVETLPAAQLAGVELDLRLLVDHRERLVRQRVALANDVRWNLHDLWPELSVPSRAFLTRKWLAKLARRLARAEQTARVRIARDELRRIAELTHAIDALEHEIADLVAQAAPQLLAEPGCGPLTAAKLVGEIAGADRFASDAKLARAAGLAPIRVSSGRTNRHRLDRGGNRQINAAIHRIALTRSRMHPETIAFIERKTAEGKTRREAIRALKRHLARRIWQLLRTPAPPIKTTREITF

SEQ ID NO: 111153 - protein, 364 aa, unidentified
MSSLSQRSLTHLGMDVHKDSISIGILRPDDSMDVERIFHDEDSVRRFIARMGKPRQLVACYEAGPTGYELHRLLQHLQVPCHVVAPSLIPKAPGDRVKTDRRDCRRLARLHRAGELIAIRVPSPEEEAVRDLCRARGDVVIDLDRARRRLGAFLLRHGQIWRGGSNWTLKHEQWLLGLRFEDAALASTFAHYRSIVEERRLRLQALESDLVPYCEQDPYAEGVHQLCCYRGVDTIGALTLVSEVCDWRRFARASSFMGFVGLVASESSSGGHTHRGHITKAGNVHLRTQLVESAWAYQRGPYVGERIRRAQERCSPATRERAWAAQVRLCGRFRRLATRKNVKSVVAAAVARELAGFLWGEMTA

SEQ ID NO: 111154 - protein, 344 aa, unidentified
MKYVAIDVSSKSFVVHVIDRKKRLLFQGEIAPVKTALLKLIEDLGPEPMKVVFEAGNQMKWLAETLQGVEKVDLHVVHPNELKWISKSSSKTDKVDARKMAELARGDLLPRKVHIVEGPVRRLRELTSARQTVQGKRIALSNSIRALLLQEGVRLSEKFFGRTDWRDRLDRVAVSDTGRIVITAYMQAIDALQETEAELTEQMVAVKDERLELLESIPGIGLLTSRVLLGALDEAQRFDDRKAVAKYGALTPTIYQSGAVTHLGRINRDGRHEVRRVLLQCAHTVARMKSFESRPLRQFFERLMKRRGKKIAIVALARKLLTIAYGVLKNQAHYDPARLTPYPV

SEQ ID NO: 111155 - protein, 405 aa, unidentified
MSNSITYVGLDAHKNEHSVAAILPGTDAPEQWTVKNAPREIKRMIRRLRRRTDGPLRFCYEAGVCGFTLRRQILAADDQVECMVVAPSLIPIRPGSRIKTDRRDARKLAELFRAGLLTEVHPPNPREEAARDLCRCRHGAKADQGRARHQLGKFLLRRGMVYTGGSHWTQRHFAWLRSLRFDQPLDQEIFAEYLAELDHRTQRVASLDRRLAALSQEDPYRQPVAWLRCFRGIETVTALTIVTELHGFGRFACPRQLMSYVGLTPSEFSSGDSQRQGGITKAGNGRVRRLLVEAAWHQRNPPITPKALAKRRQGQPAAVVGIAERAQKRLHQRYWRLVNRGKAPTKAVTAVARELSGFLWSVLFPPSMGLAVTNTPGRRRTTPPEKPRRKTSRRLTAQEFFTSAD

SEQ ID NO: 111156 - protein, 354 aa, unidentified
MQQFVGIDWATRRARWCAVTRAGALIEEGWAPADEDGLASMVVRLGPDAVACLEMMSGAAWVRDQLQAAGWTVQVADARKAKAVGSLAAKTDKLDARVLAELARRDLVPQVHVPTFADRELKERLGRRMHMVRLRTAAMNRAHGVLSQFGVTLAFKRLRGPDREELLIARGIPEVWRRSIAEAVAVVAMLDQRLIPLEQELRPLARDDPRVQLLITIPGVGDLLGLTIASEIGDISRFPSARKLIGYSGLTPRVYQSGQKARTGKLSKSGSTMLRWAAIEAAQQAWRPNNPWNQLYLDVKQRCGGKGNPAKAAVARKVLIATWHVLALQQPFNPTRPRGATAPVPASSSCVLAD

SEQ ID NO: 111157 - protein, 285 aa, unidentified
MKEVITTIGLDLGKKVFQVHGVDAVGGVRVRRSLRRSQVLGWFGKQPACLVGMEACATAHYWGRELSRLGHEVRLIAPAYAKAYVRRNKNDAADAAAICEAVSRPGMRFVAIKTAAQQAAGGLHRVRDLLQKQRTMLINQLRGLMAEFGIVVAGGPQHVKDLLAVLADPADARVPELLRGPLLGLAQVLGDLERRVATLERQIVAWGRGNATYRHLITVPGYGPILAGAFAAFVVEPSTFRSGRDFSASLGLVPRQEGTGGKLRLGSISKRGNGYLRRLLVNGAM

SEQ ID NO: 111158 - protein, 390 aa, unidentified
MFDYTIRTPAKPQPKGGLAMNNYIMVGCDLHDKSMLIKTAHNREEPVQKSFNNAPGGIKKMVSVLKERAEAANNARIVFAYEASSLGFGLYDDLTDAGIDCYVFAPTNIPRSVKHRRRKTDARDAQRILEIVRGHFLAGNKMPTVWIPDPQTRDDRELVRMRLGVGKKITAIKAQINILLKRNKFRKPGDIGNNWTKKHRTWLAESVGSESALPIGASSALSSLLRQLAAMEEEVIYLDKQIRVLAQTDRYAIPVRELNKLKGVGILTAMVYLTEMGDLSRFKNRQQVGSYLGLVPSSHESGEKGSRKGHITHHGPGRVTRVLCQACWSRVRTDHHERAVHKRICDRNPKHKKIALVACMRRLGIKMWHDGLKAQLLAGSFNLQTHQTAA

SEQ ID NO: 111159 - protein, 351 aa, unidentified
MVVVGADVHKHSHTFVAVDQVGKRLGQLTVEATSKGHAKALHWARAQFGDELVWAIEDCRHLSARLERDLLSAGQQVVRVPPKMMAEQRRVARTRGKSDPIDALAVARAYLREPDLPLASHDEVSREAKLLVDRRESLVATRTRTINSLLWRVHELDPAHAPKPGSLDMVKHQRPLREWLATLSGVVAEMALDELDDIITLTVRIKTFDKRLRELAHRQVPTLLGLPGCGELSAAKLLGESAGITRFHSEAQFARHGGIAPIPVWSGNTAGRVRMTRSGNRQINAAIHRIALTQSRMPDALGHAYYDKKLAEGKSKTEALRCLKRRIARVVFNLLTIDHNNRQTPAQPAAA

SEQ ID NO: 111160 - protein, 320 aa, unidentified
MRNAVGLDISKLTFDAFAMVGNAEYSAKFDNNSKGLNRFSDWLKSLGCQNLHICMEATGNYYEDVADYFAKYYSVYVVNPLKISKYAESRFKRTKTDKQDAKLIAEYCQSMKESELVKRQKPTDEQYRLSRLTAAYAQLKSECAAMKNRYQVAKDEEVAKAYAEIIKSMNEQLEVLKAKIKEQTEKPDCKEGVKRLETIPAIGRITAAVLFQYLTFSKFETSNKFAAFAGLSPQQKESGTSVRGKGKLTKFGNRKLRTALFMPAMVAYRIRAFPDFIKRLEAKKKPKKVIIAALMRKLAVIAYHVHKKGENYDPSRYKLA

SEQ ID NO: 111161 - protein, 346 aa, unidentified
MLYAGLDLSRQRLDVHVLDEDGRTVEVTAVRPDAGALRALAARILRHGHEVSGAIESMTGARFVHDTLERYGWEVEIADAAKVKGIAPLAAKTDRIDAWVLAELARLDLVPAIWLPDPVIRAERERARFRLHLSHHRTALKNRIHATLMTFGQPVPMADLFGEKGRELLAGQALPEPWTATLTTSLAMIDELDARIDAAEAELRALGAEHPSIPLLLTVPGVGWVLAYTIASEIGNITRFASPKKLTGYTGLCPLVRQSGNRDVRGPLAKNGPKYLRWALIEAATHAARHPAYRLRYERTKQRLGRQRGAKVARVELARQLAEAIWHILMKREPFAPAGPTKLLVA

SEQ ID NO: 111162 - protein, 323 aa, unidentified
MNKDIKYFGIDISHLVFDVMDSDGNYYQFKNKELGFKKFTKLLNNKSHCVMEATGYYHYQLAYHLLESGIKVSVENPLSVKRFIQMGLSKVKTDKSDSKLICAYAEQVELKLWQGNSKEEIECLQIVRTLSVYTKQSTMLKNKLHGEAVLGNPSKLVVTSLKRSLRQLIKEIKTLEDKLLILVKQSHQDLFTRLKTIPGIGSKTAIMLVVLTGGFDRFTSASELCSYAGLTPVIRQSGSSVKGRPRISKMGNQKLRNLLFMCSFNACKYNKACRDLYERIVAKGKSKKLALIAVCNKLLKQAFALAKSGLIYDGNYKSTLVKN

SEQ ID NO: 111163 - protein, 352 aa, unidentified
MSQTLKTAIAVIGIDIGKNSFHVVGQDERGAIVLRQKWSRGQVEARFANMPPCLIGMEACVGSHHLSRKLNSLGHDARLMPAKYVRPYSKGQKNDFRDAEAIAEAVQRPTMKFVATKTADQLDLQALHRVRERLVSQRTGIINQIRAFLLERGIAVRQGLRFLRAELPRILTTPPDVLSPRMVRIVEDLAGDWRRLDERVERLSNEIEAIARQDAGCERLMSVPGIGPIISSAMVAAIGAGDVFTKGRDFAAWLGLVPKQISTGDRTILGKISRRGNRYLRVLFVQAAWVVLIKPKSWERHGLKSWIEAARKRLHRNVLAIALANKLARIAWSVLARGRDFEARSIANAQPV

SEQ ID NO: 111164 - protein, 385 aa, unidentified
MIVGGPQAHVILDFMTALAPSDRVHLATKRPGLGEGANVRFIIGCDFHPSFQQVAIFDNLTQEVRQLRLAHPQQAEEFYRSLPAPARVGTEAGGHNQWFQKLLVELGHELWVGDAARIRASYVRKQKTDRHDARHLLELLRQERFPRIWVPSAAERDLRQLLVHRHSRVRMRTQVKNQLQALALNQGLQKKRRLWTELGRAELEGLVLLPFAGARRTALLDSLDRLNQEIAVLDRQVERAALAHAGATRLMTHPGVGPVTALAVVLSVGPVARFRRAKHLASYVGLVPSEHSSGGKQRLGHISKQGSSFLRFVLVEAAQSAVRLDPAMKRQYVRLALRRQRAIAKVAAARRLLRRLYWMLRWECDYPALLARMQASPSHAVTRSA

SEQ ID NO: 111165 - protein, 346 aa, unidentified
MKKIFIGIDFSKEKFDATLIKAEGLKECAPSMHEVFDNKTSGFHRLVRWVKGQSEGQPIDSWLFCGENTGAYSIGLSNYLYASGYDMCLECAYKIKHSAGILRAKNDKADSMVIAEYAMRNYDKVRLHRPQSTSLTCLREIFLYRHSLVRQKVALTVRRDEKRLTQEKSDARAFMSFTSKHLITEINKAIYKCDQKIKETIAADDGLREIFDIITSMPGIGVQNATCLMVYTDNFQKFDMDSRKIACYYGIAPFGRQSGTSVNSRPKVSPFANRMIKSLLSQAALAAIKSDINIHNYYQRLIERGKHPLLVHNNIKNKMLHALVAMVRDRIKYNPDYVYQTNKSAA

SEQ ID NO: 111166 - protein, 407 aa, unidentified
MTEFNAKEVRIETASALASVRQAQREQASRCEARYAAYVGLDVHKDTIAVAVAWSGRDEPEYWGEIKHSRKAVDKLIGRLLAACGGGVLLFCYEAGPCGYGLYRQLVARGCDCEVVAPSRIPQRAGERIKTDRRDALKLAGLLRAGELTGIWIPDEEQEAMRDLCRARGDMKSQEHKARQQLNAFVLRHGHHWPSNKARWTMTHFNWLEGLKFAHDWQQVVLQEYIDAVKAAQARVAAMTAQMMRVLPQWRLAPVVDALTALRGIDKLSAMTLLAELGDISRFQSPRQLMAYLGLVPREHSSGGRRRQGAITRTGNGHARRALVESAWSYRFPARQTPHLKRKAAAAPAQAKAIGWKAQRRLCGRYRTLIQAGKNTKQVCVAIARELVGFIWDIVCQEMAKMKPVTQ

SEQ ID NO: 111167 - protein, 348 aa, unidentified
MAMTIVEADRTVIGGVDTHLDVHVAAALDPVGGVLGVESFAASRGGYAALLEWLSSFGTVGKVGVEGTGAYGAGLCRFLVDAGIEVIEVDRPNRQVRRQKGKSDPADAVEAARGVLSGRSTGRPKSRDGKVEAIRVLLVAKRSARQGRLRAIHQMRQLSYTAPEQLRARFKGLSTSDLIAETAALRPRAGGDTVTYATKVALASLGRRCLELEEEIDHVDALLAGLVEEAAPELLGLYGVGVDTAATLLVAAGDNPERLHSEAAFARLCGVAPIEASSGKVTRYRLNRGGDREANAALWRIVMTRLSFDPRTRDYMERRTKEGRSKREVIRILKRYVAREVFRVLPRS

SEQ ID NO: 111168 - protein, 491 aa, unidentified
MPERRLVGIDLGIASEHTACVLRGDGSEVCRRRARPSRESLQELERVAVAGTPAGTRLEVIMEPTGSSWLPVAVYFAGRGHVVYRVSSVKASDLRRVLSRHAKSNRIDAVALARLPTVVPDGLFPLELGSHDQAALDRRVRACHRLTRLAAEHKTRIKDLVRQLLPLTPLGTDLSRADLAVLERTGADPHRLIRLGLAELTSLIAEASRHRLGSRRAQQWLDAARLAIELYQDHPAVSFGDLAEEVQTEVRLLAATDDELGHHAIAREQAYDRVDPGALARSLPGIGEVGAPSLVSALGRPQRFRSGRRVRSFTGFTPRSSETGETERKGQPISKAGPGRLRTTLVLAADFARKLDPQLARVYYVQMTERGACHQKALCVVAAKLAERALTVLKRGTPYEVRDIDGRPVSKEEAKAIIAEHWTVPEEVRRRRRGRKQQRGKVPQQVLPGHANAGARSAATRRPSPQPMLAGRLTPIKEVLAGVATRTGVRT

SEQ ID NO: 111169 - protein, 341 aa, unidentified
MGEKKYCVGVDLHRNQFTYCVRYSNGQEKVGKESIVHLERFARRLGKHSEVAVEATGNTWMFCQVLKKYAGRLVVVNPNQFKVISRSVKKTDKNDAKTLAEFLEKDLLPEVRMKDELQSKVASLTQTREKLVQLRTVLKNKINNLFASRFILLKREELSSEKGLQKVLTYHFDSISDVELRVMVDQIRSLNKSIEELDKAIEDNGTKMDGFDNLKSVKGIGAKGAATLLSVIGNINDFRSAKQLAAYIGIVPRVSDSNETVHHGRITKQGSKIARTTLVQCALIAKRYNAYLFNFHEGIKARRGGAKANIALARKFLEIIYRILKNKWIFEDFTQFKLKTA

SEQ ID NO: 111170 - protein, 380 aa, unidentified
MTIVAQTRPFVIGVDCHARTHTYAIIDASTKRRVACEQFPTTSAGISRALAWVGRRTDGDMACLWAVEGIGSYGARLARAVTEAGYDVAEAPRMNARGRRAIGKSDPLDAAAIGTAVLALEESQLRAPRRDEGTRAGLSILSAARDQLTRDRTMNVNALIALLRAHDLGIDARKPLVPAQIATITRWRERQEQIELSIAREEAVRLARRVLEVTTQLTANQKRMTELIQQSPAAPLLEMVGAGAVTVATVLTAWSHPGRVRSEAAFASLAGVNPLPASSGNTVRHRLNRGGDRRLNRALHTITMTRMVHDPGTRDYVTKRTEEGRSYREIRRSLKRYIARILYRQLNTLYATAEPAPIPCRVFAGDRSSRPASAILVSNW

SEQ ID NO: 111171 - protein, 398 aa, unidentified
MYAVGIDVSKGRSTIAITRPLGETVAKPFEVRHTKSGMNDLVNYLNALEGECRIVLEHTGRYYEPMVRWLSNAGLFVSAVNPKLIKDFDNNSLRRVKTDKADARKIARYTLDKWSELRQYTAMDKIRTQLKLMNRQMSFYQKQQTAYKNNLIALIDETYPGANKFFTSPKRPDGSEKWVDFIEKFWHVDCVCKISLNAFTDKYQKWCKKHNYIFQPDKPKEIRDASLELIAILPKEDMTKMFVQQAVAQLNAISKAVEELRQAMNSLASQLPEYPVVMSMFGCGPTLGPQLIAEIGDVQRFTKRSQLTAFAGVDPGVNESGNYAQRSVPTTKHGSPYLRKTLFLIMDTLIKNQPENDPVYQFMAKKRDEGKPYHVYMTAGANKFLRIYLGKVKQYLAE

SEQ ID NO: 111172 - protein, 415 aa, unidentified
MEVVHPRCAGIDISKRDAKVCVRAQGTGRARAKSTVTTWGAVTNRILALRDHLVAEEVTLVVMEATSDYWKPFYYLLEDAPFEVMLVNARHVKGIPGRKTDVSDAAWLAELGAHGLVRGSFVPPEPVRQLRDLTRTRTAITRERGREVQRLEKLLEDAGIKLSSVASDITGVSGRAMLEALIARDRGPAGLADLAKRRMRSKIPELTEALTGRFAEHHGFLARLHLDLIDSHSRAIEELNGRIEEAVQPFRATRDLIVTVPGISTIVADVIIAETGGDMSRFPSAGHLASWAGTCPGSNESAGRVKSTNTRPGNPYLKGALGVAAMSVARSKNTYFAAKFRRVASRRGPVKALVALEHAMLIAIWNMCSTGEFYADPGEDFFTRLHPDRARDRALDQLRRMGYAVTLEPLSAQVG

SEQ ID NO: 111173 - protein, 356 aa, unidentified
MSIVAHSRPFVVGVDTHAKNHVYAIIATATGALLQTRDFPTTSAGINRAIAWVARLTGADLATLWVIEGAASYGALLAGAVGAAGYEVSEAARMDARARHGVGKSDPLDAHRIGAAVLPMEEQQLRRPRLNEGVRAALRVLVCARKSMTTDRTRSVNALTALLRVNDLGLDARKSLTGTQIADVSCWRAREEPLALSVARFEAIRLAKRISQLDTDIKTNGGQITDLVEISEAAPLLHEKGFGAVTSAICLTTWSHHGRVRSEAAYASLAGVNPIPASSGNTTRHRLNRGGDRTLNKALHLIAISRMTFDPETIAYVQKRQAEGRTKKEIRRCVKRYLARRIYRTLNAATPTHCSA

SEQ ID NO: 111174 - protein, 340 aa, unidentified
MDIAVLGIDLGKNSCSVVALDSSGKVTLRRRMLRKTIVALTSKLTPCIIAMEACCGAHHLGRVLSAQGHTVRLMSPEYVRPYVKAQKNDDRDAEAIAEAATRPTMRFVALKSEEQLDMQTLHRARDRAVGERTSLMNQLRAVLLERGVIVPQGRAKLRLRVTELLQQSPEQISSRIRLLEDMLMRWQALDEWIAGFDGEFAAELKRDEAARRLTSIPGIGALNATALVAAIGNAQTFARGRDLAACLGLVPRQATTGGKPRLLGITKRGSKYLRKMLIQGARAALPTLSRNNTRLGQWLRGLLARAHSNTVVVALAAKMARTVWALLRYGTTFEPRAIAI

SEQ ID NO: 111175 - protein, 395 aa, unidentified
MNKVIHYIGLDVHKESIAVSIAPAHSTEVRRYGIIGGTLAAVDKLIKKLSLEGVELRLVYEAGPCGFVLCRHLRAKGLHCEVVAPSLIPKKASDRIKTDRRDADQLARLYRAGELTCIHVPDQEDEAVRDLIRARFSAMTDQRQARNRLKGFLLRLGFRYTGKSSWNDAHQRYLSGLVMPQAPQQIAFQEYIHAINDATDRLARLTRAVEDALAGWKWEPVVRALMSLRGVQVLTAMTLVAEVGDFSRFDDPRSLMHFFGLTPSEHSSSDKRVQGGITRCGNAHCRRVLTEAAWHYRLAPKVSAAIQIRQQAQSKEVRLIAWEAQQRLHKRFKQLSAKKKSVIAATAVARELAGFVWAIACQVKPAKQAPAPEIIRTCRGKVYRLDPNTKLQKNK

SEQ ID NO: 111176 - protein, 420 aa, unidentified
MLSVKHFVCCGMDVHKKFLVATIAVTDFRGVTSYIKKKFATFNSDLKALKKWLLDHNCTEVCMESTGKYWIPVFNVLEDSCHVVVANPKYVRAIKGQKTDDKDSAWIADLFKFDIVPSSYIPCKEIRALRELFRYRQKLIGHRSSEKNRFQNSLTVSNIALSSVLTDTFGKSATAIVDYILTCDIFDPEYCKSLLLKKAKDKADDVVKSIIGYELRGDQSLKMKVCRKHFDHINECISTLEEAISDLAQPYHKFIELATTIPGITQKSASFIIAEIGVDMAVFKSSKRLCSWAGLTPQNNESAGKKKSVHISRAGVYLKPLLVQCANAAIKDKKNPYFKYKYDRIKKRRGHKRAIIAIARMMLTCLYHMFSKQEAFNPADTDYSAIPEEMYQKFQEQYDKNAVKRLEKRGFTIIPPVATA

SEQ ID NO: 111177 - protein, 317 aa, unidentified
MQTVLNVGVDVAKDTVVVASADQRWPAQQVRNQRSTWRAWLKTLPAGSRIGLESTGSYHELLADLAHAHGHTVYLLNPMETRHYAKALGARAKTDRVDAMLLARMIAQEHAGLRAYTPPTAQQRQVDRLIRRRAKLVRLKGALKLTMANLEGLTGAVKAVVRKLDALLAKLDATMATVAAQSPPHQQAQRRVETIVGVGPLVGMSLTNTLERVPFRNADAFVAFTGLDPRAKDSGQKTGRRRLSKRGPAELRRLLFMAAMSAIKTKVWKPIYDSYRIQGWSSTATLVIIARKIARAAWSIHRYQTTFNPDRLIRGLT

SEQ ID NO: 111178 - protein, 343 aa, unidentified
MKHYAGLDVSLEETSVCILDETGKICREIKVASHPEDLRRILQDPAWQFERIGLEAGLLSQWLFNGLAEAGLPVVCIETRHTKAFLKAQVNKSDRSDARGIAQMMRVNLFRPVHVKTLTSQKRRVLLTARKLLQEKAIAFENEIRGLLANFGLKVGVVGAAKFEERIYELLGDLPDLAEIMEPLLDARRRLREHFSTLHCKLLELARGDEVCRRLMSIPGVGPVVSLAFVATIDTPARFRTSKAVGPALGLTPVRNQSGDHERIGRISLCGDALMRTLLFEAAQVMLRRTTKWSWLKAWAMKVAHRRGSGKAIIALARRLAVIMHRMWRDGTEFRWTREVQAA

SEQ ID NO: 111179 - protein, 359 aa, unidentified
MKTIVSNKQNWFNKIKLTKDDEIYVGIDVHKKSYAVAVWLNNAPAIDFVMPADNQKVLTMLDKLRIALKQVVYEAGPTGYSLARLLQDAKLPIRVIAPSKTPRQSARESKTDKLDCRKLAQYAAKGLLRPIAIPTKQQEADRQLFRLREQLVEKQRRLKLQIKSFLLQHGIPDPAGLKSWSVLAVEKLRTIALPDKLRYCLDIFLDELAFLKTQIKKTEQHLKETFSAPQYAKKIELLRTHPGVGPVVAGQFCTEIFNPKRFKNSTEIGKYVGLSPMVTQSGQSRKDGPVLKTGRPQLRSNLIEASWVWIRNDPHAYKTYIRLLHNTGEKNKAIVAMARRLAIHLWKMLSDNKPFIQAA

SEQ ID NO: 111180 - protein, 415 aa, unidentified
MELLHQRCAGLDIGKKDLKACVRTPSPSGKRSRRQEIRTFATTTNALLELRDWLVAEKVTLVVMEATGDYWRGAFYLLEDGPFEVILVNAAHAKGLPGRKTDVSDAAWLCQMGECGLLKASFVPPEPIRQLRDLTRYRATLAAERTREAQRLEKELEDAGIKLSSVATDILGVSGRAMLTALIEGERDVHTLAEMAKARMRPKIPQLVEALTGHFGEHHAFLCRLHLERIDQLSEAILELSTRIEEQMGPFARQLEQLQTIPGVGQATAEVIIAETGADMSRFRTAAHLASWAGVCPGHHESAGKRKSGKTRHGNRWLGAALGTAAMAAARTKNTTYFGARYQRLAPRLGKKKAIVALQHSILTATWHMLTHDVDYHDLGGDYFTRNDPHRAMKNIIRQANALGFTIRFEAIPAA

SEQ ID NO: 111181 - protein, 454 aa, unidentified
MALGEVREIPDEGHEQLIERVAAIDVAKAFGKICTRVPAATGTGHRLTRVWEVSATANAVLELADELIGQGIEKVTVESTGDYWRIWFYLLEARGLNIQLVNAREVKHLPGRPKTDTLDAVWLAKLTEKGLVRPSFVPPAQVRALRDYTRLRIDLSHERTRHWQRLEKLLEDALIKLSVVVSKLTTASARDMIEALIAGQRDPRVLAELAQGRLRRKNEALIEALTGQFDDHHAELAAMLLTQIDGLDAHIMRLTGRIEELVTTLPGPADTANPASGDGPDGAPGGPGGPAPATAVERLDEIPGISPQIAQVIIAEIGLDMTRFATAAHLVSWAKLCPRTIQSGTRSRGGATGKGNPYLKGVLGIAATAAAKSDTFLGARYRRIVKRRGKLKALVAVARSILVIVWHLLADSQARYHDLGADYHSRTLDRDRKTRSHVRQLQALGFAVTLTPTA

SEQ ID NO: 111182 - protein, 534 aa, unidentified
MVVLGQVAVDGGLKVDDRSEDTTPDALASEFREKAFDGIEPGAGLRGEVERPARMPGEPGFDLGMFVGAVIVEDGMDQFPGRDRALDGIEKADELLMGMALHTAAEDDAIERVESGKQGGCAVALVDAMGRAARACDLGAATTAGRCPMRQANDLSRSLAAFDQPTTLIAVIEMSQSSWLVAGIVPGLERHPLKKLAVDEGSLLRLLQRWRDQAIRAGCRIERITVAFEAGRDGFWLARWLRAHDIEGYVIHPTSVAVSREHRRAKTDRLDTELLKRAFLGWLRGEADHCNMAAIPTIEEEDGRRPHRERESLVAERTRIVNRMKGCLARLGIRGFKPTLQRAPKLLSTLRTPEGTPLPPNALAEMGRDLARLHFVEGQISEIETARLERLEQAPTEKSHAMVRLLARVIGVGIETADMLVREILSRNLRDRRALARYAGLTGAPDESGSKRREKGLARAGNARVRRGMIQLAWRFLMFQKESALAQWYRSRTVDARQGTRKSLIVAMARKLLIELWRLVTTGETLLGVKMRPA

SEQ ID NO: 111183 - protein, 419 aa, unidentified
MVSIASEEAGWKRSSSGPRGWTSIKERVTACVRVPAEGGEREQHVAEFKTTVAGLLTLRDWLAAHRVEQVTMEATGVFWKPVWAVLEDEFECRLVNARHVKQVPGRKTDVADAAWLCQLAEAGLLKASFVPPKPIRALRNLTRYRKTQIQERAREANRLHKALEDTGIKLDCVASDILGKSGRAMLEALIQGTTDPEVLAELARGKLRVKIPALREALHGRFDHLHAVWIGSILAHIDFLDEQIAGLTETIGEQITPFERAVELLCTIPGVQRRAAEVIVAEIGVDMSVFPTAKHLASWAGLCPGNDQSAGKRRSGTTRKGSKWLDWALEETALAAVGAKHVYLAAQYARLKPRRGHKKALGAVKHSIIVACWHMLTTGELYNDLGGDYYRKRDPARITKRLVKQLEALGHTVVLQEAA

SEQ ID NO: 111184 - protein, 394 aa, unidentified
MTATTDHYLGIDVHKRQAQVAVLDDEGEVTEEIRVAKADLDEIVQKYAGSSAAPEAGSNYFTIYDRLDEELDVTLANPVKADWLADQKQNNDRKDAKNLARYLRLGKVPESYVRPEEYRRYRALARGRKKLVDKRSDFKNEVSSLLDQNGVTYDESLWSDQGREFLRELTLDDASELLLGQWLEAIDEFTVKIKRMQRRIEEVAAEVDELDTLMSAPGIAAFSGLMIHGEIGEVGRFDRAAEVVSYAGLDPVIRESGDSRREGRISKEGNGYLRWILVQCANTAVHNAEDPYLSQFYWRLRKNRNKPHKVAIVATARKLLVALFNMLSKNEPYDHAHNARIEDDFYNQRSMTETVNSSVKRSYGSAVRAREWYREFREIVLMCLVYNIKQYVTR

SEQ ID NO: 111185 - protein, 403 aa, unidentified
MIGIDPHKGSHTAVAVTATEEPLGKVRVRACPAQAEQLVAWAAAWPERTWAVEGAPGLGRLLAQQLVAAGERVLDVQPKLAARVRLLQTENTGKSDPNDALSVAVAALRSKGQRPVLADDHATVLKVWAKRHRDLSRAHNQVACRLHAVLCDLVPGGVADEITAGHAAKILGQITPADPAAEARKELAAELLADIRHLDAQRREIKKKLATAVKASGTSTTQIFGVGPVIAATVIGDVVTVARFPRRDHFAAYNGTAPVEVFSGEKKIYRLSLRGNRRLNHAIHMAAITQIRYKHSDGRGYYERKIAEGKTHKEALRCLKRRVSDALYARLRADARNAAAASTRDPGGQPGNDSVSSAAGSHPEHRLFGSATPGPAPSLRSATALPQAMRPSEPSAKKTRRDP

SEQ ID NO: 111186 - protein, 354 aa, unidentified
MTSTKYIGMDVHTESISIAVRNSVGKVVMECVIETKASTILQFIDGLSGDLRVTFEEGTWATWLYDLLKPHVTEVLVCNTRKNASRNGSKSDRIDARKLAEQLYMNNIKSVYHGEHGLRTLKELARSYLTITKDLTRVMNRLKALYRSWGIPCAGKEVYAPRHRAEWLAKISEAGVRRRAEHYYQQLDVMRPLHQEARRDLLLEAKKHKPWKLLRLIPGIGPIRAAIVIAVMQTPHRFRTKRHLWTYSGLALETHDSAQYRSAEGQLQRSKKPATVRGLNKDYNHDLKDIFKGAAMRASTAAGPMHDFYEALLAKGRKPTMARLTLARKIAAITLIVWKKEVRFDANYLKPQAA

SEQ ID NO: 111187 - protein, 358 aa, unidentified
MNRNTGMNAGQIIGTMTGLQVFGLDIAKHVFQMHTVNMGTGEIINVQVKRAKVAEHFANLAPCLVAIEACGGAHHWARELGKLGHTVRLLHAKIVRPFVSGNKTDATDARAIWLAAQQPGVKFVGTKTAAQQATLTLHRQRELLMKMRIMQTNALRSLLYEFGATFAKGKRALFKEIEATLEGLAHTLPQVVRDSLHEQVARIKAIEVDMQSIEARLQLQLKQDPQMQRIAQIPGVGLLTATAAIATMGEASAFKSGREFCAWLGLVPKQTGSGGKVKLLGISKRGDAYLRCLLIHGARSVIAHAKEPGPWLQDIKARRPSNVVFVAQAAKMARTIWAITAKAQDYDKGFKSIRPQAA

SEQ ID NO: 111188 - protein, 309 aa, unidentified
MNEIYVGIDVSKDFLDVAALPSRETHQYTNDEAGISKLVTRLKKLYPILVVMEPTGGLEAPVAAALSVESLNVAVVNARQVRDYARATGKLAKTDKLDALVMAEFAAVIKPPAHELRDEQSEEIKAMVSRRRQLLEMLTAEKNRLAIARKNLKPNILAHIEWLKKELADIDHDLRKRIENSPIWRVKDDLLQSIPGVGKVLSVTLLAELPELGKLNRRQIAALVGVAPFNRDSGTMRGKRSIWGGRASVRTVLYMATLVSTRFNPVISSFYQRLLANGKAKKVAIVACMRRLLTIMNAVLKSQKAWRYV

SEQ ID NO: 111189 - protein, 388 aa, unidentified
MKPNTETTAAPLAVIGVDIGKEVFHLVGFGTDGKIAFRKKIRRLDLKGAFEQLPRCIVGMEACLSAHFVSRTLRALGHEPRIIPAIYVKPFLKGQKNDYNDAEAIAEAALRPNLHLVKEKSQDQLDLQACHRVRSRLVSRRTATINQIRAFLIEQGIAVRAGARALRNSLFAILENRKDEISPRTAKLILGLYEDWCHLDERIESVTEEIESLGKAEAKCQRLISVPGVGPLISTGIVAAIGSGEAFERGRDFAAWLGLVPRQHSTGGRSILGRISKRGSKYLRTLLIQAARVLLMRPHNWPRFSFGAWLKTASERLHRNKLAVALANKLARIAWSVLRHDKAFDTHLEVAAISPPSRPSLRLRNCVERINRRTLNLVPLMAARRSVR

SEQ ID NO: 111190 - protein, 419 aa, unidentified
MTRKDDSKVIRIVHPICCGLDVHKESVSACVIFPDGTGEEQYEIKVFGTFTDDLVRLREWLTAYACPVVAMESTGVYWRPVHNVLEETVQVVLVNARDMRNVSGRKTDIGDSRWIAGLLRHGLLKSSFIPPQTVRQWRDLTRLRKKYVQSAGDYRKRTHKLFESANIKIDSVVSDLFGVTGRNLMQLLVTDRKLTLSDIQTCVRGKLKGKEAELFRSIQGFFTDHHRFVLKTILKTIAMLEAQIGALDHEIHRVMKGHETLLDRMKEAPGISDVSSCDILAEIGPTLDSFPTDTALVSWSGLCPGNNESAGKRKSGKSPVRKHHLKTIMLEVAWAAVKKKGSYFKDKYYRLKARRGAKKAIVAIAHRILLGIYHVIKDGVVFRDLGEDYLTRRNKSQKVFHLRKQALALGFDLVPQTAQ

SEQ ID NO: 111191 - protein, 341 aa, unidentified
MKIIRVGVDLAKNVFQLHGVDRSEKEVWRRKLDRGNWIKVLLDKVEPGCEIGMEACSGAHHWARLLQAKGFVVKLIAPQFVKPYVKSNKNDANDAEAICEAMSRPSMRFVSVKTVEQQDIQAVHRVRASLVDQRKATANQIRGLTSEYGLIAPRELVHLRTTIPRWLEDLDNGLSERFRRLLRGLWQDMLTLDQRITELEREIEQIARQDPVAARLQQLRGIGPITATALVATVGDASQFANGRQMAASFGLTPKQNSSGGKDRLLGISKRGDTYLRCLLIHGARAVLRTAQAKTDRLSIWVTRIATTRHHNVAAVALANKTARIAWAMMSRGTDYHAELA

SEQ ID NO: 111192 - protein, 339 aa, unidentified
MIIQSKKVVPKLQSLFAGIDVGAEELILLIRKNGTPYKAQKFANTPTDRARLVKKLVNLPGIAVCLEATGVYHFDLSIALHDAGVALMVVNPKSSHNFAKVLMKNSKTDAVDAETLAQYAERMDFVAWARPSDEKIALRSFARRIDALTRQKAAAKNQLHALSASKENPKAVLRDVNLSISQLEKRIDCLSKEALVLIKKHADLERVFKLLTSVKGIAQTSAIALMGELLLLPQGLSHREWVKFAGLDPRAFDSGKSVHKKTRISKAGNRHIRSALYMPALSAKQHDPYVKAYFQHLVDNGKLPLQALCAVMRKLLHAIHGMLKHDKQFDNTRFYAIPA

SEQ ID NO: 111193 - protein, 309 aa, unidentified
MDAQYVGIDVSKDRLDVHVRPSGEAFVVARDDKGLAALLERLHAITPRLIAVEATGGYENVVAASIGGAGLPLAVVNPSQVRHYAQALGKRAKTDPVDAEVIARFAEATRPEPRALPDEATQMLAELVTRRRQIITMMVAERQRATRLPKRLRKSCERVVRMLEKELAALDIDIDITVRGSPAWRAKEDLLASVPGIGSITARALIAELPELGQLDRRCIASLVGVAPFTRQSGQWRGKAFIGGGRRSVRAALFVATMAAVRHNPTIRAFRQRLLAAGKPKMVAMIACMRKLLTILNAVARDQKSWHHA

SEQ ID NO: 111194 - protein, 342 aa, unidentified
MKSTTIAVDVAKEVLEVAVSVRPGQVSQQKRLSRAGFVKFCTDQPPATVLLEACGSAHYWARRLQSIGHRVVLLPPHTTRPYVFRNKTDRTDTRGLLEAFRNEDIHPVPVKSVSQQALTALHRLRSTWLATRTARLNTVRGLLREFGCTIPIGAHHVLARTWDLLADPESGLPDALRPGLAAACTEIRDIESRIRVVEDQLQALADQTPAVARLRSIPGVGLLTATALVAFVGDVQRFPSGRHFASYLGLTPRERSSGLVRRLGAISKRGDVYLRMLLIHGARAVLWAAKKRTTPDRLRVWALHLEKLRGHNKAAIALANKLARIVWAVWKHDVDFREVTAA

SEQ ID NO: 111195 - protein, 350 aa, unidentified
MAMLAESVDAVIGVDTHTDTHTACLIEPTGRQVATVTIEASSHGYAALLAWAVDHAPGPRLMWAVEGSRSHGAGLARVLLAAGQQVVEAGRPERATRRPGGKSDPVDAYLAAREALSAVHHASPRADGDREALRILLVAREHANNTRTAAVNVFKALLLTAPDQLRESLRHQSTPRQTAACAVLRAYGRHSTSERILRQTLRTLAQQIRLLDKEIRANERQLQQLVSALMPALLAEPGVGPISAAHLIVAWSHPGRCRSEAAFAALAGVSPIQASSGRITRHRLNRFGDRRLNRALHTIVNWRMIHGHEPTQHYLTRRRAQQKSDAEIRRCLKRYAARHLFRVMETATTT

SEQ ID NO: 111196 - protein, 375 aa, unidentified
METTRQALMNDTSVVRILYMALELSGDKWKVAIADGQRAPSQRSIAAGDTSELLQVVEKAKTRCRLPCVVRVLSCYEAGRDGFWLHRWLLEQGIENVVVDSSSIEVNRRARRAKSDRLDAAKLYEMRIRHSVGEKRLWRVVRVPSVQQEDERRVHRELERLKRERNAHINRMRSLAVLHNVRLGKVGGRGWSERLPQLKEQLPAGLWAEIERESVREQLVCQQMHTLEKSRQEQVKHMSAGPLVALLKLRGIGLTSAWLLTRELFGWRGFGNRRQLAGCAGLNPSPYDSGDCQREQGISKAGNRRVRALLVELAWYWLRYQARSALSAWFTRRFAAGGKRMRRIGIVALARRLLIALWRYVEHGVIPEGAQLKSA

SEQ ID NO: 111197 - protein, 388 aa, unidentified
MQTAADHPEAPTAIRHDLGAIFISLELSRSTWLITSLSPGGGEKMSKHSVRGGNVAGLLERFAQLQEKARARTGRTFPIIVIQEAGLDGFWIHRVLQNEGIESYVVDPASVATSRRRRRAKTDRIDGEALLRTLLAYKRGEPRVCAMVKATTPEEEDRRRLCRERKVLTNERVQHVNRIKGLLFGQGVSGYEPLRRNRRQQLNELRTGDGRPLPKHLKTQISRELDRLELLLEQIKAVETERDALLAAQKVALPGPAAMLLDFNGIGPEFTAVLWSEGLFRHFDNRRQVASYAGLAPTPWQSGSVDHEQGVSKAGNPRLRTTLIQLAWLWLRHQPQSALALWFKERVARNGGRHKKTTVVALARKLLVALWKYVTAGVVIEGAVMKTA

SEQ ID NO: 111198 - protein, 293 aa, unidentified
MKIYPRTRPIQRYIALDIHKEYILAGGMNTSQVWVLSPHKIEMGKFREWAKKNLCETDAVVIETTTNVWDIYDIVAPLVGHAVVAHAGAVRQIAEARVKTDKEDVKRLIRLLIADILPEVWVPPLPVRELRRLISYRQRLVKTGAVFRNRLQSLLHSHNLVLPEEGLVSQEWWSRQEKISLLEKLQIGQEIALLAEIEKHKAEVDQELGKQSLGETWGRDAVRLMQLPGIGVVIAMTILSAIGEIQRFENAKKLVGYSGLGAGVHDSGQEHVEKRITKSGRKELRWAMVEAAW

SEQ ID NO: 111199 - protein, 345 aa, unidentified
MSEFYEGRQFVGMDLHRRRSVLVRMSETGEHLETVRILNDRDVLADVMSRAGESPEVVLEATYGWYWAADALAELGATVHLAHPLAVKAFSYRRVKNDQRDAADLADLLRMGRLPHAWIAPPETRELRELVRHRAKLVAMRSQCKAHVHAVLAKGGIWVPMTDLFGVEGNLLLDNVTMPAPYQARIASLRRFIEAFDAEIDLFTGLAQRRLTHHAGYTAIQQIPGIGPVLAAVFVAEIGDVHRFPGPAQLTCWAGLTPSHHESDTTVRRGRITKQGSCLVRWAAIESVKSLPDTSHIGAIRDQVAHRRGNRNIGAVAAARRQLQLVFYGLRDHHIRALHHPPRAA

SEQ ID NO: 111200 - protein, 338 aa, unidentified
MVYGAIDLHTRRSEIRMVDSEGRVIREQRIGTTADRLVAAFAGVGPVRILLEAGTESEWVACALEGVGYEVVVADPNYAPMYGDRHRRVKTDRRDVAALAEANRHGWFRRAYRRSVGQRTLQQQLTSRSTLVQLRTKTISVIRSLVRQEGYRVASGPAEGFPRRLEAAGLPTALQERLAPLRRTVEQLTAEILALDTALETAAEADAVVRQLQTVPGVGVIVALWFRAFIDTVARFGSAAQVSAALGLVPREDSSAERRHRGHITKAGPSALRSLLVQAAWACWRSKRNGPLGAWVDAVARRRGRRIAVVALARRLSRILFAIWRDGTVFQPAGLAAA

SEQ ID NO: 111201 - protein, 358 aa, unidentified
MDTREEIIVTMRNKPRDAAVFGIDIGKNVFHVCGLDSSGSPVRRASFRRETLLQFFSRATPTIVGMEACPGSQWLARKLKALGHTVRIVPAKFVKPYVKSNKNDVIDAEAIAEAVSRPTMRFVEVRSPEQVDLQALHRVRDRLVAQRTRVICQMRAFCLEYGITMHHGVGRFKVELPRVLADEENELTPAMRRLLATLFEDVRGLEARIAEVTTEIESTAAADDVGRRLMTIPGIGPLVATGLMAAVGRATQFRKARDLAAWLGLVPREHSTGGKTTLLGISKRGSSYLRRLFVHGARSCLLHLDRSRDRLGGWLAGLQQRMHNNKATVALAAKMARIAWVVMTKPGATYERRVAAAI

SEQ ID NO: 111202 - protein, 340 aa, unidentified
MEPTTVAIDLAKHVFQIHFVEPDTGTIHSKAMRRAQLLPFFTNRPPSRIVMEACGSAHYWARKLSALGHDVRLIAAQFVRPFVKSNKNDTADAAAIWEAAQRPGMRFVAVKTEEQQAMLALHRMRQQLVRFRVMQVNQLRGLLYEFGVVLPQGRRTGIAAAKIALADLADQLPAMLTDGLQDQLSRLLALDEQIQRIEQRITEWRRSDEACRRISDVPGVGLLTATAAVAVIGNARTFKSGREFAAYLGLVPRQNGSGGKVKLGGISKRGDVYLRTLLIHGARSVISKARHLPDHLKSMLKRRPTNVVAVALANKMARIIWALLAYRRTYQVPLAPPLPA

SEQ ID NO: 111203 - protein, 361 aa, unidentified
MKCVQSNKLDFSGQNIYVGIDVHLKSWSVAILSEHSVLKRFSQSPEPEALHKYLVSNYPGANYFSVYEAGFCGFWIHERLTDLGITNIVVNPADVPTMSKEKLRKTDAVDCNKLARELRSGSLVGIYVPGVETLELRSLIRMRNLIVKDSTRAKNRIKSLLRFHGVEIPEEFTRCSIGCWSKRFLSWLQALELSTEYGKKTLELHLEQFIRLRKMLLQETRAIREISRKAPFEKPIRLLTSVPGIGVTTAATLMVELDDIVRFKNADHLASFIGLVPMCHSSGESNGTWDITIRRHFMLRCLLIEAAWIAIRKDPAMTVSYTEYRKRMNPQKSIVKIARRLVNRIYYVLKHEKEYIPCVVK

SEQ ID NO: 111204 - protein, 446 aa, unidentified
MSPRSTESIVPHSALINPNAAGIDVGATELYVAVPTDRCEKPVRCFSTFTQDVHALAEWLKSCKVSTVAMESTGVYWIPVFQILADHGLTVCLVNARHVKNVPGRKTDVTDCQWLQFLHSVGLLRGSFRPPQQVCALRTILRHRDAMIKLTNVHIQHMQKAMTQMNIQLHNVISDITGTTGLAIIDAILAGERDPETLAAFRDARVKSSCEIIAKSLVGDYRPELLFTLRQSLESYRHLRKQIVESDETIKSLLANFDSCVDVEEKPLPDTQKKRRKKDDPHQMRQELYRITGVDLTEIPGLQTTSAYTILAEIGHDVSSFSSAKHFASWMGLCPNNRVSGGRVLSSHTKPVASRAAAALRMAATTLLRSQTALGHYYRRMRTRLGAPQAITATAHKLARIIYQMLKTKTPFNQTLQSEYEQQNIRRRQIRLETQAKSLGFALVPL

SEQ ID NO: 111205 - protein, 342 aa, unidentified
MFEEYGHIVAIDYAESNVAIARLTKHGKEPKVREGKYRVADLRLYLEQLTGTILLVIEETTTSQYLYCELLASVERILICDPYQNKLLSTGAKTDKADARKLALLARAGLLKEVFHTTDAIINLRKLESAYQDVVVAGVRLQNQKSALYRQVGRSYREDGKLTEPNAAFIVQQLNQGIADYEARKAEYEAEFGRRRRQDKRLQRLVEVPGIAVIGAVKILARVIDARRFAGSSKYLAYCGLVWEELISGGRSYGRRRPRYCRTLKSVYKTAAMAAIGGKNDLNDYYEYLRECGVAEHNARHAVARQVAIATYGMLKTGTRYRPYLWREHLEKHRTASAAAER

SEQ ID NO: 111206 - protein, 455 aa, unidentified
MAKQKTRKAPALETVNTGAAAVDIGSREHMAAVNPDVTDMPVRAFGTFTHNLHDLAAWFKSHGVTSVAMESTGVYWIPAYEILEQHGFEVILVNARYAKNVPGRKTDVSDASWLRQLHSYGLLRGSFRPTAQIATLRAYLRQRERLVEYAAAHIQHMQKALMEMNLQLHHVVSDITGVTGMRIIRALVGGERDLDILASYRDVRCHASVETIKAALNGNDRPEHIFALTQSLELYDFYQSKMLECDRNLEAMLDVLAAEQEHDPGQLPKARTKTKQVGTPSFDVRAALFSVLGLDLTQIHGLGPSLSLKLVGECGTDLRAWPSAKHFTSWLCLAPGNKISGGKILSSRTRRSSSRAAALLRLAAVTIGRSDTALGAFYRRLAARAGKAKAVTATARKIAVLFYNTLRYGMTYKDPGASHYEERYRNRVLGNLKRRAKSLGYDLQELPTEADMAVS

SEQ ID NO: 111207 - protein, 394 aa, unidentified
MRRESREVMSELVAQLRKQVEGESVVSADKDKGVPDGESPNLDRLTVGVDLGDQWSHYCILGLRGETLTEGQFRTRRQEVAEFFQDLARSRVVIEVGTHSAWVREVIAELGHEVLVANARRMEGSKRRRRKNDRMDAAKLARLGRVDPQSLYPIQHRSTEVREDLLVLRAREALVESRTKLISAVRGLVKSMGTRLSSSSSDAFSKKVAAEIPQQIRDTIQPLLRLIANLSEEIKCYDQRVEQLAQEKYQHTKLLRQVTGVGPVTALAYVLTLETPLRFARSRDVGPYLGLVPRQEDSGDCQPQLSISKAGDRMLRKLLVGSAHYILGPFGPDTDLRRFGKKLCERGGKNAKKRATVAVARKLAVLLHRLWISGEVYEPLGHVSFSPMTQTTAA

SEQ ID NO: 111208 - protein, 354 aa, unidentified
MSVYVGIDVHRKRSQVAVVGDDGGVQLNRNVVNGSEPMLGLLGGLPPGTPVAFEAAFGWGWLAGLLEDYGFEAHLVHPLRCKAIASARLKNDKVDAATLAQLLRADLLPEAWIAPPEVRALRALLRHRIQLVRLRTLLGNRIHAVAADHGYDRPAGYWSGPGRAWLACLDLPPASRQVIDDDLTLIDALAGRITGLDEQVHQRARGDPAVKVLTQLPGVGEFTALVILAETGDITRFGSARKLAAWAGLTPIVRSSDRTVRHGHITKQGSAWLRWALGQAAQTAKRSPDFAATYQAIAARRGKQIATTAIARKLLTRAWHLLTDAGLTGPQTSPPPRLSPGNGAASPGRARQST

SEQ ID NO: 111209 - protein, 348 aa, unidentified
MTIVGNNPNAVIGGVDTHVDVHVAAAVNHVGGVLGVEAFATTRAGYCQLVSWFRSHGELTLVGVEGTGSYGVGLSRYLARAGVAVVEVDRPNRQTRHRQGKSDPVDAVAAARAALSGQATGLPKSRDGNVEAIRVLGIARRSAVDTRIETLNQLRHVVFTATPEIRAKFSGLTAISLANKASTLRPRPGDDPVRYTTLVTIRALGQRVQYLREETKRLNRLLRPLIRDTAPGLLEVFGVGFDTAAKLLVAAGDNPQRIRSEAAFAHLCGVAPIPASSGKTRRHRLNRGGNRQANSALFHVVITRMRHDQATRDYVARRLAEGKTMGEILRVLKRYVAREVFKQLPRTA

SEQ ID NO: 111210 - protein, 341 aa, unidentified
MNIKRIGIDLAKQVFQLHGVDGQEKAVLRKQLPRAKMLMYFQKLPPCLIGMEACSSAHYWGRELQKMGHTVKLMAPQFVKPYVKSNKNDANDAEAICEAVARPTMRFVAIKTIEQQDIQAVHRIRSELVQQRTAKVNQIRGLLGEYGLVVGQRIDVLRKALPLILEDAENGLTVDFRTLLEGLQQDLITLDQRVDEMDKKIKLLASSNEDAKRLQQIPGIGPITATALISAIGDGKQFKRGRDLAAWLGLTPRQHSSGGKDRLLGISKRGDAYLRTLLIHGARAVLKVVGNKEDPRSRWIQNLCGRRNKNIAAVALANKNARIVWALLTKKTDFLPEGKPA

SEQ ID NO: 111211 - protein, 319 aa, unidentified
MNSETIYAGLDVAKATLDVGLRPTGEAWQVANDESGISELVARLRRLTPALLVCEATGGFERPVVAALAAAGIPVVVANPRQVRDFAKATGQLAKTDRIDAAILALFAERVRPTPRPLADEAAQLLDALLTRRRQLLEMVVAEKNRLGFAPRPLHRGIQQHIRWLEHQVDDITGELAAQIEASPVWRAQDDLLQSVPGIGPIVSAVLLGELPELGTLSHKQIATLVGVAPLARDSGTLRGKRMIWGGRAPVRTALYLAALCGRRWNPQLKVFYDRLIAAGKPKKVALIACVRKLLTVLNAMVRDHERWAAPAPSVQHSC

SEQ ID NO: 111212 - protein, 398 aa, unidentified
MTESSDYESVQVFIGVDVGKDTHHAVAINRSGKRLFDKALPNDENKLRSLISDLKQHGQILLVVDQPATIGALPVAVARSEGVLVGYLPGLAMRRIADLHAGEAKTDARDAAIIAEAARTLPHALRTLKLADEQIAELSILCGFDDDLAAQTTQASNRIRGLLTQIHPALERVLGPRLDHPAVLDLLQRYPSPEKLASLGEKKLAAQLCKLAPRLGKRLAADIAQALAEQTVVVPGTNAAAVVLPRLALQLITLRKQRDEVALEVEQRVLAHPLYPVLTSMPGVGVRTAARLLTEVACRAFASAAHLAAYAGLAPVTRRSGSSIRGEHPSRRGNKALKRALFLSAFAALRDPISRAYYTRTMSQGKRHNQALIALARRRCDVLFAMMRDGTFYTPQAS

SEQ ID NO: 111213 - protein, 414 aa, unidentified
MKKDTPIEYAAQIGLDWSDRKHDFCIKIKDKEALEYGVVKHDVQEIEDWALALQKRFQNQPIAICLELKAGPVVYALLKYSFIVLYPIPPKALAKYREAFTQSGAKDDPSDAYLQMDYLVKHPEAVKPLVPDSPETRILQSLVEDRKDLVCDKVRLTNRITAAVKNYFPQLLQWFDDIDTQLFCNFVTKWPTLEQVRRARKDTIRNFFIANRSVRKSVIEKRLALIKEAIPLTEDQAVILPKSQLVGVLVVQLSEILQAISQYDREIARRFREHTDYVIFDSLPGAGPVYAPRLLAAFGADRDRFSSAEEVSRMSGIAPVLNRSGKSAWVHWRYSCPKFMRQTFVEWAYQSKQYSYWAKEFYDKKRAQGMDHQAALRALAFKWIRIVYRCWKDRTCYDESTYLFALKKREAAVG

SEQ ID NO: 111214 - protein, 339 aa, unidentified
MIGLDTSKSAFQIHGVNETGKAELKRKVRRSELIAFFEKQESCTVVMEACGAAHHWARILTGLGHTVKLIAPEAVKPFVKKGKKNDAADAAAICEAASRPDAQFVPAKTVAQQGILALHTVRSLLVKQQTMLANAIRGLATEFGHVVPKGLHNLEPLVALVDADEAMPAQARQAIAELHERFGELAKGIQSCEAGIVKHARNDATARRLATIPGIGPITASLTAATVVDISLFKTARQFAAWLGLVPRQHSTAGKTRLGRITKAGNKEIRKLLVLGATSMLGRAEGWHSALGAWLRDILQRRPVRLVTVALVNKMARIAWAVMTRNEVYRAQGGVAAKA

SEQ ID NO: 111215 - protein, 339 aa, unidentified
MKINVLGIDLGKSALHVFGVDEQGKVVLRERMTRRKLREFMVNLPPCLVGMEACGGAHYWARVFKEHGHRVRLMSPQFVKPYVKSNKNDFLDAEAICEAVTRPTMRFVPIKSVEQQDIQSLHRARELAMSHRNAQANQLRGLLLEYGLVVPQGIGKLRKRLPEILEDAENGLSDATRSLLAALGDELVRLDARVGEFDRQIKALSQGHEVCRRLMSIPGIGPLIATALLAAVGDASVFKSGREMAAWLGIVPRQRTTGGRAVLLGISKRGDTYLRTLLIHGARAVLRVAHKRDDKRSRWVVALQGRRGPNVAAVALANKNVRTAWALLTRGTTFEVQAA

SEQ ID NO: 111216 - protein, 370 aa, unidentified
MAEPTPLFVGLDVHKDSIAVAHAQGQSADPPVFLGTIGTRQADLDKLIRRLQAKTPALVFAYEAGPSGYHLHRDLTARGFACRVVAPSLIPKKPGDKVKTDRRDAVALARLLRSGDLTPVYVPSVDDEAIRDLCRARDAARLTLKNAKLRLKSFLLRLGLPYTGRAAWGDAHRRSLAKVICPTPAQQIVFQESIRAVDEQVDRVQRLETELRELGPAWRLYHVVEALQALRGVQWLVAITVVAELGDLTRFDNPRQLAAFVGLIPSEHSTGGRRRLGGITKTGNGRARRALVEGAWAYRHPAKVSAHIQRRIETLPQPLQDIGWKAQVRLCKRFRRLVAHGKHPNVAVTAIARELIAFMWAIAKVVPITA

SEQ ID NO: 111217 - protein, 356 aa, unidentified
MYGLKHQKEKRSMDHFAGLDVSVKDTNVCIVDDSGKIVREVKVASEPDALLAVLRDRTYHFKRIGLEAGPLSQWLFSAMAEADLPVICVETRHMRAVLKARINKTDRNDARGIAQMMRVGLYRPVHVKTLRSQKLRLLLTHRKLLQSKAIAVDNDLRGTLRNFGLKVGMVGAAKFEARIRELVEGLPDLAILVEPLLVVRRVLREQVGILHRRLLAIVRDDEVCRRLMTVPGVGPVVALTYRATVDVPARFRKSKSVGAVFGLTPSRDQSGERDRPGAISRCGDEMMRTTLYEAAQVMLMQSAKWSWLKAWAMKIARHRGRNKAIVALARRLAVIMHRIWVDGTEFRWTREEAAAA

SEQ ID NO: 111218 - protein, 411 aa, unidentified
MVKENFIYVGIDLHKETHTAVMIDCYNQKLGEITFPNRPADFPKLVTKVKKCNTDAKEVVYGLENAYGYGRPLAVWLIDKGYFVKDVNTAISHRQAKHRGAMYRKSDSDDAEAIALATLNMLDKLPDACPNDAYWSLGQLVHRRDNIMKQRTRLVNQLHEQLCIAYPSYKQFFNDISRPTALYFWEHYPSRKYLKGKSVEDLRTELVPVSHNRCSTKNCEKILDAVASDKVKNNAYQDARDMVTLSIVSDLQHYDSQLAEVDKMLEQMYKMLGCTLTTIPGVNVITAVKILAEIGDIKRFSNANKLAQFAGIAPLHLSSSGKGKDVATKQGNRRLQATIYFLAIQMVQVSSKGTPRNSVVRAYYEKRKAEGKTSQQALICISRRLISIIYGMLKHGTEYRMPVVESAGENR

SEQ ID NO: 111219 - protein, 379 aa, unidentified
MAQCTRHDDVLARSTRVCIGLDVHKWSWHVTALAAAVKVFSGAMPAEYAALKSLLERFEDCEIVAAYEAGCCGFSLYDALEEDGIRCIVTPPSLMPVEIGNRVKTDKRDSMKLARLLEARLLKAIFVLTEEQRAHRDLVRTRHQLVVHRVAVMAQIKMKLLFYSLRVPGGPRAAWSRQYVDALRALPYPYPALRTAIEALLTALEQLKAQIAALNREIMDLARTDMYGERVKLLTTVPGIGVLSAMELLTELGDVARFRSNDELASYLGLTPCEFSSGESVRQGHITRCGNARLRRTLVEDCWCLVRTDPAMRKKYERIKRVRGGKRAIVAIARTLVGRIRHILLHGEPYKLATTTNGRAHGSSRGGENKTLAATEVTA

SEQ ID NO: 111220 - protein, 343 aa, unidentified
MEAYAGKQFVGIDLHRRRTVIVRTTEAGEVLETVRIVNDVERLASVMARAGECPEVVLEATYGWYWAVDALQADGASVHLAHPLGVKAFEYRRVKNDVRDAADLADLLRMGRLPEAWIAPPATRELRELVRHRAKLVGLRSHCKAEIHAVLAKCGVQVLMSDLFGVAGTALLDRLDLPSPYAARIASLRRLIDDLEFEIDLFAGMVRGRMTQEPGYTAVQNIPGIGPTLAAVFVAEIGDVTRFASAPKLTCWAGLTPKHHESDTHVHRGRITKQGSRLVRWAAIESVKNIPARSVAGVLRERVADRRGRNVGAVAAARRQLEFVFYALRDGHVRALEHLPRVA

SEQ ID NO: 111221 - protein, 349 aa, unidentified
MRFYNGQHQHWCGIDLHARTMYVCILDEAGQVLVHENRKATPEAFLEAVAPYREGLVVAVECVFLWYWLADLCAAEGIDFVLGHALFMKAIHGGKAKNDRIDSLKIATLLRGGMLPQAYAYPAGMRATRDLLRRRLHLVRQRGQLLAHIQMTAQQSNLPPLGRRIAYPANRAGVAEHFEDRAVRRSVAVDLALLERMDGIVRELELDLVRQAKQHDPQAFQLLRSIPGVGKILALTMLYEIHDIHRFGRVQEFASYARLVKCAKESAGKRYGTSGAKMGNVHLKWAFSEAAVLFVRHSAEGKKALARLEKRFGKGKALSILAHKLGRAVYFMLRRGKAFDRERFLATMS

SEQ ID NO: 111222 - protein, 345 aa, unidentified
MDHYAGIDVSLATSSVCILDATGRIVREAKVASEPEALVSFLTGCGYHLVRIGLEAGPLSQWLHAGLVGAGLPAVLVETRHVKAALSAMTVKTDRNDARGIAQLIRMGWFRPVHAKALPAQEVRTLLTGRKLLQSKLLDLEGGIRGMLRGFGLKVGPVGAAGFERRIRELVTGQATLERVMEPMLRARQALRSEFMNLHRDLLRIVRTDDICRRLMTVPGVGAVVAITFTAAVDDPARFRRSKDVGAHFGLTPRKYQSGETDRAGRISKVGDAMARSMLFEAANAMLTRATRFSALKAWAMRVASRHGMTKAKVALARKLAVVLHRMWVDGTEFRWGREPAGAAA

SEQ ID NO: 111223 - protein, 369 aa, unidentified
MPHVTSIGLDVHARSVAAAAFNPFTGEVVRRSFGTDASEIAEWALGFEDPRACYESGPTGFHMARELRALGLDCAVAAVSKMQRPAADARRKNDRRDAEFIARMLATHNIVEVPLPDAAVEAARDLDRALDDATVEYRRARQRLNMFLIRLGHVWDERNADGTRKGSWTRAHWRWISGIRLEGPQRDALEYYVTAARCAESDKRQLERRVVALAGTDRWRPAVEALSCIKGIDALTAFRLAAEAGSFTRFRTAPAFASWCGLVPSERSSGETERRGGITKTGNRLARTALVESAWHYLTCTPRPKAPAPGADVPAAIRARADDCTARLCRRREALAAAGKSSCKANAAVARELACWVWEIGRRAEGTLG

SEQ ID NO: 111224 - protein, 508 aa, unidentified
MDWCEANGVDYLFGLAGNDVLHAQIRILADDLCVRRTEDEQEKRRTWTEFRYAAKSWTKPRRVVARLEATTRGFDARYIVTTLEGSAEYLYQTAYCARGQAENFIKLHKTQLASDRTSCRSPRANQFRLILHTAAYCWCGRPPTASTCQNEVVADLRQRRPSVEQISRIGMDTSKHIFQLHGVNTAEEPVLRKKLRRTEMVVFFATLPPTVLAIEACGGSHHWARLLQSFGHEVKLIAPQFVKPYVKRGKNDAADAEALCEAMSRPAMRFVPVKTAKQQAALMLVGLRDRLIRNRVQLANAIRGYAAEFGLTAAKGVCKIEPLLDRAAADETLPALARELFAFHAAEYAQLQEQLEKVEAKLIAWHRADECSRRLAQIPGVGPIGASMLVMKTPTPEAFRSARHFAAWLGLTPKDHSTAGKVRHGVITRAGDAALRSVLVVGATAVIRQIRYGRGALSPWLLDLLKRKPPKLAAVALANKIARIAWKLMVSGQTYRVHAKSPAIGRAA

SEQ ID NO: 111225 - protein, 403 aa, unidentified
MNAVGIDVSKGKSMVAIMRPFGEIVSTPFEIKHTTSDINSLVELINSVEGESRIVMEHTGRYYEVLAHQLSEANLFVSAINPKLIKDFDNDSLRKVKSDKADAVKIARYALDKWQNLKQYNVMDELRNQLKTMNRQFGFYMKHKTAMKNNLIGILDQTYPGVNTYFDSPARSDGSQKWVDFASTYWHVDCVRKMSLNAFIDHYQKWCKRKKYNFSQSKAEEIYGKAKELVPVLPKDEITKLIIKQAIDQLNSASVTVEELRSLMDKTASKLPEYPIVMQMKGVGSSLGPQLMAEIGDVSRFTHKGAITAFAGVDPGVNESGSYEQKSVPTSKRGSSGLRKTLFQIMDVLIKTHPQDDPVYQFLDKKRAQGKPYYVYMTAGANKFLRIYYGRVKEYLSSLPESE

SEQ ID NO: 111226 - protein, 343 aa, unidentified
MLAITTVGLDIAKSVFQVHGIDARGSVVVRRQLKRRYVLAFFKKLAPCLIGIEACATSHHWSRELQALGHTVRLIPPAYVKPYVKRQKNDAADAEAICEAVQRPSMRFVPTKTPEQQSCLMLHRTRHLFIRHQTAIINTIRAHLAEFGIVAPVGRNGVEDLLYAVADQRDERIPEVARACLEALGALLSKLKAQILEFDRQINAWHLSNAMSRRLDELPGVGPALATALVASVADPKAFRSGRDFSAWIGLVPKQNSSGGREKLGSITKQGDRYLRSLFTAGALAVIRYAKIHGTKHRPWLARLLERRPTKVAAVALANKIARMAWAMMAKGERYREPIALAR

SEQ ID NO: 111227 - protein, 357 aa, unidentified
MVESKTEAKSSEVGVTNPYRQTEHCDKIHGYRCDKGVGVIGIDISKDHLITSRGRVRKYKNNKEGYEEILEMKPCTIVLEPTGVYAIRPSQYFKERGIKVLQVSPNILSREKEFRGKKTDFYDAEKLENMVDKAKEYEYNSLRELVTLYLFLKDIEVKYKNRLKRALFLVSDNDKLNKERLERLAKGDFTQEELYQLEYTPIVLEEIKVLAKTLLETQEKLKEVRRMIEEQVPDNHVLLTIPGVGRLAAGVIIGVVGDVKRFPKPESFVAYCGLDPLVERSGKAVISKGISKRGNKYLRRLFYFLADMNYSRNHTLLKFYEAHKDSLQGKKLYTALARKLARVVWSVWYNNRPYEPK

SEQ ID NO: 111228 - protein, 364 aa, unidentified
MDPPLKDGVIMRQHRISIFKKRRRSMKDIKILCFDISKDVFQLCVFDEWGKVIYTRRVKRAQYVSTVASLKVGCVVMEACGGANHWYRTFMGMGIPTQLISPQHVKPYVKSNKNDRNDAQAIAEAASRASMRFVRGKTVEQQDVQALLKIRDRLVKSRTALINEIRGLLQEYGLTMARGAKRFYEELPLILASEAVGLTPRMKRVLNCLYTELLNRDEAIGDYEEELKAVAKANEDCQRVQSIPGVGYLTALSVYASVGDIHQFHRSRQLSAFIGLVPRQHSSGNKEVLLGISKRGNVMLRTLLIHGARALLRHVKNKTDKKSLWLKALIERRGMNRACVALANKNAPIIWALLTRQETYRCGA

SEQ ID NO: 111229 - protein, 345 aa, unidentified
MNVLIGVDPHKATNAAAILNDHGELLECANFAQDRAGLRALERWAKRFPVRRWAVEGANGLGRPLAQKLVAAGETVVDVPPKLSAKVRVLSTGNARKNDALDATFTALAALRNERLARVHPEDRTEVLRLLSERREDLVAERTRFLNRLHGLLRDLVPGGVPGTLSADRAARILRRLRPRRKWRSAAESVRRRLASELLRDVRALDRRISDLDERIRKEVEESGTSLMEIFGVGPILAAKIIGMVGNVTRFPSKAHFASYAGVAPVEVSSGEVVRHRLSLAGNRRLNWALHMIAINQARYKGQGGSYYRKKVAEGKTHREAMRCLKRRVSDAVFKKLMLDLEEAA

SEQ ID NO: 111230 - protein, 354 aa, unidentified
MKRARKELQPGDKVFVGIDMHKLKWHVTVRTADFELFSGSIPGKWEALRRILDRYRGHRIYTVYEAGYFGFWLHDEIVEYGAECIVTPPSLIPQEYGNKVKTDRRDSRKLAHFLAKGMLKRVWVLTEKERYHRQVIRRRRQLIGDRIRSQSRIKAELQLHGLNLSAPHGKWTKIFLVNLGRIRFNNRFMQESFKRLLEQYHFLDEQIAKQTELLRELSETKLYRERVEILMTIPGVGMIAAMELLLELQDIHRFQRADQLAAYVGLTPSQYSSADKVRMGRITCVGKNSLRAMLIQASWALIRKDGVMREKYDKLKARSGGKRAIVAVARTLLIRMRRLLLDNEPYVVGLIATN

SEQ ID NO: 111231 - protein, 341 aa, unidentified
MKRYFVGLDVSKDETAVCLRDDRGEIVASFKKPTDPDVLLRALSKDLIHIVCVVLETGRMANWLYDELSRRGLPMVCIDARQAHAVLSQMHNKTDENDAAMLSELARTGFYKKIEVKSRLAQERRALLRAREVAIKMRMNTENTIRGLLASFGIRLPKHLKTYEQRVQKVLEGQIVLAAIVEPLLTLRTEALRQAAILTKEMTRHLRDDEACRRLMTIPGVGAVSAVTFVATIDTPDRFKRSRSVGAYIGLTSRRYQSGDIDYGGRISKRGDRMLRTVLYEAANTLLCRVKSGPGQSLKDWAMALKKRTSHKKAVVALARKLAVIMHAIWKDGTEFEAKEA

SEQ ID NO: 111232 - protein, 396 aa, unidentified
MQELITGFVGLDAHAESTAIAVAEAGRAAPRFVGSVSARLSELTKALSKLGAPHSLCVVYEGGPCGYALARELTSLGYRCEVVAPSRIPRRPGERIKTDRRDALNLAGLAPAGELVPVTIPDERDEAIRDLSRARVDAVRARLKARQQLKALMLRHGQRYSGKTSWSAAHERYLARVSFAHPAQDMAFTEYRQAVAEAEARVQRLRESLRREVEHWRMHSLLSAVMTLRALELVAATTVVAELGDLRRFAHPRELMGYLGLVPSEHTSGSRRRLGAITKTGNGHVRRVLIEAAWNYRFLPASAPLCRSVRSDNRPISARSPGARSCAGITATGGSRHAGCSTTRSASRSPANSPPSSGISAGTLHRAHERGTRPLEDHGHDVTALTPDQEREARTR

SEQ ID NO: 111233 - protein, 323 aa, unidentified
MTSATLGIDVSKATLQLALLKGDSRPQKKKVTNDPSGLAELSQWLSQQKVSSVHACLEATNTYGHLVSQHLYQQGHPVSVVNPSRIQGFAQSQMSRTKTDSADAAVIARFCRVMQPQLWKPLAPEAEQLQQLSRRLEMLQRMIVQERNRLGTAIVELHEEIEAHIEFMQLQINRLEEKVSQHIEESEVLKRVLKLLVSIKGISTRSGTRILAEISQWQEFGSARQLAAYAGLTPQEKQSGSSVQGRARLCKVGNAHLRRALYFPALTAIRWSEPFQVWAEQLRGRGKTKMQVVGAVMHKLIRVIYGVLKSGQPFNPDLLTARA

SEQ ID NO: 111234 - protein, 408 aa, unidentified
MARYYLGVDWADQSHQLYVSDESGRKIRELEVQQTADGLAELGRWLEESRGQGIELWAAIEKPEGRVVDFLLDHGVVVYPVNPKALDRARDRFRMSPSKSDGFDAYVLAEFLRTDHAHLRALEPNSAEGQELKMLTRDHQRLGRQKTRLLNQIGITLKEYYPVPLEVFESLDTKIALDFLKAYPTPQALSKLTRRGWKRFAKRDHHLSEARCSELWDKLNKPQLAVPTHVVRAKAKLLAALVMQLEASVKAVDSYSQEVQSFFAAMPAAEIAKTLPGGKSGTTVASIWAELGDVPKRWNSFRHLQAEGGAVPVTKASGKSRMVQFRFACNKHLRQAMYWFSFNSLQRSEWAKKYYRNQRAKGHSKHESLRALGAKWLKIIFVMWRDHKPYDENYHLANIARQMMRQAA

SEQ ID NO: 111235 - protein, 370 aa, unidentified
MSDHSEAFVAFDTSKLRNAVAIADGGRAGEVRFLGEIDSTEAATRKRVAKRAAKYRQLTFGYEAGPTGYGLYRLIRKLGHDCIVAAPSLIPKKPGDRVKTNRRDAVGLAKLSRAGELTAVWVPDERHEAMRDLSRAREAARKDLKGKRQQVSSFMLRLGRHYPGKKTWGPAHMNWLMLQKLEHREQRIALEELLGAVRQESERVERLEQAIRDAVPEWSLAEVVTALQAMRGIDLVAAVTVLAEIGDLSRFQNPRELMVYLGLVPSDSSTGDTVNRGGITKAGNSRARRILVEAAWSYRHPPRVSREKQIKVAAAPRAVREIAWKAQMRLCGRFRSLTRKGKRPTVVATAIARELSAFIWAINREVMASR

SEQ ID NO: 111236 - protein, 457 aa, unidentified
MSKRRKRAQSKSFNLKSLPKQLQHINLNAAGIDIGSERHMVAVPEGRDEVAVREFGAFTADLIALADWLQQCGVTTVAMESTGVYWIPLFELLERRGFEVKLVDARHVKNVTGRKSDILDCQWIQQLHTYGLLAGAFRPADELCVLRSYLRQREMLTQTASMHIQHMQKALQQMNLLLHNVVSDITGVTGMKIIKAILAGERDPQVLASHRDNKCHHDSATIAKSLVGNYRIEHLFALRQAVDLYEIYQTKIGDCDEAIVTQVSAQPDVTDEPPPPEQKRTSARDRQRGGVNVRDLLFQKSGVDLFAIPGLAADTLLVLSSEVGFDLSPWKTVKHFSSWLSLCPGTKISGGKVLSRRVKRNPNRAAQAFRMAAATLSRSNSALGAFYRRIKARSGGKQAITATAHKIARIYYALLTQGATYVELGQQAYEQKYQERRFKHLMAQAKSLGFQLVPSQT

SEQ ID NO: 111237 - protein, 360 aa, unidentified
MIVQGTSVGLDVHALSVVAHGIDEETGKIARARLCPDYGEVLGWLGQLRAPVRVTYEAGPTGFGLARAITAAGMACLVAAPSKLQRPAGDRIKTDARDAAHLARLLRLGEITEVAVPEREIEAVRDLVRAREDARADLMRVRHRLSKLLLRQGIVYYGGTAWTCKHEQWLRRQRFDDRHLTAAFDHSFDAVLAATAARDRLDEQILEVAASPRFADPVNRLGCLRGISALTGLALTVEIGDWSRFTGSSIGAYVGLVPSEHSSGTSRVQGSITKAGNTHVRRLLIESAWHHRKSYSSAGPTLRARWAKVDPALRARGHTGNRRLNKRWQGFIDRGKNPIVANVAIARELAGWCWSLATLQ

SEQ ID NO: 111238 - protein, 366 aa, unidentified
MDSVVLAAGPIHLGLDVSKDKIAVGILRWEERVPDTEMIFNDEASVRRLVNRFGDPGGLRVCYEAGPTGFGLYRLLRSMGVACDVIAPALIPKAPGDRVKTDRRDCRRLARLHRAGELVVIRVPTESEEAVRDLCRARAAVVGDRTRIRHRVSKFLLRHDRIWRQTAWTLAHEQWLTGQRFDEPALRTTYAHYRAMLCAREAELAALEADLAYWYTHGPFVEAVARLAAYRGVALVGALSIASEVGDWRRFPAARTFMGFTGLVPSEYSSGAAVRRGHITKAGNTHLRTQLIESAWAYQHRPNLGVTLRRRQEHVDAATIARSWTAQQRLCGRFRRLAAHKNNRNVVAVAIARELAGFLWAEMTAA

SEQ ID NO: 111239 - protein, 365 aa, unidentified
MAMTNIKEKSKKRETISFKGQQINVGLDVHKKNWSVSIYLEQQFIRTYHQESNGSILLKHLQTNYPEGIYRTCYEAGFCGFSLHRELTSLGIECHVINPSDVPQTSKGMLSKTDASDSRRLGEAFSKNMLRSIYVPKSSDEADRNLIRYRKRVQEDVRAKKQMIKSILNVLGIKIPVEHDKSYWTNNFMTWLKELTVNDVSNKNTITFLVEDVVLLRKRLFTTNKQIRIMSQTERYSKVYSLLITTPGVGLITAMTLLTEIGDIKRFDNFSKFNSFIGFCPSEFSSGEHIHKGKITIRCHKTLRSLILEAAWIAMRCDSALTLKYHELLKTKTAKRAIIIIARKLLSRLYTIWKTNTPYEKGIIK

SEQ ID NO: 111240 - protein, 329 aa, unidentified
MTIVTIGIDISKDKFDICLEIEGQERVSKVFRNSKNGRKAFLDFIPKDAQPDIGLESTGTYGRALVDLLHKHGYSIFVINPAFVSFYAKSLGRRAKTDQVDAKIICDYVRLHKIELRPWKPKPESVQKLTIINRALEDLKEDLIRTKGRIEACEHDTTLSQNVLHKLHNRQVKFLEKEISVLLKMASEVIGACPELKEKARLLQSIDGIGFITSLAFLAEIPDTIAFKSVKQLEAYVGVNPSTRQSGSSVRGRGTISKMGNSIMRKALYMPALSALRCNPIIQEFADRLKAKGKHPKVIIVAVMRKLLALMYGVLKNQKEFDRNYLKGN

SEQ ID NO: 111241 - protein, 310 aa, unidentified
MEHGKSSTVIAGVDVGKFRLDAAIGTQIQTANDAEGIKALRDWLDGHGVSRVGMEATGGYERPLRLALEAEGLEVVLHQPIEIKLYARLSRQHAKTDAGDARLIAAATAAIRRPAKRADPALLELGERLTAYEQIADQLMTLRTFKDSVSLIDLIAMIDRQIDQLKALKAALCRQLLEAVKACPWFKTRYGLLTSLPGIGPIVAVSLIVRMPELGQMQRGQSASLLGVAPHARQSGQWKGQRFISGGRTRPRPMIYLAALAARRYDKTLNTFANALIARGKPPKLAIVPIMRKLIEAANLVLKRQQPWTN

SEQ ID NO: 111242 - protein, 440 aa, unidentified
MAMRKRDDEVFPNAAGIDVGASSHWVAAPPHSAEESVREFSAMTEDLNAMADWLLGCGVDTVALESTGVFWIPVFEVLEQHGLKVWLVDARQMKYVPGRKSDVQDCQWLQKLMSLGFLRAAWRPHDDVCVVRAVARQREVLLTEQASWVQRMQKALVQMNIQLTEVLTDVMGMTGQAIIRAIVAGERDPKALARHRHRRVKASAEQITKALTGNWRDEHLFVLTQALAMYDDIARHLSECDAKLQALLTDLGQSKVDLGKVPRAGSKLRMEFDARQILANWAGVDLTRIDGLGVTAVMKILSELGADLSRFETVKHFCSWLGLCPGTKISGGKILSAKTKRSANRVRQALKMAAMSLSHSDSALGAFYRRLCSRMDKPRANTAVAHKLARMVYFMLTRGEAFVDKGQQHYEEQQRQRSIAALKRRAAALGFAINPTSAPA

SEQ ID NO: 111243 - protein, 418 aa, unidentified
MNEDGNTRGARRYVGLDIHKQYCVVAGVDREGRVLLQAVRVEHADLEGWLKKNLRASDHVVIESTTNAWHVYDLLFPLVERVVVANPIQVKQIAKARVKTDIRDTLILARLLAANLVPEVWVPPAHVREMRQLLSQRRQFVETHTQILNRMHSVAHRHHLQHERGKRFNEKNTLWQKDKRLSKVEQFQLELEMENRVYIEKQISRIGKEVAKMSHQKPWAQSMVYLMQLPGFGVITGMTVLAAIGEIQRFDSARHLASYSGLTPGLEQSGTKYREKGITKEGRKELRWALVEVAQRAVKSDPLWKHRFEGLQKRMHRNQAIVAVARRLLELVWYVLTRHQPYRHFSHERIAYKYLTWAWQMDEAARDGLTRQQFTRYYLMRLGIGHDLTRIALDPKHPRKISSEAELLAIRPELQHIE

SEQ ID NO: 111244 - protein, 335 aa, unidentified
MNYIGIDVHKDDSLVAVLDDDGEVVKEIRVQNANLDDVAEEYVGAKAAIEATGNYYTVYDTLDEHLDVVVADPSQTKAIGYAEVKNDRLDAKLLAQLRRAGMIAESYVPPEELRERRALVRGRKRLVEKRTDFKNEVHSLLDKHGITYDWDPFSVNGREILASEDFSLDVVGDQLLESFLSIIDELTAQIEELEEVIEETAASLEETQLLMTIPGVSFYSSLLITSEIGDIDRFDEANQVVSYAGLDPVVRESGDSRTEGSISKRGSGDLRWILVQCVQTAVHRCNDPYLGRFYARLKQRKNHQIAIVATARKLLVSIFHMLEREEVYDPPEVSA

SEQ ID NO: 111245 - protein, 382 aa, unidentified
MMKNSNMKRTGQTVTPSVLADRSKAKVVPSLFPKSSNSCPGYPSPHVAQGRARLEQVKIIKEDCLLETPIIFVGIDVCKAQLDVAIRPTAQTLSVTNDKAGIKTLIKHLEKLQPNLVVLESTGGLERQVMLALIGAEISVVMANPRQIRDFAKSTGQLAKTDRIDAAVLAHYAQAIRPKPRPLPDELTLELRSLTVRRRQIIDMIVAEKNHLATAPKAIKKRISAHIAYLEQDLDGADQDLDRFIQNNPLWKENQEILCSTPSIGPVSSRTLLAELPELGTIGRKQISALVGLAPFPRDSGTLKGRRTIWGGRASVRGVLYMAALVATRCNSIIRDFYKRLKAKGKPFKVALVACMRKLLTILNAMIKHKTRWSENFSHQTT

SEQ ID NO: 111246 - protein, 425 aa, unidentified
MDEHENSAAAAAAAAAAAAAGIDWAKDEHALCVVDGDGRKIFEGRFAHEEGALAELCASLVRMGVFSVAIERPEGVLVERLLGAGIVVMPIHPNQLKASRPRFRASGSRAKSDSFDAFCLAELARTDKHRFRVLTPDSDETKALRILTRSREELVGTRVALANRLRSELEAFWAGAAIIFSEIDSSISLAFLERYPSPKDARGLGEKRLLGFLRRNRYSGGKDACELLKRLREAPEGRAGEAEVQARREAVLALVETLKALTERIKRLEERIAQGVRAHPDGEVFLSLFRGQKATLTAASLVAEIGNCRERYPSSEALAAEAGMSPVAVESGRRKVAGFRRACDKRLRRAVAILADSTRHHNVWARDVYERARARGCDHAHAIRILGRAWVRVIFRMWQDGLPYDSAKHGNLRRLQTQKGLTQGV

SEQ ID NO: 111247 - protein, 445 aa, unidentified
MLPIIFKRIAGLDVHKKTVVATRMRLVTQEEVERETKTFGTTTPQLLELHDWLHEWNLSHVAMESTGDYWKPVYNVLEDTFETWVVNARHVKNVPGRKTDVIDSKWVAQLMMHGLLRASFIPPKPQRALRELTRYRTKLVQERARVVNRLQKLLEGANIKLSSVVTDVMGVSARAMLAQIVAGQTDAAVMADLARGPMRSKIPQLEKALTGIVQPHHRFVLTQQLDHIDFLDDKIETISLEIERQLESMNWPEEPAMPDAGEAIEEGTPVADQSELPLTWNTAVALLDTIPGVNRRVAEVMLAEMGLDMSQFPTANHLASWAGLAPGNHQSGGKRYSGRTTKGNKSLATIMVLGAWSAVRTKDTFLKSRYHRLAARRGKKRAIVAVAHSMLVSAWHMLTYQQPYQELGGDYFDERKKEAKVSYLVRRLEKLTGGSVSLEFQPAAA

SEQ ID NO: 111248 - protein, 348 aa, unidentified
MSITMIGLDTAKSVFQIHAVDAAGKPQLKRKLRREEVIPFFEQQERCTVVLEACGAGHHWARILTELGHEAKLLAPEAARPFVKKGKKNDAADAAALCPAASRPEATFVPVKSPEQQGVLALHSVRTLLVKQQTMLANAMRGLATEFGLVVAKGIHKLDELEAQVQAEASMPATAKQAFAELHGHSQATATRIAELEAQIVAHARQDKTARRLATIPGIGPITASLITATVGDTIGSFKSARHFAAWLGLVPRQHSTGGKTRLGRITKAGNGEIRRLLVLGATSMVHRAAQWNSAAGAWLRGVLERRPVRLATVALANKMARIAWAVMTRGETYQAKGRAPAAAAAVA

SEQ ID NO: 111249 - protein, 418 aa, unidentified
MSAEENARTARRYVALDIHKHYCVIAGVDREGRVLLPPVRVEHADLEEWLKKKLHSDDQVVIESTTNAWHVHDLLEPLVERVVVANPIKVKQIAQARVKTDIRDTLILARLLAANLVPDVWVPPAHVRQMRQLLSQRRQLVETHTQVLNRMHSVAHRHHLQHARGKRFNEKTIGWQKDKRLSGLEQFQLSLEMENKVYIEKQIERISKEVRKLCHQKPWADAMTYLMQLPGFGVITAMTVLAAIGELERFETPKHLASYSGLAPGLEQSGTKHRGKGITKEGRRELRWALVEAAQMAVKSDPLLKMKFQTLQKRMHRNQAIVAIARHLLELVWYVLTRRQPYRHFSQERIAYKYLTWAWQMDEAARDGLTRQQFARYYLMRLGIGHDLTRIAINPKYPRRLASEAEVLAIHPELNQVE

SEQ ID NO: 111250 - protein, 353 aa, unidentified
MISELTASPKLYIGIDIHKKTWSVSMRTDLFDHKTFSIPPDSHNLFHYVESHFKYHEVYVTYEACCCGFVAARDFLNFGWRVTIVNPADVPTSDKHQYQKTDSIDSRHLCKQLSLGNLRPIYIRTEQEDLLRSLLTQRDQITKQLRKVKTHIKSFLLLHGIQVPEEYDNSNWSKGFISWLKCLEWTHSTGLISLQSKLRSLEFHHKEYLLIGNELRSYCRKYHKKDYYLLKSIPGIGGFLSAAIIAELGDIRRFQNESQLASYIGIIPGIRQSGNSETKLGITPRSRELLRSYLIEAAWIAIRKDPEIQSYYRKHAHKNPKSVIVKVAHKMVRRILSIIKQEKTYEINTNQKD

SEQ ID NO: 111251 - protein, 443 aa, unidentified
MGNCAGVDWASEKHDLLIEDCDGQELTAGTFSHDEAGVSALCKTLTRFDVEVIAVERPDGVLVERLLETGVKVLALHPNQVKAARDRFRASGGKSDRFDAFVLCELARTDAHRFRVLEPDSDATKAIQALVRAREDLVAARVAMGLQLRAELDRFWPGPTRMFQKLDSRISLAFLSRYPSPEDACLLGEKRLGGFLKANGYRNQTPVTVLLERLRSAPSGRAGQIETRTRRQIVLALVHTLQVMGVQIRELEAEIAEQLERHPDGEIFRSFFRTRTSVVCAATLLAEIGDCRARYPHRDAIASDAGHAPVAVESGKYRNATFRWACNKRLRGALRTLAHSTRQWNPWAADLYLQARQRGHDHERALRTVGRAWSRIIWRCWQSRQSYDPVRHTRLQQHITVTIPSQSGPRPDIAASQRMAGINLTPWANRTPTIGSLMANGLT

SEQ ID NO: 111252 - protein, 370 aa, unidentified
MQMSKRQQTVAVGIDVAKGHLDVAVSERKDVFNVSNDSAGHDKIVALLKVGKIKPSVVVMEATGGYEKPVAKALQRAGFLVVVVNPKQARDYAKGIGVFAKTDKVDARMLAEFGEMLVSRRKLKNYLKLPVDERRERLLALVTRRRQLLTMSLAEKQRMGLMPKELHGSVQVVVDLLDDQVKKIDLEVRGHVDEHYMALDQLLQSTPGIGDQCSAMVIAALPELGQLNRRKIASLVGIAPFPKDSGNSTGRRFIQGGRFDLRRSLYMAALVAARHNAIIRPFYKRLVAAGKLKKVALVACMRKLLTILNAMVREGRAWEAPASAVVDVAETPQKGRKRASCRKKSLTNQEIPHEFSVDDALVAVAGVGCG

SEQ ID NO: 111253 - protein, 367 aa, unidentified
MVKSIKYIGLDVHKNSIAIAIADTGRENEPRYWGQIENDLNQLNKVLQKIVCDGSELSCVYEAGPCGYTIYRYLMSNGIDCSVTAPSKIPRKSGDRIKNDRRDALTLARLHRSGELTSVYVPTPEDEALRDLVRAREDAQHALRKNKQQLGAFLLRHNLVFSGKTMWSLAFFNWLADICMQHLAQQFVLQEYADAVESCSQRVERYTSQIKELSKQTRLYPLIVGLQTMRGVSLIVAATMAAELGDLRRFETPSQMMAYLGLVPSESSSGPKIKRGSITKTGNGHVRKVLIEAAQTYRFQARISRAIRKRQEGIPEKIRAIAWKAQVRLCARYKQLSAKGKNSNLVKTAIAREIVGFSWAIAQEINI

SEQ ID NO: 111254 - protein, 524 aa, unidentified
MAVQSRPKNRHKPQKHTLHKPRGVVHPRVVAVGPEHFAFVCVDCAKARSKILVADFYGRVLVEPTTVEHNRSGFDSAFVTVRTAMTRHYIKDVIVVVERTGRYHGPIQRAFREAGFEVRIIHPYATKQYRLPADPGNKTDDTDLSAIHRAAVNGFGLAEPEPDPAYVQLQLLARHRRKLVHKRVTVQQQMLEHLQSFMPGYSRCTADVFDSPAVLWIARELGSAAAIVQAGVDGLSQRARQNRLRVQRSTLEKIVAWARSAPSAEQPASLHHRIFLELDADQLAKANSIRAIESELAGLLARTPYVLLLGIVGINVVSAAEFAGEMGPIVRYPKPEAITGRAGLVPSRSQSDEVDRRDGPLIRHANRDLRYAILMIADNLIKCNEHFAVLAAGWRLKGKDTRALRVQAAGRFCRIAYHMVAGRQTFEHPCTRQRDYIIKKLTTFCLDHLSSPDQLLQDLEAAVSQLPPAAYREEAVPLAEELARVQKSRGAGPHPLGTILPALLAKLEVGLVRSTESGEADPTE

SEQ ID NO: 111255 - protein, 441 aa, unidentified
MEELREDHDDGSVARVAAIDIAKASGMVCLRVPHDTIEGRRIQQVWTVASTTNAILELGDRLVSQGVQRVVMEATGSYWRPFFYLLESRGLECWLVNARDVKNVPGRPKTDKLDAVWLAKLAERGMVRASFVPPKPVRQLRDLTRTRTVFVQERTRHKHRVDKVLQDAQIKLSGVVSDLFGMSGRAMLDALVAGERNPRTLAGLAKGNLVKKKAALAEALTGQFDDHHARLLRVLLSTVDHLTAQIQELDRLIVDLMGRTTAPHDDRGSSPPGRADVTAQHLAERLDAVPGVGQATAQIVLAEIGLDMSRFPTPEHLVSWAKLCPRTIQSGAKNTAGPAGRGNPWLRGALGEAASAAARTDTFLGARYRRIVKRRGHSKALVAVARSLLVITWHLLSEPEASYQELGAEWHHRHLNPARKTRDLVRQLQALGHQVTLAPAA

SEQ ID NO: 111256 - protein, 331 aa, unidentified
MKNKEIVGIDVSKNTLDVCILSTNYHFTVKNTPEGFASLIETTSGHVKEKSHPPFFCFENTGRYSRLLSVFLEESGFHFALLDALDLKRSMGLTRGKSDKKDARMIALYAWRRRDELASSQLAGPVIDQLRQLLTLRDKLIKHRTTFKNTTQDLHDGYCDGEFDFIKERHLSMLNHLQQEITLVENEISRIIDLHEELSSNYNLLRSVPGIGNVLAIYLIVLTQNFSRFNDPRKFACYAGIAPFEYTSGTSVKGRSKVHPCANRQIKSLLNMAAMASIQLTGEYKTYYLRRLLDGKNKMSTLNIIRNKLVSRAFAVTKRGTPYVNLHKFAA

SEQ ID NO: 111257 - protein, 445 aa, unidentified
MAHANRLSRGDVRRNARLDRLRRVVSRDHAVLAVDLADDTQVVVVCDHDSRVLARRTWRCRPWQLDRALGWGLAVACRHGFAGVVVACEPTGHRWRVVVEQASRLGLEAVCVQPLLVRRAREAEDFTRDKSDDKDALLIARLTTQLHCYLPERPTAAWARLRHLGNRRVEQLTLATAAQQRLRDLLECGWPAALEVTRHPLDSSTWRAAMTVGRCDPARIRRLGFTRFARAVARELPRWGGRRRNLRILRALYAATGDDRGVTSQRAGSLERSALVLTDFKQALAALAEVEGRMAKVLAELGLAELVTSIRGVSVVGAAAILAETGDPTRFDDAKAVVKHAGLCPRDNASGAFAGKTTISGRGRPLLRLAAWRAVWGALPHNPVFAARYTHLTSRQRNRLSDGQARTAVAAALLRQLWVVCVNRTPWEPAVAGGTIPKEVTDPAA

SEQ ID NO: 111258 - protein, 391 aa, unidentified
MFLLGIDIAKLNHVASCIDSSTNEVVFSNFKFKNDFKGFSALLNKIKSFDAKNLIIALESTSHYGENLINFLFIHDFKVALINPLQTSHLRKANIRDAKNDNLDSLNIAKSLVFTKLNFVSKKNIECFSLKKLTRFRSNLIKQRSKAKIQLTSLLDLLFPELQYLFKSKIHSKAIYSLLKKYPSAEEIAALKDDEISNLLYASSKGHFKKEKSIELKSLAKTTVGIKDTSISLHLIQLIELIELYTKQIKDIEIKITDIVNNLDTTLLSVPGISVIACAIILGETNNFENFSSSKKLLAFAGLDPKIRQSGNFNASSCRMSKKGSPYLRYALIFTAWNIVRHSEKFNKYYSLKRSQGKSHYNALGHVAHKLVRILFTLIKKNISYQEEKLE

SEQ ID NO: 111259 - protein, 344 aa, unidentified
MRKYFVGLDVHWSHTNACILDARGKKVKQFRVRGPWTMVPGELAKLNGKLFVCYEASCGYGQIYDLLLRVAERVVVAHPGQLRLIFRAKRKNDRVDAEKLAKLLFLDEVPVVYVPSQDVRAWRQLLQHRVRLVDKRTRAKNACRALLRSVGTLSPGRFGLWTKNGMQWLRSLKLPNTLFALQRDMLVTEIEMFNEQIKLAEKELKRYSARNPAVQLLMTIPGVGLRTAEAMVAYLDDPARFHRNKAVGAYLGLVPCQDQSAKTNRLGHITREGPALVRRMLCEASWQAVRRSPTTRRYFERIQRGRKDRKKIAIVATAHYLARVMLAMLQSGEAWRETEVKQAA

SEQ ID NO: 111260 - protein, 390 aa, unidentified
MIKLIIGIDIGKRYHQATVIDESGKMLGGSVKFPNSISGAELLLKRVSAVNPVSLPLIFGLEATGHYWLALHAYLTGKGYQIVVLNPYQSDAFRKVSMSSTKTDKEDAFLIAELLRFGSFPQTKMADEDMVALRRLTRFRLSLNQQVTDSKRRILTILDQVFPEFESMFSDIFGKTGRSLLKRYPTPEEMETVSLRKLTSIITKLSKGRFKKQKAQEVLEKAKTSFGITLALESLTLQLKILLETLEFTEKQLKVVDTQIEHLLPATCVLLTLPGVSKILAAAILSEIGDIKRFRTSAQLVSFAGINPTVRQSGNFMGSRNHMSKKGSPYLRLALWQASITGARFNPILKEYYQRKIKEGKSHMTVIGAVTRRLTGIIFAMLRDQKVFHA

SEQ ID NO: 111261 - protein, 338 aa, unidentified
MLSIGLDAHERTSSLCILDASGRTVKELTLKGHPRRVLQWLRELNEPFRICFEASTNYGWLYDELKTIAVEVLVAHPGRLRLIFRSRRKNDRIDAARLAKLLYLGELPLVYVPGVDVRAWRGLIEHRQRCVRERTRGKNGIRALLRTHGIQMPSRMRLWTHKGRAWLAELDMPTTVAALRRDQFLDDLEHHDRKIRRLETMLGTIGDRQSGMVLLQTIPGVGMRTAEAFLAYVDDPQRFRGRSIGAYLGMVPRQDASGGVNRLGRITREGPATVRQMLAEATWQAVRRSHTVRQRFERICQGRPDRRKKALIATAHYLARVMIGMLRTGEAWREEVTA

SEQ ID NO: 111262 - protein, 395 aa, unidentified
MPEARIPSQSSTAVRIDIAAIFVSLELSQSKWLITSISPGGGARMSQSILPAGDVASLLKRLGDLKRQSRDRVGGDFPIITIQEAGLDGFWLHRVLMSEGIESHVVDPASVAVSRRKRRAKTDKIDGEALVRTLLAYKRGEPRVCSMAIAPTPADEDARRLVRERKTLIRERISHVNRIKGLLYSQGIKGYEPLPRDRRERLEALITGDDRPLPPHLKAQIKRALDRLELVLKQIAEAEKARSAMLASASSDPSNSTRPSGSGPGMLLGLKGIGEEAAAILWSEGLSRHFDNRRQVAAYAGLAPTPWQSGQVNREQGVSKAGNPRLRTALIQIAWLWIQHQPDSALTKWFKARVLQNGGRLKKPTIVTVARKLIVALWKYVNAGVVIEGAIVTHA

SEQ ID NO: 111263 - protein, 460 aa, unidentified
MNHKQRREVMRKIQSEDLSLEVVHPDAAGIDIGNESHYVAVPPTRDCQTVRRFGCTTAELKAMADWLKQCKIRTIALQSTGVYWVSVYDILEEAGFEVYLVNARETKNLPGRKTDVQESQWLMKLHTYGLLRNSFRPSQEIRTMRTYWRQRHDLVRTAGRHIQRMQKALTQMNIQLANVLSDVSGMTGQAIVKAILAGERDAYELAALRNWRVKASEEEIALSLEGNWQEEQLFVLQQEQDGYEFCLKQMAECDQRLQQYLQQQQDRSQAASLPEEKRKERLRKKKKGNTPQFDLRPELFRMSGTDLTQIDGIDVTTAMTILSEAGWDMSKWRTEHHFVSWLRLCPDNRISGGKIIGKGRLPTNNRVTNALRMAASTLRLSNTYLGAQFRRLRTKLGPPVAIKAMAAKLARLIYRMLRYGMPFIDRGADFYETQHRKLQINYLKRKAANLGFQIIEAPAA

SEQ ID NO: 111264 - protein, 375 aa, unidentified
MDEKAKVIFKAHSFSNTSDGAATLLQKITPYATELEIGMEATGHYWLSLYSFLIENNFVVHVINPIQTDGWRKGTEIRKRKTDIIDSVLIADFIRYGDFLETSLADEDTMSLRNLSRFRNYLVGSIGDLKRKTICVLDQIFPEYHHAFSDIFGKTSKELLLQLNSPSDYEDVTSEQLEELLSQVTLKGYAAKKFKDVSALAKSSFGITFCVDSFSFQLKLLIEQINFIEKQVSDVESQMSELLEKINTPITTIPGIGNIIGATILGEVGDINRFSSGAKLVAYAGIDASVSQSGEYECSNNHMSKRGSPYLRKALFRAAFVASNSDPVFKAYYQKKRMEGKHHNVAVVAVARKLCYTIYAVVKNNVPYEVQAPRD

SEQ ID NO: 111265 - protein, 362 aa, unidentified
MAGMDLHGNNVMVGIVDAQGARLQHRRLACELPEIIEFLAPYKTELESIAVESTFNWYWLVDGLRAAGFPVVLANPAKIDQYGGIKHADDKNDAYFLAELQRLKILPTGYIYDPELRPVRDLLRRRMSLMRQRTTLFLSAKSLHQRTTGRALELRRLKAMEPEEAVALYTHPANQLIARIQKEHIDSLDQSIRQIEKAVMKVALQQPYYQRLQTMPGVGIILGLTISMEVGNIDRFAGPGQFASYCRTVDAKRVSNGKTKGENNQKCGNKYLAWAFVEAAHGARRFDTACRRWYDRKAGKRCPTVATKALACKLAKAAWYVMAKGEEYQAGRVFPGLTEPKAEEISGEQASARKGVGPNPED

SEQ ID NO: 111266 - protein, 341 aa, unidentified
MVDKVTEAAVVGGVDTHKDLHVAAVVDQNNKVLGTQYFSTTRQGYRQMLAWMTSFGTLKRIGVECTGTYGSGLLRYFQNAGLEVLEVTVPDRMERRKRGKSDTIDAECAAHAAFSGIRTVTPKTRDGMIESLRVLKTCRKTAISARRVALQIIHSNIISAPDELREQLRNMTRMQLIRTLGSWRPDASEYRNVTNVYRISLKSLARRYLELHDEIADLDVMIAAIVDELAPELIKRNAIGYESASQLLITAGDNPQRLRSESGFAALCGVSPVPVSSGKTNRYRLNRGGDRAANSALHIIAIGRLRTDAKTKEYVARRVAEGHTKMEAIRCLKVSVQREPY

SEQ ID NO: 111267 - protein, 342 aa, unidentified
MEHYAGIDVSLEYSSVCVVDATGKIVREGKAASEPEALIAWFGSLGFGLARIGLEAGPLSQWLYAAMREAGLVVELLETRHVRDAFKAMPVKSDRNDARGIAQLMRLGWFRPVHCKSIGAQETRAVLTARKLVQSKLQDVENSLRGILRGFGLKTGKTTSRSFAGRIRELVANHPSLETIAEALLSVHAVLLHEFKAFEKQVRSMARSDAKARLLMSTPAVGPIVALTYASAIDDPGRFKSSKQAGPHFGLTPKKYQSGQTDVTGRISKIGDASVRTALYEAAHIMLTKPIKGCSQLKSWAMRIARRAGMKKAKVALARKLAVILHRMLVNGTPFNAAAAAA

SEQ ID NO: 111268 - protein, 416 aa, unidentified
MNAVGIDVSSRKSTVAVLRPLGEVVCLPFDVTHDIAGLASLVEKLKALDGETRVVMEHTGRYYEAVEKALHEAGLFVCAVNPLLIKEYGANSLRRVKTDKADAVKIARYALDNWADLRDFTPMDAIRYDLKTLNRQFQLASKQRTASANNLIALLEQSFPGIRKCFDSPVRSDGTQKWVDFAHSFWHVDCVRKQPFPAFCERYRKWCKRHAYLFKLSNAEEVYALAKRAVVLTPKAKVVKVLVQEAANQLSSISRSVEVYRAEMDRLAAMLPEYPVVMAMYGVGKSYGPQLMAEIGDVRRFERKQALVAFAGIDPMPNQSGDKNVRSNKSSKRGSPYLRKTLFNVIRTYLQCAPQDEPVFQFLNRKRAEGKPFYVYMLAAANKFLRRYYAKLRDYFASLDTLQSVDPIPATLKASL

SEQ ID NO: 111269 - protein, 316 aa, unidentified
MEHVEDQVARFVGIDVSKGHLDVYIRPTNDSFSVVNDAAGIAELVAKISSGPLCLVVLEATGRYELDAAEALIAANITTCVINPRQVRDFIKATGQRAKTDRIDARMIALFADRLRPLSRAMPDAHLKLLTELLSRRRQIVEMITAEGNRRRKSREDSVVERIDAHITWLKAELKDVEKQLDHAVDDNPAWQTREALLTSVPGVGRTTARTLLTDLPELGSIDRRQIAALAGVAPINHDSGKTQGKRTIQGGRAVSRTALYMATLVGVQRNPALKVFYSRLRAAGRPPKLALTVCMRKLLTTLNAILRDQRAWIAS

SEQ ID NO: 111270 - protein, 310 aa, unidentified
MQDILECCCGLDIHKDSIVACLLKGPVNEQPTSEIRVFSTLLSDLDALKAWLVEENCMHVAMESTGIYWIPVYETLETAFDGHISLIVANARHMKNVPGKKTDMKDAEWIATLLRAGLLNGSFIPDKDIRELRDLTRYRKSVISDITSQKNRIEKFLQSCGFRLSSFISDIFGASGSAIIKHLYTHGSITIEDLDGYLKTQTRRKINEIMQAINGKLDKHQMQFLKMMFNHLESLKTHLAEVESQINSYIQKYEHQIELIDSIPGIDKIAASTILAEIGTDMSKFKTAEHICSWAGLSPGNNESAGKKNE

SEQ ID NO: 111271 - protein, 343 aa, unidentified
MKLHVLGIDLGKTVFHLVGLDSTGKVVIRKKCSRTQLLAFTANLQVQLIGMESCSGSHFLGRALREQGHEVRLMPAQYVKPYVQTHKSDFLDAEAIAEAVQRPRMRFVPIKTEEQLDLQALHRVRERWVMRRTAVVNQIRSLLLERGLTLPKGRSYVDRQLPRILEDGELRLSGSFRVLLAQLKLELEQLTARMEEMDRVIQKTAKENEDCQRLTEIPGIGPVTATALIAAVGNASAFQKGRNLAAWMGIVPGEYSTGGKQKLLGISQRGNKYLRTLFIQGARSVLQQRHKQAPGLSHWLAQLLGRTHQNVVIVALANKLVRMAWAVLCKNERYRAPVLAVTT

SEQ ID NO: 111272 - protein, 349 aa, unidentified
MKFYTKTHNHYCGIDLHAKTMYLCILDKNGQILLHQNMKSRPEDFLAATQPYRDDLVVSAECMFTWYWLADLCQQEGIEFVLGHALYMKAIHGGKAKNDKVDAFKIATLLRGGNLPKAYVYPPAMRATRDLLRRRLHLVRRRGNLLAHIQNTHHQYNLPAPQAKIAYKANREGVAETFTDPDARKSMEVDFLLIEHYDKVIRDLERHLERRAKQHDPQAYHRLRTVPGIGKILALTILYEIHDIGRFDRVQDFLSYTRLVKCDHSSAGKKLGTGGAKIGNVHLKWAFSEAAALFLRNNPEGQKHLRRVAGRHGKAKALSILAAKLGRAVYFMLRQERAFDMRRFLARKN

SEQ ID NO: 111273 - protein, 376 aa, unidentified
MRKYTKFVGLDLHQHSTTVAIAEPGRRQPRLFGQIASTPLALAELAARLDDGQTELQFCYEAGPCGYGAYRQLKALGYECLVAAPSLIPRRPGERIKTDRRDARRLAEQHRSGELTSVWVPAAEQEAMRDLVRCREDLKHMSRQLKQRLHGFLLRHGRVYTGRSKGTQAYGRWLEQQRFESPVQQIVFQEYVDGVAQMQARLAGLETELAKARQAWSLAPVVDGYVALRGVAALTGMTVAAELGDVTRFDSPRQLMAYVGLVPSEHSSGSARRQGGITKAGNAHLRRVLGEAAWCYRFPARKTAALQRQAEHTTPAVQALAWKAQKRLCGRYRHLTNRGLPKGKVCTAIARELLGFIWAIAWELKPAVAAPTAQRA

SEQ ID NO: 111274 - protein, 413 aa, unidentified
MKSYVGIDWSEGHHNVCILNKAGACLNRFQIPHSQAGFQHLEEVLGQVNSDPSACLIAIETDHNTLVDFLWSRGYELYILPPNQVKSNRGRQRTSRAKDDDSDAQLLADILRTDQGRLISRQADGTLVQQMRSLLSWVDNLTDSIKRYRNRLRAILLNYYPQPLAAFGNLTSQFSLKVLAAYPSPAHFTALTYEQFVIFSRSQGYYQVRHLVGYYALLRESMPSTSQAIWPAYQEQTVFLANLILSLVKQKQTVISQTNHLFEEHPDAYIFASLPGAGDLLRPKLLVMFGDHRSRYPKPTILPAIAGTCPVTIQSGRSRSVRFRWACNHSYRQTAQQFAKSSLRSSVWAAGYFQRALARGKTNSHAYRCLANRWLHVIWTLWQKRVPYDETYHMDQVNRYRKPLDSIDLAISS

SEQ ID NO: 111275 - protein, 422 aa, unidentified
MLAESHDEEQIIARVAALDIGKAELVCCVRVPAPAGGRRRSQQVSTHSTMTKSLVELANRLVEMGVERVVMEATSSYWKPVFYLLEAHGLDPWLVNARDVKHLPGRPKTDVLDAVWLCKVAERQMLRPSFVPPWPIRRLRDLTRYRTDLVAARTAEKNRVEKLLEDACIKLSVVASDIFGVSGRAMLGALVAGERDPKVLAQLARARMRGKIDRLEQAFDGHFVEHHRFLLARMLSRIEALDGDIAAVDVQIEMHLAPFAEAAAHLDEIPGIGPVAAAAIIAEIGVDMSRFATAGHLCSWAKFAPGINASAGKTKRSASSGHGSPYLARVLGEAAVGTSKTNTFLAARYRRIAKRRGQPRAVVAVGRSILVIIWHLLKDPDAHYQDLGADHYKRHVNSSAQKRSHIRQLESLGYTVTLTPAA

SEQ ID NO: 111276 - protein, 344 aa, unidentified
MYHYAGIDVSLECSSVCVVDGTGKILREAKVTSEPEALIAWFRSQGLGLERIGLEAGPLSQWLYAALREAGFAVELLETRHVRDAFKAMPVKSDRNDARGIAQLMRLGWFRPVHCKSIEAQETRAVLTARKLLQSKLRDIENSLRGVLRGFGLKVGKTTELTFAARIRELVAGHPGLELVAKALLEAHAVLRCEFNGLDRHTQRLARSHPSARLLMTTPAVGPIVALTYASAIDDPKRFSSSKATGAHFGLTPKKYQSGQTNYTGRISKIGDASVREALYQAAHVMLTKPLKNCSALKSWAMRIARRAGMRKAKVALARKLAVILHRMLADAKPFNPTVKAAAT

SEQ ID NO: 111277 - protein, 374 aa, unidentified
MHQVESERSVLDGVAVFVAIELSKSAWLFAAQASPSGKTSSHRLESGDITGLLTLLRRLQARERQACGGGAVQVVVGYEAGYDGFWLQRRLAAEGITCRVMDPGSLQVNRRARRAKTDRLDAAMLLRALIAWCRGDRAACHMVQVPSVAREDARRTHRERQRLVVERVQHVNRIKGLLATQGINDYQPLRRDRSARLGEVRTKDGHALPPRLRREIERELQRLELVLEQLEAVEAERDAAVAAPAADDADAAKVALLARLGGIGNELATVLVREGLYRSFTNRKEVAAYAGLTPMPFASGERHREQGISKAGNPLLRKAMLELAWLWLRYQPDSALARWFTDRVGSVRGRIRKITAVALPGSCWLPCGGMSRPG

SEQ ID NO: 111278 - protein, 316 aa, unidentified
MDHNNVVYGVDVSKAKLVIARYDVLTLAEVDNRPESIVAWLAGLPKGAVVAMEATGIYHRLLAHLAHAAGMRVYVLNPQTLKHYAQAIGRRGKTDNCDARMIARYAVHEQAKLRRWQPPARAADRLSQLLERRHTVVGVRQTLAQSLSGLPMLKAARQSLLASLERTVGRLDILIRHEMARLPGAAALYERLKSIVGIGPVVAAQLVAVFSTLSFARAGAFIAYTGLDPRPDDSGNRRGRRRLSKHGPPLLRCLLYNAGMAAANSKVFKSVYRQLRERGLQTTEAIVILARKIARIAFALYKSGEVFDAKKHFKMA

SEQ ID NO: 111279 - protein, 310 aa, unidentified
MQTITTIGLDIAKSVFQVHGVDAGGRVIVRRQLKRRSVLAFFQKLPPCLVGIEACASSHHWSRELQALGHTVRLMPPAYVKPYVKRQKNDATDAEAICEAVTRANMRFVPTKTPEQQSGLVLHRTRHLFIRQQTAVINAIRAHLAEFGIVAPVGRHGVEELLNVVADPSDRRVPEMARACLLAFGAQLRRIKEQILEFDRLIRAWHRSNEMSMRLDEAPGVGPVLATAVVAAVADPKSFRSGRNFSAWIGMVPKQHSSGGKNRLGNISKQGDRYLRGLFVAGALSVIRYAKDPWHQPSTLACGLAGEAAD

SEQ ID NO: 111280 - protein, 418 aa, unidentified
MKKHTNSRKKSEPTSKRAKTRGPMRRDTKEVLTELVGKLKEKLDPKKVAATSAGEEHERGELGPNLDRLTVGVDLGDQWSHYCILGLEGETLAEGQLRTTQEDIAEFFQALNAARVVFEVGTHSPWVQEVICGCGHEVLVANPRLMEGSKRRKRKNDRIDANKLARLGRVDPQSLHPMQHRSREVRQDLVVLRARDALVAARTELINATRGLVKSMGARLPKCSSPSFAQKVEETVPVELRDALLPLVRMAAALSDCIQGYDEKIEKLGREKYGHTALLRQVKGVGPITSLAYVLILENPDRFVKSRDVGPYLGFVPKQEDSGESQPQLGISKAGDTMMRRLLVGSAHSILGPFGPDTDLRRYGLRLCERGGKNAKKRAAVAVARKLAVLLHCLWVSGEVYEPLRQGMSATMTPAAAA

SEQ ID NO: 111281 - protein, 314 aa, unidentified
MDISKLTFDATAIVGNAEYSAKFDNDSKGLNQFSDRLKSLGCQNLHICMEATGNYYEEVADYFAQYYSVYVVNPLKISKYAESRFKRTKTDKQDAKLIAQYCRSAQESELVKRQKPTDEQYRLSRMTAAYAQIKSECAAMKNRYHAAKDEEAAKAYAEIIKAMNEQLEVLKEKIKEQTEKPKCKEGVKCLETIPGIGRMTAAVLFHHLTSSKFETSNKFAAFAGLSPQQKESGTSVRGKGKLTKFGNRKLRAVLFMPAMVAYRIRAFPDFIKRLEEKKKPKKVIIAALMRKLAVIAYHVHKKGGDYDPSRYKSA

SEQ ID NO: 111282 - protein, 338 aa, unidentified
MKTHVGVDLHQRFCYLTAVNASGKVFKQGQVVNEGAALRAWLRPLPCPRQVVVEASGFWRAFARGVAPEFERLVMVHPQRVKAIASAKLKNDRVDSETLAHLSRCDLLPEAWMADEATQQLRLLVRLRITLGRQRARAKNQLQAVLHQEGFKKPVTDVFGKRGRAWLKGLELSAAGRLVVDTWLREVDHLDVELAAQTRELERMARADARARCLQSVPGIGAYAAMVILAELGDVERFGNKRALASYAGLTPVVRESAGKRKRGGITHQGSNTLRWIMLQVAQVAARCSPGARSYYAGLRQRKPAQVARIALARKLLTVVWALLHHGVCFDEGLFIRN

SEQ ID NO: 111283 - protein, 400 aa, unidentified
MRAVFGIDVSKASSEVAILVNGEKVHGYTMSNDALGFARLLGDLRTVHKPEIIFEATGVYSRRLQAFLDEHGYAYTRLNPLEAKKQLDSLRVRKTDQIDAEKLAQSQFVLNRKPTYVQEEVYQNLRDLSRFYQNLTEDIVRAKNRLHKVLQVTFPELENILSTPSGEQYWNLAIAFPCKDFVLDLSKDELLESIRQSTSKRISDKRVAYLAEKLTALANQSYCAVKKTSPILEEVRYYAKELLRLSERRQTVLDQMVELAQPLPEYDILLSIPGIAETTATSIIGELGDIRRFQSANQINAFIGIDLRHYESGNFLAKEHITKRGNPYARKILFKCIHNIASASHTNPCHIADFYEKRKRQSQTTSTKPHTIASIHRLIRTMYYLIMHNKLYDYASTQNR

SEQ ID NO: 111284 - protein, 357 aa, unidentified
MAEGSWVGLDVHARSTVAGVLDGASGELRTLPVPPRSNETVDWLQTLPAPVRVAYEAGPTGYGLARACAEAGIACLVAAPSKIPRGAGDRVKTDRRDAERLARLLRLRELVAVRVPDRAEEAARDLVRAREDARGDLMRARHRLSKLLLRHGLVYDGSAWTLAHTRWLNRQRFASRPLARAFEESYTVVVQAKARRDALDREISQLAAEPPFRDVVGRLACLRGVSTLTALALTVELGNWHRFRPQSLGPFLGLTPSEDSSGSRRRQGAITKTGNSHARWLLIEAAWHQRRPPRPSATLERRRAHQPAPVRARADHSARRLHQRWQHLEQRGKPRTLIATAIARELAAHCWALATMS

SEQ ID NO: 111285 - protein, 412 aa, unidentified
MEVLYACCCGIDVHAKMLVACLFKAGKKDIRTFSTMTEDLLRLLDWLTQAGCTHVAIESTGVYWRPVFNILEGAMDVILTNARDAKGYKARKTDVIDAAWLADLLRHGLLKPSFIPPLPIRELRELTRYRESLVREQTALANRIQKLIESANIKLGQVASDALGVSGKSMLRALAAGETDAKKMSHLARRTLKRKQPQLQQALEGRFTQAQRWILGQLLDQYDHVEAALQSAAERIRQEVDSSADPFVPEAIPLLDTIPGVGETVAQIIVAEIGVDMGRFPTANHVASWAGMCPGNHESAGKRKSGKTTKGSRYLRAALVQAAWAATHQKGTYLAAQYSRLVKRMGKKKALVAVAHSILVIAYHILQNRVSYQELGGDYFDRRNVDKQRKRLIRQLEALGVKVTVEEVKEAA

SEQ ID NO: 111286 - protein, 403 aa, unidentified
MESVIGVDISKNFSVASAYSGRNERMEPPLIFEHTNAGFTEFMQLVKRLEQQSNSKPNIVLEPTGHYHLTVTDLLEKQGYQVIMINPLISKRERNSSSLRKVKTDETDAEHLAKMYYRMDLTPARLCHDELAQVRYCTRLHETMSTMLTSIKIKSKAVIDLTFPYFGEVFAKSFTKRYIQCLSEYPTARSVINASRESIVSFIAVSLGYSEDCKTVQNIANKLINAALKCPIEKEVYDSQIHTLLILLRTIEESQNNLDSLIQYTTETLSHRRDFQILKSIPGIGDVLAASILCEIGEISNFGSHKKLIAFAGIEPSVYQSGQFKAQDNKISKRGSHYLRRALYIAVACQIRGKYKLPIMRDYYDLKRSEGKPRGVAMVACMNKLIRIIFALLSKNQMYQLYI

SEQ ID NO: 111287 - protein, 379 aa, unidentified
MTCKERGRVAKLTRAMQYVNNTELSSAEETRCQFNGSKADIKLGIDVHQHFYTVVMQVGGCNPKPPQRFAKEVFLHWAAKLKQSCGGQVHAVYEACGFGFGLQRELSALGIECEVVCPQKLDEQNRRVKTDGLDAKALCLKLDRFVQGNRSAVALVRVPSEEEEQLRAIHRQREQLVKTRKQLEAQGRSLMVNHGIEPVQQWWKRRAFAALNVPKWMKELLKNSQPILLALEEKIHALTVQLQAAAQDRQPRGFGALTSVVIDREIANWHRFSNRRQVGSYTGLCPGEYSSGNTRLQSCVTKHGNPRLRAALVEAAWRLVRFQPNYKPIVKGNATLRKGALATGAARKKAIVAVARQLAVDLWRIRTGRVSAQELGLIN

SEQ ID NO: 111288 - protein, 355 aa, unidentified
MTSSKYIGMDVHKESISIAVMNAAGKVVMECVIETKASMILQFFDGLRGDLQVTFEEGTSAAWLYDLLKPHVTKLVVCDPRKNASMKEGNKSDKIDARRLAELLRLNHLNPVYHGEHGLRSLKELVRSYLTITKDLGRVMTRVKAIYRSWAIPCIGKQVYAPRHRAAWLGKITEPGVRRRAEFYYQQLDALRAVRQQVRRELLAEGQKHPAWKRLCQIPSIGPIRSAVLLGILQTPHRFRTKRQLWAYSGFGIETQSSADHRSVDGQLQRAKKQNSLRGLNRDCNHDLKNLFKGAAIVASSKPGPFQEFYTALLTKGIRPEMARLTLARKIATVVLIVWKRGACFDAQHLIPQTA

SEQ ID NO: 111289 - protein, 316 aa, unidentified
MDTSATLQYVGIDVAKEHLDLALGTAAPEQIAYTAVALKQLVARLQALPAVQVIVEATGGLEVRLLTELWAAGLAVSRVNPQRVREFAKASGRLAKTDRLDARLLAQFGAALQPAATPLPSADSETLVALVGRRRQLVAMRTMEHNRRLSAPQTLHERLDNHLAWLDAEITALEQEISDFIQQSPAWAEKDAVLQSAPGVGQVTARTLLAALPELGSIDRKKIAALVGVAPFNHDSGRLRGKRIIQGGRYAVRSVLYMATLSATRYNPTIRTFYEHLLAAGKAKKVAIVACMRKLLTMLNAMLRDMQAWNPVSASC

SEQ ID NO: 111290 - protein, 342 aa, unidentified
MNQVNQSIGIDVSKDAIMCCMGTLESGQHCFSKSKSFPNTPKGFEALLEWSTPGKTSAVFVMEATGVYYENLAYWLDSQGYQLSVLLPNKMKHYAKSLNVKTKTDAVDAQVLSRVGLERTLHYWHMPSAMMREIKFLSREYRETKAKLVVIKNQLHAKKHSFACPLSVEKRLIGQMALLETQLLEIESELRAAAISDPQFYDRVTRLNTIPGISFITIITILAETNAFALIKNAKQLASYAGLDVEHRQSGAKEGKTKISKKGNRFIRNALYMPALCATKHNPHMKPFYTRLCERKPAKKVAVTAVARKLLVLTFTLWKNNQEFIENYTEESRQALKPAYTG

SEQ ID NO: 111291 - protein, 312 aa, unidentified
MEAKFVGIDVSKATLDVDCLPVSTARQFSNDAGGIAALVQWLLGSGVERIVVEATGGYEIAVASALAAAGLPVVVVNPKRVRDFAKAQGVLAKSDRLDARVLALFGERIAPPVRALPQAAQRDLTELLDRRHQLVSMRAQEQARLATVLPVARGDVEQHIAWLDQRIRKHETVLLKRLRANEIWDAKVKLLDSVPGISPVNLFTLVGRLPELGTLNRQQIAALVGVAPFNDDSGKRRGQRYIRGGRAEVRCALYMATLTAKRCNPVIAQMFERLIAKGKPFKVAMTACMRKLLTILNAILKSTQPWENRLAT

SEQ ID NO: 111292 - protein, 335 aa, unidentified
MLYGAIDIHESVFQAAVLDPESGALSERRFAARREELGDWAIEWQGKLAAVAIEATTGWRWVARELEQRGFEVRLVDPGRASALRGRRRKPKTDRLDARWLALVLARQLLSECEAWLPPAEIQRLRDQTRLRRALAGERTGWAQRLHALLTQEGWPCARGRLLTGAGRRWVDALALDPCARAQVEVMLTVMAALEEQQERLESELRRFARADRRCQALETIFGVGPILACHLLAEIGDASRFQRPRQLVRASGLDPTVEESADSKRRGRLSKQGSRHLRWALVEAANHSHRRRSPDHELYTSAKNRCRSGRARLTVARKIARRAFHVLTAEAVVS

SEQ ID NO: 111293 - protein, 358 aa, unidentified
MQSNKKSFKGQKIFVGIDVHAKTWAVETLTESGFTKRHAQEASAKVLFDFLSKNFPDGEYHAVYESGFSGFSTYYQLKEYGIHCVVVHAADVPSTQYEQVMKTDKIDAGKLARALRKGDIKPIYIRERDNLDDRAVVRLRKTIQKQLSGYKTRVKHLLHTNGVKLPARFDKPGTHWSRAFMNWLKDEVVLLSSTRLSLDLLVNQVESIRKNLLEATRVMRILAATDKYKANYELLLSIPGIGFNVAMCLLTEIYDFKRFGNENCFAHYLGLVPTCHDTGDKHSTGGKTFRGNKLLGPMIIEACWVAIHKDYGLSQAYCSYKQKMKPQLAIVKVARKMSNIIFSVIKNGKKYEPYKWEE

SEQ ID NO: 111294 - protein, 347 aa, unidentified
MGKSITDLSSVTTVGLDLAKHVFQVHGVDASGRVIVAKALRRKDVLAFFAQLPECLVGMEACGSAHHWARELIKLGHDARMMPPAYVKPYVRRQKNDAADAAGICEAVTRPSMRFVGVRTLENQAALMHHKLREMLVAQRTQLINALRGHLAEIGVIAAQGLKNARDLAGVIKAEGDETIPACVRAALAPLVRQLHALDQEIARSDQTIAAMARDDEMARRLMTIPGLGPVTASAMATSVQDVSVFSGPREFAAFLGLTPRQNSSGGKERLGRVSKMGNRYLRKLLVVGAHAVLYHRKPHDDALRSWAKKLMQTKPFKLVAVALANKMARIAFAIMRGKTSYSAAPA

SEQ ID NO: 111295 - protein, 351 aa, unidentified
MIIIGVDYHPSVQQVAFLDTETGETGERRLNHSDGEAERFYRDLQRRQVKVRVGIEATGHARWFERLLAELNFELWIGDPARIKAARVRKQKTDRQDAQLLLKLLVENRFPQIWVPSPENRDLRQLIWHRHRLVQMRTRAMNQLQAAAMNEGVRRKKTLWSKTGRRQLEALPLAPWATRRRQDLLELVDRLNTTIDELTAAAEQEARKRPEVLRLMTHPGVGPITALAFVLVLGSPDRFGCGHQIGSYLGLIPCEDSSADRQRLGHITKQGSSLLRFLLVEAAQAAVRWDPDWRRRFVHLAMRRDRRIAKVAMARKLAVSLYWMWRKECDYQQTLQFGSHAGEPGFGHGVK

SEQ ID NO: 111296 - protein, 429 aa, unidentified
MNPSEQTAEDWLTHRAFGALDWASEKHNVVMVDALGKVVEDFEIEHSALGWKRFRERLAPYGSIPFAIETSQGAAVEQLLEAGMEVYPINPKSAQAYRERKAPSGVKDDQLDAWSLADACRVDGHGWRPLRPEDPLVKELRLLCRDEVGLIEQRTCFINQLRHALADYYPTALEAFEDWGSVSAWMFVQRFPTAEVLKGAGKRQWEKFLHSRRLWRTESGPRRMELFAHATELCGSVPMANAKSQLALSLISMLFALEKQLGIYRQRIEELFARHPDHDLFGSLPGAGAKLAPRLLSEIGDDRDRFSEGPQALQCLAGTAPVTRRTGKSKIHTNPERWPCHQRWACDKYLRHAIHLLAEQTLTRCVWAQIYYNSHRQKGRSHADALRRLGQRWLKIIFRMWMDRKLYDPMLHNQNQLKHGSWVLQLNPT

SEQ ID NO: 111297 - protein, 337 aa, unidentified
MINFFIGIDFAKTKFDVVILSRDDLVSKGEHKQFCNTKDGVKQLEKWLHLVCGRDVIVESVICGENTGVYSVLAAKILTREGYTVCLESALRIKRSMGISRGKNDKKDARDIAEYAARHYDKLVVYREPSQTSEALKTLFTQRRLLIKQRGDLQRRNKELTGLYKENPLLKKMLASDTRIINALDAEIEKIEAHMKSIIDDNPEVRKVYDILTSMKGIALVNAVALIVYTDNFKRFDYDARRICSYWGIAPFANQSGSSINGKPHVSHFADHYLKSLLTQAAICAIRYCPEISNYAQRLIARKKHISIVHNNCKNKMIHILVAMVKNGTYYGEFQKK

SEQ ID NO: 111298 - protein, 362 aa, unidentified
MAESTTFVAFDQHAATTMAAVLLPGQRTPALHPMTSALGELRRFVRRLRASGGLRCCYEAGPCGFELQRALATDGVPCDVIAPALIPRRPGDRIKTDRRDASQLAVLSRAGALTTIHIPTEQEEAARDLLRCREDIRADLLRARHRLSKFLLRHGRRFTGTKKAWSKRHETWLRAQTWAIPALDQTHWAYLRAVDEAVARLRAVEADLQALLTLEPLRARVARLRCFRGIDDLTALTIAAEFGDPRRFPTAPSTMAFVGLVPSEHSSGGKRAQGAITKTGNAHLRRVLVEAAWHYRHHPFVGRALQRRQTDAPPDVVARAWTAQQRLHRKYARLAARGKRKQHVVTAVARELTGFVWAVLTQ

SEQ ID NO: 111299 - protein, 404 aa, unidentified
MIFVGIDWAETHHDICVLDELGGILAKRRIAEGLEGVGQLHALLADLATEPNQVVIGTETDRGLLVGALLVAGYQVYGINPLATSHYRARHATSGAKSDPGDAKVLADLVRTDRHNHRPVAGDSELAASLQVLARAHQNLIWSRQRLANQLRSNLREYYPAALAAFGTDLVDPVALGVLEAAPTPTVGRTLSRTKLAAILRRAGRERGIAEKAVAIQAELRAPQLAAPALVGEAYGKSVAATVHILRELNTQLATLEAELAPSFEKHPDAEIYRSQPGLGVVLGARVLSEFGDDRTRFAHPKARKNYAGNSPITKTSGTRRMVLARCARNRRLADACYQWAFCALRQSAGAHQYYAVLRQRGKTHHQALRALANRLVGILHGCLEHRQPYREDVAWPRSVSVAA

SEQ ID NO: 111300 - protein, 338 aa, unidentified
MRKFIGIDLHSNNSVVVVADDDDRVVYQKRLPNNLEAIAAALAPHRAETVGVVIESTYNWYWLVDGLMDRGYRVHLANPTAIKKYEGLKYSGDFADAAYLAHLLRLGLLAEGYIYPREQRGARDLARKRMQLVRHCTAQILAIEGILMRQTGARKSCAAIKRLNAEQVEAFAFPPDVALAVQANRAVSAVLQQQIEVLEARLKERVSLRPEYRLLRTVPGIGEVLATTIMLEAGPVSRFAAVGNFASYCRCVDTLRESNGKKKGEGNGKNGNKYLAWAFVEAANFALRYCPQAKSFYERKKRKTNVVVAIKALAHKLARACFHILREQKPFDVNRCFA

SEQ ID NO: 111301 - protein, 363 aa, unidentified
MRESTTVTVGLDVHARSIRLAAVRANELLEERTLPYDEEAVARLLRRWPAVRCCYEAGPTGFGLYRHLTQRGIDCVVVAPGLVPQRPGDRVKTDPRDARKLARLLAGGLLEPIHVPLPGLEAVRDLVRAREDARLDRMRDQHRLSKFCLRHGRQLPGLSWSVVRRKWLSEQWFEFVAEQLPFDTYLHALDLVDARIEALERAIRETAEQEPWRELVAQLRCLRGVDTLTALALVAEIGDFSRFKCAKEFMAFVGLVPAEHSSGEKRRQGSITKVGNAHVRRLLVESAWHARRRPKVGYELARRQRGQDAIVVERAWRCQQRLYQRWQRMAGRGKPQQKIVVACARELAGFVWAIATEQPLRTS

SEQ ID NO: 111302 - protein, 350 aa, unidentified
MKITTSGIDVAKTVFQVHGVDEHGKVLLRRQLRRSQLLLFFSRLEPCLMGMEACASSHYWARKLTALGHTVRLMAPQFVKPYRKNDKNDGNDAEAICEAVQRPSMRFVPVKSPEQQAELAVHRVRRRLMSQRTALINQLRGLLAEYGLVLAQGANQVRSKLPALLEDASQSLPALALELFRDLYEELVELEQRIGAYDRRIERLYRANPVCQRLGQQEGIGALTATAFVATVAHAAQFKNARQCAAWLGLVPKQDSSGAKTRLLGITKRGDVYLRTLLVHGARSAMRHTPKRNDPKSRWVEQLRKRRGENIAAVALAAKHARILWALMVRGQSTEQPADPGLDRLEQPTV

SEQ ID NO: 111303 - protein, 317 aa, unidentified
MEGVNFTQVVHRGCGIDIHRDIAVATIGGEGITTETRSYKTFSSSLTELKEWLIANGVTHVAMESTGVYWKPVYKVLEGPDLKVWIVNARHIKYVPGHKTDKKDSAWICKLLLAGLLKPSYIPPKEQRELRDLTRYRNKLIQNIASEKNRIIRVLEDCNVKLDSVLSSTSGVTASKLIDKLIENGIVKMEDIDEVYHRRIQASKEELYLACEGFIDEHQKYLLQMIRRDVNQTQALIDELSERIRNLLAPYDNAVERLKEIPGLSTKVVEDLIAEIGLDMEVFPTEKNLASWAGMSPGNNESAGKKKAPAPTTETSR

SEQ ID NO: 111304 - protein, 316 aa, unidentified
MTTNSVVVGVDVAKDRLDVAVRPSGEVWSEANDEAGITALVTRLRPLGPALIVCEATGGFERAAIAALAAAGFPVVVANPRQVRDFARATGQLAKTDQLDAGILALFAERVRPTPRPLPDAAAQLLDAVLTRRRQLLEMLVAEKNRLGFAPKPLHRGIQAHIRWLERQLDDVTTELATLIEGSPVWRAKDDLLQSVPGVGPIVSYTLLGELPELGTLSHKQIAALVGVAPLARDSGTLRGKRMIWGGRASVRTVLFMAALCGRRWNPALKVFYERLKAAGKPTKVALIACARKLLTILNALVRDQSRWTSHVQYSC

SEQ ID NO: 111305 - protein, 339 aa, unidentified
MAQVTTLGIDIAKNVVFVHGVDAHGHVVVTKRLARPKVLPFVAQLPPCLIGMEASGGAHYWAREFTQLGHTVKLMPPQFVKPYVQSQKNDPNDAAGICEAVERPRMRSVPVKSVPQQDMQALHRIRERQIKARTALLNQIRGLLMEYGIVIPQRASQVRHKVPYILEDAENGLTATAREWLQALAEELRALDQRIAATDQQIERLFVADEACQRLAQLAGIGPLTATALVAAVGDATDFKNGRQFAAWLGLVPRQHSTGGKTTLLGMTKRGNRYLRTLLIHGARAVLRVVDRKTDPRSRWLQGVKARRGKHCASVAQANKTARIAWALLAKGDHDRQAA

SEQ ID NO: 111306 - protein, 325 aa, unidentified
MFYLGIDVSKAKLDCALRNADSGKVKTKVIPNTAEGFKKLLEWLTKNDAPSPHIIMEPTGVYHELAAFFFVDAGLTISLVNPAQLREYAGGLGVRTKTDKMDSQVLARFGTERKPAPWQPPSPAARTLKALLARRDAVADDLLREKNRQEKLEATETPQLVTESVEGSIKFIEAELKRLQKCIDDLIDNDPDMRGKRELLNSIPGVGERVSNHMTCLLAGRDFRSGEQLAAYLGLIPVSWESGTSVRVPPHMSKAGPAHLRKLLYMPAIVAVKRNPHIKALYERLLERGKSKMSAIGAAMRKLAHLCFGVVKTGRAYDKNFAIQS

SEQ ID NO: 111307 - protein, 369 aa, unidentified
MTFFIGVDLHKTQFTVHVRTEKESESLDQIKQYPTTPDGYAEFLARISRYKAAGSDVKIGVESTGNTRFFKNQAEKAGAEVTVINTLKFKVINESAKKTDKHDASTISEFLSKDMLPESYLCGKETENIRRLLKSRERLVHSSVGQKNEIHALLVSLGLPDELRSLQSKKGRQRILDTLESNDDYVLEAQSVRLMFEIIERIEESVKIIEKQLAELTKDDEMVNRLLTIRGCGKITAWTIRAYTEDISRFANAKKYAAFCGLVPWVQDSNETVHHGKITKRGPQELRTSFVQLVLGIRRCKDTSKWRMMQRYEYMKTNKGSGKSIVAAARKMAEIVWAMLSDKKDFDAQKMIGKYKPMSRAEEALAAMN

SEQ ID NO: 111308 - protein, 420 aa, unidentified
MKASKQYLRFCGIDMAKHKHVACIIDQDGQYLLRPKSIRNDADGFQQILNCLKQTGRTKSILTGMEATGHYWYSLHDFLTRQGYAVAVLNPIQTAQQAKQAIRKCKTDKYDAFHIANLLRSGQYKAAVVPGELAMTCRQITRLRYRIVKQGAMIKQLVNSRLHPAWPEYEGLFSNKFGTTSMKLLQTASTPKELMELDPDDLTELIHKASRGRFGPAQTQKVLQSAKNSVGMQRGHYGTSTGIKFLLEQIEALEPVRKKMDAEIVKLTAKVPEYLFTLPGATELTIVSLYGEISPIEAFKKPSQLVAFAGLDPKVFQSGQYDAPRRRISKRGSPYLRRTLWQMAYRAVCTEGDLRDFWRRKHRQNKHHLVAVTAVANKLCHIVWRIMTDRRDYIPKGYNPKSLGIFNCQRAIQKILLFYS

SEQ ID NO: 111309 - protein, 380 aa, unidentified
MMIARTRPEMSVSEPTMYVAFELGKKEWKLAMTSGFGVAPWLRSVVSGDWRGVDRALAQGRARFGLAAAVPVVSCYEAGRDGFWIHRALQQRGIRNRVVDSASIEVNRRARRAKTDRLDALKLVTMLVRVCWGERRVWSEVHVPSVAAEAARQVSRERTALTQEQTRLTNQLKGWLATWGATLPRRRPSGWWTTVSDWAGAPLPVEVQARVARAEARRAVLEGQIAELDDQQQAAVTTAAPGSAVRQLVQLKGVATRSASVLLDEGLVWRAFQNRRQIGGFLGFAPTPYESGESAREQGISRAGNNRLQSISIQLAWNWVRWQPHSALTVWYREQFGKGKRSRRIGIVAVARKLVIALWRYVTTGVVPAGAILKGALPVA

SEQ ID NO: 111310 - protein, 388 aa, unidentified
MIYVGIDIAKLNHFASAISSDGEELIKPFKFTNDNDGFQLLISKLDPLDKDSLIIGLESTAHYGDNLVRYLVAKNYKVCVLNPIKTSTMRKNNIRKTKTDKVDTYIICKTLMVQESLRFVTFYDLDLMDLKALGRFRQKTIKQRTRLKIQLTSYVDEIFPELQYFFKSGLHQKSVYALLKEAPTPEAIASMHMTHLAHLLKVNSHGRFDKEMAQQLRVLAQKSVGASDSSLSIQVTHTIQQIELLDSQLERVEAEMTEIMKFNDSVIMTIPGIGYINGGMILGEIGNIHRFSSPNKLLAYAGLDPSVYQSGNFQAKKTRMSKRGSKVLRYALVNAAHNVVKNNTTFKAYYDAKMAEGRTHYNALWHCAGKLVRIIWKMMTDNLEFNLD

SEQ ID NO: 111311 - protein, 341 aa, unidentified
MKNKSFIGIDISKNVIDASIFTEGASIKDFPHAVFNNSRKGFGGMVTWLKKNHVVLSNCLFGMEFTGSYSMELEKFLTARKYQFCMLSTHTVKHYPMGPKDKNDKIDSAKIADFLYRYNGTECVKPYKMPDKTMQRLKTLMNERKFLVEQRTCFMNRRLLCTTKEDTQLYDGYIKKLSRDIENIELEEQKLLATDESLLTTYRNLLTIPGIGSVNAINVIVITRNFTAFETARQYASYVGVAPHFRTSGTSVRWRPRPSARCDGQAKADLSMAALIAVQYDAELQSFYNRKLGGKQDSDTKRKALNAVKFKLILRMFAIGKQNRKWETLDSMSNNEILAIS

SEQ ID NO: 111312 - protein, 391 aa, unidentified
MVCVGIDVAKDKHDCCILDSDGMVRADCFTIPNNMDGFKQLLQTIRNCTKKSDKIKVGLEATGHYSYNILGFLLDNGLPTYVINPLHTNLYRKSLSLRKTKTDRVDARTIATMLLSDVDLKSYTDIAYHNEELKSLTRYRFDKVQERAKLKQSVSRLATILFPELEGLVSSIHGTSIYALLSEYPGAKQISEVHLTKLTNLLTTASKGRYGKEKAIQIREEARASIGSVMPAKSLELKHTIKLIQELASEINEIEDSIQKIIDELNPPILSIPGMGVNSAAVILAEIGDFSNFSSPDKILAYAGCSPSTYQSGKLTNCYAHMEKRGSRYLRHALYNATKYVCYWNPVFAEYLAKKRAEGKHYNVALSHAMKKLVRLIYALQKSGKAYLAAA

SEQ ID NO: 111313 - protein, 357 aa, unidentified
MESQDGKYVGIDCGKKTLEVVRINSENSLERRQFSTTESGINNLLKWLTLNDIVGLEAGSQSFRIAKSILNKGIQVIVLNPGDLTTIYQSLKKTDKEDSLKIARLIQRFPIEELPVVPIPTDEEEDNRRLCTEHENWTRQLTQGKNRLHSLFTQAGLTEITKKHLRTKASREASVTLLPDRYKREAERILKVLDLVELNLKLIEEEIKEALKKNQSYVQTIMSMPGIGMITSLAIMSYMGDCKRFSSAKQAAYYVGLVPSVDISGDTVRYGRIVSRGCHAIRRVIVQAAWSLVRCQHGGKIKEFYQRLYVKKGAKKSIIATSRKMIEVLYSMIRTGDLFDSMPEEVWNRKLAQYGLM

SEQ ID NO: 111314 - protein, 334 aa, unidentified
MSSVTVFVGLDYHQAFVQVCVMDAKGSVLSNRRCDNSARLIVNSVKAYGERVVAAIEACCGAAALADELLAAGWQVSLAHAAYVNKVKQSPDKTDWSAARLLADLLRVGYLPRVWLPPAKLRQLRHVVRYRQQLAEARRNAKLRVTALLRTHRVEYGVRRWTKRWIAAVRSCEALGTEGNWVVGELLDEVERLQQQLNVVEARLAALTADDPFVQKLLSYVGIGLVTAVLLRAELGDMSRFRSGKQLSRFVGLSPRNTSSGLKQADAGLIRAGNPQLRAVLIEAAHRLQRLDPRWATLGRQLRRRGKPGSLVAAAVANRWVRWVYHQLRDVQVS

SEQ ID NO: 111315 - protein, 343 aa, unidentified
MNNSVISVDLAKNVFQVCALNKNHKPVFNKKVNRSKLLDTLRNLEANQVVMEACYSSNYWGREIEKLGFTVGLIPPHQVKPFVVGNKNDHNDAIAIAEASFRPKTTFVPVKTLTQQDIQSLHRIRERYVKARTSVANQLRGLLAEHGIIVKKNIGMLRKNVPCILEDPENDLTATARQFIAELYEELQYYDDLIGRKEIAIKALLKDNADYHRLLEVPGIGPIVGSAVIASVGNAKQFKNGRQMAAWIGLTPKQYASGDISRISGISKRGNQTLRRLFIHGARAIVNWCEKKDDALSLWIKSLLKTKHPCKVVVAVANKLARMTWAVLAKNEHYLAPSLTAAG

SEQ ID NO: 111316 - protein, 314 aa, unidentified
MSAYAGIDVSKNTLQVALYPEASELCVTNDAAGLEVIAQHFKAHAVERVLVEATGGYEKLSVRLLAKAGLKVQRINPVRARQFALAMGKRAKTDPIDARMLALFASALEDKHFVVPDEAREHLTELVNQRDSLVQQRDDNRRRIKQASLPVVLEHYKTLESTLRVLIKACDEQIAEQSRRVDADLFKRLSEIKGVGNVTIASLFCYLPELGDLNRAQVAALAGVAPYNNDSGTKNGKRHVYGGRAKLRRAAYMCTLVMARVNPDFKARWARLRASGKPAKVALVACMRVLLVRLNAMVRDGTPWRDQPVGRHIG

SEQ ID NO: 111317 - protein, 323 aa, unidentified
MTHETALHVGIDVSLARLDAVILPTGEAISVENTPAGILSLVGLLSEAGDAALVVMEATGGLERDCAVALVAAGLPVAVVNPRQVRDYARATGVLAKTDRIDAAVLARFGAAVQPEVRSLLSQDEHEFRAWVRRRNQVVEMAATEKRRLAFEKVAAVRASIQAHIELLSKESREIERLLLASVKVHPSWRYRAELLESVPGVGAITALTILAELPELGALSEKQVAALVGVAPMNRDSGRYRGRRQIAGGRRRVRNTLFMAAGTAMLRNPVIRAFRSRLDERGKCRKVARTACMRKLLIILTAIVRTNTTWAGPNIAPLRAHP

SEQ ID NO: 111318 - protein, 341 aa, unidentified
MMLYVQVESVDMLINVGIDVGKESLDLYVLLNKTIGKLKSKKFKNKKEGYLTAVEWFTKTIDCAPGTMLITLEATGVYHEGIAYYLYSQGFRMFISNPGKAKKFAQSLGLVHKTDKSDAAMLAKYGSIQPDDMSLWVPEDDDVRAIKTLIRRLNALEKDKLRESNRLEASLISDAAKRVIQSTRYLISVLGNEIMDIQNEIDQLISSNQEMNKNRELLLSVPGIGAVMARELVYLFSAKKFTSAKQVAAYVGLIPRLNESGVFKGRSSLSKSGPARTRSKIFLAAVCAGTHNPDIKAQKVRLIHAGKTKMQALGAAMRKLIQIGFGVIKNQTRYQPQIVLI

SEQ ID NO: 111319 - protein, 351 aa, unidentified
MRLEVRYVGLDVGKWKCRAAIMNQKGQILDEFWFTNNHDGIESLTEKLSIQDRVVMESTGSVWTNLYDRLDDRHIHVSLANPLKTKAIASAKIKSDKVDARILAHLLRSNLIAESYVPAKPLREIRALIRHRVAIVKIRTMVKNQIHAIIDKHGFACEYSDMFGKHGLEWLRGLELPSLDKLILDNHLTHLESLNQQTDRVDEEIHRKACEDEDVRLLLSLTGVDVYTALLIRSEIGNIDRFPDYKKLVSWAGLAPSLHQSGNVEYHGSITKQGSKMLRWIMVEAARVAATRDPRMREFYERVKRRRGDQKAIVAVANKLLKITWFMLTRREPYESRNEKRYLQKLNSVAA

SEQ ID NO: 111320 - protein, 342 aa, unidentified
MARQEIIKQVVGIDIGKEKFFACYQIKDLNEHIVIKGTKSFRNDNGGYKEFLLWCKRREKPTVAPTVYVMEATGIYYEDLAYFLYENGCKVSVQLAQKLTYFAKSNNLKTKTDKVDAKMIATFGIEKALETLGIWEPPSKEFRVIRDLAREHTSLKEDLTAAKNQLHAMEHAHQTYERVIELKEEMISFYQEQLKSIEKELKVLIKANHQLSNKIKNIETIKGVGFITIVKVLAEVNGFLLFKNIRQLVSYAGLDVVEKESGNFKGKTRISKKGNARLRSALYMPAMTAATHNSNIRTFYERVNTDRKIKKHGIVAVMRKLLILIYTLWKKEEPYQIDYEMG

SEQ ID NO: 111321 - protein, 423 aa, unidentified
MEVMHKRVAGLDVHKETVVACVRLMVGRKSTRECRTFATTTEGLLALRDWLTASRVTHVAMEATGVYWTPVWKILSEGEFGLVVANAAHIKQVPGRKTDMNDAMWIADLQACGLIKASFVPEENVQELRSLTRTRKQLVREQTRHVQRIEKTLEEANIKLGAVISDLMGVSGRRMIEAMIAGECNPHRLAALAERTIKASPKALYDALHGRLREHHRFLLKVHLRQWDALDAAIREIDRQVAGQIERMDAEAADGQPPFRELIQRLSAIPGVARLSATAILAEIGRDMGRFPTAGHLVAWAGLCPGQNESAGKRKSARLRRGAPWLKTMLVQCAWAAKRAKDSYYMAQFHRLRGRRGPQKAICAVAASILTAIYHMLKSGAAHRDLGADYFDRRSTETKAKHLVARLTKLGFTVQLQPSAKAA

SEQ ID NO: 111322 - protein, 377 aa, unidentified
MATTRTVLRGQLTAKPGDLYMSLELGDKHWHISIGGERRSVSHYIVEAGHTEEVADCIAKAAARLHTARVHSCYEAGRDGWWLHRWLTELGVDNIVVDPASIEVNRRARRAKTDRLDADKLLAMLVRHHRGERVWSVLREPSASDEDARRAHRELQRLTHERIAHTNRISSLLVLHNLRPRIVIGGRDWPVWWNAHREQVPPTLRAELEREAVRLKVVKEQVRAIEAARARELAEGKQPLVAQLVRLRAIGAKGAWVLVKEVFGWRHFANRRELAGSLGLVPTPYASGDSEIEQGISKAGNRRVRALLVELAWSWSRLQPGSALTQWFNRRFAGAGKRMRRVGIVALARRLAIALWRYLQTGEIPIGARLKPAGSGI

SEQ ID NO: 111323 - protein, 353 aa, unidentified
MMIVLGADMHKSSHTIAGIAAATGEMLGDKTARVGTRGFGEVLVWARGLGADRVWALEDCRHVSGSFERFLIARGERVVRVPTRLMASSRRSSRERGKSDRIDAVAVARAALGEGIETLPTAALAGPELDIRLLVDHRERLVRTRCALNNTLQWHLHDLWPELELPGSSLFYGKWGPRIARRLARTEQTMRVRIARDELRRLRELTQAIKALEAEIAKLVGQVAPQLLTEPGFGALTAAKLVGEIAGAGRFASDAKLARSAGLAPIPVSSGRTDRHRLDRGGNRQVNAAIHRVAVTRARCHQETIEFIARKQSEGKTHREAIRCLKRHLARRIWQLLRAPHPESETAPHPSIS

SEQ ID NO: 111324 - protein, 369 aa, unidentified
MLIIGLDYHPGFQQIAFVDTETGELQERRLQHRAEAEKFYRDLAAQGVRVRVGMEASGHARWFERLLAELNFELWMGDAAEIRTKRVRKQKTDRQDAQLLLRLLLEDRFPRIWVPSWGNRDLRQLLWHRHRMVQARTRIMNQLQAVALNEGLRCKKRLWGEAGREQLESFPLAPWASRRRRDLLELLDRLNPTIAELSQAIEQEVEKSPEAQRLMTHPGVGSLTALAFVLIIGTAERFRSGKPIASYLGLVPAEESSGDRRRLGHITKQGNSLLRFLLVEAAQVTVRSDPEWRSRYFHLAMRRGRKIAKVAMARRLAIRLYWMWRKEWDYEQFTKFGSHAGQPGNRFGVPLNTELTIGHPAPLLRGSSN

SEQ ID NO: 111325 - protein, 413 aa, unidentified
MADETIHWFAGVDWGSAKHQICLLDGAGKVVGEREFAHGGAGLTALCEWVVSMAGDPGTIAVAIEVPHGPVVDVLLDRGFAVYAINPKQLDRLRDRVSVAGAKDDRRDARVAAAGLRTDRPLFRRVLAGDPSVVELREWSRLAEELQQERVRLGHRVRQQLWRYYPQLLALSDDVTAEWVLALWTRAPTPAQAARLREATLARLLRQHRIRKLDAPAVRGILRQPAITVAPGVTEAAVLHLRSLVARLRLANQEFHQAARKLEELCTALSETQPSTQDSGPSDGAILHSLPGVGPVTLATLLTEAAGPISRRDYTALRTLSGVAPVTKRSGKSCLVIMRYAAQVRLRNAVFHWARVAVLNDPKCRSRYAALRARGHSYGRALRSVADRLLGVACVLLQRQVLFDPNHGAPAVP

SEQ ID NO: 111326 - protein, 340 aa, unidentified
MQIVRIGLDLAKYVFEIHGVDAHGKTVVRKTLRRHAVSVFFANLPPCLIGMEASNGAHFWAKALSDLGHDVRLISPQFVTPYVKSNKNDRNDAEAICEAVGRPNMRFVPVKSAEQLAVQAVHRIRSRLVADRVRLVNQVRGLLGEHGIVVAKDIGNLRRALARIVGDNEDHALHDLVRALMAELREELTELDARIAGYDRKIRELYRNSEICQRLGKVEGIGPVTATALVAAVGDRSSFKNGRQFAAWLGLVPKQRSSGGRARLFGISKRGDRYLRTLLIHGARSVLTHSKSPPEWLSELVKRRPKNVAVVAMANKTARTIWAVTAHERAYHSGYVSRPA

SEQ ID NO: 111327 - protein, 411 aa, unidentified
MLKIVYPICCGLDVHKTFIVACIASTNDKGVTTYQTKRFSIYTKSLNEFSDWLVENNCKDVCMESTGKYWHPVWNVLERTCRPVLAHPKYLKAIRGKKTDKKDAKWIADVFKHDLVSGSFIPPENIRQLRDLMRYRSKLTNYTTGEKNRAQNCLTTSNIQLDHVFTDVFGKSATAILNHILENPGENFDVAPFVDRRCKTPVEEIQLSIDGSIAPEQAEKLKIIRSHMGSLELCKLNLESIILSLAEPLLLKINLVSTVPGIKSFSAIGVIAEIGADMSAFPSAKHLCSWAGLAPQCNESGGKKKSSRVSKAGAYIKPLLIQCSNAVVKSNKHPEIKNRFLSIKKRRGHKKAIVAVARMLLTAIFHILSKNEPYNPVLYKVSDVAPVDTVDRAIKILEKRGFTVYQPVAIS

SEQ ID NO: 111328 - protein, 400 aa, unidentified
MTAVWAGIDSGKRTHHCAVIDAAGRMVLSQRVANDESALLELITSVLALAGEDHVVWATDLNAGGAALLIALLADRGQQVLYIPGRIVHHAAATYRGDGKTDAKDARIIADQARMRLDLQPVRSGDQISTDLRLLTSRRTDLVCDRVRAINRLRATMLEYFPALEAAFDYSKKAPLILLSGYQTPDTIRRVGTTRLTAWLKKRGCRGSATVAGKAVDAANAQRTVLRTEPVAAQLVAQLAGQIAAIDTEIAQLDEQISERFDQHRDAPILLSMPGFGPVLAATFLANTGGDLRAFETVDRLASVAGLAPASRDSGRITGNHHRPRRFNRRLMRTCYLAALSSLKNSPASRTFYDRKRAEGKSHKQALIALARRRINVLWAMLRDRTTYREPLPAALTPAA

SEQ ID NO: 111329 - protein, 433 aa, unidentified
MRAAPVEIPDADSETVLSRVCAIDVAKEFGTVCTRLPGPTGRRGSRVWQVAATTNAVTDLAAQLAAADVQKVTVESTSDYWRIWFYLLEAAGLDVQLVNARDVKNVPGRPKTDKLDAVWLAKLTEKGLLRPSFVPPAPIRALRDYTRMRVDLIRDRTRNLQRMEKLLEDALIKVTTVASSLRTLSTRDMIEALIRGEHDPNALAELARGRMRGKRTALIEALTGRFKEHHGELARILLDQIDRLDKQIAHLSDRIDAVLAEIDPPQPSGDAIPAQDAITVSTARQRLCEIPGISTESAQMIIAEIGLDMSRFATPAHLVSWARLCPRTIQSGTSLSAGKAGKGNPYLKGTLGMAAAAAARGGDTFLAERYRRLVKRRGKSKALVAVARSILVIVWHLLAHPGAPSRPGRPAVRSDQGGAGDRPESGGDRAPGL

SEQ ID NO: 111330 - protein, 315 aa, unidentified
MNQSTDSVKFLGVDVAKDTLQLFSRTLKVPAQIENTPKAIAAWLKALGRHHSQLHIACESTGGYENALLRACWKVGVRVSRLNPARVRDFARCRGLLAKTDAIDAEAIAEFASTFPPQPTPEPSAQQVLLTELVARREDLKTQRAAESNRSRDIQDKSLCRMLEKHLKFLDAQIKQIDQLIEDTISQDQEMSRKRDILVRTKGVGKTSAAILLSCLPELGTISGAAISALAGVAPFNRDSGTLRGKRSIRAGRATARKALYMCALVGSRTNSILKEIYQRLTSKGKPPKVALTALMRKLVVHLNSSLKTLQSTTA

SEQ ID NO: 111331 - protein, 425 aa, unidentified
MGSSKQSREKMNTHLLSSEHAEASIKYVCGIDIGSQSCSSCVTRPDKSVVVKPITFVNTQQGWKVLEEKLAQLDAAPDQIVIGMEATSRSHENLYHELEQRGYQMRLLHPGQTHHFHQQRGLRAKTDRLDAMTIARVLLSGEARMGYIPGEQVATYRELVRLHTQLSEEAARYQNQIQVLVVVLFPEFNQVFADPCGQGALAVLKAYPHAQAVAEAGVEAVYQVLRVIPATHFGRPTAQKLVAAAQTSSSSGRALSGRASSLRILCDQLEHTQANLTRLEEELEQLITTDPGTKGLQQMPELGPKTIAVLRAELGEVDRFACTDQAVAYAGMDIRIKESGKFKGKAKLSKRGSGLLRQILYLAALRSIRLEGSAFGAYYRHLVGRGLKKMSALMAVMRKMVAVTTHLMQTGEDYDPSKVWVGGTS

SEQ ID NO: 111332 - protein, 370 aa, unidentified
MKKRITFVGLDTHKNSIEVALADEGANSEVRLYGSIGGDLDSLDKMIRKLRIPGAELRFVYEAGPCGYEIYRHLRAQGLHCDVVAPSMVPRRSGDRIKNDRRDACNLARLYRAGELTAVYVPHEDDEAMRDLVRGRQDAINAQRKARQQLGGFLLRHGVRYPGKCLWSLAHGRWLAGVKMPHPAQQIMMQEYIHTVEECTQRVIRLNEQIQQLLPDWRMHPLVTALQALRGVAPVVATTVVVEIGPMGRFKNPRQLMAYLGLVPSERSSGGSVRRGAITKTGNGHARRALIEAAHSYRHPARISRTILKRQETLTEPVRQIAWKAQLRLCARFRRLIARGKSRNRVVAAVARELSGFMWAIAKQVPVPQG

SEQ ID NO: 111333 - protein, 391 aa, unidentified
MVCVGIDVAKDKHDCFITNSDGEVLFKSFTIANNREGFETLFQRIQSVSDDLTKVKVGLEATGHYSYNLLGFLLDNGLPTFVINPLHTNLYRKSLSLRKTKTDKVDSHTIASMIMSDVNLKSYSDTSYHNEELKSLTRYRFDKVKERAKLKSSVSRLVCILFPELEKLVPQLHMASVYALLSEFPSAHAVASAHLTRLTHLLSESSKGRYGKDMAIIFREAARNSIGSNMPAKSLELKHTIKLIRELTSEIDEIETEIKSIMDEINSPILTIPGISYRMGAMIIAEIGDFNRFDSPDKILAYAGFSPSTYQSGQLDGAYAHMEKRGSRYLRYALYNATKYVCHWDPTFAAYLAKKRAEGKHYNVAISHAAKKLVRVIYHLEKTKQQYIKAA

SEQ ID NO: 111334 - protein, 407 aa, unidentified
MLFVGDDWSEENHDVELMDASGRTLARVRLKEGAAGMTRLHAMIGEHAGDDEPVVRVGIETDRGLWVMALTAAGYEVFAINPLQTSRYRDRHQVSGGKSDAGDAHVLADMVRTDSHQLRQVAADTPAAQAVKVVARAHKTLIWERTRHVNRLRHQLLDFFPAAVEAFDDLDAPDALELLAKAPDPAAAAKLTTAQVAAVLKRAGRRNITDRTAVIRAAFRSPQLAQPSQVTRACASVVRALTAVLAALNEQITVMEAQVDAHFLQHPDAEIIMSQPGLGHILGARVLAEFGDDPARYASAKARKNYAATSPITRKSGKKKIVLARYVHNDRLVDALDSQAFCALTASPGARAYYDRQKARGISHHAALRQLANRLTGILHGCLKDRTLYHEETAWPQSASPNISTAA

SEQ ID NO: 111335 - protein, 380 aa, unidentified
MKKITTAKKNHKALSKTEKKQIWQKASQQRLTVGLDLGDAESCYHILDDVAATVSTGRLLTTKTGLKSLFEKMPSSRVALEVGTHSPWVSRLLAGLGHEVIVANPHKVRLITQSMKKNDRIDAEQLARLARVDPKLLSPIRHRGEVAQADLAVIRARAGLVEARTGLINTARGLVKPFGERLKSCDADQVGEGLQEGLSEAVCTAVEPLLRSVEAVTEQIRVYDGEIEAIAKRYPEVELLRQVYGVGQLIALTFVLTIEDPSRFEHSREVGPFLGLTPKQGESGERQPQLGITKAGDQLLRSLLVQGAHCLLRKGAPESDLRIWGMEKMEKGGKNAKRRAIVGVARKLAVLLHRLWVTGEVYDPLYNQKQKGKQAGRAAA

SEQ ID NO: 111336 - protein, 388 aa, unidentified
MIYVGIDIAKLNHFASAISSDGEELIKPFKFTNDNDGFQLLISKLDPLDKDSLIIGLESTAHYGDNLVRYLVAKNYKVCVLNPIKTSTMRKNNIRKTKTDKVDTYIICKTLMMQESLRFVTFYDLDLMDLKALGRFRQKTIKQRTRLKIQLTSYVDEIFPELQYFFKSGLHQKSVYALLKEAPTPEAISSMHMTHLAHLLKVNSHGRFDKEMAQQLRVLAQKSVGASDSSLSIQVTHTIQQIELLDSQLERVEAEMTEIMKFNDSVIMTIPGIGYINGGMILGEIGDIHRFSSPNKLLAYAGLDPSVYQSGNFQAKKTRMSKRGSKVLRYALVNAAHNVVKNNATFKAYYDAKMAEGRIHYNALGHCAGKLVRIIWKMMTDNVEFNLD

SEQ ID NO: 111337 - protein, 383 aa, unidentified
MTEEQVIIGMDPHKSSNTIVVMTPDETMLTRRRFVNSDDGFIEMLDAVGDYPNRVWAVEGANGVGRSVAQRLVAFDETVVDVPAKLATRVRVYSTGHGTKTDNADAVAIARAAIHSKHLRRVLPDDATVAMKLLSDRRHELVGLRTQAMCRLHRLLRELVAGGAPRQLSAEKAFDLLNDLKPDDPANEMRLEIAFDHIEDVMRLDRKIDDYNRRIVADIKTCGTTLIRLYGVGPINAALILGEVGDVSRFPNRDHFASYTGTSPISASSGDQQRHRLNRAGNRRLNHALHIAAITQIRQDTPGRVLYRRKMSEGKSHKEALRCVKRRISDAVWRQLQTDRSDDQTQDTKWPRKPAKDTFLVAYRSPDTPRANGRPKQLKPAVV

SEQ ID NO: 111338 - protein, 342 aa, unidentified
MKKASIIGLDLAKRSFQAHGALADGSVAFRKKLTREKVLGFFAERPRCIVAMEACGSAHHWGRAIRDAGHEVRLIPPAYVKPFVKRQKNDAADAEAIAEAASRPTMRFVAVKTEEQQARAMLFRTRDLLVRQRTQLINALRGQLSEHGVVAPQGPANVVILAQAIDDMTPSLPLLVVELARVYLDQIDGLSQKVAGLEKAIACEAKRGGMTRRLQTMPGVGPITAMAIETFAPPMEVFRRGRDFAAWLGLVPVQHSTGGKQVLGKTSKMGQRDIRRLLITGAMVIVRWACRKGAQEGTWLHRMLGRKPRMLVAIGLANKMARSIWAMLTKGEDYRGPVAANL

SEQ ID NO: 111339 - protein, 463 aa, unidentified
MKQKHGRKQQEKRSGDPGSLPPITPNAAGIDIGSEEHWVAVPEDRDERPVRCFRCFTADLHAMATWLKACGITTVAMESTGVYWIPAYQILEAHGFEVKLVNARHVKNVPGRKSDVADCQWLQRLHTYGLLSASFRPDNEVCVLRSYWRHRDSLVRYASSHIQHMQKALTEMNVQLHRVLADITGVTGMKIIRAILDGERDREKLALMRAPGVKSTPEEIAKALEGDYREEHLFVLRQAVELYDFYQRQIEACDHEIDACLSRFATKADLESHPLPPLKKGKKKPKDGPLVDLRAHLWRMTGVDFTQIDGLDVLTVQTILSETGLDPRAFRTMKHFTSWLALCPDNRVTGGKVKSTRTRKVANRAAMAFRIAAQSLANSTSALGGFYRRIRARLGAPKAITATAHKLARIFYTLWTTRNQYVDLGAQHYEQRYKDRIVRSMKKRLHDLGYVVTIEPAATAATL

SEQ ID NO: 111340 - protein, 348 aa, unidentified
MIVGIDVHKHSHAAALLDERGGEVGTLTFTNTPKGYQRLLVWLDDHGAADAVVGVESPGAYGRCLVAALVAAGHETLQVPAWRTHRERHRQGPGKTDPGDAISIAQVVLRKRRELGPAMEPELVRVLGMLELQRRRLVRNRTQAIQRLRADWTQLDPVAEAGVIRCDRRRELAKLKRLRLGEGLAERTAARCIRELARDIEDLNKRIKALDGEIAELLEEHGNPLADLQGAGTNLTATIIAQAGDVRRFRDAGAFARFCGTAPIPCGSGQTAGRHRLHRGGNRQLNSALYRIAIVQARHHPDARAYLARKASEGKTPREARRALKRHLANVLYRRLYAWAEQAPAMQT

SEQ ID NO: 111341 - protein, 412 aa, unidentified
MDVVYRCCCGLDVHKDSVTACVLWAESGGKNRQEKRKFATFTRQLLELLEWLRQCGVTHVVMESTGIYWKPVWHVLEGHFELLLANAQHVKAIPGKKTDRRDAGWLAELLQHGLLRGSFVPPEPIRGLRDLTRYRVNLAQECNRIANRIQKVLEDANIKLASVATDPLGVSGRAMLKALVKGEQDVEKLAEMSRGLLRRKIPQLQLALEGRVTEHHRFLLRELLDHLEFVESKMGKLETEIAARLAPFQDQIKRLCEVPGINCVSAWGIISEIGLDMNQFPDAAQLASWAGLCPGNWESAGKRQSGRTRKGSPWLRRHLCQSAWGVSTKQNNYLSALFRRLAGRRGVKRATIAVAHALLVIAYHILKTQAHYHELGADHFDRLHPERLTRRLVKRLEGLGFQVTVTPISVSA

SEQ ID NO: 111342 - protein, 352 aa, unidentified
MKTRQAVSELTVGVDLGDRKSVLCRLDAQAAVVERRTISTTAEAFHRYFSALPSARVVLEAGTHSPWVSRLLEQLGHEALVANPAALHHAGLAKSDQIDAEKLARWGRADPKMLHPIQHRGVQAQADLALLKARDALVRSRTLLINHVRGSVKSFGARLPSCSAESFARQVEARLPALLYGALAPLLELIASLTQQIRAFDREIEEACEEAYPETAPLRQVAGVGALTALCYVLVLEDPSRFPQRRAVGKYLGLIPRLEESSTWSPELPISKAGNQFCRRLLVQAAHYILGPFGPDTDLRRWGLGLANRGGKSAKKRAVVAVARKLAVLLHRLWTTGERYEPLRHARVLAPA

SEQ ID NO: 111343 - protein, 340 aa, unidentified
MGEITTIGLDLAKHVFQVHGVDADGTTVLRKQLRRSQVLAFFSRLPSCLVGLEACATAHYWGRELAALGHEVRLMPAQYVKAYVKRNKNDAADAAAICEAVRRPTMRFVPAKTADQQAAVLLHRGRERLVRQRTALVNALRAHLAEFGVIAPQGLRNVGKLIAIVRDEDDARLPDMARQVLQVLAAQVEQLEMAVAAIEKQLMAWHKSNPVSQRLATIPGIGPIIATAIAATVVEPTAFRSGREFAAWLGLVPRQNSTGGKTRLGRISKRGNQYLRRLMINGASANLLRSKATKADPWVIGLRRRRPSLVVAVALANKTARMAWAVMQRKENYQRMAAAA

SEQ ID NO: 111344 - protein, 435 aa, unidentified
MSKLEQMRQRAAGIDVGSEKIFIGMPDGNVKSYLTFTQSMQTAVNFLKQQGINTVAMESTGVYGVVLFEMLETAGIEVFLVNPSHIKRVPGRKTDVQDCQWIQQLHSYGLLCQSFIPSEDIRRLRAYVRLREIYIEDAAAYIQRMQKALTLMNIRLHQVIAQIQGASGMRIIKAILEGEREPHKLLLLCEERIIKNKAEDVLASLQGNYKAEHLFALQQAVECYEFFRQKITICDRQLNEHLKKMTVSKNTPAKINKVKPIRHHKPDIEDLHIKMIKVMDGKDITTLPGITDYNLLQIVAETGNDLTKWPTEKHFTSWLKLAPGKHTSGKLNKKVKYKTTPRAGQLFREAAQSLMQSKHIALGQFARRLRAKKGSYIAVKATARKLAEMFYRAATMGLEYIEKGIEQYEKQWQEHQLRLLHKKAKELNFELRPID

SEQ ID NO: 111345 - protein, 353 aa, unidentified
MSHLPEEREVILGVDTHLDVHVAVLIDVVGRIVATTSVPTTALGYEQLIEWARGFGRLTRAGIEGTGTYGAALARRMQAHGVQVLEINRPDRSRRRLRGKSDPTDAENAARAVLAGEANAIPKAQSGLVEAMRAVSMARRSAVKAKTQAINQLRALLVTAPESIRATLWKVKPEQCVARCARLQSLGDTPLLKALTSTLRLLARRWMSLAKELHQLDAALVELTKRAGRRLLARFGVGPQTAATLLVTAGDNPNRLRSEAALAALCGASPLEASSGKTTRHRLNRGGDRAANNALWTISMVRMRSDPRTRAYVTRRTAEGLSTKEIQRCLKRYIVRELYPLILADLAESIRKT

SEQ ID NO: 111346 - protein, 277 aa, unidentified
MHGTTIAVDVAKSVFEVAVSEHPGQVRERYRLSRERFHRFLGEQSPATVLMEACGSAHYWARRAQTHGHRVVLVPPHVVRPYGLRNKTDRTDTKGLLEAVRNEDVRPVPVKSETQQALAALHRLRSTGLATRTARLNTVRGLLREFGVVIPTGARQVVPHVWAQLEDADGLVPSLLRPALAEAVREIREIEARMHAVERQLEAVAEHTPVVERLRTIPGIGLLTATALVAAVGDVQRFPTARHFASYLGLTPRESSTGARRQLGAISKRGMSTSGRC

SEQ ID NO: 111347 - protein, 347 aa, unidentified
MLYAGLDLSRKRLDFCLLDEAGELIERGAVPPDRAGLCSLAERVAAQQRQRVVAAVESMTGARFVHDQLESHGWRVEVADAARVRGLAPLACKTDRIDAWALAELCRRELVPAIWLPDGEVRGARERARFRLHLVKHRTALKNRIHQTLVGFGTPCPVSDLFGERGRRLLARLELPQPWAGSVAASLRLIDELDREINEIEAELRRLGASHRYVPLLLTVPGIASILGYTIAAEIGDINRFASPAKLAGYTGLCPRVYQSGEHDRRGPLSKHGPRYLRWALLEASIHACRHPLYAQRYQHTKKRLGRQRGPRVAQVDLARRLSEAIWHMLTRNQPFAPAGASQVLAA

SEQ ID NO: 111348 - protein, 350 aa, unidentified
MPRKFDTAVVTIGIDPGKNILHLVGLDARGEIVLREKVARAKIVSRLANMPPCLIGIEAGMGTHYVTRDLLALDHDVRQVPPVYAKPFRQTHKNDFRDAHAVAEAVQRPTTRCVPPKTDEQLDLQALHRVRYRLVGQRTAIINQIRCFLLEHGITVRQRLHWLRHALPDILAQRTDVLSPRMVRILEDLAQDWRHLDDRIEAVTDEIDVLSKNTEPCRHLMTIPGIGPIISSAIVAAIADGAAFTRGRDFAAWLGLVPRQISTGDRTILGRITKRGNRYLRMLFLQAARVVLLRPRNWMRHSFGPWLAAAAQRLHHNVLATALANKLARIAWSVLVEHRVYETRLSAAAV

SEQ ID NO: 111349 - protein, 387 aa, unidentified
MPNQIDLSRCVIALEQDATLIAVVEMGQSSWLVAGVVPGLERNPLKKLGADRDALLLLLHRWRKEAARAGRTIKRITVAYEAGRDGFWLARWLRAQSVEAYVIHPSSVPVSREHRRAKTDRLDTELLKRAFLGWLRGEPKHCSMAAIPTLEDEDARRPSRERETLVGERTRIFNRLKANLARLGIRGFRPNLARSSSQLEALRTPEGAPVPTNTMAELRRDMDRLQFVKRQIKEIEKTRAQRLAKTPSEQRQAMVRLLMRVVGVGVETADMLVQEVFSREIQDRKALARYAGLTGAPDESGQKRRERGLAKAGNARVRRAMIELAWGHLMHQKGSSLTAWFWRRTSDSRGGKRKTMIVALARKLLITLWRLVTTGETPAGLRLRPAE

SEQ ID NO: 111350 - protein, 428 aa, unidentified
MDELDRNRLEEFRQLRQEVRHSEEYLIVGIDISKDRHHAFFGTATGKTLLRRLVFSNDYEGFRTLLDQAEALRARHGLKKVVYGMEPTANYHKPLGEFLIHLGRCVVLVSGVTVKQNRESLDGRWDKHDVKDSANVADLISQGKCLYYDHPAARLRGLRNLLSLKRRLKKQEHGYRVRIRNNLIAQYFPEMDRDYERLGAEGLSIMRWCFPPSQMTVLDVDPFIERVTSRRIRIEKRRRLEGIWEKAGESIGCDGVPGVEHEARVMVEGLKQIREMIKETEDKIEELCEEFPEYKYLLTIPGYGPDVSAKVLGAIGDPDRFQNGKQVLKLAGLDLSADRSGKDSAKAIPQISKRGKADLRYALYQAALIASTRNQDFMRYYTRKLQGREREKGIHTKMWVKLSAKMLLIAWTLMKRKEVFDPAYLNVE

SEQ ID NO: 111351 - protein, 323 aa, unidentified
MKTQHFTLNIGVDIAKKKFDTTGLLDNKYKHKTFSNDLNGFAEFTDWFSKLYGDIKPLICMESTGIYSQALADFLVSKGYAVSLVNPAKIHAFAKSQLSRAKTDKADAKLIAHYAALMQPPLWIPPPANIRQLQALVRRVEHLQEMIQMETNRLESANSHVETSINTVLTTLEAELKATREAIKNHIDSDPDLKKRGELLDSIPGIGNATIAHLLIALSPHHQFTKAKQVVAFAGLAPKLRESGQWRGTTHIAKNGDAALRKALYMPALSAWKYNPLIRQFCLRLKANGKNGKAVVCAAMRKLIHLAFGILKSGKRFDPNFAG

SEQ ID NO: 111352 - protein, 415 aa, unidentified
MTEQRWYAGVDWASESHHVFLTDGTGRRIGEKIFKHSGDGLAEMAAWLLSASGAASSSQIYVAIETPHGPVVETLIERGFTIHAINPKQMDRFRDRFTLAGAKDDSRDAEVMASALRTDPPCFRPLAALDPTVIELREWSRIASDLGTERNRLTNRLREQLWRYFPAMLELESDLGAPWLLDLWELAPTPGKAARIREGTVAKLLKRHRIRRFDAVHVLDVLRKPAVQVAGGTVKAASAHIKTLIARIRLVNGQIKEANRQLDALTAKLIPVEDTEAGQAKQHDVEILASLPGVGRIVLATLLTEAWDVLMRRDYAALRSLAGVAPVTKRSGKSCIVIRRQACSNRLANAMYHWARIAIQHDPRSKAKYAALRGRGHSHGRALRSVADRLLNVTCAMLKTGALFNPQPEARIAPC

SEQ ID NO: 111353 - protein, 343 aa, unidentified
MDHFAGLDVSVKETSVCIVDDTGRIVREVKVASEPDALLAVLQNPAYHFKRIGLEAGPLSQWLFSALAEAGLPVICVETRHMRAVLKAQINKTDRNDARGIAQMMRAGLYRPVHVKTLRSQKLRMLLTHRKLLQSKAIAIDNDLRGTLRNFGLKVGVVGTVKFEARIKELVENLPDLTLLVEPLLIVRRVLREQLGILHRRLLAIVRDDDVCRRLMTVPGVGPVVALTYRVTVDVPGRFRNSKAVGAVFGLTPSKHQSGESSRTGGISRCGDEMMRMMLYEAAQILLLRSAKWSWLKAWAMKIAKHRGVKKAIVALARRLAVIMHRIWVDGTEFRWTKEVAAA

SEQ ID NO: 111354 - protein, 397 aa, unidentified
MSMVFIGIDVSKDYSSAQGLDRGGKKLFDLEFAMNGEGFSQFLKVLKTHGEDLSGVTVGMESTGCYHINLFAFLCSEGMVCVVINPLLITNFARLSLRKTKTDKKDALTIAQFLLVHRSKLSQVSYSQSSQDLKDFARERESLAGMMAGLKNDVRRLLQMSFPELEHRCKLFTETMRRFLMKFPSARAIRTAKPKEISKALIHAEGKRKRVFISAEEIIKLAKASVASDRVAKEWILSEKIETLLYLEQKQARITEALVEACRSMRVDELDILTSGDGISAITGSTFLAELGDIGTFKSYKHVIAFAGLDPSIHQSGQYEGISRLSKRGNRHLRRVIFLMTLCAVRSRNIFREYFLKRKEEGLPPKKAILATAHKLLRVLFAMLTRKSYFRREVVEV

SEQ ID NO: 111355 - protein, 427 aa, unidentified
MNQNDTSTNFAATLGWDWADKKHDVWLQAAGGGKPEHRVIEQTPEALHQWVAHLRARFPKGRIALAIETSRGPVLSALGAYGFIVLYPINPAMLCSYREAFCVSGAKDDRTDAMLLEEYVRLHQAKLRPLEPDTELTRKLARLVENRRGLVDERTRLVNQMHSLVKTYYPLMEVLFEDMTLPLVAFFLLKWPALASLKMAGPAALRKFFYGHNCRSDKTMEERLQAIQKAQPLTEDPALIEPAVLQARALAGLLQVLHQSIDQMETKIEQTTDAHPEAALFRSFPCAGPALAPRLLAAFGTNRDRFASAQEVQQFYGIAPVKKQSGQSKVIHRRYRCPKFGRQTFHENASHAVRKEGWAKTFYEEQRAKKKGHHACVRAVAFKLLRIYFRCWKDKKCYDANLYEEALKKHGSPLAGLLKKAAPTNGE

SEQ ID NO: 111356 - protein, 361 aa, unidentified
MFSERTSVGLDVHARSVAVAAIDGVTGELFTARLTPARDHIRGWLRDLPGSVAVAYEAGPTGFGLARALGADGIRCVVAAPSKLQRPSGDRVKTDARDAMHLARLLRLDEITAVVVPSPDQEAARDLVRAREDCRGDLMRARHRLSKLLLRQGIVYSDGGAWTGAHDRWLRRQRFDTPATTLTFEADYEALLSTGARRDRLDTAIAGMAADSEFTPVVRRLSCLRGVSTLTAFALAVEIGDWHRFTGNSIGSFVGLVPSEYSSGASRVQDSITKTGNTHARRLLVEAAWHHRARYLPGAVIRSRWELAPPSARARGDAGNRRLHARWTRFNERGKRPVIANVAVARELTGWCWSLAVLEPR

SEQ ID NO: 111357 - protein, 346 aa, unidentified
MEHYVGLDVSLKLTAICIVDRAGKIAREGTVSSDPEAIATFIKSHAPDVARIGLETGATSTWLWTELNKLGLPVICIDARHAKAALKMQINKSDRNDALGIARIMQCGWYKEVRVKDLDSHAVKALLVSRALLVKIKRDVENQIRGLLKNLGLVIGRAKMNTFARRAAELTENRPELAAAVEPLLRARTAIEQQIADLDRKVMLLARNNAQARRFMTAPGVGPITALCFLATIDDPTRFKRSRSVGAYLGLTTRRFASGEIDWTGRISKCGDKMLRSYLYEAANVILTRAAKWSALKAWGIRVAKRTGLRKAKVAVARKLAVILHRMWIDGTEFKWSSKEAANQPA

SEQ ID NO: 111358 - protein, 318 aa, unidentified
MNTDNFQSINVGVDTGKFQLDIYIRPLDIYFTVSNDEKGINDAVKEIKKYKPERIVIEATGRLEMPFIMACAKANLPFVIANPVHIKRFSGAIGQRAKTDKLDAQLIAHYGEAIKPRLSTLKPETMQDMSDLVARRNQLLVMQTMEKNRLQILPKSLTMTIKPILTAFKNQITKIENKIVELIESCPDYQAKNTILQSMKGIGKIASASIISNLPELGYMSSKQASALVGVAPMNRESGRYKGHRKIQGGRHQVRTVLYMAMMSAIQSNPVFKETYQRLVAAGKPKKVAIIACIRKMIVILNSMLRDGVLWEAPVIKN

SEQ ID NO: 111359 - protein, 337 aa, unidentified
MFEVSTVGVDLAKNVIQVHGVDAAGNVVVRRQLRRSQFVGFFEGRPCCLIGMEACSGAHHWARELQSMGHEVRLMPPSYVKPYVKRGKTDAADAEAICEAVTRPSMRFVPVKGEADSAALVLHRARDFLVGQVTQTGNAIRAHMAEFGIVTAKGSKRVADLEAELTALPEAARLPLQALFDQLADTQARIERLTDEIEEVHRRNDVSRRLASVPGVGVLTATAISATTPDISNFGSARDYAAWLGLTPKQHSTGGKPRSGGISKMGNRYIRRLLYLGAMAQIMVRRRSRRPGSDWLSRKLASKGTRVVAIALANRMARTIFALLRDGTSYKPRVSAA

SEQ ID NO: 111360 - protein, 413 aa, unidentified
MDLLYASCAGLDVHKDTVVVCVRQRDAAGKVRQQTRTFGTMTSQLLELGDWLRALGVTHLAMESTGVYWKPIWNLLEDQFEILLVNAHHIKQVPGRKTDAKDAEWIAELLQHGLLRGSFVPARPQRELRDLTRQRRQLIMAKASVANRIQKTLEDANIKLASVATDVLGVSGRDMLRSIIAGQDDPEELAELARRRLRSKIPQLRLALRGRVSAHHRFLLKLLLEEVEQHEAWIARITERITEVMSAPFTEAVRCLASIPGIDERAAENILAEIGTDMKPFASDGKLSSWAGVCSGNHESAGKRQSGRTTKGNRWLRATLVQVAWAASRTKKTYLSAYYRRLASRRGKKRALVALAHTILVIVYHVLREGTTYRELGSQYFDHLESERLTRSLVRRLERLGHKVTLQTQETAA

SEQ ID NO: 111361 - protein, 336 aa, unidentified
MLNESGRLIQQSILATRAAAILDFIGGMRGTLHVTFEEGTHSSWLYDLLSRRVTRLVVCNPRKNALMKSGNKSDAIDARKLAELLRADMLSPVYHGEKSAMEVQHLARSYALLTEDTTRVMARIKAVFRGQAIACAGKKLYGKKHRDEYLAELGTGALRRRAEFLYQELEAVQQLRRQAKRDMIVECRKYPETKLLCSVPFLGPVRAAVLIGRVQTPHRFRTKRQFWAYCGLALEMRDSGEYRMVDGQVERRKRPAQIRGLNWNHNHELKNLFKAAATSASACEGVFREFYLGLLKKNMQPEMARLTLARKIAAIALKIWKKGEAFDAEHLKLQAA

SEQ ID NO: 111362 - protein, 389 aa, unidentified
MYSYFVGIDIAKNTHWASCLSSDGEIILEPFSFSNDNSGFQKFISKLESLDKTKILIGLESTAHYGENIISYLFNLDYNIGLINPIQTANLRRSNIRKTKNDKVDTKIIIKALTLGNYSLITSRDINNLKLKGLCRSRRNLVTMRSKAKIQLVSYLDQIFPELAQFFKGNLHLNVSYQLLKEYSSPKQISSLHLTKLSNILHDNSHGRYNKQDAIRLRELAKNSVGIDNPSLSLQIKHSILQIELYNEQIAEVEALYKQILDEMNTPILSIPGMSYNQAAVIIGCIGDINRFEHSCQLLAYAGLDPSVIQSGNFQARSTRMSKRGSGMLRYSLVYSAHNVVKNNKTFRDYYELKRSQGKSHYCALGHVAHKLVRIIFKMLKDNVAFHLD

SEQ ID NO: 111363 - protein, 343 aa, unidentified
MKLMRIGVDLAKNVFQIHGVDCHKKPIWRQRLPRDRWLQTVLEKVEPGCEIGMESCGGAHHWARQLEALGFRVKLIAPQFVKPYVKSNKNDANDAEAICEAMSRPSMRFVAIKTIEQQDIQATHRIRAGLIEQRTAKANQIRGLVAEYGLVAPKELLMLRRAIPCWLEDADNGLTARFRRLLNGLWDDLRALDERVGQLDSEISAIAASEPTAIRLQQLRGVGPMIATALIAAIGDARQFANGRQLAASLGLTPKQHSSGGKDRLLGISKRGDAYLRTLMVHGARSALRTAKSKDDRLSQWVVRLAERSHPNVAAIALANKTARMAWAMLRNDTDYQPDRAAA

SEQ ID NO: 111364 - protein, 356 aa, unidentified
MKTTIGVDLHKSSLNTVVLDEHGQIKERREIATKCRRQIAEYFGSYGLEAQVAVESVGFYQWFWDLVRPQVGALHLADPAGVRAHAGRKAKTDRNDALLLATLLRDQRLPMAYVPREPIRALREMVRHRHSVARALAGERRSLRWLALKNNLPGPDVLTSPKAQKWLLSVETKLSPVHRMAARQRLDHIIALERDVWDCERTITEMAEADEGLMRQVQLIETVPGIGRITAVTVISETGDITRFNNIDQLSAYAGLAPTVSQSGQSVHHGHISKQGPPTLRWVLQQAAWVAIRTSPRARSIYARISKRAGSKKAATALARKLLSYCWSVCRKNTPFRWPGEENPEKPNAPGDDYAI

SEQ ID NO: 111365 - protein, 408 aa, unidentified
MRLLVGDDWAEDHHDVELMDAAGRVLARARLPEGVAGMARLHAMIAGQLADADPDEVRVLVGIETDRGPWVAALAAAGYEVFAVNPLQAAQYRKRHAVSGAKSDAADAHVLADMVRTDARHLRPVAGDSAAAQAVKVVARTHKTLIWERTRTTQRLRHALREYFPAALAAYDDLDAPDTLELLAKAPDPATAARLTISQISAALKRARRRNIAGKAVQIQAALRTEQLGQPAAVTAAYAASVRALTAVLVTLNEQVKAMQRQVETHFGQHPAAEIIASQPGLGPVLGARVLAEFGDDPARYASAKARKNYAATSPITRASGKKKTALARFVHNGRLIDALMGQAFAALNTSPGARAYYQRQRARGAGHNPALRQLANRLVGILHGCLKTGTPYDEATAWSHHVKDLAA

SEQ ID NO: 111366 - protein, 344 aa, unidentified
MVTIGIDTHKATLAASAVDQTGREVAARTFPNDGPGHAGLVRWAEARGPERRFGIEGSGSYGAVLARLLVSAGEVVVEVPAILTERERRHLRRAGKSDPGDALAIARVALREPGLGPVPMPGIAEDLKLLVDARDQRLAERTRIANRLHAQLVVLAPGYKRTIPHLGAARHLAAVADLLDGQGGVRAELVRAELARLRELEAECVALEARIGALVRLSGSSLPTIQGVAAITAAKILGETGDPRRLRSSPAFAAMSGTAPIPASSGQTSRHRLNRGGNRQLNRALHTIALTQVRTDPRAKAYMTRRRAEGKSWLEALRCLKRHLADVVLRTMLADAQAGPVLRA

SEQ ID NO: 111367 - protein, 423 aa, unidentified
MKIAYPICCGIDVHKSFLVATIITTRPQSLEAEYQKKRFSTFNNSLLDFKQWLLANNCRHVCMESTGKYWIPVYNMLEDDIEVTIANPKWVSVVKGNKDDVKDSKWIGELFRLGLVPGSFIPDKQIRLLREFVRYRCKLVGMKASEKNRYQNAFTVCNIALDSVVSSMFGKSATAIADYLTSDAPFDPQHCVTLLHGRLKRKAEQIVEAVEGFRMEPEQKTRIHVIQYHMQAIDYAVNQLDEVIDELAKPFSSHLELLCSIPGVKRITAITILSEIGTDMSMFGSSKRLCSWAGLVPGNNQSAGKKKSVRITRAGVYLKPALVQAAHAAVRDKTCDYYRSKYQKIAGRRGKKKAIVAIARMILTAVFHMLQTGQTFQPSDLLNEEQLTELREKKQKNSLKEAAKLIQKAGIALPEQFLLSLSG

SEQ ID NO: 111368 - protein, 438 aa, unidentified
MSIARIRYVGLDVHKCVVEACIVDQAGAVVHRERFALNHRVLELFATKILRKNDHVALEATTNCWAVADALRPHVARVMVSNPMATKAIAQAKVKTDKVDAHVLAQLLRCDFLPEVWQPNEATRRLRELTGRRSTLVGQRTMMRNRIHSVLAMRLIEAPSRLFSGNGLEWLAKAELDPQARLLVDSDLRQLEFLQKEIDVLDAELARHGHANDFVKLLMTLPGVDVATAESLLAAWGDPTRFPDGDTATSYLGLVPSTKQSAAHCYHGPITKRGNSQARWMLIQAAQHLDKHPGPLGHFFRRLCRKKNRNVAIVAAARKLGVIGWHMLTTNEPYRYAIPRATGDKLQRLRVRATGERRRGGTKKGQKAVAKLPGGGYTVRALSGVCHSEGLPPLRPLSPGERRTVQQTGCENFLAQISQPQLLPRAPRRQTKQRAIHA

SEQ ID NO: 111369 - protein, 397 aa, unidentified
MSGLKSSFSRFVGIDISKDKFDACGITREETKLFQISATMDREGFEKLKGHLAGSSILIGMESTATYHVNLFSYLVSEGYNVILINPLLVSNYVKMQLRKTKTDKKDAVVIASFLLANGNTLMQRVTPSLIVDLRDLSRQRESLTDEMTALKINIKRLLNITFPELEHIADVFTKSILKLLQQYPSAFALRDADIGKLSQALIADSYGRKREAFASALIKAARTSVGTSSPVKEMILKQETNLLLHLEDSLQEITSMLIETSRKLMEDDINIMTSIKGIGDTTAANFLIEMGGDIHHFECSGKIIAMAGLDPAVYQSGQHDGRGRITKRGNRHLRKIIWTMTTKVIQYTDTFHAYYSKRRKEGLPYKKAVMATAHKLIRVIYAMLTQRKTFCPQENS

SEQ ID NO: 111370 - protein, 343 aa, unidentified
MGLPLARSAAGRLSLRVMVFETGSDVVGPKHHRGTAMDHYAGIDVSLEQSSVCVVDATGRIVREAKVASEPEALITFLRGLTLPLVRIGLEAGPLSQWLQAALVKAGLEAVLLETRHVKAALSAMIVKTDRKDARGIAQLLRMGWFRPVHCKSMPAQEVRALLVARKQLQAKMRDVELSLRGLLRGFGLKVGEISKGQFAARVRTLVAGHTMLERIAEAMLQAREALRVEFGKLHKAMLAIVRADAVCRRLMTVPGVGALVAVTFTSGVDAPERFARSKGVGAHFGLTPRKHQSGETDITGAVSRVGDVMVRTALYEAAHILLTRAVRFSALKRWARPCCTDQ

SEQ ID NO: 111371 - protein, 363 aa, unidentified
MKKTFDHPQTIIGIDLGDKKHAVCVLDKDGKVICEKSISNQRKSLEALCKDYAASRVAIEVGAHSPWVSRLLRDAGMEVIVANARKLRAIYQNERKSDELDARMLAKIARMDPEMLHPVTHGSETSQRDLLLIKLRDNLVRQRVNLINGVRGALKSLGIRLSLTTTQASVRRVREELVEHEGLAVRIEPLLAVLESLNEQIAGYDGMIAKAVEERCPQAGKLQIIGGVGPITALCFVLSIEDPGRFEDARDVGAYLGLVPRRDQSGNTDKQLPISKAGNGYLRRLLVQCAQHVLGPFGADSDLRRYGLKLAERGGKAAKKRATIAVARKLAVLMLTLWQKRAEYEPLRNAVRVETESQMRAAA

SEQ ID NO: 111372 - protein, 491 aa, unidentified
MNSIFQRSNPAIEKLFADAGSPKKVMCIPIDYAKGQHTALVCNGEGLQLRGPFNIHNTPEGVEFLNNIVKGLCKKHSIRKQYVFFGGEDCGGFSFNFIHALLNEGHLGIGMNAHDAAEERKNQVASTDKLDLLAIASILINKKQGRTLSMSYSPARILRDLTRHRNALVKARVASTGRIHHLVDQLLPGFLDEKQSPLTPFSDASLWLMSQNFSPRQILARKSDSLAEKLGLFMIRDAEQKVTKIKKLARSVLPPPASLCETLQINLGHEVSVYQHLEHCIQDTDKDIARRLAVTPGAMVTTVQGIGVTNAAGLYAEIGDPARDRALRRLCSYAGLVARLKQSGGPDKEAYTQGRSRRACIPLKRRIMDIALKIGQYGHDDLKADYQRRVNERQDPRLTMGRKLLRICSHLIRETDFFFPPSVLNNPDPDVRKAYIQKSWDQILIKWRNAGAIQQAFAPDAPLEKWRILFNELYNLNLSKLSPQSDRLRDR

SEQ ID NO: 111373 - protein, 340 aa, unidentified
MKVTILGIDLAKNVFRLHGVDAEGRPVLRKQLRRAQLLPFMRQLTPCLVGLEACHSAHYWGRELEKLGHAVRLMNPRFIKPYLKGEKNDANDAAAICEAVSRPSMRFVPVKNPAQQDIQALHRVREQLIRNRTALVNQVRGLLGENGIVVAQGIGRLRQALPSLLEDPDNRLSGLFREMLGEMAERLRWLDDRCRRYEQRIEQLFRTDERAQRLGQIEGVGPFAATALLAAVGNAREFKSGRELAAWLGLVPRQHSSGGRNVLLGINKRGDRYLRTLLIHGARSALRVAERRRDQRSIWACRLKLRRGPNVAAVALANKNVRVMCAMLTRGEDYRRPAAA

SEQ ID NO: 111374 - protein, 405 aa, unidentified
MAVVMIGVDPHKGSHTAVAIGADEVPVGLVRVRACAAQAERLLAWAKSWPERTWAVEGAAGLGHLLAQQLVAAGERVLDVQPKLAARVRLLATGAVSKNDPNDARSVAIAALRSAACLPVRPDDHAAVLKIWAKRHRDLSRARTQVACRLHAVLCELVPGGLSKEICAAQAAAILDEAEPGGVVRQARLELAAEFTADLRRFDAQLCETRKKLAVAVRASGTSLTEVFGIGPVIAATVIGDVRDVSRFASRDRFAAYDGTAPIEVSSGNRKVHRLSLRGNRRLNHAIHMAAITQIRYRHSDGRACYDKKITEGKTPKEALRALKRQISDAIYKHLKADAARTAAAGAQGPGGQPGNDSVASAAGSHPERRLFGQATPGPVTTLRRPADQQKRASSRARKKTARTT

SEQ ID NO: 111375 - protein, 343 aa, unidentified
MKLKYSVGIDVAKDKFDACFMAIDQAQTVTIKATKSFVMKNDHKSFLEWVKKHRKEDIPLCFTMEATGNYFEKLAAYLVENGCFVSVVLPNKAKKYLQSLGIKSKTDKIDAKGLAQMGAEQKLKAWQPFTKSIYKLRSFTRQHENLNKQKTVLTNQLHSQMYNMYDIKEVQKQLKTMIRLIDKQIKQIDVLIEQLLDGDLVLKSKVENLISIPGVGLLTAATVIAETNGFYLIESIGQLISYVGYDIVENQSGKRVGRTRISKKGNSHIRRILYMPALNVVRLKVDAFKVFYERLYDRNKIKMKSYVAVQKKILVLLYTLWRTDKPFIPGFYKGQSINEVVPA

SEQ ID NO: 111376 - protein, 357 aa, unidentified
MAALSIADVSASVTVGVDTHKHSHVARAKDGLGRHLGQLEIGTDPGGYADLLAWAQGFGPVVTFGIEGTSSYGAGLTRFLGAQGQAVIEVLRPVRRDRRFGSKSDPIDADAAAGAVLSGKATAVPKAGDAGVEMIRALKIAKQTAIKARTQAVNAVKGLIVMAPDPIREQLRNLKTPALVRTCSAYRVDGASDPTSAIKLSLRSMCRRYVVLDQEVRSLEKELDALTIRLVPQLRQLFGVGQDVAATLVLAAGHSGGRLRSEASFSMLCGASPIPASSGMVQRHQLNRGGDRQANAALHQIVVVRLRYNEATKAYFAKRKADGKSKKEIFRCLKRYVAREVYRTLVDPREEAARSAA

SEQ ID NO: 111377 - protein, 391 aa, unidentified
MYYIGFDIAKENHYASIANSNGEVIQEAFLVKNSINGFNFFMDKLKEKNITISDCLVGMESTGHYGENLIQFLHNKGFNIGIINPIQTDALRNSNIRKTKTDKIDTYLIIQSLMLKHYTPFVSKDIKILELRSLCRHRDDVLKYRTKLKVRLVSFVDQLFPELNLIFNSIHLKSCYALLSKYPSPKDIASTRVDAIANLLSTASKGHFSLDKAKELKELAKSSIGVNNSSLSIQIKHSLKQIELLDSQIKEIDLKIKEIMDELNSVILTVPGISYTLGAIILSEIGNIDKFASPTKLLAFEGLDPSVKQSGNFNATIIKMSKRGSKLLRYAMLRASGIIIWNSETYNAYYNRKLSQGKSHNNAVCHVAHKLTRVIFHMLKENVEFKEQLEN

SEQ ID NO: 111378 - protein, 408 aa, unidentified
MKRYYVGVDWADKEHRVYVGDENGKKIADMKVEQTVQGLAEFGRWLDERRAEGTELWAAIEKPQGRIVDFLLDHGVVVYPVNPKAVDRARDRFRMSQSKSDGFDAYVLSEFVRTDHGHLRALEPSSEQAQELKMLSRDHQRVQRHNTRILNQLKVTLKEYYPRPLEVFDDLESKVARDFLKHYPTPAELSNLSRKQWKRFATRQHHLGEARCQELWEELSKPQLAIPQHVIRAKARLLAVLLDQLEASIKAVKTFAEEVERFFADMPAAEFVKTLPGAKSGTTVPLLWAELGDAKSRWQSFRHLQAEAGGVPVTKASGKSRVVQFRFACNKLLRHASYWFSFNSLNRCEWANKYYRDQRRKGHSHPQALRALGAKWLKIIFVMWRDHKPYDENYHLANIARQQMRQAA

SEQ ID NO: 111379 - protein, 357 aa, unidentified
MSTRTAVGWDIHRKFSQLSVVAQSEQGEIRVVKRMRLEHVDRAAMREELAKLPPATPVAMEGAFGWPWIADLLDELGLDPHLGHPPAIRVLAKNEAKADRMDADRLGRFWLRGIFPESYLSTPEVRQLRERMRYRTALVQLRTGIKSRIQAILHRQGVSHDYSDLFGKGGRAFLTTLALPEACRAALDGWLAQVDLLDAQLAEVEAWMKQRLEEDKITRLLQTIPGIGLILAHVIRAEIGQLTERFPSRRHLTSYSGLAPLANDSADRHGHRHIAAACNHTLRWSFIEAAQCAINSKKCPANLRRLHDRLTHGGRTNKSQAKVAVARELCELVYVIWKKGEPYRETTSPVRPQRSKH

SEQ ID NO: 111380 - protein, 507 aa, unidentified
METRTNLNEVGKKKLVLGIDVALKNHWAAIGDNKGQEMVKPFQFSNNAEGMSLLEGMIKQTGRAEDKGDVIIGMEPTGIYWKPMGHYLREAGYRVVLINPSHTHKMKELEDNSQTKNDRKDSRVIQTLTREGKYLEPIILRGIYGELRRLGQAYKSALKRGNVISNKVKMIADEYFPEMRGIIKSINGKTAKGLLAEIPFPDDIIRLGKTKFYKKLKKWSNKRFGKKKSLKLWEAAKKSIGVKVGQEAAKIELRQLVEEMELVKRHREELVKGIEEKAKVTEEGKSLIKLPGLGYLSIGKLIGETGSIKSYKGARSLEKLAGLNLIESSSGERHSGKKISKRGRKLMRTTLYQMALASIKNNRAIKYEYQYRIKTKKQKKMKALTAVACKMLRVIYALVSANKEYDERKISRHYYESEIKREENICEWVTPIIPPSGPGYNSGDTVMKNTGHPLPMTLNEVMSGAPVQYRDDTGRNDRVRHRKSGGTNPLVNIEKSWAEENQEVVCK

SEQ ID NO: 111381 - protein, 346 aa, unidentified
MDATTAAVDVAKAVFEVAIADRHWHLVRRHRFNRRQFAHFLATASPMHVVMEACGSAHYWGRCAQRDGHTVTLLPPAYVRPYVRRNKTDRTDAEALLEATRSGQIPSVAVKSVAQQTLVALHRVRDQWMTTRTARINTLRGLLREQGLLLPAGAGPAVRAIPAVVENAEAPIADCLRRMIALLYEEIRALERHISALERELRSVADTDPVATRLREIPGIGLLTATALVGTVGHIHAFHRARQFASWLGLTPREYSSGAHRRLGGISKRGDVYLRCLLTHGARAVLRAAHQRVTMKKPLTRLYQWALTVQTRRGHNKAAIAVANKLGRIVWAVWHHDVPFAAVPAA

SEQ ID NO: 111382 - protein, 415 aa, unidentified
MEEQTKSSAAGIDWAKDEHALCVLDAAGRVLLERRFTHEERGIEKLCRSLVEMGVERVAIERPEGILVERLLDGGLTVLAIHPNQLKAARPRFRASGHRAKSDAFDAFCLAELARTDHHRLRMLVPDSDETKALKALTRSREDLVGTRVALANRLRAELEAFWAGAALLFSEIDSSISLAFLKRYPSPKDASKLGEKRLAGFLSGQGYPGRKSALELLERLRKAPRARAGEAEIEARRATVLALVSALQTLVRQIRLLEERIAKAVRAHPDGAVFLSLFRSSKSTITAASLVAEIGECRERYPTNEALAATAGMSPVAVESGRRKVASFRRACDKHLRRAVATLAESTRHHNRWAKDTYLRARQRGCDHAHAIRILGRAWVRVIFRMWQDGQPYDPARHGGFKRFRSAGGLPQGV

SEQ ID NO: 111383 - protein, 345 aa, unidentified
MGPMYYIGLDVHKQKISFCVKDSSGKLFAEGWIPATRFDLDRWMNTLPQPWSAALEATMFSGWIYDHLKTHAAALKVAHPLMLRAIATAKKKNDRIDASKICDCLRCDFLPESYMAPTAIRERRRTLRYRNLLVRQMVQMKIKISSLLMEAGVSYNKHKLHQAGYFRELLATNLDINEGLRPLLQLCRETVVRLSKTENGLVRSLREDPVLQYRVERLMSIPAIGPITALTWALEIGEVHRFSSIKKAISYCGLCGDEQSSGNAVQRTPISKQRNKHLQTVLIEAAKMAPRYSPTLALLYDREKQKGNANRATLAVARKLVAYLVAIDRGQTHFLILDQETQTAA

SEQ ID NO: 111384 - protein, 343 aa, unidentified
MQTVTTIGFDIAKSVFQVHGVDAAGQVVVRRQLKRRQVIALFQKLPPCLVGIEACASSHYWSRELQALGHSVRLMPPAYVRPYVKRQKNDMADAEAICEAVTRANMRFVPTKSPEQQSGLMLHRTRHLFMRQQTSVINAIRAHLAEFGIVAPVGRKGVEELLRVVADPSDKRVPEVVRACLAALGSQLLRLKQQILDFDRMIMAWHRSNQTSKRLNCIPGVGPLLATALVASVADPKTFRSGRNFSAWIGLVPKQHSSGGREKLGSISKQGDRYLRSLFVTGALAVIRYAKIHGAKHRPWLTALLARRPTKVAAIALANKLARMAWAMMATGARYNYPASLRV

SEQ ID NO: 111385 - protein, 342 aa, unidentified
MNIGNIRENLPKGKSDTYEHFLAIDWSMKVMAVAHMTRCSKEPKMFERPSNLQELKAYIDSLTGRKVLAIEETTTAQWLYLELVHHVDRIIICDPYRNRLLSDGPKTDKIDAGKLCKLLHAGLLKEVFHSASKLYELRCLVSAYEDVVKSGVRLLNQKFCLEQGHFDKGLHSEFILDHINKNIDLYHTNKKNYENKFIELSKHNSLMRNIMEVTGIGIIGAVKIMAIVVDAHRFPKSGKYLSYCGLVEHEKMSGGRSYGRRRPRFNHTLKSVYKLAAMAAISGGNNPIRQYYDMLLAKGFAEHNARHAVARYIARVTYGMLKTGKRYEPYQVRKQNTEHKAA

SEQ ID NO: 111386 - protein, 416 aa, unidentified
MDVLHARCAGLDVHKDTVVASIRIADGGPAKTEVRTFDTTTPGLLALSAWLAQAGCTHVAMEATGIYWRPVWHVLSDGEVTLILANAAHVKNVPGRKTDVADAVWLADLLAHGLIRPSFVPEAATQEMRALLRTRKQLVREQASHVQRLQKTLEDANIKLSSVLTNIMGKSGRTIIEALVEKQTDPEGLLALVQKGVKAPAERIKAALTGRVTDRHRFLLRLHLRQIDALDAALAEIDAEVDRGLDPFRQAVELLRSIPGVSDLTAQVIVSEIGTDMSRFPTAGHLISWAGLCPRNDESAGKRRSNRLRHGAPWLKTTLVQCAWAATRKKASYLQAQFQRLRHRRGPKKAVCAVAASILTAAYHMLRDGTFYQDLGPDHFRRASPETHAKRLAQQITKLGFTCTLAPATPAEEVSI

SEQ ID NO: 111387 - protein, 463 aa, unidentified
MNRKSSKSRVDRTMPVVHPNAAAIDVGATMHMAAVRADRAPEPVRSFGTFTADLHRLVNWFTECGVETVVMESTSVYWIPIFELLDARGFTVFLVNARDAKHVPGRKTDVSDAQWLQRLHSFGLLRASFRPKGQIAELRAYVRQRERLLEYAASHIQHMQKALTEMNLQLHHVVADITGATGLRIIRAILAGERDPEALAALRHYSCHSSAETIAKALTGSYRAEHLFALEQALALYDTYREKASACDVRIEAVLKELSIHRGRGHGAVPPPRRRHRTDQANALAFDVRAALFALLGKDITAIDGLGAYLSLKLIAECGDDLSSWPSAKHFTSWLGLAPSNKISGGKILSSRTRRSGSRAAALLRLAAVTVGRTDTALGAFYRRLSSRIGKAKAVTATARKVAVLFYNAVRHGMEYVDPGASSYETRYRTRVVNNLQRRAKAFGFVLQPLEPKAGAAVCAAVS

SEQ ID NO: 111388 - protein, 312 aa, unidentified
MSPERVYLGADIAKTTIDCRWLNQAFTIANGPAGFADFARRIKLSTSPLLHVVCEATGGYQNRFVDFLHAHGLPVSVINPRQVRDFARSRNILAKTDRIDARVLCAYGLANSPEPQAPKPEHYQRLNDLLAQRAHLVAQRASEKTRRQQLNDRWLSAQAERTIAFYDRELKKLEAQLLALRDSDPQLLAKSARLDQAAGIDWRIALALLGFMPELGTLNRRAIAKLPGLAPLNQDSGFYRGQRHISGGRAAVRRLLYLASLTAIRKNSILKAYFQKLKAAGKPGKVALIAVARKLLILLNSSLQNPNISLAN

SEQ ID NO: 111389 - protein, 338 aa, unidentified
MYYTGIDLHKKTSFITTIDQNGKVIFRRNFPNVEELILDYFRNLDGPTKIVIESMCSWYWLYDLLSANNFTTVISNPLKTKAIASAKIKNDKVDSHMLAQLLRADMIATVHVCNIKTRKLKELIRHRRRLVQDSARMKNRIHMLLMKNNINIPVSDLFGKRGMKLLKEVSLPGYHQQQFNSYLALLRYLAEQIEPLTEQIRDLAKKDPMARLLMSIPGIGFLTAMTIIAEIEDIGRFPSYRNLASYAGLVPSLDASADKSRTGRITKQGSPYLRAALVEAAQAIPRTKQSRLNIFFRKRIVRAGYRKAIVATAHKILQYVYYVLKNQVFYSEEYLARA

SEQ ID NO: 111390 - protein, 476 aa, unidentified
MKKHKKTKPKPKEAKPLHEPVANAAGIDLGATEIWAAVPPERCQLSIRRFGAFTQDLKALVAWLVECGIRTVAMEATGVYWIPLHQLLSDANVEVYLVNARHVKNVPGRKSDVRDCQWLQYLHSVGLLRASYRPDQAVCETRTIFRYRQNLLKQGGENLQHMQAALDQMNIKLHYVIDDLSGQTGQAIIEAILNGEREPLRLAKYRHKRIKASEETIAKSLEGDWRREHLFVLRMAWQNGKHVQEQIKKCDQELMEYARQLAASTVVAQPSRPLKSFCLKAEPGLTPLNSAAALRPAKPRRKTSKNEPDGPWREELHRFFGVDLTLIPSIGVLSGITLMTELGNDLSAFKKSHHFSSWLCLCPDNETSASKVLHRSTRRSQNRVRQALRMAASSLHHDKSYLGDKYRRLRARLGAPKAITAMAHQLARIIWHMLTYRVAFDIGIFAAQQKDNQTRRLKHLQSNARQMGYQLTPIPA

SEQ ID NO: 111391 - protein, 412 aa, unidentified
MSNPLLVGIDVHRKTNTVALMERNGREVAPPFTVANNRPGTAALAQKLGAFAAEEGYDAIQVAAEATGWYWEHFFRTLDDDPFLKQRPLTLYPFNPRLTAHFKKTYADLDKTDLIDAFVIADRRRLGRDRPQPFAYDETGLAWRFLTRHRFHLVHQIVREKAYFMAHLYLKASEYTHLKPFGDIFGATSRAILQGSPSMEAIAAIPFDDLVEIIDVQGKRRFADPADNARKMQAVAQDSYLLPEALQAPLNLILRQTLQQIDALQRQVQRTEAAIAEALQNWPHTLDTVPGLGFVFSAGIISAIGNLARFAYDEAKVAKFAGLKGRKTQSADFQAEETRLTHTGNRYLRYYLCEAANSMRMRDAEYRAYYERKYHEVRLHQHKRAIVLTARKLVRLVVRLLPTNQPYRPRRI

SEQ ID NO: 111392 - protein, 423 aa, unidentified
MLQETQETEEIIERVAALDIGKAEVMCCVRVPGEDRPGRRLREVRAYPAMTRSLPGMADRLRCLGVTRVVMEATSDYWRPAFYVLEAAGFETWLVNARDVKHLPGRPKTDKLDCIWLCKVAERQMIRPGFVPPPEIRQLRDITRYRADLVGARTAEKNRAEKLLEDAQIKLSVVASDIFGVSGRAMMAALIAGERDPSALAQLARTRMRQKIAALREALTGRFTDHHAFLLARMLGRVDAIDADIAGLDARIGEMIAPFTAAADRLDEIPGIGPAAAAIIIAGIGTDMSRFPTAGHLASWAKFAPGVKESAGKKKGKDATGHGDRYLARVLGEAAAGAARTDTFLGERYRRIARRRGAKKAIAATGRSILTIIWHLLSDPELRYADLGPGYYEQRINPERRKRNHIRHLEALGYKVTLEPLAA

SEQ ID NO: 111393 - protein, 385 aa, unidentified
MTDQLQPSTFIPRDYDIFGGLDVDKKSIAVTFTDHGTMQKSLRLPYSADHLLNYTRKHFPGQRVAFVYEAGPTGFGLHDELRATNHPCLVVSPAMVPRAPGQRVKTNRLDSKKLSEGLRGGQLRSIHVPRQSYRELRHLVQLRDTQVAQLTATKCRIKSLLLYEGIPFPAANGKWSGRALRELESLPCSAAVRFKLERLMDALQFHFESAAVVQKEIRHFCQNDPELRQCISFLASLPGIGSITSTHALARLGDWRQISNVRQIAGFLGLVSSEHSTGDKENRGQITRIGDSRLRNKLIQCAWTAIRKDPELRAFYRSIYERQPKKVAARKAIVAVARKLTTRMYAVLKQQRPYVIRPDSSIAPLTAEETVGPRERLDAAQNEQP

SEQ ID NO: 111394 - protein, 343 aa, unidentified
MSIVILGVDLGKNACSVVGVDAAGAVVVRRSMRRQTLVDYVAKLPVCVVAMEACCGAHYLGRLFAAHGHEIRLMSPEYVRPYVKAQKNDDRDAEGIAEAASRPTMRFVELKTQEQLDIQTLHRVRSRLVAERRSLTNQLRAILLERGTIFPVGRRKLELGIDALLADEDTTLSPRLRQLVAELRAEWRELDTRVETLNGEFVELARNDAAARRLTSIPGVGVLNATALIAAVGDASSFAKARDLGAWLGLVPRQHTTGGKPRLLGISKRGNTYLRTLLIHGARAALPSLARSETPLGRWLTGMIERGVHRNAIVVALANKLARIAWAALRKDATFERGYPVAA

SEQ ID NO: 111395 - protein, 345 aa, unidentified
MQYDAGIDVSLEQSSVCVVDAAGKIVKEAKVATDPHVLVTFFKGLGFPVTRIGLEAGPLSHWLYAGLTQAGFDVVLLETRHVKAALSAMVVKTDRKDARGIAQLIRMGWFRAVHAKSASSQEIRALLTARRLLLDKLRDVELSVRGILRGFGLKLGKVTQRGFETRVHELVTNHPMLQQITRSMLLARATLQREHNRLHKALLKIVRRDKVCQQFMTVPSVGPIVAITYKTAVDDPHRIKKSKGAGPLFGLTPTRYQSGETDVIGGISRIGDAMVRAMLYEAANVLLSRTMRFSALKRWGLAVAKRRGMKRAKVAVARKIAVVLHRMWIDGTSFRWSNQKAAAYA

SEQ ID NO: 111396 - protein, 339 aa, unidentified
MTAIDILGIDIAKNVFQLHGADRRGRPVFKRRVMRDQLLGVLSGIEPCTIAIEACTGAFCWARKFEELGHRVKIVSPQYVKPFVRGQKNDGNDAEAICTAVRQPHIPLVPKRTKEQQDIQALHRARQRLVNHRTATICQIRGLLLDRGIAFGKSITKARRMVPDILSDMNNELSEMARDAIAELWDLFCNLDRRIISFDKKIEAVFRASPTCQRIAKIKGVGPKTATAIVAAIGDGREFRDGRHLAAWLGLVPRQHSSGDKRVMLSISKRGSQHLRTLLVHGARAVVRTAPNKDDQMNVWVNDLRERRGFNRATVAVANKNARIIRAVLRTGEPYRAAI

SEQ ID NO: 111397 - protein, 362 aa, unidentified
MDKYIGLDMSDKETVACVITPGRKDIYQTLPTEVSALRAFLARQREGGHRVHATFEVCGRAGWLYDGLVDTVDTLAVSNPSQMTWIYRTAKKTDRIDARKQAVLLQMGELPTVHMPEAAVRQWRGEIQHRRKLIERACQIKNRIRAHLKGKGVDRPDGKMGWWTQKCRRWMLGVRPDDLALMDLLEELALLEKQIARITTLLDKRLKKHPGAAVLLTIPGVGPRTTEAVLAYADDISRFARGKSFCAYFGLTPRRDESGAVRRVGHISKQGPSVARWLLAESSWRVVKKSPALRAFYERVQHGQPGRKKIAIVAVARKLLSIMRAMLITGEAFNEALVLRQEFLQGDVVPRRRASRRKRRCR

SEQ ID NO: 111398 - protein, 453 aa, unidentified
MSKKKSKRKKKGRLLRVIRSNAAGIDIGATKIYVAVPEGCDKEPVRSFETFTQDLHEAAQWLKSCGIDTIAMESTGVYWIPLFQVLESYDFELFLVNAGHVKHAPGRKTDVEDCQWIQYLHSVGLLNRSFRPPQEICAVRSLLRHRNNLIKASATHIQHMQKSLTQMNLQIHNVISDITGTTGLAILDAILAGERDPHKLAELRDPRIKSDKGTIAKSLEGHYLSEHLFTLKQAIQAYRYYKNMINECDSEIEKYLNNFDSQIDPEKNPPPKPKSLRKKPTGNEPHFDLRTHMYRILGTDLTQIDGINSMTAWVFFSEVGTDLSKFPSKEKFSKWLALSPNNNITGDKIKSSKTLMSKNRLAIALRLSAQSLWKSQSFLGFYYRRMRARQGPPKAITSTAHKLARIIYHLVKYRKNFDESVFADEIKLHKKRLETRIRKQAKMLGFKLVSADS

SEQ ID NO: 111399 - protein, 341 aa, unidentified
MYYIGLDLHKKTISYCIKDISGKVFGEGTIEATRQSLDDWMKQLPGRWMAAMEATIFTGWVYDHLRPHAEAVKVAHPLMLRAIAAAKKKNDRVDAATIADCLRCNFLPECYMAPMEIRDRRRTLRYRNLLVRQAVQLKNKTAGLLMETGVTYNKKKLHQGGYFTEFLATNEEVSESLRPLLRLNRGMLVGLKKIEHGLLRSLEQDPQLVERVSRLMTIPGIGPVTALSWVLEVGEVKRFSSVKQVISYCGLCADEKSSAGVAKRGPLSKQRNKHLQTVLVEAAKLAPRWSPELALVHANALQKGNRNRATLAVARKLAAYLLAVDRDERVFVVRGQEVTAA

SEQ ID NO: 111400 - protein, 426 aa, unidentified
MKVTKTTIDFKPAHNLNVSCDVHKKVLYFLARLPGFEYSDTCENRTRDIERKLRQFADIAQEHGKQTIRVVCEPTGEYDRGLLRTAHRLGFMTAYVNTENVKKYRQIETNDDGKTDTKDPRGIGSLADQERVIQIRDLDEKYVTLRKLGAVAEEEEVAIVRLKNRLHREIFNFFADYDMKKDFLYTKSGRALVNNYGCNPYRIVRAGFKRFERRMRKSAKGIRTKTLNRLWHAANASVLHELPDMYGQILEERIRQLYRDCEQHIERKEKIEGRMIDIVNELRRQDPRIPPPTPRVISEKNLAKLLAEICSPADFESPRQLLRYVGLNLRERESGRYVGLTRICKKGRSRARKVLGNIVLPLVPRHKLYGKFYHHKRDVDRMCGNKAMVVVMRNFLRKFWGWYHAGGGEFDETRWFTCQSQAEDAA

SEQ ID NO: 111401 - protein, 427 aa, unidentified
MAYRVAGIDVHKRMLAVVMTDIAVEGEYQFQRRMIGTSPDQLRALAAWLLEHEVEEVVMESTAQYWRPVWETLERYWQPRRRAREGAGPVSGTLHLAQALSNRGARGRKQDFPDAERLVRRLVAQELTLSFVPEAEQRLWRTVTRRKYQLTCNRVQLQNRLECLLEEAHLKLSSLVSDLLGASARRMLQAVADGNTSPAAVAALASQRLRATPEQLCDALGACTDLHPVYRRLLHMALDELRLIEEQIRQLDQELAHLLAVHQNAVQRLAAVPGLGVDSAQQIIAEVGPTAATFPSPKHLSSWVGACPGNDESAGVNYSRRSPNGNRQMRRLLNQAANAAVKTKGSIFELVYRRLVVRLGHAQTIGAIAHRLCRLVWKILHESVVYEERGPAVTKQRAHRRAAKMIRELRSLGYRVELAPSPSASPA

SEQ ID NO: 111402 - protein, 399 aa, unidentified
MVSIGIDVSKGKSTVCFLKLYGEVLHKPFEVEHTESSLSHLINLISLIQEDVRVVMESTGIYHLPILDYLKSNNIFVSVINPLIMHKYASLSIRRGKTDPLDAIKIANFGLDNWFTLTNYSPNEEIYDELRLLNRHYLNYISMRIKAKLTLTTLLDRTMPGIKTLLLNNSIAPDRDKLCDFVRKYWHFDNITKMSENAFIKSYNNWAKKKGYQASENKATKIYALASDGIPTLASSLPSTKMLLDEAVESLYHIDTTLANILLQMKKLASTLKEYDVVMAMPGVGEILGPRIISEIGDATRFHSAKALVAYAGLDAPPYQSGNFTATKRSISKRGSASLRKTGYEIMKCLKTAKPKQDSAVYDFMIKKELEGKPLKVAKIAALNKFLHIYYARAKEVYQ

SEQ ID NO: 111403 - protein, 425 aa, unidentified
MNYKQNEKINQVKESTLVVGIDIGSTTQYARAFDWRGIELGKVFTFSNSREGFESFKAWMQHLQDKYRKSDVIVGIEPTGHYWFDLGAYLEDEGILLVMVNPYAVKQTKELDDNSQSKNDRKDPKVIAKLVTEGRYSAPYTPDGVYADLRIMVANRKRLIREMTQIKNRFARWFAIYFPEYTDVFGDYEAQSSMLLLKKTCTPEAIVELGAEKINRIWRDAKLRAVGMKRATTLCETAKRSIGLKKGSSAAQYEMKLLLEDYEYKKAQLDAVMEEIEKLCRKVPESEQMLAIKGIGVITVAGFLAEVGDVRRFESPRQIQKLAGLSLRENSSGKHKGQTTISKRGRSKLRAVLFNAAIPLIAKNSEFKSLHEYYTTRANNPLKKKQSVIAISCKLIRVFYAILAKGVTYDAQKLISDIHRQPQVA

SEQ ID NO: 111404 - protein, 452 aa, unidentified
MGAGEVRYVGFDLGGECHEVAVCDGRGVQLGRFTMPRGRRGREALRAEVDGLTPSGTHVVYLVEAVQNFWQEVVHPLDAAGAEVCLLSPVKCSDMRKFYRRHVKTDAIDALATARVGVSDHELRRAWVGTPEQETLRRLCRLAWKLSLEARDHKRRLAMLLEMVLPGVGEVWKNRYCASARLFYRRYLDPAKARRLGRKRLGEMLRRRAWGKFSEDALGRLWGVIENAPELRYRYDDLTFEVQCELDGIEAIEHRHEALMERIEELYHEVDPAHRLESVPGLGGFFGAAITSAVGDVGRWRNVDQLVASTGLIPRKKASSGREKANQRLTKQGDPMLRSWLYVGAELVRHYDPELQAFYGRLRRRGLHHKAAICAVATKLLRRIYAALRDGTDYRVLGSDQAHNAEKPVRMSVHEVAQALLRDDADSASLEEGYAAQPGGASDTLAPADAEV

SEQ ID NO: 111405 - protein, 347 aa, unidentified
MKRIVKQVVATDVAQKELVVCLGRMYDDWILELYANKTFANNEKGFAALILWVKKLTEESIPVRYVMEATGVYHESFAYFLDGKGFEVSIVLPTKISNYVRTLEVKTVTDKTASEAIARFGLERKLDRWKPPAEIFRKLRQKTREYDQLVGERTLVKNQLHAEQTEAYPAKESIARMKTRITLLNKQVMQIKEEMNGLIKENNAVNKSVALITSIPGVGILTAVTVLAETNGFELIRNKRQLTSYAGLDIKEKLSGTSVKGRPKISKKGNRYLRKAMYMPALTAIRYEGRFKVLFTRLVSRHGIKMKAAVAVQRKLLEMIYTLYKTNTVFDKDYLKEEDVITSTQVV

SEQ ID NO: 111406 - protein, 344 aa, unidentified
MNITMIGLDTAKSVFQIHAVDETGKTQIKRKLSRNDLVLFFTKQELCTVVMEACGAAHHWARILTGLGHDVKLIAPEAVKPFVKKGKKNDAADAAALCAAASRPDMKFVPVKSLEQQGILALHSARSLLVKQQTMLANAMRGLATEFGLTVPKGIGKLEELAVLVEEDETFPMKARQAFTGLFDQCKALTESIMTFEAEIVAHARHDETARRLATIPGIGPITASLIAATVGDIGMFKSARHFAAWLGLVPRQHSTGGKTRLGRITKTGNREIRKLLVLGATSMVYRAPQWNSAAGLWIRGILERRPVRLATVALANKMARIAWALMTRNEVYQAKGRVAAAAA

SEQ ID NO: 111407 - protein, 386 aa, unidentified
MQKLNDLSRSLIALEPAGTLIAVIEMSLSSWLVAGIVPGVERQPLKKLAVDESALLKLLHRWREEAEKAGRRIERIVVAFEAGRDGFWLARWLKAHSIEAHVIHAASVAVSREHRRAKTDRLDTELLKRAFLGWLRGERDHCKVVAIPTLKDEDAKRPNRERESLVGEQSRIVNRMKAALIRLGIRGFNPKLKRAAGRLDSLRTPEGEPIPPNTLAELRRDMERRRLVSNQIRQIEEARLERFEQAPNDGPHAMVRLLARVVGVGIETADMLVHEVLSRNMRDRRALARYAGLTGSPDESGRKRREKGLARSGNGRVRRGMVQLAWRFLTYQKESALAHWFRARTENALGTRKPMIVALARKLLIALWRLVWQGVVPDGVVLRPAQ

SEQ ID NO: 111408 - protein, 434 aa, unidentified
MSGRACEGDDAVVLAGCEDKEEVIARVAALDIGKAELVCCVRVPAPRGRRKRLQEVSTHSTMTSSLTELANRLVELRVQRVVMEATSDYWKPVFYLLEAHGLEPWLVNARDVKHLPGRPKTDVIDAVWLCKLAGRQMLRASFVPPTPIRRLRDLTRYRADLVAARTAEKNRVEKLLEDAGIKLSVVASDIFGASGRAMMAALIAGERDPKVLAQLARRRMRTKIAQLEEAFNGHFDEHHRFLLARMLARSDGIDADIAAVDEQIEAHLAPFAAAAARLDEIPGIGPIAAAAIIAEIGVDMSRFPTAGHLCSWAKFSPGLKASAGKTKGNASTGHGNRYLARILGEVAITAAKTDTFLGARYRRIARRRGKKRATVAVGRSILVIIWHLLADDDASFTDLGPDYFTKHLNPDTQKRNHIRQLEALGYKVTLTPAA

SEQ ID NO: 111409 - protein, 351 aa, unidentified
MITQITAIPKLYIGIDIHKRSWKVHCATDLFAGKSFSMSPDPKQLHTYVSKHFKEYEVTVAYEAGCCGYYAHRCFESYAWRSLVVNPADIHRKGKEKHTKTDKIDAQLIARELKDGRLESILIPDKKREELRSLFRRRNDLVKDFRRVKSYIKMQLLYFGIKEPEEFDNDHWSHKYRNWLDDMIFEYPTAKAALDSRMRFFRFVDQELRDVSTQLRRYCKVHYKKDYLLLRSIPGIGGIVACGILCELGDLRRFKTIKHLAGYVGLAPSVHQSGDHQRTMGMTPRANRLLRSYFVEASWQAIRADPVMQAYYRKHQGKNVKRIIVKVARKLLSRTLAVIKTEVPYTIGVIQ

SEQ ID NO: 111410 - protein, 425 aa, unidentified
MPISTLFVGIDVSLKTNQVCSINFNQDVFFSKKFDNSPSGTEKLIRLVLDVLYAHREFTKVIFCLEATNVYHIHLASALAMDHRLSAYDSKVYAENAKSIENYKRTFLDREKTDPEDAFLCADYARVGKCKKSHPIIGYQKTALQRLTRQRKHVAEQLGKEKQFLSSNLFLRFSALKVNPDDVPFSNIYGKTSSVMLNDFLTNEEIVNAHLSDLVERISELSKNRFDDPESVARQFKKLANDSYRLDKVASDSVSMAMASSFRLIQTYQDELNRLDKEIVRLLGSLDNQYLTILTSIKGVGLVYAAGIIAEIGDISFFKDSDHLAGYCGLRWKRKDSGHKNSDHTKQPNSCNSYLRYYMVEATGSVIRYNDEYASYYYRKRSEVKINAHKRALVLTARKFVRLVFGMLRNHKLFDNHYLAAFSQI

SEQ ID NO: 111411 - protein, 379 aa, unidentified
MKKELYLGLDVHQEVIITAVAEAGHRGEVRETGAISNDLQAVEKWIGRLRKAHGKEVIFCACYEAGPCGFGLARRLRQLGVQCEVVAPSLTPRRPGDRVKTDKRDARKLARLLRAGELTAVYLPEPTDEAIRDLCRSRTDAVDDQRRSRQRLKGFLLRHGYRYQGKNSWSAAHERYLRELVLPHPAMKVILEEYLQAISAAGERIERCEAAMRDLLEKWRLAPAVRALQAMKGFRVIAAMILVSELGEVHRFAHPRQVMAYLGLVPTENTSSDRRRQGHITKCGNSHLRWLLVECAQHYARPPKVSKELSRRQETQPREVRAISWRAQNRLHLRYTRLLARRLQRNKAIVAIARELCGFIWELLRTQPCYHQAQSPPAL

SEQ ID NO: 111412 - protein, 345 aa, unidentified
MNYVGIDWAYGRAAFCSMNQTGAIEAEGMIPASEDGLARLVLKVGTEVKACVEMMSGAVWVRDQLALAGWEVKVAHARKVRDVAPLACKTDKVDARVLAELTRRDLVPELWVPPPEDRALRERLRRRMHLVKTRTAARNRIFGLLTQFGLKISLRRLQEDDALELLERRGVPGPWRASIAELLEVIAEMDARAKVIEAELRPVSAADRRAELLMTMPGIGPLLGLTIAAEIGEVSRFSSPAKLIGYAGLAPRISQSGDRSAIGALSKAGSRTLRWAAVEAANQAWRPSNPWHGHYRRISERHGKNPAKSAVARKILIASWHMLARGEPFRPHQPAPANSSRFLAA

SEQ ID NO: 111413 - protein, 400 aa, unidentified
MDKDRIVAGLDVHKDTIYLCVMDNTESVIFAKVYGTLTPDLELMCSEMVSHGVTEAAMESTSTYWVPVWNALCESMSLKLVNPYFIKQLPGRKSDVKDAQWIAECLLKNLIRGSFVPDKRVQDMRKYNRRIFDLNEDLTYNSNKQDAALQRCGFRLSNYVSRVNGKSYQKCVRAIITGITDPEELVKLIHGKTLRKYGRNIIKDAVTGDFHQADICLLKQYAELIEVIERQIEECRNALIAMCQEHFPKQFKRLQSIPGVKERAASAIIAETGADMKPFEKATNLVGWCGLKPRNDISNNKVKSNRTTHGNRFLRQILIEISWVASRTRNCFFSNFSYVQCTQRHKNKMKIQVAIARKLLVAVWHMLTKDEDFIDVYLKRLEKQAEWQNDIQALESLLVG

SEQ ID NO: 111414 - protein, 406 aa, unidentified
MLEAMIRCCAGLDVHRRQVVCTVIREGSHETREYAAFYRELKELARWLQREQVELAVMESTGIFWKAVYASLEEAGIEGRVVNARHVKQVPGRKTDVQDSEWLAELGRCGLLRPSFIPPRDFRELRLLTRYRRKLSGILAGEKNRLHKVLDDAGIRLGCVVSDIDGVSARAMVEALIRGGSTPEQIAEQALGRLQKKKDALQLALEGEISDRHRLVLQKILGHIKWLQRQMALIDGQIVAAMKPYEEEWKLLQTIPGLDVLSAAVLLAEIGVDMSRFGSKDRLCSWAGMCPGNQESAGKRKSGRTRKANVYVRSILCEAANSARKTQSQFQGLYKGLVIRRGHKRAIVAVGHKILQVVYVLLHRKEPYKDPEIDYEALVVRRNAPRWLDALHKYGYLHGMRSTAGR

SEQ ID NO: 111415 - protein, 334 aa, unidentified
MKKEVIVGIDVSKTWLDAHILYKGTTGTNLRIDNTKAGILKLCKWIEKSTNVPSTQWLFCMEHTGLYSYQLNSFLQNRSIYQTMVNPLAIKKSMGIIRGKSDKADARVIACYAARFQDGLKEFTLPSKSLQKLKILLSQRERMVDMKRQIDLSMQSFEELPQELTREIAAQNKKLKLHFKRNIELLDETISQTVKEDQLLKDQSKKIQSVPGVGPQIAVHILVTTQAMTQFKTSRQYACYCGVAPFEYSSGSSYRSKTKVHYLANRKMKTLFHMAAMSVLTSDGEMKVYYNRKLAEGKNAMSVINAIRFKIIDRVFAVVKRNECYDKKYLKQAA

SEQ ID NO: 111416 - protein, 417 aa, unidentified
MMETYAALIAIDWADRQHAVCLYDQSTGQREQYPLKQTPECLQAWVSSLRTRFAGQKLAVCTEQSRGPLIYALLQYDFLVLYPINPATLAKYRQAFSPALGKDDPSDAEYLLDLLQHHREHLRPWRPDDEQTRTLQLLVQQRRRLIADRTRISNRLTAFLKGYFPQVLGWFPDLCTVLVCDFLSRWPTLTAVQKARPATLLKFFQAHHSVRAATNERRLAELKTAVPLTTDGAVLNSSRLMVKVLVAQLRTVLTAIAEYDRHIEALCLTHDDYKLFATLPGAGPVFAARLTAAFGTDRSRWRTADELLRLAGVAPVLERSGKQQWIRWRYFCPKFLRQSFHEYAAESIHHSFWAKAYYNMQRLKGKGHHAAVRALAFKWIRIIWKCWQTRLPYNEVIYLESLRKASSPLLKFIASQP

SEQ ID NO: 111417 - protein, 319 aa, unidentified
MYLGIDVHKRYAQVAVMDEAGKIVEEVRVENANLDDLAQRYAGAQAVLEATSNYYHIHDTLSEHLDVTVAHPKKINQIADTDKKTDRVDAKELARMLRLNSVPESYVPTEEVREARALVRGRQTLVENRTKYANKIHGLLSDHGITEDVKPLNVKGRESLRELSLPVPFDTLLESYLDLIESLTEEIQKFDETIEERAGSLKENQLLMTIPGVSYYTALTIYAELGGIDRFDGDKEVASYVGVNPVIRESGDSRIEGSISKRGSGRVRWLLVQAANTAVHTSNDEYLSRFYDRLASRKNSQKSDRGSSSEDAGIDLSYT

SEQ ID NO: 111418 - protein, 357 aa, unidentified
MAEGTLVGVDLHARSAVAGVLDQVSGELRIERVPAASELLVEWLRLLPQPVRVGYEAGPTGYELARACTRAGIGCIVAAPGKIPRAPGDRVKTDRRDAERLVRLLRLEELTAVRVPDELEEAARDLVRAREDARADLMRARHRLSKLLLRHGLVWPGSAWTLAHERWLRSLSFAPRPLLLAFDESYGAVAHAKARRDALDRAIAETAAEERFAAVVARLCCLRGVSTLTAFALTVELGDWHRFQPGRLGAFLGLVPSESSSGERRRQGAITKTGNSHARRLLVEAAWHQRRPLRPSLALSGRRSGQPAAVRTQAEAAARRLHQRWWDLERRGKRRTIVAVAVARELAGHCQQLATMD

SEQ ID NO: 111419 - protein, 389 aa, unidentified
MTQLKAINRLGPLRHSCKDQIESYRHEAYLEFQSIQLLTNSTNYWHKYMKNLFIGVDFSKEKVDVAIIFADGLTETGSRVFNEFKTTVSGYKQLVKWVEKNSYGIDPSLWLFCGENTGDYSKGLCNFLYGKGYDIWLENAKSIKDTSGLRRLKSDRADASMIAEYAMRNHDKAVMYKPLSESLAQLRELFLYRQMVVRHRCSFQVRRGEKKLTMEKSPIKTMISQSGRHIVSELNKEVEKIDKRIAELIKSDEELTEVFTIVTSVPGIGTHNAVCLMVYTDNFRRFNYDSRKIACYYGLAPFGKDSGTSVHSDPHVHYMANRQIKAMLTQAALAAVKFNPVMARYYMRLVERGKKKQVALNNVKNKLVHLVTAMVRNRQTFTPEYKISA

SEQ ID NO: 111420 - protein, 336 aa, unidentified
MQHYCGIDLHSNNHVVVIIDEEDKRVFERRLSNDLSQTLKVLQPYQSTLCGIAVESTFNWYWLVDGLQAHGYQVKLVNTCAVVQYDGLKYSGDQHDAFHLAHLMRLGILPTGYIYPKEQRAVRDLLRRRLSLVRMASAQLIGVQSQLWRSTGIRISSDTLRCQDFKIPLEESHTRQAIESGLAVYQAIQREIDVLEQSAYQAVKLNKAFEILQTVRGIGKILGLTIMLETGDIHRFASAGDFASYCRCVDSTRTSNGKKKGNGNAKAGNKYLSWAFSEAAHFAVRFEPLAQRFYERKKTKTNGIIAIRAIARKLARACWMILKHQRPYEAKLMFPG

SEQ ID NO: 111421 - protein, 395 aa, unidentified
MLILAIDLGKFNSMCCFYDTNSRKPDFQKAETTRRYLTTVLKSRQVDLVVMEACGPSGWINDLCEELGLKTLVCSTNEEAWQWKNVKRKTDKDDALKLAKMAEMGALSAVHVPKQEVREQRTLIKYRKTLDQRVNRIKNTIRSLFANRGIQIDSGKRAWCTGRKLIDSHRKPIIECELDELWKGELDMELTQLDALAVQLDKVEKRLGVIAKNNPHITRLMTIPGVGPRTAEVLVATIDNPHRFKNARQVSSYIGMIPKQYQSGETDRNGRITKRGSRLLRTMLVECAWISIRYNAWAKLTYARLHGGQKTRRKKAGIALARKIAVIAWGMMRDETDWEPSKLLPELEPGDKAKIKVTQRPNVPAGAVLAQQTKASISRGSSRSRPGSRKQASPK

SEQ ID NO: 111422 - protein, 320 aa, unidentified
MNTPIVGADVAKAKFDAARLGADGKYKHKKFDNTLEGFAAFLAWLVAFGGDRPLVCMEATGAYSIPLAEYLAAQGWPVSVVNPNKIAHFGKSELSRAKTDKADAKLIARYAREKTPALWTPPPPEIRELQLLLRRVEDLTEMRQMEQNRLDTADAAVAGSIKAVLASLDQELEATQKRIRQHFDDHPDLKQRRDLLDTIPGVGKATAAQLLVALSEHYGFDNAKQAAAHAGLAPLIQESGRWKGKTRLSKTGDPMLRKALYMPAVVAWQHNPAIRAFCERLKAAGKNGKAVACAAMRKLLHIAFAILKSGKPFDPNYGLA

SEQ ID NO: 111423 - protein, 321 aa, unidentified
MNKNTEIFGIDISKDVFDVYSHQKGHQSFKNDAQGFKSFLKVITKDALVVMEATGYYHYLFAQFLHKKKVQVSVVNPLSVKRFIQMKLAKVKTDKSDAKAICEYGQMNEVPLYTALTDVQAECLQLFRLLDNYLKKRTQTKNKKHGEEVLGIPSKYVYGSLKRDLKHLDKEIKGIEARLLELVKQDQQHQLTLLKSIPGMGMKTALFLIVVTDGFSKFETASQLCSYVGITPTIRESGSSVRGRSRISKVGNKKLRNLLFLCAFSACKHNKACREIYERIVNKGKSKKLALIAVANKLLKQAFDIAESGLSYDVNFVSQLA

SEQ ID NO: 111424 - protein, 339 aa, unidentified
MQQVSTIGVDLAKNVFQVHAVDNDGKPVVRRQLRRSQFLAFFEGQPHCLIGMEACAGAHHWGRTLQEMGHEVRLMPPSYVKPYVKRGKTDAADAEAICEAVTRPSMRFVAVKDEAASAVIVLHRVRDFLVRQVTQTGNAIRAHMAEFGIVAAKGAKVVESLASSLDALPEAARLPINSLFDQLAETRARVERLTKEIEEAHRQSETSRRLAAIPGVGTLTATVIAATTPDVSNFASARDYAAWLGLTPKPHSTGGKARTGRISRMGNRYIRRLLYLGAMSLIMVRRRRGPGIDWLWQKLAAKKTRVVAIALANRMARTIFALLRDGTMYRPRVSATPPG

SEQ ID NO: 111425 - protein, 350 aa, unidentified
MIIGVDYHPSFQQIAFLIEETGEYEERQLNHTDGEAERFYRDLQRRGISVRIGMEATGYSRWFERLLAELGFELWIGDPAEIAAKRVKKRKTDREDARLLLKLMLEDRFPRIWVPSPENRDLRQLLWHRHRLVQMRTRIMNQLQALAMNEGKRWKKKLWNEQGRAQLEKLPLGFWASRRRRELLELLDRMNPTIEELTAAAAQEARKRPEALRLMTHPGVGPLTALTYVLIIGTPTRFQCGKQIGTYVGMIPSEDSSGGKQRLGRMSRQGSSLLRFLLVEAAQMAARINPEWRRRYMHLAMRRNKSIAKVALGRRLAVRLYWMWRNGCGYSPSLEFGSYAGQLGYGHGVK

SEQ ID NO: 111426 - protein, 408 aa, unidentified
MFVGIDWASEEHEVFVSKDDGGRADGFRFAHTQQGFDELVRRLGRHGEPADVPVAIERPDGRLVDRLLEAGHPVFPVKTNAIKAWRESEVVSGAKSDAGDAEVIADYLRIRRHRLRALDPFSDATKALRAVVRARTDLVEQRVAAANQLTATLDAFWPGAKAMFSDITCNIALTFLETYPTPAAAAPLGEGRMAAFLKKHGYTGQRSATELVERLRAAPAGVISGSAASAQGDVVLAMVRVIRALNQSIKDLDRSLNARLDEHPDAAIFTSLPRSGRINAAQMLAEWGDSRQAYDSPGAIAALSGAAPVTKRSGKHHVVSFRWACNKRLRNAFATFADNSRHASPWAADVYARARARGHDHPHAIRILARAWIRIIWRCWIDQVPYDPTRHGAARAFAERDLATGAAA

SEQ ID NO: 111427 - protein, 333 aa, unidentified
MQDLSTKQHFVGCDVSKDTLDLALYQPKTDYRKFEHVQISNDTEGFKQLLQWLKARKIKKNEVAIAFEHTGAYSIALAEWLHKKKITFNMLHPLDVKNACSRGRNKTDEVDAKFIADYAYTMREKLAPSGPEPKNIKHLRELRNERDLCVRCRASYLCQIKVQTEAQTIARMHKMVDFMTVQIHQIEEEIKKIIAADETIATNYHLLISIPGIGMVNAVNTIVATGNFTRFQTSRQYAKFCSVSPMVVQSGTTVHSGNHVCKKGHNELKATLSEAARSAIIHDPQLRHYYQRKRSQGKSHGCVMNAVKFKLICRMFAVIKRQQPYVNTECYRG

SEQ ID NO: 111428 - protein, 432 aa, unidentified
MNTKTINNSSQSPPAAANAAPALQPVAWIGLDWGHHSHAFALQERGGSPEEGTLEHSAESLHGWLRALEKRFGGRPVALGIETSRGAVIHALLQYAWLTLYPINPVTSARYRRAFTPSGASDDLPDARVLLELVRDHAAKLRPLQPQDEQTVKLSGLVEVRRDFVDRRTQVLNQLTSLLRAYYPQALELVGALDTELAADFLTRWPDLIALKAARPGVIKRFYYAHNLRRPDLLEKRLQLIRQAVALTTEEARVSVAVLQLRGLLDQWRAFHKHLAVLDAEIKTVFAAHPEAALFRDLPGAGPALAPRLCVALGTLRTLYPDPAHLQKAAGLAPVREKSGASLWTHWRWQASKFLRQSFVEWAGQTVVYSAWAKEYYQHMKAKGKEHHVILRALAFKWVRVLWKCWQSRTPYDEARYLQQLVHRNSPHAVSV

SEQ ID NO: 111429 - protein, 429 aa, unidentified
MTHSEIKSTEFAAYIGIDWADQKHDICLQEAGSNQIESLQLDHKPDSISIWISELRKRFQGKPVAIALEQKRGALLYSLMHCEFIVLYPVNPHALASYREAFTTSGAKDDPVDAGLLCEILYLHRDKLHPWRPDDPLTRELCLMVEYRRRLVDDRTFLTNRLQALLKQYFPQALDWAGELDTLRAINFLARWPQLELVQAASPEQLRDFYQQHRYRLGKKLPQRLAEISAAQPLTRDKAVINASGTMVQALLEPLRGLIAGIETFDQRIKACYEQHPDKEIFNSLPGAGAVLAPRLLAAFGADRTRYQSAEQIQRFSGIAPVTKRSGKTKFVQRRLACPKFVRQSFHEFAGSSINWSRWARAYYDRQRHRGNKHHEAVRSLAFKWLRIIYRCWQDHELYDESVYLAKLELRRSPLSKLIPTVDGQAMPS

SEQ ID NO: 111430 - protein, 355 aa, unidentified
MNSTKYIGMDVHTATISVAVRDAAGKLIMESVLETKASTILQFIHGLRGELYVTFEEGTWAAWLYDLLKPHVTEVLVCNPGKIPLHKQGNKSDQIDARKLAERLRLHDLKPVYHGENGIRMLRELARSYLTVVKDLSRVMNRLKALYRSWAIPCAGRDVYYRRHRSEWLDKIQEPGVRCRAERLYQQLDMLQHLRQQARRELLVESRKHTITAKLRQIPSLGPIRSALAVALMQTPNRFRSKRQLWTYSGLGLETRDSGEYYVVKGQVRRRKKQATIRGLNKDHNHDLKGLFKGAATRASVKPGPFQEFYQRSLAKGIKPTMVRLTLARKIAAITLTLWKKGEDFDINKLNSQAA

SEQ ID NO: 111431 - protein, 413 aa, unidentified
MEVVHPRCAGIDISKKDAKACVRIQGSGRRATTATVTTWGAMSNQILALREHLIAEKVTCVVVESTGDYWKPFYYLLEDGLNVMLVNARDARNRPGRKTDVSDAAWLADLGAHGLLQASLVPPPPIRRLRDLTRARTDLKRDRARQIHRLEKILEDAGIKLSSVATDIMGQSSRAMLEALIKGKTDPAAMADLAQRRMRSKIPALTEALTGRFTPHHGYLIGMHLDLIDSYTAALCDLDTKITVALSPSLIAARELLCSIPGWSTTVAEIFLAETGGEMTVFPTAGHLASWAGVCPGANESAGRVKSTKTREGNRNLKGALGVAALSVTRSKDTYFAAKYRRICLRRGPMKALVAVERAMVVAAHGMLTNGDFYRDPGANYFTTRRPGPVKANAIRQLAALGFTVTLQPLTTT

SEQ ID NO: 111432 - protein, 357 aa, unidentified
MESQEVKYVGVDCGKKSIEVVRINSENSLERRQFSTTESGINNLLQWLTLNDIVGLEAGSQSFRIAKSILNKGVQVIVLNPGNLATIYQSLKKTDKEDSLKIARLIQRHPIEELPTVPIPNDEEEDNRRLCSEHENWTKQLTQGKNRLHSLFTQAGLTQITKKHLRTKVSREASVTLLSDRYKKEAERILKVLDLVELNLKLIEKEIQEALKKNKAYVQTIMSMPGIGMITSLAIMSYMGDCKRFSSAKQAAYYAGLVPRVDISGDTVRYGRIINRGCHSIRRVIVQAAWSLVRCQYGGKIKEFYQRLYPKKGAKKSIIATSRKMIEVLYVMIRTGKLFDSMPENILNRKLTQYGLM

SEQ ID NO: 111433 - protein, 351 aa, unidentified
MRQYIAFDSHKHYTVVEQEDVASGQRQQYRIEHSPGAIREYLVQCEPGTAVAIEATANWYWIVDEIEQARLQPVLVHPRKAKLMMGMINKTDQLDVHGLNVLQRNGTLPVVWIPPGELRDLRELTRGRLALGRDRTRLKNRIQAMLAKYGLTKTEYSDIFGKNARQELEAKIKTLPTHGQFVTWKRLELLEHVICQVQDIEKRLIGLLTVTPEVKLLQTLPGIGLILASAAALEIGDVSRFITQEQLAAYSGTVPRVHASGGKVRYGKLRPDVNHYLKWAFIEAGNSVAVNHKVWPEKFVSQRYRTVRQRKGHPVAVGAVARHLAEAAWHVLKNKQPYRDPNWNRGQAREA

SEQ ID NO: 111434 - protein, 401 aa, unidentified
MVSDFMKGRYNLMKIFVGIDIAKLNHFAAAISSDGEIIIEPFKFTNDADGFQLLVSKLESFDKNSLIIGLESTAHYGDNLVRYLVTELYQVCVLNPIKTCQMRKNNVRKTKTDKVDTYVIAKTLMMQDNLRFVSFFDLDMMDLKALGRFRQKTIKQRTRLKIQLTTYVDQVFPEIQYFFKSGLHQHAVYALLKEAPSPKEIASMHMTHLANLLKVNSHGHFTKEQAKELRILAQKSVGANDSAISIQITQTIQQIELLDSQLEKIEAEMTDIMKFNDSVIMTIPGIGYINGGMILGEIGDIHRFSNPNKLLAFAGLDPSVYQSGNFQAKTTRMSKRGSRVLRYALVNAAWNVVRNNATFKAYYDAKRAEGRSHYNALGHCAGKLVRVIWKMLTDEVEFNLE

SEQ ID NO: 111435 - protein, 348 aa, unidentified
MTARREGEMGVTMVGREKRCGENPGDVIEEVVLGVDTHLDVHVAVVLDGLGRRLGELAVPTTEKGCEGLICWAEGFGRVRGAGVEGTSSYGAGLTRHLRAVGIRVLEVERPKRRHLRRKGKSDSRDAEAPARTLLAGETAGEPKSADGRVEMIRVLRAARRSAVKARTQAANQLRGVRVTAPEALRRRLRSFSTKELVAVAARFRPGGNPGGVEEATRFALRSVARRYQALSEEIAVLDVQLDRLVAKTVPELTSLPAIGTDHAATLLMVAGDNPERLGSEASFASLCGVSPVEASSARWCAIVSTGAVTETLTAPCTLSASCACASTSAPVATPRGAPPRASPKRRS

SEQ ID NO: 111436 - protein, 343 aa, unidentified
MQTVTTIGLDIAKSVFQVHGIDAEGKVLIRRQLKRRYVLAFFEKLQPCLVGIEACATSHHWSRELKALGHNVRLMPPAYVKPYVKRQKNDAADAEAICEAVTRANMRFVETKTPEQQSCLMLHRTRQLFIRQQTSVINAIRAHMAELGIVTPVGRKGVEQLLAIATDASDRRLTEVARACLAALGAQLRMLKAQILEFDRRIMAWHRSNEMSRRLDAIPGVGPALATALIASVANPKAFRSGRNFSAWIGLVPKQRSSGGKDKLGSISKQGDRYLRSLFTAGALAVIRYAKIHGTKHRPWLTALLARRPTKVAAIALANKLARMAWAMMASGERYKEPVALAT

SEQ ID NO: 111437 - protein, 314 aa, unidentified
MNATTYGLDVAKRVFQMYWVDAQTGEIVNRRFGRDELIGFLAQRPAGRVALEACGSGHWWARKIKALGHEVVLLHAKFIRPFVQTNKTDAADARAIWTAMQQPQMRTVAAKTEDQQAMLSLHRMRALLVKFRTMQVNQLRGLLYEFGVTFRAGRLAGLAEIRVRMAELEDTLPGAMICSLQDQLKRIDGLEQDIDQLEKRMGTWQKQEAACRAIAEVPGIGKLTATALVAMIGDARTFKSGREFAAFLGLVPRQSGTGGKIRLGSISKRGDPYLRTLLIHGARSVMCHAKVPTTWQRSIRARRRANVGAGALAN

SEQ ID NO: 111438 - protein, 345 aa, unidentified
MLLLPDQVVEADAHYRIQRRQRLTRTKFAHCMGNRAASVVVMEACGSAHYWARRVQAQGHEVKLLPAQHVRAYVRRNKTDAADAAALIEASRSGEIKPVAVKTIEQQVLQQLHRLRSQWQAARSARINGLRGILREFGIDIPVGAVRGLAATREALELADNGLPDALRPFIAQVLREIEDLAQQVKSTERALKCLTREDPVVQRLQQTPGVGLIVSTGMRAAVNDMQRFATGRHFASWLGITPKEHSSGEKRRLGAISKQGDVYLRTQLIHGARAVLLAAKNAAKNGRGLDRLRRWALQTEQRVGHNKATVALANKLARIIWATWKYERPFDGNWVHPVAVTAAA

SEQ ID NO: 111439 - protein, 423 aa, unidentified
MMKLKYSICCGLDVHKNVIVATIVTTNKDGISEYLQKSFSTINSDIQRFHNWLIENNCYHVCMESTGKYWIPIFNYLENDIDVCLTHPKYVKAIKGKKTDKKDSKWIADLYKFDLVRCSFIPPKDFRQLRELSRYRFKLVCMKSSEKNRIQNCMTISNVGIASVLSDPFGKTATEIISYLLEHTADSMDEKAVRKLIKKGAKSKSDEIIEAIKGYTIETDQAKKLELARGHLEYLDDMITQTEVELYVRIKPYYEFVEFVSTMPGMTELSSTIVLAETGIDMDIFDDAKHLCSWCGLSPANNESAGKKKSVRIAKAGDYLKPMMVQCALAAIKSKKQPYFAIKYGRIKKRRGHKKAIIAIARMMMVCIYHMVSEKKPFTPTDYEELMDPQNHVESVVLNENNVFAYLESLGYDSSKLVKRNDN

SEQ ID NO: 111440 - protein, 371 aa, unidentified
MSNDAIGFSRLLGDLKTVHKPEIIFEATGVYSRRLQAFLEDNGYAYTRLNPLEAKKQLDSLRVRKTDQIDAEKLAQSQFVLNRKPTYVQKEIYQNLRDLSRFYQNLTEDIVRAKNRLHKVVQVTFPELETILSTPSGQQYWNLVIAFPCKECVLELSKNELSKSIRQSTSKRISDKRVAYLAEKLTVLANQSYCVVKKTSPILEEVRYYAKELLRLSEQRQAVLDEMVELAQPLPEYDILLSIPGIAETTATSIIGELGDIRRFQSTNQINAFIGIDLRHYESGNFLAKEHITKRGNPYARKILFKCIHNIASASHTNPCHIADFYEKRKRQSQTTSTKPHTIASIHRLIRTMYYLITHNKLYDYTLTKNQ

SEQ ID NO: 111441 - protein, 422 aa, unidentified
MKNSAARKLEQVPEGFLIVGIDPHKKKHAAVAITQDLTTRGKFKFDNTRDGLEAMSQRARTEMVKYGCRGVMFAIETGGHYWRNIAYFLEDQGIPFRFINQYTLKRRREGKDLNRRKNDYRDSEVAAQLLCTGEFVESTLPHGVYAELRTAHNAYRRLVKERTRITNLVKALLDSLFPEFTHIFKDPCGATATTVLCTCPVPGVISKMSEEQFMASIAAEHGRRRLMRRKLKALHEAAKDSIGVAAGARSLASEVSFLCQKAELIKRHISIIERTLANLVDQTEEGKFLLSIRGLKYVAVAGLLAELGCFRSYRSAKQMIKMAGTNPTESESGGKRATHTPMSKKGRPVLRYCAWISAIPLLRLNPDFRTWAKSRRERPVDAHPLNRREIVGAALNRLFRLAFALVKNQTYYQVSRPAWSAA

SEQ ID NO: 111442 - protein, 510 aa, unidentified
MQENKSLCLSDFIRNPNAVIEDFNEIPDDDIEYVKEYGIGIDCHARFIEVCIRYRNGKTILKAQSRFSTNWNDLIDARDWCLNILATKADPVPDLSEPLHYLIESTANYHMPVCMAWGGSPTIINPTIAGATKRKTDVLDSRLLALHDQLNIWRECYIPSEEVKTLRVMIGQRERCIHDATASGNRINNILTRFGFTIGRNGSIVKNPDIRAIVEDQISDHPSRIEGICPFEIPMEARIVIRAEYEKFDSLKKEATEWKTKILEKARSIEWETDTGTLPGSEMIRILSTAPQIGELTAVIWLARIVTPRRFRNAKALSAYCGLDPSLKISAGKVTSTVMRGGSKPLHKALNMSAHRLISRHNEMFGIWGYNLQLQTGKKKKASNAVARKLSVALYYMMKTGTEFSYEKYHSIRRIDVFDIPVEDLILINPDFKRYIRILKENNLHTTTDLATAYITCSLGSCNGLGKKFFSLLKDFLDHHVTYKQMYDEIQDNLSKGGSDHGSTQDKNNQ

SEQ ID NO: 111443 - protein, 315 aa, unidentified
MTQESIFAGIDVAKDRLDLAIRPSGTVRTMAYDAAGISGLISELQSLEPSAVVLESTGGLELPLAGALAAASLPVVVVNPRQVRDFAKATGRLAKTDVLDAQVIAHFAEAVRPAIRPLPDSDTQELHSLNARRTQVVEMLVAEKNRLGRASQAVRPRIRAHIEWLEQELKDLDRGLRDMLRRSPVWREQDDLLRSVPGVGPQLSVALLADLPELGKLGRRQIAALVGVAPMNRDSGTMRGRRTVSGGRARVRAVLYMGALVASQHNPVIRSFYQRLLAAGKTKKLALTACMRKLLTILNSMVKNGQRWNPHAISY

SEQ ID NO: 111444 - protein, 337 aa, unidentified
MASVPVFVGLDYSQAFVQVCVLDPQGKVLANSPRPNTWADIAALVHHHGTAVRAAIESCTGAADLAAELVEQAGWSVALAHPGYVARLKQSPDKTDYQDARLLADLERVGYLPRVWLPPLHIRELRKLVRHRQTLAAQRRAVKLRLRALLRDHRLPAPACTPWTQAWRRWLTQEATLPEHSRWLVSEHLAELDHVQQRLAAVEARLAAATKDDAIVQWLLTQPGVGPVTAWTLRAAIGDFGRFRSGKQLARYCGLSPQNVSSGTRQADAGLIRVADPALRSTLIEAGQRLARYDPQWKGRVAAWRQAGKPYNVIVAAVANRWVRWLYHQVLAGPAAA

SEQ ID NO: 111445 - protein, 411 aa, unidentified
MGSDTLIAGIDLAKRESVVVFIRAKDKARLGKLRIPTTREGVAELERRGCLMMEREGLTRLVLGMEPTDHYWKVVCRAGERLGIGYAIVQSFVVARARELDDLTRDKTDHRDAALIADLVADLRFTDVRLESGAWLALRSYADARARYRVERASALQEQRSLLELAWPELLRVVLDLRGCHLQAALRLGLTPSEIARIPLHRFTSRLRIKQRAHRFSPEMSRRIWEAARAAREEPEAVSAALRWQLAGERAQAAELAISRLDVRMREAFAATGLDWMRGQIRGLGEILLTNLLAFSGDPRRLDDAACMLKLAGSNPTERSSGEQVAAGGIHRRGRPSLRLLAFQAATCLLRHNPEFQIRYRALVDRARHPLSPKQAQLAVANKLLRVLWSMAVSGRPYDSQLAAGGLRQAA

SEQ ID NO: 111446 - protein, 286 aa, unidentified
MQKYNISFKGQNIFVGIDVHLKTWHVTTLTESGYKYSFAQHADARELFERLNKKYPEAHFKSAYEAGFCGFSVHYALTEYGIENIVVNAADIPTTGKEKAMKTDAVDSEKIAWSLKRGELSGIYIKDKRFMDDTNLMRLRQRFIKDLSRQKNRTKHLLYTQGVIYPKRFLNSRTHWSRNFMQWLREEVELLSEEKLTLTLLCEQVENTRKAILKVTREIRRLSMTEKYKGNFDLLISVPGFGLIMAMTMLTEFDNNIKRFPNERKFVSMLGLIPTCHDSGEKKTNG

SEQ ID NO: 111447 - protein, 504 aa, unidentified
MTFPPWEPAFWLAIPLRKSVNPFGGDLCFGWLGSLRLYLYKPLGCVSTLWNWMPAGKDITMHYQKVLKMPESIPYLSVGFDVGADFTWMSIMLPNGILIGKPFKIIHSDPQSRELAISKIKEAQEMYSLESRCFLESTGIYHIPLLCFLRDKGFDCAVINPIITKNSTNMNVRKLHNDKFDSKKAAKVGLDASLKASIVPDDAIIDLRNLVRDYYYFKDLQSAIVLKLHAELKVSFPAYLNVFSKVTTQTSLKLLEAYPLAADMLAAPKDELVETIRSTARFGETYALARYDAICTAAKDAAVFGRALPSNALRIRLYIKMYREYQAHLDSILEELHQAVGKLEGTPDYDRISFIQTLHGVGFLSAVVLIAEMGSFDRFSSPKKLYAYFGLDPGVNDSGKFHGDRVHMSKRGSSLARRILHMVAINNLKVDKATKTPVNPVIYDYYTRKCASKKKSVAVGAVMHKICNIIFAMLRDNKPFELITPEEHRERYAAEHPESVNPAA

SEQ ID NO: 111448 - protein, 400 aa, unidentified
MRVVFGIDVSKASSEVAILVNGEKVHGYTISNDAIGFARLLGDLRTVHKPEIIFEATGVYSRRLQTFLEDNGYAYTRLNPLEAKKQLDSLRVRKTDQIDAEKLAQSQFVLNRKPTYVQEEVYQNLRDLSRFYQNLTEDIVRAKNRLHKVLQVTFPELENILSTPSGEQYWNLVIAFPCKDFVLDLSKDKLSESIHQSTSKRISDKRVVYLAEKLIALANQSYCAVKKNSPMLEEVRYYTKELLRLSEQRQAVLDEMVELAQPLPEYDILLSIPGIAETTATSIIGELGDIRRFQSANQINAFIGIDLRHYESGNFLAKEHITKRGNPYARKILFKCIHNIASASHTNPCHIADFYEKRKRQSQTTSTKPHTIASIHRLIRTMYYLIMHNKLYDYASTQNR

SEQ ID NO: 111449 - protein, 345 aa, unidentified
MRLYCGIDLHSTNNYVAILDEVFDAVAGRRLPNDLEEVLKFLAPYREDLLGIAVESTFNWYWLVDGLKAAGYGVFLVNTSQVKQYEGLKYSDDRHDARWLARLLGLGILPTGYIYPKEERPIRDLLRRRTFLVQKKSSMLISMRGAFQCRTGINVKTNAIKAWTEDDLDQWFDDPEMKLGIGCMLSPISAMKEQIERIEKAVLAKAKLRCEFRLLKTVWGIGNILALTIMYEVGEIGRFEHVGNFASYCRLVDSKYVSNGKRKGKGNSKNGNPYLSWAFTEASHFANRHRKPAQKFFQRKSRQTNAIVATRALAHKLARASYFVMRDSVEFDPTKAFGAQQCKQQ

SEQ ID NO: 111450 - protein, 363 aa, unidentified
MSGRETAITTIAQSEPIRVTVGVDTHGDVHVAYATDQLGRHLATTRIATTPRGYRALGDWARGLGQVAAFGVEGTGCYGAGLARFLGAQGQVVVEVNRPDRQARRRRGKSDPVDAEAAARAVLAGQATAIPKTGDSMVEMVRCLRVARATAIKARTQATNALRALLVTAPVELREQLRDLDPSKLAATAARLRPGAIVTPTAATKLALRTVAERQLALTTELTTLDAELDRLTARAAPALRELCGVGAEVAGALLVTAGDDPARLRSDAAFSMLCGASPIEASSGKTVRHRLNRGGDRQANTALYRIVVVRLRWHEPTRNYMARRTTQGLSKKEIIRCLKRYVAREVFAALMKTSPNGLVHAP

SEQ ID NO: 111451 - protein, 372 aa, unidentified
MQEDGEVYVGLDVSKLKVAVALAEAGRDGEVRFLGEVENTPEGIGRLVARLAKRHRRLAFCYEAGPTGYGLQRQVTALGHDCAVVAPSLIPRRPGERVKTNRRDALTLARLHRAGELTRVWIPDPGHEAVRELVRAREAAMEELRRARQHLQSFLLRHGRVFGGRAPWTKAHARWLGGQGFDHPAQQLVLAEYRQAVEDAGTRLERLTRQVAEAAAAWSMAPLVAAYQALRGVAFMTAVTFVAEIGDVRRFDSPRQLMAYLGLVPSESSTGERVRRGGITKAGNGRARRVLVEGAWTYRFPARLSRLLQERQEGLPKAVREIAWKAQVRLCGRYRKLMARGKRQTVVVTAIAREMAAFLWAIGRQVEPRPAG

SEQ ID NO: 111452 - protein, 406 aa, unidentified
MGSETHYARAFSWRNYEYSKKPFAFSNDETGFAAFKEWMNDIAEKHGMEVIIPGMEPTGHYWLNLGAYLQEQGMKPVYVNPHHVKKSKELDDNNPSKNDRKDPKTIASLVNEGRFSYPYIPTGIYAEIRNLSNLRIQTQEEITRIKNRMARWFSIYFPEIKDVYRNPDAVSGLMVIKQAPLPCDIRELGVEGVNKIWRDARLKGAGIKRATTLVTAAEHSIGNTEAPRSARKEIRNLLEDYEGYKKRMDELMEEIEKMLSEIPYIDKLMEINGIGIKTVSCFIAEVGDIGRFDNPKQVQKLAGYAIVADSSGKHNGESRISHRGRKRLRYALYEAAISVIGKNKEFKEIHSYYRTREKNPLKKMQSVIAVACKLIRIFYTILTKGVDYDGQKMLNDIVRSEIQPAA

SEQ ID NO: 111453 - protein, 414 aa, unidentified
MQSYPKEDKSMKEFTPERIEVKSESPLNLILNHKNLEDYCAYIGLDVHKETIAIAVATRGRREVSYRNEIPNRPKNIKKMVDKLVKEFDGELLLFSYEAGPCGYDVYHQLIALSVDCEVVAPSLIPKKAGDRVKIDKRDAIGLARLSRSGELTAVWVPEPEQEAMRDLTRAREDLKAVELKAKQQLGAFLLRYGKLYEKEKTRWTKGHFNWLETVKFNSPVQQIVLQEYINSVKDSVKRVAGIRSEMDNALKTWSLRPVVEALISLRGIDIITAMTVMAELGDISRFDKPRQLMAFLGLVPSEYSSGGKRRLGSITKTGNGHVRRVLVEYSWRYRFPARKTKHLRQKEAKASKRVQAIAWAAQKRLCGRYQQLLESGKAKQLACTAIARELSGFIWAIVCEVMNKPHASRCITM

SEQ ID NO: 111454 - protein, 418 aa, unidentified
MSGILAKKLARFKPGMLYAGVDLGLDRNEVKVIDERARQVGKLAFPHNQDGYDYFERCLQVLVERHGATGVVVGMEPTNYFWTLLAADQERRGRPYHLVNAFTVHRHREGDQLDRAKDDQRDAFFVAELLRTGKYTETRLLHGLYADLRYWVDLHDRLQRDLAREQTLIRNTVGRLFPELATVFNDFAGHTVTAMLRNHAAAAAIKDMPLETFLAAVRADSHSKRLLLSKLRQAHRLATKSVGLTEGIDALQSAIRLYLEKRQLLHRQLSEVRAALSKTFLALPEASSLLSVPGLGLISSATILAEIGNPQYYGNARQLIKLAGTQPTPNTSGRKSRSKTPMSHQGRPRLRTALYFACLRLIQLDDTFARDYRYFQHREHNPLCKMQALGALMNKLLRILWSLMRNHTLYQPALNNAA

SEQ ID NO: 111455 - protein, 337 aa, unidentified
MQKTYLGIDVSKLNFDLSVLIVQDGVKKDVLTTKFENNEEGLKAFKKHLDDNGVAFNENSLLVIENTGIYHRLIWQFCSDYSLPIYIGNAADLKWSFGIARTKNDKVDSMRLCDYAYKNREDLKPTPALNKSFLVLKDLLTNRSKLIRQQNAIRQTIKELKISNDKATQKMLEAINKAAIDGLKKSIKLIEVQMRKMVKSDSKVLANYTLMITIPGIGEITSIFILCCTNNFAIKISGKQLASYAGVVPCEHTSGTSVKGRNKVSHMANKELKSILSMGAMSAVQAYTEFGDYYERKKIEEKHHNKIMNAIKNKMLLRVVSVVNSGTPYVNNYKKAG

SEQ ID NO: 111456 - protein, 437 aa, unidentified
MLLCLNPNAAGVDIGATEIYIAVPEDRDPQPVRCFPTFTEDLHAAADWLKTCHIETVAMESTGVYWIPFFQILEARGFKVFLVNAHHVKNVPGRKSDVSDCQWLQYLHAVGLLRGSFRPEQAVCTVRSILRHRDSLVQMASSHVQHMQKALDQMNLQLHHVISDITGVTGVAIVEAILAGERNPHTLAALRDRRIKASADTIAKSLVGDYRREHLFTLGQSLEAFRHYQELIAACDREIAQYLEGFESKVDPPPAPTSPSKDGPQPKDSEPRFDLQTHLHRIFGVDLTKIPGINVLTTQTILAELGPDFSRFANGPALTSWLGLCPDNRISGGRVLSVKTRKVKNRAATALRMAAQSLYRSQSYLGHYFRRMRAKLGAPKAITATAHKLARIVYHMVTTRQAYDETICAHNEVQNRQRLEARLRKQARELGLQVVAI

SEQ ID NO: 111457 - protein, 347 aa, unidentified
MALTIVETPITGGVDTHADVHVAAALDPVGGLLGVAEFPVTPAGYARLLSWLSGFGTVCLVGIEGTGSYGAGLARHVATAGIRVVEVDRSDRQDRRRQGKSDPLDAVSAARAAQSGRARGAPKGRDGSVEAIRALMVAKRSARAERTQTINQARSLIVTGPDDLRTRFARHTVAALVAETASLRPRPGSTVGYATRIALRELGRRAQFFDGQLERLGELIVPLVTARAPGLLALYGVGPDTAALLLIAAGDHPARLRSEAAWAHLCAAAPIPASSGKRTRHRLNPGGDRQANHALWRIVITRMSSHPPTRAYVERRTAEGLSKTEIIRCLKRYVAREIYPRLRAAAD

SEQ ID NO: 111458 - protein, 312 aa, unidentified
MNEIICGVDVAKDWLDAHVEPQGAAGRFGNDATGIAELAAFCKAQSVGLVVMEASGGFERLSFMLLWQAGQPCGLVNARNVRRFAEAMGFLEKTDRIDAAVIARYGQVRRIVPTKPQSPAQQRLQALVARLSQVTADLIANRQRISAACDAEMADSLAEVIDLLLRQRRALESEIASRIDDDPLWACLDKALRSLKGVASRTVARLLAELPEIGTFSNRAIAKLAGLAPLADDSGKRTGRRSVRGGRAGPRGILFLVAGIVAKHNPHFAAFQQRLKDAGKPKMVIRIALARKLLVVLNAKTRDARKQFAYAT

SEQ ID NO: 111459 - protein, 344 aa, unidentified
MDHFAGLDVSVKETSVCIVDDTGRIVREVKVESEPDALLAVLKNPTYHFKRIGLEAGPLSQWLFSALAEAGLPVICVETRHMRAVLKAQINKTDRNDARGMAQMMRAGLYRPVHVKTLRSQKLRMLLTHRKLLQSKAIAIDNDLRGTLRNFGLKVGMVGTVKFEARIKKLVENIPDLAVLVEPLLIVRRVLREQFVIQHRRLLAIVRDDEVCRRLMTTPGVGPVVALTYRATVDVPARFRNSKAVGAVFGLTPSKYQSGEIDRSGRISRCGDEMMRVMLYEAAQSMLRSKKWSWLKAWAMQIASRRGMKKAIVALARRLAVIMHRIWVDGTKFRWTREQAAAAA

SEQ ID NO: 111460 - protein, 607 aa, unidentified
MSTIASLDRIGVGIDTARYGHRVSFLRPDRKPAAKPLTVMENRAGYQALQDRLNQLHEQHPTAHFHVRIDAAGQYAVNLELFLRGLKLPMTISVGEPKRNKDYQKAHFPKRTTDDTESQAMARFAVIELPNATPAPSTPMILLREVAGRLQSKVKQTTQAINRLHNLLARVFPELATLTEDISVGWVLKLLDKYPTAERIAQAQIASLEKIPYLSVEQAHAVHQAAKQSVASLRGELAEALVRDLVNQLRLCQKAEQHLHQLLLEAFADLPASPHVQVLTITGIGEATAAALVAKIVDINRFATPNHLVSYFGVFPEESSSGVDKHGKPLPPGTLIMSPKGNDLVRFYLWNAARTAIQHNPAIRALYRRLRAKGKRGDVAFGHCMRKLLHLVYAVWKTDRPFDKEHFPWEGSSDTQPSATTPPSADAGTTPSANEEAVGHKRDLPAEEVVTTADSTLEPASPAVKPASQSAAHRPKVDFACVREHVTMEQVLQHLGYFASLRGRGRQRRGPCPVHSQPTAPERTFSVHLGKNAFQCFHAECAVKGNVLDLWAAIHRLPLYEAALDLAETFQVPRNREEEPVKGTSSPRTATAKTSAPAAATATDGAK

SEQ ID NO: 111461 - protein, 345 aa, unidentified
MSIVRTVIGGVDTHADFHVAAAIDANGGLLDVESFPADSAGYEALLGWLVGFGAVRLVGVEGTGSWGVGLARFLRDQDVVVVEVDRPNRQVRRKVGKSDPTDAVAAARGALSGAASVIPKARNGPVEQMRVLLVARRSARRQRIQTLNQLRHLVFCAPEEIRARFKDRYKTGLVTEAAAMRPRKGSDPVTFTTNLVIRNLARRIQGLNAEMASIDDMLTELVAETAPSLIALYGAGADTAASLLVTAGDNPDRLGSERSWAHLCGVAPLPAGSGKTSGRYRLNRGGDRNANAALYRIVLTRMSSDEQTRRYVSRRRDEGLSTAEIMRCLKRYVARQVFKQLPRAA

SEQ ID NO: 111462 - protein, 350 aa, unidentified
MTAKKGYIGIDAHARNSVMGWRDGRGKYQGAQRFETSESNLLKHLQDIPAQEKHLTIEEGPLAGWIARTLMPHAKRILICDPKKNTSIQRDSNKNDLADTEELSRLLWLNQLTEVYHPADDERAIFKAAVQQYLDLRNEQVRMKHKIKAKYRMWGVSAVDGMKVYGPKNRRSFLEQVQQPSIRHQLQRLYVVMDTAEEQMEKSFEEVRALGRKYPEIKEFLKIPGVGPVGSHVFDAFIQTPRRFANKQQVWRYSQLAIRDRSSDNKPLGFRRLDYNGNPELKAMSYWAWMGALAREEDNEVKRLYQASLERTHNHVHARLNTQRKIIAVMWTLWRKQEAYKPELFFLSPT

SEQ ID NO: 111463 - protein, 386 aa, unidentified
MQKLNDLSRCLTPLEPDSTLIAVVEMSLSSWLVAGIVPGVERQPLKKLAVDESVLLKLLHRWREEAEKAGYMIKRIAVAFEAGRDGFWLARWLRARDIEVHVIHTSSVAVSREHRRAKTDRLDSELLKRAFLGWLRGERDHCKMVAIPTIKDEDGKRPNRERESLVGEQSRIINRIKATLVRLGIRGFNPKLKKAAERLEGLRTPEGEPIPPNTLSELYRDMERRRLVRGQIRQIESARLDRLERAPGEGAHAMVRLLARVMGIGIETADMLVQEVLSRNLRDRRAVARYAGLTGSPDESGKKRREKGLARSGNARVRRGMIQLAWRFLLFQKDSALAQWFRARTENARGTRKTMIVALARKLLIALWRLVREDVMPDGVILRPAQ

SEQ ID NO: 111464 - protein, 338 aa, unidentified
MIIKLGLDVHAGQVTVCRQDDGQQPKPAQRLGWAQFDRWVRGLRQGGARVCSCYEAGPCGYGLHRQLTALGVENVVVVPQRWDEQGRRVKTDRRDARELCDRLDRYRRGNLKAFSVVRVPTPEQEQRRAAGRQRGALVKERQRCVVRGHGLMLAQGIQAPPQWWRPARWAGLQPQLPGWLRDQVGVWQQQAQRLDAEVTDWTRRVAQPSAGQLVPKGVGRLTAALIAGEILDWQRFTNRRQVASYTGLCPSEDSSGTRRRQGGVTKHGNPRVRHALVEAVWRLQLWQPQYPPLRKLHAALGARARKRAVVAVARRLAIDLWRLNTGQCPAQKLGLQLA

SEQ ID NO: 111465 - protein, 349 aa, unidentified
MHARSVVACGLDRQTGEVFERRLCPDHREILEWIGGLPHPVAVTYEAGPTGFGLARALEAAEICCVVAAPSKLVRPAGDRVKTDARDARHLARLLHLDQIVAVTVPSMQQEAARDLVRAREDCRADLMRTRHRLSKLLLRQGIVYYGGEAWNAVHERWLRRQHFDTAGLQMAYQEAFDAMLVTRDRRDRLDAAITAMAVDSEFTTVVTRLGCLRGVSTLTAFALAVEIGDGHRFTGRSIGAYLGLVPTEFSSGATRVQGGLTKTGNGHARRLLVEAAWHHRKPYRLAIALRRRQDAASPAARARGNAANRRLHTRWQRFDARKKRPVVANAAIARELAGWCWSLATLDE

SEQ ID NO: 111466 - protein, 406 aa, unidentified
MQVYLGIDCSQHSYEASFVNQAGAVLARLAIPSSPEGFLHLDAARDKLGIPPSDCLVALESAHNLLVDFLWDHGYSQVYVIAPHVIKSCRDRYRHSGARTDPSDAYVLADVLRTDRHRFYPWYPDQPSTRQIRAMNSLIGHLGRTIVRHSNRLRAVLARYYPGLLQAFRDIHGPVALHFIQAYPTPQATAQLTWEQFQLFARQHRYTHRARVSRCFSRLQTPQPEAAPPIVEAYQQEAVLLAGLLLSLVEKRRALIRQMDLLFERHPDHTIFASLPGAGPQLAPALLAKFGDDRSRFPTPATIQALAGSCPVTDSSGKRRTVKFRRACDREFRHIAQQWARCSLQRSLWAQAYWSQVPPRCSSDSHALRCLANRWLAVAWSLWQKHQPYDEAYHLHQRALNTRLPT

SEQ ID NO: 111467 - protein, 346 aa, unidentified
MTANHITIGLDLGDRRHTVCVLSASGEILAEEAITNTRECLTAFASRHPGATFVMETGTHSPWVSRLLQALGHAVIVANARKLRAISQSTTKSDEEDARMLARLGRADPALLCPVQHRSESAQRALVQLKVREALVRARVNQMNSVRFLVKSLGLVVPRGVKATAFVRQFRTRADAATAALVEPLLLTIDAINAQIKQLDARLEQMADEHYPVTQRLRQVDGVGPLTALCFVLTVESPARFPHTRDVGAYLGLVPRRDQSGLTDKQLPITKAGNVQLRCLLVNCAHYILGPFGPPSHLREAGERIAQRGGKSAKKRAVIATARKLAVTLLALWKSGADYHALPLAA

SEQ ID NO: 111468 - protein, 385 aa, unidentified
MGTVKKRGPGPSSLLMTPDHAGNVVGVDPHKRTLTASVADARGGILASAHFRVSGEGHRELEAWARQFGQIARWGIEGSASWGRHTAMFLIGRGCDVRDVCANRTPRSDRARQRGKSDTLDAERIAREVLAHPLLPKAFKRSGQQQGPDERHQLLALWHNRRRSILTSRQHLVGEAEYLLCELPLQLREQLPDTKAVKPRLAAVTRRNRRRRYDAPTKLRLELLDGYHAQIKALDLEEKQAIAQLKALVDQSGSTLGELCGLNIRSVAELLVEVGDPRRFTEGGFARFNGTAPLPASTAEGPGEPVRHRYNPGGNRRVNAVLHRMAVTQLCHEPRAQRIYANARTAGHTKKEARRVLKRHLSDVVYRRMIRDLHAQLTDQPLLAA

SEQ ID NO: 111469 - protein, 391 aa, unidentified
MLNDAPLPVQAAIRTDLGAIFVSMELSRRTWLITSLSPGAGEKMSKHSVPASDVPGLLHRFAELRRKAAARTGRDFPIIVIQEAGLDGFWIHRVLQSEGIESHVVDPASILTSRRARRAKTDRIDGETLVRTLMAFKRGEPRVCSMARAPTPQEEDRRRVCRERRTLMGERVRHVNRIKGLLFAQGVFGYEPLRKHRRERLEELRTGDGRPLPVHLKAQIIRELDRLEVVLAQLKSVAAERDALLKPATDEPASPPAMLVQLKGIGPESAAVLWSEGLFRRFDNRRQVAAYAGLAPTPWQSGSIDHEQGVSKAGNPRLRTTMVELAWLWLRNQPTSALSLWFHERVERLRGRMRKTIIVALARKLLVALWRYTTAGVVIEGAVMKPAPATI

SEQ ID NO: 111470 - protein, 378 aa, unidentified
MYRILKIGMDVHTTNFTLCAVEPILGQEANVLARATVGPDYKNIIDFISKLKNTLKVTDKECDIQCGYEAGCLGYSLYMQLTKAGIKCVILAPSTMLTQQGKRIKTDKRDALLIAQCLCYGGYHAVHIPTDDDNAVKEYIRMRDDHKISAKKIKQQINAFCIRHGLIYTGNNWTGKHRAWLKAQKLDPINQETLNEYIVSLEEAEAKIARFDKRIEEIAVETKYVEKVKALRCLLGIQTHTALSLVVETGDFKRFAKGSIYAAYLGLAPGEHSSSTDINRLGISKAGNNHLRKLLIEAAGGICKGAIGHKSKALRAKQEGNTAEIIAYADKANTRMRSRYYHFIRRGKKRNIAVTAVARELACFIWGLMTNNIALNPT

SEQ ID NO: 111471 - protein, 370 aa, unidentified
MRVDRKNGKRKGCKMNSIVAGIDLGDRESLATVLSPIGDVADRFSFPMNEEGYAYFASRVPKNARIAFESTIMAYPILRAFRTHGYSDITVAHPKTLAWIVRSKKKNDKADSLKIAKLHMAGMLPESHLLDRDQQIARDLLVQRVKLGVEIGRLKNSLIGYLKREGVYDSLPKTGDNFSVKRRHAILSLRFDDKRDLILGTMMGRLEFLEGQCIPLEDSVRENARVSDDVKLLMSITGVDYYLASLLSSFIGDVERFPSDDHLASFFGIIPTSRDSADVKRRGRMTKDGSSIVRWALSIMVDTVMLHNEPIREYYQSVKKRTDSGKLAHVATMRKLTRMLYHMLKTKQHWKWENPLLTERKMAKLEGGWR

SEQ ID NO: 111472 - protein, 365 aa, unidentified
MNCVGIDVSHGKSIIVVMRPFGEVVVSPFEVLHTDSELSKLAGLLKSLDGETRVVMESTGYHHTPVAWLLHDAGLYVSVVNAMLVHDYGNNSLKRAKTDKKDAVKLANCGLDHWLTLPRYVPEEDTRLMLKTCYRKYQQYSKVQTMLKNNLISLLDIAFPDANRLFTSPPRADGSEKWVDFVAAFWHCECVCNLSEKAFTAKYHKWCRKHRYKFCEDKTLDIYSSACGHFGVIPKTDTAKLLVEQAVFQIRATSTTLAALKQEMQSLAASLPEYPVVMGMFGIGPALGPPLMAEIGDVRRFHSKKALVAVAGIDAPPYQFGQMDVRSHSISKRGSASLRRPFFLVMSVILQHAPMNEPVYQFMNK

SEQ ID NO: 111473 - protein, 355 aa, unidentified
MNEAKYIGLDVHQATISVAVRDSDGKLVMEAILETKAETILQFVHGLRGSLHVTFEEGTCAAWLYALLKPHVTQVLVCDPRKNALLKVGNKNDRIDSRKLAELLRANLLSSVFHEDTGLRAVKELARSYLTMTKDLTRVMVRLKALYRSWAIPCATKQVYAPRHRAEWLAKIREASVHRRAELYYQQLDALRSLQQQVKKELLIEGRKHSATKLLRQIPSIGPIRAVLLLALIQTPHRFRTKRQLWSYCGLALETRTSAEYRVVHGQLQRSKKPVAIRGLNKNHNHDLKNLFKGAALRAAAVEKPFQEFYAALVAKGIKPEMARLTLARKIAAITLIVWKKGARFDAEQLKQQAA

SEQ ID NO: 111474 - protein, 286 aa, unidentified
MSIYAGLDVSDKTTHICVVDADGKVLRRDVVASDPDVLAKWLTRHCPDLVRVVLETGTLSTFLYHGLAERGVAVECICARHAKGVLSARVNKSDVHDAEGLAQLARTGWFKRVHMKASATHIDRAALRIRAQLITARTAMANQLRGLLKLFGLRMGTARTPGRRAERLTAFYAQRPDLKALFAPLIASMEAIEEQLCASNRLLNERAKADEVCARLMSVPGVGPITALTYTSTIEDPHRFARSEDVGAYAGLVPRRSQSGERDTSGHISKAGARRFTRPPTSRCPR

SEQ ID NO: 111475 - protein, 354 aa, unidentified
MPATAQTAIAVIGIDIGKNSFHVVGQDTRGQIVLRQKWSRHQVEARFANMPPCLIGMEACVGAHHLSRRLKTLGHDARLMPAKYVRPYSKGQKNDFRDAEAIAEAVQRPTMKFVATKTADQLDLQALHRVRERLVSQRTGIVNQIRAFLLERGIAVRQGQRFLRAELPRILATPPDVLSPRMLRIIEDLAGDWRRLDERVEGLSNEIEAIARQDAGCERLMSVPGIGPMISSAMVAAIGAGDVFTKGRDFAAWLGLVPKQISTGDRTILGKISRRGNRYLRVLFVQAAWVVLIKPKIWERHGLKPWIEAARKRLHHNVLAIALANKLARIAWSVLARGRAFEARKMDQAVNQSA

SEQ ID NO: 111476 - protein, 332 aa, unidentified
MSVYVGIDVHRKRSQVAVINQDGEVLANRNVPNGVEPILRVIGGLPSGTPAAFEAAFGWGWLVELLEDYGFEPHLVHPLQCKAIASARLKNDKADAAILAQLLRADLLPEAWIAPPQVRQLRALLRHRIQLVRLRTLLRNRIHAVLADHGHDRPAGYWSGPGRSWLASLDLPAVSAEVIADALALIDALESVTGRLDAEIRGHARSDPRVTVLTALPGVGPFTALVLLAEIGDITRFGSARKLAAWAGLTPTVRGSDRTVRHGHISEQGSVWVRWILCEAAQTAKRSPEFAARYQAIARRRGKKIATTAIARKLLTRACHLLTDASSDGAPR

SEQ ID NO: 111477 - protein, 322 aa, unidentified
MNPVSTPSVFVGIDVSKARLDVCIVAETQACFSVDNSAAGVAELVSRLRLIAVTRIVIESTGRYSRLVAAELCAASMPVCVVNPRQARDFAKSLGRLAKTDAIDARSLAEFARVAGLRVSEKQPENQAILDDRITRRRQVVQMLVMEHNRTEGVTDKLTIGHIKKVIRLLEQQREDLDREIAKLIDADDDWRKRRDALVSVPGIGQSTASILVTDLPELGKLNREQIAALVGVAPINRDSGTLRGKRGIFGGRPHVRATLYMATLSAMRFNPTIKAFADRLREAGKAFKVIAIACIRKLLTILNVMLRDNQPWRNPCLAKNA

SEQ ID NO: 111478 - protein, 347 aa, unidentified
MKKIATIGLDIAKNVFQVHAADADGSTAFNRKIKRADLLEYFAKLPPCLVGLEACSTAHHWGRRIAELGHEVRLIHPAYVKPFVKRGKTDFNDAEAINEALTRKTMRFVPVKSAEQQASAIIFQTRTLVIRQKTQSINALRSHLAELGIVTALGNTGLKALVAIVNNEQDDRIPASARFALHQALKQIEFFEENLAQLDREIKARTKHDDDIKRLMTIPGVGPISAIAFTTLVPEPGGFKSARHFAAWIGLTPKSHSSGDSQVLGKISRMGNGQLRSLLVTGAMSVLRNTKSDERVSPWVAKIRKRRPFKVAAVGLANKTARIVWALLVRGGNYAKPGSSVHAETMV

SEQ ID NO: 111479 - protein, 340 aa, unidentified
MPLYGGIDLHANNSVVVLLNDQDQVIYEKRLPNHLPAILEPLRLHPGEIEGVVVESTYNWYWLVDGLMEAGYRVHLANPAAIQQYSGLKYSDDHSDARWLAHLLRLGVLPEGYIYPKAERAVRDLLRKRAHVVRQHTANVLSLQNILARNTGARFSLKRMHELTKQELQSLLTEEAQVLAVTSSLAVLDCLQHQIKLLEQSVHTRLRHTPSYEQLLTVAGIGPILAHTITLETGAISRFPRVGHSASYCRCVDSNKLSNGKRKGTGNVKNGNPYLAWAYMEAAQFALRFQPAAQRFYQRKLAKSRNNTVLARKALAHKLARACYYMMRDLVPFEATKAFG

SEQ ID NO: 111480 - protein, 364 aa, unidentified
MENATHLGLDVHKETIAVAVLRPGHIEPDERTIANTPEALRALIRRGSFERPVACYEAGPTGYETHRLLTSLGVPCEVVAPTMIPRRPGARVKTDRIDARNLARLHRAGELTPIRVPTATEEALRDLVRVREDIKDDRRKTQHRVKSFLLRQGRRYPGRDKGWSDKFDLWARSQRFEEPAADAAYRHYLAALDVRRSQLSTVTTEIEAAAQLPPLAEPVAKLRCLRGIETLSAVSIAAEVCDFRRFPGAPSFMAFTGLVPSEHSSGPSVHRGSITKTGNAHVRRVLVEAAWSYRHRPAIGINLRRRSDGQPPEVLAYAWAAQCRLHSRFQSIAAAKNRNIAVVAVARELSGFIWGLMNDHVEVA

SEQ ID NO: 111481 - protein, 365 aa, unidentified
MARIPQQGPIHLGLDVHRNTISVATLPPEAAAAAVEQIPHDEAAVLAFVGRFAEPSRLRVCYEAGPTGYELARLLHRQGIACQVIAPSLIPRAAGDKVKTDRRDCRRLARLHRAGELVAIRIPTPREEAVRDLCRARADLVDDRSRARRRLQAFLLRHGRVYRAGACWTGKHERWLGTQRFDDPQLQATFTHYRAVAASRDAQVTAIEADLAEAATQPPFADAVARLASYRGVGQLGALSLAAEVGDWRRFVHAGAFMAFTGLVPCERSSADSVWRGHITRTGSKHLRFQLVESAWSYHHRPLIAGALRERQQHVGPDTLARSWTAQLRLCRRFRQLERRKHIKGVAVVAVARELAGFLWAEMQT

SEQ ID NO: 111482 - protein, 366 aa, unidentified
MDQGITFIGLDVHKRSIVVAVREPGSGGVQEERIPHEIPVVKRWAQRWKRRSGGQLLCAYEAGVCGYALQRQLESLGVRCQVVAPSLVPRKPGERIKTDRRDARKLAEYLEGGLLTEVRPPTPSEEAARDLCRAREDAKQDRMRCRHRLSKFLLRRGRSYPAGRRSWTLAHRAWLKQQSFEDLYEQAVFDDYRLAVEQVDARIAALDRQIEGLAQAPPYRAAVGALRCYRGIATHTALGLVTELHGIERFDRASGLMAFVGLVPSEASSGDRQRRGAITKAGNGHARKLLIEAAWHARHKPAIPVALRQRREGQPPEIIAMADVAQNRLHRRYWRLVQRGKPTTVAATAVARELAGFVWAALRAVA

SEQ ID NO: 111483 - protein, 396 aa, unidentified
MWTLGIDVAKRRHRATLLDDDGQTVFRNVSVEHSREGVGELLQRLSATGQPADTVLVGMEATGHYWMVLYETLVQSGYTVQVINPLVVAARRNITIRGTKTDSADALLIARLLRETHLKVCAIADEEVQQLRDLTRLRFQCAHTAKAEKARLVSLLDLAFPEYHDHFTDVFGASSRVVLAEYPTAEQLAQVDVRRLTRLLKQASRGRFGRQQAQSLKAAAKSSFALTSRNQHLELAIRFVVERLNLLVEQIAQIDRQLKAFLVEQQTLLQSIPGLGKVWAPTILAEVLPVFHPQSQRGARKFVAIAGLDVVQADSGERTGKGKVSKRGSRFLRTAVMQAAEIAVFKSHDPLFTQVYERQIKRGKHHLVALTHVANKMLHVIFSVLKNSRPYTPIMN

SEQ ID NO: 111484 - protein, 342 aa, unidentified
MYYIGLDVHKKTISYCVKDARGRIHDEGKIGATRNDLDSWMKTLVRPWMVAMEATIFTGWIYDHLLPHAERVKVAHPLMLRAIAASKKKNDRIDAGKIADCLRCDFLPECHMASTDIRDRRRTLRYRHLLVRQMVQMKNRISGLLMETGVSHNKQRLHKVGYFRELLSTNKEVHESIRPLLRLSRDTIVRCQKTEYALVSSLQRDPLLSERIKLLRTVPGVGPITALTWALEMGDVSRFRSIKQAISYCGLCGEEKSSADTVLRTPLSKQRNKHIQHVLVEAAKLAPRQNHELALVYEKEKQKGNANRATLAVARKMVAYLLAVDRGKRAFVLLEDHSTTAA

SEQ ID NO: 111485 - protein, 349 aa, unidentified
MQIAVLGIDLGKNSCSVAGLDPTGRIVLRRRTNRDGVIKLASRLPPCVMAMEACCGAHHLGRTLQSIGHQVRLMSPEYVQPYVKAQKNDERDAEAIAEAATRPTMRFVELKSETQLDVQSLHRARSRLVGERTALINQLRAVLIERGLTVAQGRRRLEQYLALALDAEDAPPLLLSPRMHLLIDDMRTQWRELDRRIAAFDAEFVALARKDATARRLTTIPGIGVLNATALVAAVGDARNFSRARDLAAWLGLVPRQATTGGRPKLLGITKRGNKYLRTLLIHGARAALPSLATTDGALGNWLRGLSARAHRNTVVVALASKLARIAWAVLRAGATYHATIGDRPTAAA

SEQ ID NO: 111486 - protein, 416 aa, unidentified
MNAVGIDVSSRKSTVAVLRPLGEVVCLPFDVTHDIAGLASLAEKLKAIDGETRVVMEHTGRYYEAVAKALHEAGFFVCAVNPLLIKEYGANSLRRVKTDKADAIKIARYALDNWADLRDFTPMDAIRYDLKTLNRQFQLASKQRTASANNLIALLEQSFPGIRKCFDSPVRSDGTQKWVDFAHSFWHVDCVRKQPFPAFCERYRKWCKRHAYFFKLRNAEKVYALAKSAVVLTPKSKVVKVLVQEAANQLISISRSVEVYRAEMDRLAAMLPEYPVVMAMYGVGKSYGPQLMAEIGDVRRFERKQALVAFAGIDPMPNQSGDKNVRSNKSSKRGSPYLRKTLFNVIRTYLQCAPQDEPVFQFLNRKRAEGKPFYVYMLAAANKFLRRYYAKLRDYFASLDTLQPVAPIPTILKATL

SEQ ID NO: 111487 - protein, 356 aa, unidentified
MDQLTTVGIDLAKDVFAICVLDATGVVLQRRVLRRDAFMRWAEQLSPCRVAMEACGSSHHWGRWFAARGHTARLIPAEFVKPFRPGGKNDAADAEAIAVAARQPTMRFVAIKSVEQQAILAWHSVRQGWQEERTALLNRTRGLLAEFGVVIARSADRFLSALPQLIDDARLPDPVHCMLLEVREQLVALNLRLARCDHQIATHARSSDVARRAGELLGVGPVTSSAMAATVPNAKVFRNGRQFGAWLGLTPRQHSSGGRTRLGHISLRGNVYLRTLLVQGARSTLQSALRADPTHASRLQRWIRQLHERKGYHKTLIAIANKHARMLWAMLAKNEHYDADAWQRHPMHPPLPPAAS

SEQ ID NO: 111488 - protein, 345 aa, unidentified
MKITTIGIDLAKSVFAVHGVNEHGREVLKKVLKRDQVAKFFANLQPCLIGMEACGSAHHWARKLQGFGHDVRLIAPQFVKPYVKTNKNDAADAEAICEAVARPNMRFVPVKNVEQQAVLAQHRVRQGFIKARTAQANQIRGLLAEFGLIIPQGIANIAKRVPELLEDAANELPGSFRLLVQRLMEHLKELDRQAGEIEAQIVTWHRDNELSRKLAEVPGIGPITASALVATVSDAKNFDNARQLAAWIGLVPRQNSSGGKNVLLGISKRGDTYLRTLLIHGARSVICAFQRKKDKVDGWLGALLARRNPNVAAVALANKNARIVWALLAHDREFRPGYTSAQASA

SEQ ID NO: 111489 - protein, 427 aa, unidentified
MKEAPVAGFDISKSSSDICVLAPGNEVVWRSKMAHTSQSMAQVARRLTDIGVQYGAAPVIIMEATGHYHRIVLQFMKNEGFDVVVVNPIQSGALKNISIRKVKNDRVDAYRIALLYRLKAAKRTNLPTDLIADLRSLCRQHYDLTQDLIAYRSRLHAQLDQCFPGFAGVFSSLVNLSALSVLERFPLPSLILSASDQDIEGAILSVVTRKSAYLQKKIHALRQAARNALPIAISTPSCAVIMKNLVSMLQILKKSIREVDLQIRALIRSDAGLRTDAELLKSIPGIADYAAAVILSEIGSVSSFQSAKQLVAFCGLDPTERQSGQFTGTRSKISKRGSKYLRCILNMSAHISIQPGCKGTYANPVLAEYFQRKRQSKPYKSALCAVMHKIVNIIFAVLRDQKPFELRSPELHCQIMRDRAAKLSLAA

SEQ ID NO: 111490 - protein, 348 aa, unidentified
MRFYTTQHAFYCGVDLHARTMYVCVLDQAGKIRFHRNLPCRADAFLRAIEPFREDLVVGVECLFCWYWVADLCAAESIEFVLGHAYYMKAIHGGKSKNDKIDSHKIAALLRGGTFPLAYVYPRGMRATRDLLRRRLHFVHKRAELLAHIQNTSTQYNLAPLEKGIAAAANRHDLLEHFGDHEPVQMSVAADLALLDTYDQTIHELELFLRHAVRTDDGSSYHLLRTVPGIGNILALTIVYEIHTIERFAGAGNFLSYARLVKGDRGSAGKKSKPGGAKMGNVHLKWAFSEAAALFQIANPKGQKLLARLRKKHGRGKAMGVLAAKLGRAVYFVLKRKEPFDLNRFVAA

SEQ ID NO: 111491 - protein, 365 aa, unidentified
MQKISTTQTSGKNIFKGKLTIGLDLGDRASAYCVLNDAGEIVLERKLATSPKAMTEIFGKMVRCRIAMETVTHSPWVSRLLTALGHEVIVGHAQRVRLITKSRRKDDRQDARKLARLARIDPELLSPVKHRSVQAQLHLTEIRARAGLVSARTALVNGARGLVKSYGERLRKCDTRQFRREATGGLSTGLRDALEPLLREIESLNDRIQEYDRRIERMAKLTYPEASLLKQVKGVGDLIATTYVLTMEDPHRFRKSRDAGCFVGLQPGRRNSGDSEPQMHISKEGDEYLRTLLVQGAHYILGPFGEDSDLRRWGRKLSERGGKTAKKRAVVAVARKLAVLLHRLWVSGEVYEPLHNNQKAMTAAA

SEQ ID NO: 111492 - protein, 426 aa, unidentified
MVIGSKGAALGRQDVKDEVIYLRAAGLDLGKRFLVACVRVPNPRRHGTWSLETERFGTTPVEVRRLLAWLVEHRVEIVVMEATSDYWRFVYYTLQESLNLMLVNPAHLRGIRGRKTDPSDAAFLARAGASGMVMASLVPGRAIRELRDLTRRRTEVAVARGQEAQRLEKELEDTGMKLTSVITDVTGTTGRRILGALIDGERDPATLADLAVGVARQKVPALVEALDGTFTDHHAWMCRHYLDQIDHWNTLAAALDERIASFMTDHDQDLTNLDTIPGISRKAAEIIIAETGGDMTAFATAGHLASWIGVCPGMNESAGVVRSGQTRDGNGNLKRVLGVAAMAAVRQKNSYYGAFYRRIATRRGKQRALVAVMHKLTVAIWHVLHDRTGHKDLGADYHTRKNPQRAMRRMIREANALGLTIRFDPA

SEQ ID NO: 111493 - protein, 399 aa, unidentified
MQYCLAIDVAESKSMFCVLSQMGELVMPPTEYGHSISGFQAVLEVLLALDETDIHIIMESTSIYHLPVERFFREHTGYEIIILNPIISKENKRNLRKTKTDREDCLNLANIFFRNDYNQQSSHEQLYYELQAISRHLNHVQEGQNRTKNRFKQLLSLTCPEYIRIFKDNSIYSPTALHFIGCYPHCDMVKQKRVDALASCLGSVYKRHPNYYRRKAEMIKAALQDSFPAVTEDSETVRCLTDITKQLAEQEAYIDQLKARLIDLAQATEAFTIYISVPGIGPLTAALLIAEMKDIRRFSNVKKLTAACGLDPTIIQSGKSINYHGPISKRGNRLSRKILFNAIMSILMVTKRAYPDNPIRLYYEKKRGEGKHHHACVAACSTKLLRILFAMCNQNSLYQ

SEQ ID NO: 111494 - protein, 344 aa, unidentified
MTNIQHKETAHETKPDLFAGIDVGAEELILVIRKNGKLFDPQKFANTPADRDRLVKKLVKLPGIMVCLEATGIYHFDLSLALHDAGVLLMVVNPKASHNFAKVLMKNSKTDAVDANTLAEYAARMDFVAWTRPSDETIALRSFARRINALTGQKAAAKNHLHALNATSETPKAVLKDAKLAITQLEKRIDRLTAEALVLIGKHPELKRILALLIGIKGVGETSAIALMGELLLLPPDLSHREWVKFAGLDPRAFDSGKSVHKQTRISKAGSRHIRAALYFPALSAKQHDKHVKAYFQHLMDNGKTPLQGVCAVMRKLLHAIHGMLKNNEPFDNTRFYAIPESNG

SEQ ID NO: 111495 - protein, 300 aa, unidentified
MSKHNILFIGLDTHKVSTEVAHIEDQRGAKTVHQGKIKTTKAAITKLARQYQSKYPCATLHFVYEAGPCGYWIYRLLTSLGHCCYVVAPSLIPKKPGDKVKTDKRDAMKLAKLLKDEELTPIYVPEPEDEAIRDLSRARETAMKDLKDAKYQLKGLFLRNNITCKVNDNWSNQHLRWLTELVLPHPSQQIVLQEMIQTITERIKRVERLVNELAHQAKLWRYYGVVQALQAMRGIRFLVAVGTIAELGDLRRFDHPRKLMAYLGLVPKENSSGDNRKQGGITQCGNGRARRLLIEGGSNL

SEQ ID NO: 111496 - protein, 402 aa, unidentified
MNAVGIDVSKGKSMVTIMRPFGEIVSSPFEIKHTSSDINSLIELINSVEGESRIVMEHTGRYYEVLAHQLSEANLFVSTINPKLIKDFDNDSLRKVKSDKADAVKIARYALDKWQNLKQYSVMDELRNQLKTMNRQFGFYMKHKTAMKNNLIGILDQTYPGVNTYFDSPARSDGSQKWVDFASTYWHVDCVRKMPLNAFIDHYQNWCKRKKYNFSQSKAEEIYGKAKELVPVLPKDDITKLIIKQAIDQLNSASTTVESLRTLMNETAFKLPEYPIVMAMKGVGPSLGPQLMAEIGDVSRFTHKGAITAFAGVDPGVNESGSYEQKSVPTSKRGSSDLRKTLFQVMDALIKTKPQDDPVYQFLDKKRAQGKPYYVYMTAGSNKFLRIYYGRVKEYLAALPES

SEQ ID NO: 111497 - protein, 466 aa, unidentified
MKNKDKKATKRMQRPRRRLVRVNPDAAGIDCGSTEHYVAVPPNRDSEPVRCFKTFTEDLRRLADWLVACGVKSVAMEATGVYWIPIYEILEARGLEVLLVNARHVKNVPGRKSDVSDCEWLRDLHSVGLLRGSFRPKAEIVALRSYLRHRETLVQGAATMINRMQKALVQMNLQLHVVISDISGTTGLRILRDIVQGQTDPRHLATHRDGRCQASEAEIAAALTGNYRPEHLFVLRQNLEIYDSFQRQIESCDTQIEMHLKALAANTTPREGAALPAARSRRRTRSNQPRFDVRTPLHLLSGVDLSQMDGIGPYNALRLISEIGTDMSRWPSERHFTSWLTLAPDNKISGGRLLSSRTKPSANRAAAVLRLAAMSLGRTPTALGAFYRRLAYRIGKAKAITATARKLAILVYRALKGQIVYKDPGAAVYDARHQKALVKRLRQRAQTLGFSLVSNQTGEILQGGVS

SEQ ID NO: 111498 - protein, 402 aa, unidentified
MNAVGIDVSKSKSVVAIMRPFGEIVSTPFEIKHTASDIHSLIELINSVEGESRIVMEHTGRYYEVLAHQLLEANLFVSAINPKLIKDFDNDSLRKVKSDKADAVKIARYALDKWQNLKQYNVMDELRNQLKTMNRQFGFYMKHKTAMKNNLIGILDQTYPGVNTYFDSPARSDGSQKWVDFASTYWHVDCVRKMSLNAFIDHYQNWCKRKKYNFSQSKAEEIYGKAKELVPVLPKDAITKLIIKQAVDQLNSASTTVESLRTLMNETASKLPEYPVVMAMKGVGTSLGPQLMAEIGNVSRFTHKSAITAFAGVDPGVNESGTYEQISVPTSKRGSADLRKTLFQVMDVLIKTHPQDDPVYQFLDKKRAQGKPYYVYMTAGANKFLRIYYGRVKEYLASLPES

SEQ ID NO: 111499 - protein, 320 aa, unidentified
MKAQQVKFPQIVNVGCGLDVHQAVIVATVRKSDAEFETRSFEAYTSSLKELREWCQKHDVTHIAMESTGIYWKPVYNILEDYFEVILVNARHVKNIPGHKTDKKDSAWLSKLLLGGLLKGSFIPPKEIRDLRDIVRYKKKQVQQVSSENNRIYKILEDANIKLSTVMKADSVSGQKVIDALINGETKSENLLRFIHGKTKASRQEILKALEGNLTDHHRFMLKIIRQSIGDKELLIADLDKQIDQMADKYSVEIELLSTIDGVGRDSAIAIISETGTDMSRFPDEHHLSSLGGMSPGNNESAGKKKVQKPSKGTNISGQR

SEQ ID NO: 111500 - protein, 328 aa, unidentified
MDHFAGLDVSVKETSICIVDETGKIVREVKVASTPEALLAVLKNPAYHFKRIGLEAGPLSQWLFSALAEADLPAVCVETRHMQAVLKAQINKTDRNDARGIAQMMRVGLYRPVHVKTLRSQKLRMLLTHRKLLQSKAIAIENDLRGTLRNFGLKVGMVGKVKFEARIKELVENLPDLAVLVEPLLIVRRVLREQIIILHHRLLAIVRDDEVCQRLMTIPGVGPVVALTYRATVDVPARFRKSKAVGAVFGLTFQVSIRRDRSKRQNIPLRRRDDAGHALRSRSGHAAAFKEMVLAQGLGDADRQAPRDEKGNRSFGTPVGRDHAPHMG

SEQ ID NO: 111501 - protein, 384 aa, unidentified
MRSEYLITLDTHCRTSDACVKTGRGKLVARQCLPTSIPTLLEFIRQVPRPRRLCFEEGPLAGWLCRNLAQEVDELVVSDPRRNAYVGKDGDKDDPIDAEKLNDLYRANLIRPVHQSPSAERAGFKQLVGAYHTAVRARVSRANCLLALGKRWGLMWKSSTLLSGEAAEALTASLRQAGASPDVELIASLLSQGLKQAAEAEETLARRLRELARGSELMRRLMEVPGYGPVRVATLVAYLDTPWRFHSREALWKYCGIGLRRQHSGGGPEYVCVEQACNRTLRGVVLGAAQRAIRVAPAAARTLQGSPREMEEPDSCQRSDHENVNVFAERYARWLSAGLSPHNARRNVARLMIQCVWSMWKSGESFNPARLSPEPPEDRAKGRR

SEQ ID NO: 111502 - protein, 302 aa, unidentified
MSQPNLQCMGIDVAKLSLDIATTDTIEPFTVGNDEDGFAVITDKLKHTKINLILMEATGGLEAAIACKLQSEGYDVVVINPRQARDFARSMGYLAKTDKLDAAMLAQLALVIDRHPDRSRYIRHLPDEARAVLAAMVVRRRQLNHMLVAERNRLYPSHPQSRKSIDNIIDALQNELDRINEQMKQHMTAFFQEQARLIGSVKGVGDITVASLIAELPEQGKLNRREISALTGVAPLNRDSGKMRGKRTTFGGRAGVRATLNMAALVATQFNPAIKLFYSVCLPPENPKNLLWSPACANSSPF

SEQ ID NO: 111503 - protein, 464 aa, unidentified
MARTRKEARRNQGKRKDVTEGLPPLNLNAAGIDVGNAEHYVAVPPGRAAQAVQKFGSFTADLHRMGQWLKACKVDRVVMQATGVYWMGLYQVLEEYGLDVRVVNATYTKTLPGRKSDVQECQWLQKLHTFGLLNPSFLPGPEIRRLRTYLRQRENLVAAAGTCIQHLQKTLTEMNVQLANVLSDLSGWTGMAILRAIVGGERDAQRLAELKDERVKASREEIACSLEGNWREELLFVLKQTLELYDLYLGKIADCDQEVEAHLRTMTAKVDVEAQPIPKPRRVKRPRRQKHQPCYDLRGELYRVTGVDLTQIDGIDVQTAQTVISEVGVDMSPWKTEKHLASWLGLSPDHRISGGKMLKRGTRKVVNRASTALRLSASNLLRSDSALGANFRRLRARLGAPKAITALAHKLACLIYRMLKFGKEYLDRGAAYYEGQYQQRRLKWLEKQAAALNLQLVPRAAVTR

SEQ ID NO: 111504 - protein, 329 aa, unidentified
MTTPNATDCTFAGIDVSKHKLDLAQSGIQQVVSFTNDPAGITQLVELLLKTPPKLIVVEATGGLERPLLDALLEASLQVHLANPKQVRYFALSLGILAKTDPIDAQVIERYAAQLSPRLLQKRSQNQSELEALVTRRRQLLHLRTQQGNQLEATRSKLARKSIQAVLKLLEKQIDSMDRQIRQLIESDDDFNDIDKLLRSVPGIGNVASSTLICEMSELGSMDRQQAAALVGVAPFNRDSGRYQGKRAIRGGRTSVRSVLYMSAVCAIRFNPILSDFAQRLQKAGKLPKVIIVAAMRKLVCFINAMLRDGLRWDQLDIVKKFAAEKKPA

SEQ ID NO: 111505 - protein, 359 aa, unidentified
MEAQRKALSFKGQNIYIGIDVHLKSWSVTLMSEATQLKRFSQSPDPDALYAHLVRNYPEAEYHSVYEAGFCGFWIHYRLVGPGIHNIVVNPADVPTTTSEKLRKTDAVDSAKLARSLRAGELKGIYVPGSESLETRSLIRLRDSITKDQTRLKNRIKSHLRYLGIEIPEEFSGPGRCWNRRFVVWLKGSETGTAYGRQTLDFLVRQYEALRGQRLEMLRAVMALSRTERFEKPLENLMTVPGIGQLTGMSLLSEIDDIRRFKSADQLAAFIGMIPMCHSSGEREGVGDITVRRSARLRSVLVEASWVAVRQDPALSMAYGNYCKRMAPGKAIIKIARKLVNRIYFVMKRNQPYVKCVVA

SEQ ID NO: 111506 - protein, 412 aa, unidentified
MIYVGIDWSDEDHKVYLTDDSEKRLDAFVILHTPEGVSELFARVEKFAKSVDDVLFAVEKPSGLLVSAILDRGFTLYPINPKAVDRYRDRFKVSGKKDDFFDARVLANILRTDRHIHKPLIPDSPVCRNLKILTRQYESLSRLKRRVMNQIISTLKDYYPVALELFGKIDQPITIDFLKRFPTAEKFSKLTISQIKNFLKKHHYPGVEKKADELFQLAKTPHFQVEEFVVESRSLYLSTLLTQLKNLMNALTTFEHEIEKILSQHPDKDIFLSLPGSGNLTSAKLIAEFGDDRDRYKKVGAVQAVAGSCPVTRQSGKYRNVYFRKACIKPFRNATNQFAFNSIKNSQWAKDRYKKYVDSGKKKTHALRCLSNAWLEVIFAMWKNRSTYDEQKHLKIVKEQFQGEISPSFLTC

SEQ ID NO: 111507 - protein, 355 aa, unidentified
MSTMPCIDGEVILGVDTHADTHTAALVDPLGRTLATTTIRAGRRGHRALLRWASLRGQVKVAGVEGTGSYGAGLARFLALEGVEVIEVTRPARKGRRHLGKSDARDAEAAARAVLSGEATAIPKPRNGIVESIRVLRHTRASAVKSRTQAALQLRNLIVTAPDELREPLADLTTKQAVTRCARFRRSDRLDPVAATRKALRTLARRWQALDAEVRELDRDLKRLTAQAAPRLLAQPGIGPENAAKLLIVAGDHPDRLRSDAAFAALCGASPVEASSGKTRRHRHNRGGDRQGNCALWTIANNRMLHHPETRAYVERRTAQGLSTREIRRCLMRHLTRRLYPLLRADLTDAATAST

SEQ ID NO: 111508 - protein, 316 aa, unidentified
MFIGIDVGSKHLDLAASAPTPSLPRRVPNTPAGIASLVTVLTPAAPTLIVLEATGAYHQPLLAALLIATLPVSVVNPAQVAAFRTTGLGRHKTDRADAQLLARFAALHHAELRRATPEEPDLAQLRALVSYRDDLVGQQTAWRNRQHAVRWTGREAVLAWLEADLAQIATRLREVEREIAALLATRPETAVLTAQAGVGLLTAAAVLASLPAGVLGNPKAAAAYAGIHPRQEQSGQRNRSRVSKQGCPAVRRALYLAAMCAIRFDPELGAWYRSLCARGTAPKSATCAVAHKLLRRMMGKIRDLRADPPAILPLAA

SEQ ID NO: 111509 - protein, 386 aa, unidentified
MKTKKLYSAIDLHSNNLFIAIVNAEGKRIKHGRLFCELHEIEKFLRPYRSRIVSIAVESTFNWYWLVDGLQDMGYQVLLAKPAELTQYNGLKHADDQSDAFFLAELLRLGILPTGYVCERKVRAVRDLLRRRAALVAKRTALILSLRNLQFRTKGYGLDSSLLKSGSAHDLISQFEDPAEKLTVDVQKTHIDAFTHSILRIENHVLKVADKRPHYRQLLSVPGIGKILAMTIVLEAVDISRFPSAEDFASYCRTVAAIKTSNGRKKADNNRKCGNRYLGWAFIEAANLIRRYDERAKRWHSRKLAKTNNVIATKALACKLAKLVWHILSEGSLYDGDRLFLTAKPAAAAVVQAKPFGRASLSQEKGLNPEITRTDWSGMFSHNIFS

SEQ ID NO: 111510 - protein, 337 aa, unidentified
MMYSGIDLHSNNSVIAIIDEADRVVAQKRLPNEIEKIVGFLARWQDELTGVVVESTYNWYWLVDGLQDAGFHMHLANTAAIKQYEGLKHSGDETDAQHLAHLLRLGILPTGTILPREHRAVRDLARKRMQLVQSSTAHVLAVENIMARQLGGRVTSNQVKRLTNDAIDSMPVAADVGLAMKANVAVIATLQSQIEVLERRLQERVKPRPQYGLLTSVPGIGQTLATVIFLETGPIDRFADVGNFASYARCVDSVHTSNRKKKGEGNVKNGNKYLAWAFVEAANFARRFCPEAKRFHERKKAKTNNIVATKALAHKLARACYHILKEGKPFDVTRCFA

SEQ ID NO: 111511 - protein, 410 aa, unidentified
MEENGKRYIGLDVHKHYLIALGVDTDLNVVLPARRVELSRLESWMKKTLTKQDEVVLEMTTNTWQLYDELMQYAGKVTVVHPPHVALITRSQVMNDKIAASILARLLAKGLLVGIWVPPQEIREARGLVAQRQKMVRLATQAKNRLHAVIQRHHLVPPAGNPFGASNQAWWQMLSLGKLEKLNLQSDLETLQFAGKQERRLSEIMEGMAAEQEEIGRLLHLAGFGVVTAFTVWAAIGDIRRFAEPRYLVGYAGLGTRVHDSGMTSRSGKITKAGRRDLRTVLIEAANVAANHHPHWKAELARLEPRLGRNKAIVAIARKLLIVVWYVLQGKTDKYAEPEAVVQKMLKFAYAVGKANRPKGQSAAQFARIRMDALGLGKELTSISWGSKKPIPLPPSMLPEKGVSDVPNTE

SEQ ID NO: 111512 - protein, 409 aa, unidentified
MQYFIRKEGMPMLSIGIDVSKGKSTVCGMKPGGEIVYTPFEVQHTREGMSELVSLLRGSGEEVRVVLESTGSYHCPVVAALLENGIFVSVVNSLRMKRFCSQSIRKVKTDRIDAMQIALYGLAYWQELQPTKLPEDTYRELQLLARQYYQMTSMLIKAKVDFNALCDQVLPGMQELMNDHAGRHKLSDFVLRYHHTTHILEMGETRFRKDYCKWAEKKGYRNCERMAVLIFATAQNGIPVLPNAPSTQIVITEAIRVLHTVEASRDAILTQMQALAKTLPEYSLVREMPCIGDTLAPRLIAEIGDVRRFHSKRALIAYAGIDAPPYQSGKFCANNRHISKRGNRYLRKTGYEVMQSYVMHKPANDPIFTFIEKKRGEGKSGKLAMVAGLNKFLRVYYGKVTELYRSLPQ

SEQ ID NO: 111513 - protein, 320 aa, unidentified
MQKATLGIDIAKATFHAALLHNHKLHQRQFANTDSGFAQLQAWLGKHRAKRLHACMEATASYGDELALLLYHAGHTVSVVNPARIHGFAQSQLQRNKTDQLDAALIARFCQQQQPEAWTPPPLEIQQLRALVRRLEAVQEMRQQEANRLEQAAQQLLIRESLLKIIATLDAEIARLRQLLNDHIDQHPHLRRDRELLLSIPGIGETTAAWLLSEVQVAAYGSARQVAAHAGLTPRHRQSGTSVHGPTPLSKTGNRRLRRALYLPAVVAKRYNPIIRAFCQRLQERGKRPMEIIGAAMRKLLHIVYGVLKSGKAFDPSLAA

SEQ ID NO: 111514 - protein, 404 aa, unidentified
MFYFGIDWSEDHHNLCIMNEAGARISQIKLEHSLAGFGRIELERRKLGVPTRECLLAIETSHNLLVDFLLGKGYVVYIIPPQATKSYRNRHRSSGAHTDDSDAALLASILRTDRDSHRIWRPNSPLTQQILAQLRLIESLRRSIQRQSNQLRAVLWRIYPQALGLFGDLTSQISLQFLIAYPTAQEAQALSLEEFTAFCREHHYTRSDLILRRYAHLTEPNPTANPAVVQAYRSHVHILAELLLPQVRCRNEAITQLKKLFERHPDHFIFASLPGAGEILAPALLAKFGDHRDRFPQAADVQALAGTCPVTERSGKKKIVKFRKGCDKEFRRIAQQFAQASVQQSGWAAAYWAEVRPHCDSNSHAYRCLANRWLAIIWKLWQTRQPYDEAYHLRQRALRRRPRS

SEQ ID NO: 111515 - protein, 354 aa, unidentified
MIIIGVDFHPEFQQIASVDSETGEFQEKRLGHREEAEKFYRGLAAASQTVRVGMEASGHGRWFERLVAELQFELWIGDAAEIRTRRVRKQKTDRQDAQLILKLMLKDDFPKIWVPSWENRDLRQLLWHRHRMVQARTRIMNQLQAVALNEGLRCKKRLWREAGREQLEAIPLAPWASRRRRDLLELLDRLNPTIAELTQTIEQEVDKCPEAQRLRTHPGVGALTALAFVLIIGQAKRFHCGKQVASYLGLVPLEDSSGNRRRLGHLTKQGSSILRFLLVEAAQVTVRSLPEWRSKYVHLMMRRGRKIAKVAMARKLAVRLYWMMRQGWDYEQVKKFGSHAGQPGNRHGVQSNTE

SEQ ID NO: 111516 - protein, 340 aa, unidentified
MKKQVRFYLGMDVSKLWVDMTLMCVVDHQKQPIVSERFENNEAGMKALGKWLKKYKVSFDENSLLVIENTGIYHRLVWEYCSKPGLPIHIGNATHIKYSFGIARGKNDKIDSERLCSYAFKNADEIKATPALNPIFIRLKDLMTSRSRLLAQQNSIKVYLGELKLSNSKEAQQIIEDAHKAALEGIKQSFKAVEQQIKQIVKEDKAIEKNYKLLISVPGIGHLTAVYIICCTNNFICKITGKQLASYAGVAPFGNTSGTSIKGKDKVHKMANKDLKKLLHMGAVAAITHYPEFKDYYERKVKEGKHELSAINAVRSKIALRAVAVVNNQEKYVKKYKKVA

SEQ ID NO: 111517 - protein, 315 aa, unidentified
MEAMIERCAGLDVHQETVVACVLFGPLDKKPKTSIETFSTTTTGLLALSDWLATLQVSDIVMESTGVYWKPIWNILEGSFHLVLANARHVKNVPGRKTDVKDAEWLAKLLRCGLIESNFVPPEDIRDLRDLTRYRKKLIHHRTSEQNRIHKILQDANIKLTSVLSDIFGVSGRRILEAILNGEKIETDGLRKMVDWRTKASITDIASAINGRIRRHHRDMLRYHWEHMSYLEKAIEELEKQIDQLLSPYRKEVELLDGIPGVNKAAAATFIAEMGVDMSVFKSAKHLASWAGVSPGNYESAGKKKRVKPHKVTKL

SEQ ID NO: 111518 - protein, 390 aa, unidentified
MFYLGIDIAKNTHVASLLDDNGNTIFKAHSFSNSIKGTDSLIEKLEKYSINDILVGMEATGHYWLSVYSYLIEKGFNIIVINPIQTDGWRRATEIRKRKTDIIDSIMIADFIRYGNFETTSLADEKYLNLRNMTRFRHYLIEQTSDLKRKIIANLDQVFPEYSSHFSDIFGQTSKEILLNFNTAEDFKKLKANDFKKVLKNVTLKNSAKVKLNNLKKAAKTSFGINFALDSYSIQIKCLIEQIKVIEEQIDLLESEIESIVKDLNTPILTIPGIGPVTGATILAELGDINKFSSDKKIVAYAGLDSTVTQSGESNGTNGHLSKRGSTHLRKALFQAAFIACTNDTVFKEFYDKKRSEGKHHLVAVNAVARKMCHIIYAVLKKNEPYVELK

SEQ ID NO: 111519 - protein, 465 aa, unidentified
MRTDKKLWRNRKAKKELARRLQSENPGLEVVHAHAAGIDVGNSAHYVAVRPDCDPQPVRRFECFTADLYRLADWLHSCAVKTVALQSTGVYWIPLYDILEERGFEVYLVNARHTKNLPGRKSDVQESQWLLKLHTYGLLNNSFQPPSQIRVLRTYWRQRLQHVTGAATCVQRMQKALRQMNIQLANVISDLSGVTGQLIVRAIIGGERDPHKLAELSHPRIQASRGEIAKSLEGNWRQELIFVLHQELEMYDTYQRRVAECDQQLQKHLRAFADTVPPPVEEVLPPKKKKKQNKNNPHFHLADELQRITGVDLTRIDGVDVIVAQTLVSEVGLDMSRWKTEAHFASWLGLCPDNRISGDKVLARGTRRVLNRAANALRLGASTLLKSQTYLGAQYRRLRSRLGAPKAITAMAHRLARLVYRMLKYGQHYVDKGAEYYEQRNRQQQIEFLRKKAAKLGLQVTPAHA

SEQ ID NO: 111520 - protein, 358 aa, unidentified
MKDHILKVALGVDVSKDNLAVCLCRLTVNLAKEFEDSFEVSNDISGFKKLIRWLDTQVAEREDLWVVMESTGVYHEGFVYYLYEAGFNVSVMQSGRVKRYAQSLDQRSKTDALDSRMLAMLGCERALPLWTPPDPTLRELKGLSRERSFLLKEKQIERNRLHANQHSAYSNKGELRRFKQRLKLIAKQLEEVEKEMKVLINDTPDLKCRIKHLESIPGISFVSAATVVGETLGFTGFTNAKQLTSYAGFDVVLKESGAYKGKTRISKKGNKNIRRALYMPAMTAVRCNPTLKKFYERVKPTKAKPMIALVAVERKLLVLMYSLWKNEIDYDSEYEQKKTARTEVLAAQDRSNLALTSS

SEQ ID NO: 111521 - protein, 337 aa, unidentified
MKKNYQVFIGIDVSKCKLDYCVINDPSSTKHHYGIVANNEKGIKQLISSLKKKFISEQMIICLENTGVYSMPICYWEQLYEIDYWVVPALEIRRAKGISRGKNDKADSKDIASYCITHLHLVKLTTLPQNDFIELRLLLAEREKLVKAIGMFKMTKESQGFLPKEVLKVTFAHNKKTTEVLQKQLNKIEKILQALIDNNPTFKEQQKLLKTIPGVGHQTSVNLIAITYAFTAFKNWRKFACYCGVAPFEYKSGSSIKGRTRVSHLANKKIKALLNMAALTAKKNDLEMKAYYDKKVKEGKNKMLVLNSIRCKIISRAFAVVQRNTPFVNVNKFKTAA

SEQ ID NO: 111522 - protein, 412 aa, unidentified
MEVVYPCCCGLDVHKKSITACVLWAEAKGKSRKEKKRFGTFTHDLLQLADWLAERGVTHLAMESTGVYWKPVWNILAEQFEVLLVNAQHIKAVPGRKTDQKDSEWIADLLQHGLLRGSFVPPQPTRELRDLTRYRVSLVQEINRIANRIQKVLEDANIKLASVATDALGASGRAILEAMLAGEEDAARLAEMSKGLLRNKIPELKLALEGRMTEHHRFLLRQLFDHLRFTESKRSEIEQEIDKRMRPFQDEVIRLCTIPGVDRVTAWGLLAEIGLDMNQFPSSGHLASWACLCPGSFESAGKRLSGKMRKGNVSLRRCLSQAAWAISMMKNNYLSALYRRIAARRGAKRAIMAVAHALLEIAYHMLKHKEDYRELGADHFDRIDVKRIRRSLVRRLERLGHKVTLEPLAQTA

SEQ ID NO: 111523 - protein, 465 aa, unidentified
MSMIERTTETQDVRQQTVRSMKGLDVIHPGAAGLDLHKEVIVACAPMTAGETQHPVRKFGAYTSALLELAAWLKQHGVTTVAMEATGVFWLPVIGILRAKGLEVLLVNAREVRSVKGRPKTDKLDCEWIRRLHACGLLRGSFIPDAETEMLKSLWRHRLNMEEEAARAIQRMQKAFQIMNIRLDIAVTDIVGETGIRIIEAILAGERDPRKLAKLRDPRVAKSEREIADALTGNFKDEQLFIIRENLAHHRFLLERIRETDARMGAQMDTMKKKSDAAELPAATKPDRSRHGETLSRERLYELLGVDLTQIDGVGVLTVSSFLVNAGRDMSPWMTENHFASWLGLSPNVKQSAGKTRAGATRKTASALAHSFRMAVMTIGRLDSWLGAYYRRLKGRIGAPKAITATARKLAIIFYRAVKAGGTVKRLTAEAYEQANRNRILKALRQRAAHFGFDLTMKSHVPVEA

SEQ ID NO: 111524 - protein, 386 aa, unidentified
MQASNRSTPIANDLSTIFVAIELSRKSWLVTMHSPDKDRMSRHKVESGDHAGLLALIERIRERAAQALGAAPAVVSCYEAGYDGFWLHRLLLAAGITNHVFDPASIMVDQRARRAKTDRIDGEQMLRTLMAYCRGEPRVVRVVRVPSPEQEDARRASRERDRLVKEQTAHTTRIKALLRLLGMAVGNPHRRDWLSWLSAQRDWQGQAVPPRIKAELEREHARLMLVRQQLDALAQAAAEAELTPAAAEMAQRSDLLLRLKSLGPVFATTLTNEAFYKDFRNRREVASYFGLTPSPWQSGATDREQGISKAGNRRAREKTIELAWLWLRHQPDSALTQWFRQRTLNASKRIKRIAIVALARKLIVALWRFLTTGLVPAGAVLKAAKA

SEQ ID NO: 111525 - protein, 431 aa, unidentified
MEQSTRFIGMDVHKDTIVVAVTATGDIGKATAYGIFPNTVAALEKLVRRLRQAGDGPLKFCYEAGPCGYGVHRTLTTLGEDCVVVAPSMIPRNSGDRQKNDRRDAASLAVLHRGGLLTAIWVPDTAHEAMRDLIRARLAAVRAVRAARQQLSAFLLRHERLYPGNRKPWTKAHRGWLADQSFAQPAQQIVLEESIDAVRLGEQRRDRVDDYLRAQIPNWSLFPLVRNLCALRGLDTIASAGLAAAIGDPSRFASASNFMAYTGLTPSEHSSGTQRHLGAITKTGDVHARTLLIEAAHSYRFPARIARHKLAAVDAVPDAVRVIAWKAQTRLCQRYRRMMAKGKPRQLVVTAIARELAGFVWAIACITSDAPAKTPASEDVGPTSRRTIIVSSRNGSERRSEVARPAMRNGDARHRQLAEPEEMIAQHRSTC

SEQ ID NO: 111526 - protein, 268 aa, unidentified
MKKSNYYVGIEISKLTFNVAISSSEDNYKYFKFVNNHEGFAMFFEYLSASDSICVMEANGPYYLKLATFLSEQAIDVCVINPLVIRRFSQMRMSRAKTDKKDAMLIAEYGKTEKPDLWRPEAAYALELKQMQAYLEQLNKNRTVFTVQKEAFNQNPIKSETLYKSINSVIETIDQEMFDQLRSITEMGSKTSLFLIVISGGFSKFNNHKQLASYIGISPRIFESGTSVKGKSKICKMGMSKIRVLLYMCAWSAKRCNETCKALYDRLL

SEQ ID NO: 111527 - protein, 343 aa, unidentified
MTVIIGVDPHKASHTAVAISDAEEELDRKNVRSGGAQLAQLVSWAAPFERRTWAIESASGLGYLLAQQLVAAGETVVDVPATLASRARLLATGRSNKNDPNDALSVAVAALRSPDLRRVAAVGHSEVLRLLAKRNIDIGNQRSRVVSRMHSLLAELAGGGIAKEINASDVDRFLEAATPSSPVAQVRYDLVVELLDDIRRLDSQLKVSHKRIRDAVRASGTSLTDLFGVGPILAAIVIGNTGDATRFRNRDHYAAYNGTAPVEFSSAGRVVHRLSRRGNRRLNHAIHMVAICQLRQPHSQGRAYFDRRVAEGKTKKEALRALKRHVSNAVYRQLIADARHTRS

SEQ ID NO: 111528 - protein, 338 aa, unidentified
MSVYCGIDLHSNNQVVVILDEKDRVLVERRLPNELEIVLGVLEPHRQELAGVAVESTFNWYWLVDGLMEADHRVSLVNTSAVQQYEGLKFTDDRHDARWLAHLMRLGILPTGYIYPKEERPIRDLLRQRGRLVQQRTSNLLSIQNLLARDTGKMIKGNELKRITAEQVAELLETPERVLAVESRLQVIAVLDEQIGRIEAAARAHGELRSEYRVLRSVKGIGQALGLTIMYETGDIRRFPAVGNYASYCRCVKSARLSNKRKKGEGNRKNGNPHLSWAFSEAAHFARRFQAKARKFYERKLAQRGRIVAERALAHKLCRAVYFMLRDQVPYDESLLFR

SEQ ID NO: 111529 - protein, 355 aa, unidentified
MNDAKYIGMDVHQATISVAVRDSRGNLVMEAIVETKAETILQFIRGLRGSLYVTFEEGTWAAWLHDLLQPHVTRVLVCDPRKNALLKVGNKNDRIDARKLSELLYLNKLSSVYHGEPGIRTLKELARSYLAMTRDLTRVMSRLKAIYRSWAIPCAGKQVYAARNRAEWLAKISEAGVRRRAELYYQQFDALAALRQQARRELLAEARKHPAMKLLRQIPTIGLIRAALLIALMQTPNRFRTKRQLWAYCGLALRTYTSGEYRFVGGQLKRSKKVLAVRGLNINHNHDLKNIFKGAATRAASTVGPFQDFYQACVARGVKPHLARLTLARKIAATTLLVWKKGVRFDAEHLKQQAA

SEQ ID NO: 111530 - protein, 343 aa, unidentified
MDYFAGLDVSVKETSVCIVDDAGKIVREARVASEPEALLQVLTNTIYRFKRVGLEAGPLSQWLYSVLAEAGLPVICVETRHMRAMLKVQINKTDRNDARGVAQMMRVGLYRLVHVKTLRSQKLRMLLTHRKLLQSKAIAIENDLRATLRNFGLKVGMVGTVKFEARIKELVENLPDLAVLVEPLLIVRRVVREQIGILHRRLLAIVRDDDVCRRLMTIPGVGPVVALTYRVTVDVPARFRNSKAVGAVFGLTPSKYQSGQNERTGGISRCGDEMMRMMRYEAAQSMLVRSAKWSWLKAWAMKIARHRGIKKAILALARRLAVIMHRILVDGTAFRWTREVAAV

SEQ ID NO: 111531 - protein, 423 aa, unidentified
MNQTVPVAGVDVSKRFSDLCVLAPNNDVLTRMKIYHDLPSMERALTELRRIEGEYGASPVVVMESTSHYHLILFQFFQEAGFEVIVVNPIQSGALKNINVRKVKNDKVDAYKIAILYRLKVLRASQVPTNSLRGLRLLCRQRSELMGDVTRYKNRLTAYLDQVFPGYDKVFSDVGGVSSRAVLKECATPQVLLSKSEDELADLIHTASRCGMAFSRKKSVKLRTVAEEAAKLGIIAPGTTAVIATVLNVLEILLQNIRQIEQDIKALVKQETYIQKNLILLQTIPGIGFNSALTILAEIGDFSLFRKPKQLAAYFGLDPGERQSGKFRGSKNKMSKRGSPQVRAALHMAAVNSVAIQKKRPACNPVLAAYYEEKIKSKPGKVAMCAVMRKISNIIFAVLRNQKSFELRQPQEHAQRLGLSFAV

SEQ ID NO: 111532 - protein, 343 aa, unidentified
MKLSRVGIDLAKNVYQLHGVDRFGKTILKRRLKRHQWLKVLLDKTEPGCVIGMEACSSAHHWGRELQSRGYTVKLIPPQFVKPYVKSNKNDARDAEAICEAMSRPNMRFVTVKTVAQQDIQATHRVREELKVRRTAKGNQIRGLVAEYGLVAPKGLSSLRAAIPCWLEDAENGLTHYFRSLLHGLWDDLLMLDDRMCEMDKTIKRLAKDNEDCVRLQKLRGVGPMTSTAMVATVGDARQYRKSRQMAAGIGLTPRQNSSGDKHRLLGISKRGDVYLRTLMIHGARSVVTGAKHKDDSLSRWVTEIAQRRHPNVAAVALANKNARMAWAILRHKTDYDPDFAMS

SEQ ID NO: 111533 - protein, 422 aa, unidentified
MLEQAQDKHEIIERVAALDIGKAMLVCCTRIPGQGGRGRAQEVTEHSTMTRSLQLMADRLLELGVTRVVMEATSDYWKPPFYLLEAHGFEVWLVNAKDVKHLPGRPKTDRLDAVWLCKVAERQMIRPSFVPPAPIRRLRDLTRYRVALIADRTREKNRVEKLLEDAQIKLSVVASDIFGVSGRAMMDQLIAGERDPRVLAQSARGSMRGKIASLEQAFVGSFGDHHAFLLRQMLGRIDALSTDIATLEGRIEEQIAPFAHAVSQLDEIPGVGVTAAQAIIAEIGLDMSRFPTPAHLASWAKFAPGVKASAGRNKGNGSTGHGDPYLARVLGEAAVGASRTDTFLGERYRRIARRRGKKKAIVAVGRSILVIVWHLLSDPDAHFHDLGSDFYDKRRGPERIKQTHIRQLEALGYKVTLEPTAA

SEQ ID NO: 111534 - protein, 320 aa, unidentified
MRNAVGLDISKLTFDATAMVGNAEYSAKFDNDSKGLDQFSDRLKSLGCQNLHICMEATGSYYEEVADYFAQYYSVYVVNPLKISKYAESRFKRTKTDKQDAKLIAQYCRSAKESELVKRQKPTDEQYRLSRMIAAYAQIKSECAAMKNRHHAAKDEEAAKAYAQIIKAMNEQLEVLKEKIKEQTEKPNCKEGVKRLETIPAIGRMTAAVLFHHLTSSKFETSNKFAAFAGLSPQQKESGTSVRGKGKLTKFGNRKLRAVLFMPAMVAYRIRAFPGFIARLEEKKKPKKVIIAALMRKLAVIAYHVHKKGGDYDPSRYKSA

SEQ ID NO: 111535 - protein, 401 aa, unidentified
MISVGIDVAKGKSTVCILKPCGEIVSRPFDISHVEKDLGELAAMLLRFDDEVKVVMEATGIYHLPVLTYLQEKGLFVAVINPYLMKVYRSGDLRKAKTDKIDSRIIANYGIEHWFTMAEFKASGDVYGELKMLGQQYRHYMKLHIMSLHELTHLLDYTMPGIKGMLASWNEGNRKDKLSDFVERFWHYDTITCLSETEFIKQYTFWAKEKKYHQSQDKAKAIYALAREGIPTLSSETPSVKMLVTEAVRVLKEVDATLSIILSRMQELAKSLPEYSVVRGMGGVGEVLAPKLIAEIGDVRRFHSGKALIAYAGIDTPPYESGQFVGSNRKITKRGSAALRKVGYETMRCIKTHPRPDDPVYQYIVKKESEGKLKKAAKIAGLNKFLRIYYARVKEVYTDIK

SEQ ID NO: 111536 - protein, 347 aa, unidentified
MRFYTKQHQFYCGIDLHARTMYLCVLNQDGEILLHRNMPAGPEPFLKAVAPYRTDLVVCVECIFTWYWLADLCAQEQIPFVLGHALYMKAIHGGKAKNDKIDAQKIAVLLRGGMLPQAYVYPADMRATRDLLRRRMHLMRKRAELLAHIQNTNSQYNLPEIGKKIAYKANRDGVAERFSDPAVQKSIEVDLALIGYYDQLLHDMELSVLKTATQHDANTLYRLRTVPGIGEILSLVLLYEIHDIQRFPRVQDFVSYCRLVKCAKESAGKRYGTSGTKIGNAYLKWAFSEAAVLFLRANPAGQKYLARLEKKHGKGKALTVLAHKLARAVYYMLKREVVFDLATFLQS

SEQ ID NO: 111537 - protein, 413 aa, unidentified
MEKVYDKCCGIDVHKKLIVACFKCGKKQEVREFGATTRELLKLADWLGSGGCEMVAMESTASYWKPLYNILESSGLNAMVVNARHMKAVPGRKTDVKDAEWIADLLQHGLLQASYIPDKDQRELRELVRYRKSLVGERTRELNRLQKMLEGANIKLSGTVSDINGKSARSILEYILTGESFDDAKYDEMYGNKIIAHNLKATKEQIIDDLNGIMSPLQRKMMRTLLKHLDELNSHIHELDDDIDSFMKPEEKQASAAIQDVTGIGNTSAQAVISVIGTDMGRFPDDAHIASWAGLCPGDNESAGKRKSGKTRKGNALLRETLVNCAHAAVKNKKSYFYAQFMRISAHRGKKRAYVAVAHSMLVAIYHILKDGVVFKDLGADYYNQFNKERKIKAYLKKLKALGWEDSAAGQPA

SEQ ID NO: 111538 - protein, 460 aa, unidentified
MTIPRDKKRDVPFPTSLPVVRPMVAGLDVGSTQHWVCGPARADGVPNVQVFGTMTAQLNELADWLTKEGVKSIAMESTYVYWIPIYELLESRGIEVVLVNARQFRNVPGRPKTDFKDCQWIQLLHSCGLLRGSFRPGEAIVRLRTLQRQVTNLVAERTRYVQWMQKALDQMNVQVHRAVTDLTGLTGMAIVRAIVAGERDPVLLAAHRDSRCRKSVDAIAQYLTGNWREEHLFNLASALRLFDALGEEIASYEVRLRKELEALHPLDRQQEPVPPHPNSTKEKAIKARGEQQMRTTLWRFAGVDLIRIDGIASGVAQTILTEVGPDISAFPSEDDFVSWLRLCPRTPISGGKPLRKRRNALGANRVAQALRMAATSVQRSKTALGAAFRRIARHKGAAVAVFAIARKLAQLVYRMLRHGQDYVDIGETAYEQRFQERRLASITEAARGLGYTLVPRVATA

SEQ ID NO: 111539 - protein, 411 aa, unidentified
MEVLYERCCGIDVHKSSVAACILLERGHKPQKHLRRFGCTTRDLRELAEWLRSFDVRHVAMESTGVYWKPVWNVLEEHFHMVLANAQHIKAVPGRKTDMMDCPWIAELLRHGLLRGSYVPSPVIRDLRDLTRTRATLSQEQSGIISRIQKLLESANIKLASTVTHTMGKSGQAMLDAIVSGEDSPERLAGLALGKLRSKIPQLQLALDGRIRDHHRFLLDSLLRQYRFLEAEIQALDARLEQLGEQHQELADAVARWITVPGVERVAAWSLVAEIGSDMTAFPSAAHLASWAGLCSGNHESAGKRLSGKSRKGSPWLRRMACQSAWAAVRTKNCYLSAQFKRLAARRGSKRALIAVAHSLLVIGYHLQSKGCVYQELGGDYFTRLNPQRARNKAVRQLEAMGYHVTLDQAS

SEQ ID NO: 111540 - protein, 412 aa, unidentified
MLEVMFSHCAGVDVHKKSVTVCVLIPGKKGRVRRIVRSFGTTTKALLEMRAWLLSLGVTHVAMESTGVYWKPVYNILSDELEAWVVNAQHIKQVPGRKTDVKDAEWIATLMRLGLLNNSFIPEESQRDLRDLTRYRTQLTNERSATVNRVQKVLEDGNIKLASVVSDIQGVSARRMLEALIGGQEESEALAQLAQGRLRSKIPELVEALTGQVRGHHRFLLAELLEHLDGLNQRLAQLNERIGQQTAPQAELIERLDAIPGVGKHTAEILLAEIGHTVEQFPSEKHLASWACLCPGNNISANKRRSGKTRKGQKWLRTALTEAAWAASRTKDTYLGAQFHRLRVRRGAKRAAIAVAHSILTIVYHLIKDPNATFNELGGDYFIKRNKGDQQRRAIKTLTALGFAVELTPVAA

SEQ ID NO: 111541 - protein, 412 aa, unidentified
MDVVNTRCCGLDVHLKTVVACVLLTQNDGTVVRKTHTFKTMTEELLALRDWLDRWGVTHVAMESTGVYWRPVYNVLEDEGRTLLLVNAQHIKAVPGRKTDVKDAEWLADLLRHGLLAPSFIPPQPIRELRELTRYRATLLRERTAEINRLQKTLEGANIKLGVVASDVLGASGRDMLQALVAGERDPEVLAELARGRLRAKLPELRQALTGRMQPHHATLLAHILAHIDFLEQTIAALQEEIAQRLGPYDEEIALAQTLPGIKATAAATILAEIGTDMTRFPTHRHFASWAGVCPGNKQSGGRRLSGKTTPGNAWLRAVLGEVAWAAIRTKDSYFRAHYYRLARRRGKNKALMAVAHSILVALYHVLREKRPFQDLGADYFDRLDTTRIERHHVRRLEQLGFKVDLTPVAAA

SEQ ID NO: 111542 - protein, 366 aa, unidentified
MDKKSSKKYSWFIGIDVSRNELDFAVMKAKTIIFHREIPNQVQSIKDFIMELKSRQGFTVSKTIFCMENTGFYSNHLLQVLLRLKANIVVENAMKIKNSLGNIRGKNDKIDAMRIAEYTYLHQANLRFWSPRRPVIDHLAELTTLRLRLQGLSVGLTTSVQEQRSFVNKSIFKENLQLCKRSMEAVKLDLMDVEEAILKVINEDEQLCRLRDLIVSVDYVGAVTATEMLVCTNEFRDIKDPKKFACYAGVAPFPKESGKMKVRSRVSPLANKKMKCLLHMCALLAMRHCPELRPYFLRKVEQEGKPKMAVLNALRYKLILRIFACVNQNRKFEKVYVNSHIKKLKEIESESSAFDKEEKEIIPDVL

SEQ ID NO: 111543 - protein, 486 aa, unidentified
MANRKRSTFQRLANGQLNRKERRELGRKLAAEDPGLEIVNRNVAGIDVGSESHFVAVAPGRDPEPVREFGSWTADLERMADWLTACGVEVVVMQSTGVYWIALYDVLEARKFKICLTNARHTKNLPGRKSDVQESQWLMKLHTYGLLKDSFHPPDKIRALRSLWRLRDRHVKEAGRAVQHMQKAMTAMNVQLSNAISDISGATGQAIIRAIVNGERDPWKLAALRDRRIHATKEEIARSLEGNWRDDMLFELKQAVAAYDFMQKQMEECDQRLKMLLSTLPQRDVAPESHVELVPEPAVLNRKQKRKRPRPDGNAPQFHLAAELERICGVDLTSIDGIDIMTAQTIVAELGTDFSHWKSEAHFASWLGLTPSRDISGGKVVRQEPRKVKNPVAAALRMAASSLIRSESYLGARYRSLRTKLGAPKAIKAMARYLACLVYRMFMNGKAWVDRGAQHFEHRRNERDLLLLKRRASALGFQLVQQSASV

SEQ ID NO: 111544 - protein, 379 aa, unidentified
MSRTPRIPEPSHLPTSSPDIASAQVVEEAVLGVDTHKDVHVAAVISGLGVLLGTRSFPTTASGYRQLLDWAGGFGTIRRAGVECTGSYGAALARHLSANHIEVIEVNQPDKASRRRRGKTDTVDAEAAARAVLSGRARATAKAGDGPVEMLRIFKLAKTSAIKSRTQAINQLKAVLVSADPQLRESLSGLRNPTLIRRCAQLDTSPPHDAPTVAAYTLALLARRILELTTEIDDLNQQITAILTRHAPTLLQRNGVGPDTAAALLIAAGDNPERLHSEASFAALCGVSPVEASSGKTHRRRLNRGGDRRANSALHTIVLSRLRWDRPTRAYPTRAYLARRLTEGKTRREAIRCLKRYVARELYRLIAPPTEPQRQTPAA

SEQ ID NO: 111545 - protein, 320 aa, unidentified
MKDKRVIGIDIGKRWLDVAYEDTKEIERHVNEPAAVAALVAGFDVTRDLVVFERCGGYERELEAALASTGVPWAVVHSASVKAFRQVEGIKAKTDAIDARLLQAFGRDRLEAGKLRLGRVEDVTLDALMARQRQLKTALHAERCRRETAALACVRASIDRMIAQLEAELAAIADELSAHESHNPRLAFKEAVLCERKGVAQATARALLGELPELGRLDAKQITALGGLAPRVHRSGRTDRRRGLSPGRTCVKVILFNPARTAMRWDADIRAFSNRLRLRGKPGKVIMVAVMRKLLVRLNAALRDALGKEEVSRPATPVAA

SEQ ID NO: 111546 - protein, 355 aa, unidentified
MKTTPNLITGLDVSDRHSTYCTITAEDGEVVEEGRVRTTPAALEAHFRGPRRRIVLEVGSHSPWISRLLEELGHEVIVANARMVGLIHNNPKKRDPVDAQTLARLGRVDPKLLYPIQHRSEQAQVDLSVVRARDAVVRARTGLINHVRGSVKSYGARIPECSAEGFATKAEGHVPEALRVGLEPVLEMIRALTRQTRFFDKQIEALCEERYPETAVLRQIKGVGPVTALTFSLVIEDPARFPSSRAVGAYLGLTRRHDDSGESEPELRITKAGDEFLRRLLVQSAHYILGRFGPDTDLRRWGLHYIERGGGSKTAKKKAAVAVARRLAVLLRRLWSTGEVYEPLRENRHGTVVAA

SEQ ID NO: 111547 - protein, 466 aa, unidentified
MSRKHAKRNAPRQRGGLPVDNAPVQDDRLRTVNCNAAGIDIGATVHFVAVPKGRDEVSVRNFGTYTADLEGIADWLTQCGVTTVAMESTGVYWIPLYELLEHRGFEVILSEPSQIKKVPGRKSDVLDCQWIQRLHSFGLLRGSFRPDDAIVVLRAYLRQRETLVSYAASHVQHMQKALEQMNVKLTEVISDITGMTGMSIIEAILAGQRDPETLAKLRHERCKNDEATIALALQGNWREEHLFALRQSLQLYCIYHEKMLELDAQIESYLQTFGNRSKDQVIHRPLKKPRRRRDEPAFDSHGLLFRMTGVDLTTVDGISSHSALQLISEIGTDMNCWETEKQFCSWLSLCPGVNKTGGRKRSRSGRTRPSANRAARVLRLCAQSLLRADCALGAFGRRMRARLGAPKAVTAVAHKLAKIVYGMLKYGKPYTDQGAHYYQERYRQELVNHLRRRARQLGYSLAPDAQ

SEQ ID NO: 111548 - protein, 319 aa, unidentified
MCILNSHGLFVGIDISADNLDVAVLPGSDSWRVPNDAEGIASLVEHFARLQPTLVAVEATGGYEAPVAAELATADIPVAVVNPRQVRDFARSTGKLAKTDSIDAMVLAHFAKALRPTPRPIPDAQDRELRSLLARRRQLVQMQTAERNRLARATLSVKLRIQTHLAWLKDELKDLDRDLGDSLRSTPIWNDKDELLKTVPGVGKNLSLTLIAELPELGSLNRYQIAALVGVAPFNRDSGSFRGHRSVWGGRASVRAALYMSTLVATRFNPLIKTFYDRLCAKGKPKKVALTACMRKLLTILNVMVNRHTPWNPSYHQSA

SEQ ID NO: 111549 - protein, 385 aa, unidentified
MGVEANPTTRNGDKHMNKTDKYIGLDVHQDTTVIAVAESGRVGEVRVYGSIPGDLKSLEKVLGKLGGENVRLHVVYEAGPTGFLVYRRLRQLEIDCIVVAPSKTPQPKGVRQKTDRRDAVQLARLHRAGELTGINVPDEVDESVRDLTRARADAIHDLTRAKQRLKSFLLRQGYRYPGSANWSEAHQRYLRKLTLPLPALRSVLEEQLLAIDQATERVKRLDELLEVQIPKWRHYPAVQALMCLRGFQMTAAAIMVAEAGDVRRFAHPKNFMGFLGLVPKEETTGNSRKLGAITKAGNAQARWCLIEAIQSAYGPPKVSARLSLRQEGQPAVYKELAWKIQVRLHKRGWHLLHRGVMKAKVNVALARELAGFIWDLLRQVPAPKA

SEQ ID NO: 111550 - protein, 362 aa, unidentified
MRTQTYKKSEPELVNFAGKTIYSGIDVHKNSWNVSICLDDMFVKRFHQEADPKALHAFLTNRFPGAKYVACYETGFSGFSVQRELSELGIECVLAHAADIPQTNKEKLNKTDKVDSRRIAEALSKGMINGIYILDKQAEADRAFVRYRRGCKERLKARKAAIKMKLFTLGIKIPPQFDKSHISKKYISWLSSLTFDEPITKFTLDFMIADVEELRKKEYELNKCLRKMSVSDRYKDIYIELNKIPGIGLISIMTLLTELVDINRFGSFKKINSYVGLCPTEFSSGEKSMHGKITPRANKGLRTVLVEAAWTAVSCDPAFTQKYSELCKRMKKNDAIVSIARKILSRIYAVWSKKIDYKIGVR

SEQ ID NO: 111551 - protein, 346 aa, unidentified
MKQISTIGLDLAKNVFQIHGADAEGSPILNRKLRRAEVLRFFEKLPPCLVGLEACGGSHYWAREIAALGHDVRLIPPIYVKPFVKRGKTDAADAEAISEAVTRKTMRFVPIKSADQQAAAMVLKTRALLVRQQTQAINALRGHLSELGVIAAIGTAKVAALIEIVRDEADACLPKAARFALAEIADQIEALTRQIGKLEREIVGEAKRDEDMQRLTTIPGVGAITAASVKALVPDPDGFKSGRHFAAWLGLTPKPHSSGGKERLRGISKMGNPTLRSLLVCGATSVLRRVKGNDKAPQHLIALLARRPFKVVAVALANKMARIIWALLTKGGTYRNTGAASSAASA

SEQ ID NO: 111552 - protein, 348 aa, unidentified
MVADWVDYVVGVDTHLEEHVLAVVAAPSGAVLARRAVRANARGYAEALRFAGEAAGGARVWAIEGTGSYGAGLARYLAGRGETVLEISRTSRPERRLRGKNDSLDAARTARAALASETLALPRSGERREALRLLLIARRSAVDVRREALGQLRGVIVTAPDGLREQLRGLPVGKLLERCSRLHQSSSASADEVATRLVLRSLARRIQAATVEAAELEQEILGHVRALAPRLLDEPGVGPIVAAQLIVAWSHRGRLRSEAAFARLAGVAPIPASSGQTTRHRLSRGGDRQLNRALHTVVLHRRQHDPATQAYIERRVAEGKSRRDATRLLKRYLARNLYRLLQQEPLMT

SEQ ID NO: 111553 - protein, 349 aa, unidentified
MAIVGGFDIHRRQITFDYLDTLTGQVRRGRIEPACRAVLAGWLEQRFAGRDDVTFAVEGCTGWLFVVQELQRAGITALLAEPAQTAGLRGRKQHAKTDKTDSRHLRMLVADGKVPASWIPTGQACELRALLQLYRDLAEEHTAWSQRIHATLFHQGVPSMAHRLSSARARTVLASGADMGLSPAGARAMQVALRQMEALEAEMGPVHAQIAAFSRRQIGCKTLQQKLYGVGPLVAAVIWAFLGDARRFSSSAQAVRHTGLDVTVYSSDGKRTPGHLSHQGPPILRWALFEAGHQGSRASSPDHRYYADVAARIDANRAALSVARKLVRRSHHILRALGDQAYAPVPAGR

SEQ ID NO: 111554 - protein, 368 aa, unidentified
MGNERKRFVGIDLSKRTYEAVAITADPQTITRWNGKLDPRGRKCLLEKLNAGDIVALEAGTASFTIAKEIQGKPEIMVLVLNAANLAIIYASLKKTDKEDALKLARLVQKYTPEELPVVPIPTDQEMERRALVAHETRFRQDRVRLINRLHAVFLRAGFPDHTKSQLGITASREELIVSELDGFNLAEAMNLHHMIVEYEKILEDLDNQINDTVVACGEDAKILLSIPGFGIKTTMAVLAYAGDMRRFENPSQLVNYIGFSPRLYASGDIERVGSITKRGNPQVRWLLIQSAWCMVKSKAANPLKDRFEAMLKRGKAKSVAIVALARKLLELVFILLTRREKYRFIDPSLYTIKLRRAGFNLVGVESC

SEQ ID NO: 111555 - protein, 425 aa, unidentified
MSASDSLSSPVEVSGFAYVVGVDIGSQSAVYCVCQPDKSQVVKPTELANSRTGFEALDRRLRQLAVPPQRILIGLEATGHYSENLYQFLQEQGYCLCLLHPRQTRQFAQQRGLRAKTDRLDATTIARLLLSGEARAGYVPDELISTYRQLERLHSQLADDSARYQNEIQALLVVLFPEFVQVFADPCRPTALGVLKRYPSAQAIVAAGVEALTTTLRELAPRHSGRPTAQELVRLASQSVASPLATAGRALSLKVLCDQLEHTLANLAQVARELDQLLDRDQGVSGLKSTPEFGRKTVAVLRAELGDVTRFQRVEQVVAYVGLDLQVRQSGQWKGQVKLSKRGSGRVRRVLYLAALRCLALPASAFGAYYRRLVARGMKGRRALMAVMRKMLIVAYHLLRSHETYDPTKVCAVACTPPRTPSSGS

SEQ ID NO: 111556 - protein, 351 aa, unidentified
MLIIGCDFHTRYQQIAMAEDSTGELLLERRLDHESGEAQAFYRSLQGTVRVGIEATGPLHWFERLLGELGHELWIGDSAKIRASEVRKQKTDERDARLILDLLLAKRFPRIWVPTAAERDLRQLLWHRHKLVCLRTALSNQLHFLAMSQGLCRKKKLFTRKGRVELSGLALGLWASRRRAELLKLLDGLAAPIAELDDAVVQEVQHREEALRLMSHPGVGSVTALAFVLIIGPITRFPCSRKLVSYLGLNPSEDSSGGRQRLGAISKQGNTMLRWLLVEAAQKTARRDPALRQDYQRLKFRRGHAVAKVAVARKLAVRMYWMLRSGADYAQLVRKQGSPQATLVDVSPSTS

SEQ ID NO: 111557 - protein, 391 aa, unidentified
MIYIGIDVAKDKHDCFITNSDSEVLFKAFTIFNNLDGFNDLYQKIEAVMDDVTKLKIGLEATGHYSYNLLGYLIDKGLPTYVINPLHTNLYRKSLSLRQTKTDKVDARTIASILMSDVNLKSYSDTSYHNKELKSLTRYRFDKVKERAKLKTSVSRLVCILFPELEKLVPTLHMASVYALLSEFPSAKHVATAHLTRLTNLLSESSKGRYGKDTAITFRDSARASIGSNMPAKSLELKHTIKLIQELDSEIDEIENEIKIIMDEINSPILSIPGINYRMGAMIIAEIGDFNRFDSPDKILAYAGFSPSTYQSGQLDGAYAHMEKRGSRYLRYALYNATKYVCHWDPTFAAYLAKKRAEGKHYNVAISHAVKKLVRVIYHLEKTKQQYIKAA

SEQ ID NO: 111558 - protein, 452 aa, unidentified
MSKTREKKQGKGTVSMPLVNPNAAGIDIGDTLLSVAIPEGRATESVKNFSAFTCDLRSISHWLQGHGIETVAMESTGIYWKNLYSVLVQDGFEVYLVNAKHTKNVTGRKTDESDAQWIQRLHSCGLLNSSFLPDDQTETLRTLVRFRKSLTQDSTRYILRMQKSLESMNIKISTVISDLVGKTGTAIVKAIIDGERNPVNFLPFVDGRIKASREVILKSLEGNWRKEHLITLKQSFELYNFIQQQIIDCEKEIERTLQNYMASKNDGVIESVEEVKKKSKKKNKNNPLFNTRSYLKGIHKVDVIEIFGISETSALEILAETGTDLSKWATEDHFVSWLNLCPNNKISGGKLISSSRLKKKPNTASQAFRAAANSVQRSDNWLGDYFRRMKAKGGNKYAIVATARKIAIIYYKMVRYKEAFKPVVLEEYKEKYRLQKIKYLERKLELLKTKAA

SEQ ID NO: 111559 - protein, 397 aa, unidentified
MQQVWAGVDIGKAHHHAVVIDSEGRRLLSRRVANDEADLLELIAEVCALAGEVIWAIDVRTGGATLLVTLLFSDGQKVFYLSGHMVNRAADGYRGEGKTDARDAAVIADQARMRRDLRPVLDEDGLITELRMLVAHRQDLVTDRTRAINRLRDQLLNVCPAIERALDLAHKGPLILLTGANTPAAIRGLTPEKLTSWLRENGVRKGAADLADRVIRAAQSQTAVLPGEHMAARLTAELAKHVLRLTEQIEHTDALIEDRFARHELAEVITSMPGIGTLLGAEFLAATGGNMTAFASADHLAGYAGLAPRPHDSGRISGNRHRPRRYNRDLNRVFYTSALISVRYNPESRTYYDRKRAEGKLHTQAVLALARRRVNVLWALIRDRRCYELTPPTTKAA

SEQ ID NO: 111560 - protein, 346 aa, unidentified
MMIIGCDFHPSWQQVSWLDTETGETGEQKLVHAAGDAERFYRQMPVPSLIGMEATGNSQWFVELVEDLGHALWIGDAAQIRASYVRKQKTDKRDAGHLRKLLEEGRFPKLWTADREQRDHRQLVMHRHKLVQIRSRVKNELQHLSLNKGMQKQNKLWSAAGQKALRELRLKPWAACRREDLLQLLAMLDQQIGKLDAAVQQAAEHNPQAKLLMTQPGVGPVTSLAFVLTLGDVSRFPRGKQVASYLGLIPREHSSGGRQMLGSISKQGNRLMRALLVEAAQTAVRYDPGFRKEYLHRCHQKPKGVAKVAAARKLAVRLYWMLRTQKPYPEVVRIESSPRVALVGAS

SEQ ID NO: 111561 - protein, 326 aa, unidentified
MQGKELSNQETTTKSSVGIDVSKSWLDAHALPSGDILRVANTCEGIRRLKRWLVRFDPALVVVEATGKWHRHVHRSLHASAMPVAVVDPFRVRMFAKAQGVFAKTDRLDARVLAQFAAVMAPAVRPPAPEVMQELAELVQAREAAVAEETALKNQLSAAAGTFLKRQLKRRIDRIAKDIATLADEILRRIEADEGLVRRHTILTSIIGFGPVVAATLIACLAELGTCSRRQIAMLAGLAPIADESGERQGVRVIWGGRSGVRRILYLAAVSAARHDPGMKAFYSRLTANGKPAKVAIIAIARKLVVLANTLISENRIFTPCAPKHA

SEQ ID NO: 111562 - protein, 347 aa, unidentified
MALATVSVLGVDLGKNVCSVVGLDGSGKVVMRRRVRRETLVGLAEKLPPCMVAMEACCGAHHLGRVFAAHGHDVRLMSPEYVRPYIKAQKNDDRDAEGIAEAATRPTMRFVDLKSQDQLDVQTLHRSRDRLVGERTALINQLRAILLERGMVVPKGRRNLEQFLIVLMDEQGGAGLSPRMILLVADARAQWAELDGRIAAFDAEFVRWTKENEDARRLGAIPGVGPIVASALVAAVGHAESFDHGRDLAAWLGLVPRQFTTGGKPKLLGISKRGNRYLRKQLIHGARAALPYVAEKDSPLGRWAKALMSRAPRNVAIVALANKLARIAWAVLRRGERFVAAGVSMAA

SEQ ID NO: 111563 - protein, 358 aa, unidentified
MAVTEGTHHIVGGVDTHKDLHVAAIVDEQDRVIGTRCFATTRQGYRQMLAWMRAFGDLQRIGVESTGSYGAGLLRFMQQAKVPVLEVTTPDKQDRRRRGKNDDLDAQNAAHAAFAGQRTVTPRSRDGMIESLRVLMACRKTAVSARRVALQVIHNTIVCAPDGLRDQLRSLTRMQLVRTLASWRPDLTAYRDLESAYRIGLKSLARRYLELHDEIADLDVMIAAIVDELAPNLVARNSIGHIGAAQLLLTAGDNPERLRSEASFASLCGVSPVPASSGKTVRHRLNRGGDRAANSALHIIAIGRLRTDQRTKDYVARRIAEGHSKLDAIRALKRYLAREVFTLITQRRREINATRIAA

SEQ ID NO: 111564 - protein, 355 aa, unidentified
MHSVKYIGLDVHQSTISVAVLDGEGKLVMQSVVATHPGAILDFIHGLRGTLHVTFEEGTHSAWLYGLLVRRVDRLVVCNPRKNALLKGGSKSDTIDARKLADLLRADMLSPVYHGETGTATVKQLGQSYAALTEDTTRVMSRLKALYRGQAIPATGKKAYGQRYRAQWLAQLQGAGLHRRAERLYEQLDALQGLRREARRELILECRKHAAAQVLRTVPYLGPIRAALLIGRVQTPHRFRTKRQFWAYCGLGLETRTSSDYQFVDGELQRKKKPVWIRGLNLNHNHDLKNVFKSAATTASAREGPFCTFYQGLLAKGMLPAMARLTLARKIAAITLSIWKKGESFDAEQLKPQAA

SEQ ID NO: 111565 - protein, 451 aa, unidentified
MQKRNVKMEVVNPNAAGIDVGSRSHFAAVGQGSGDIKEFGVYNEDLQQLTKWFADNEIKTVAMESTSTYWQHLYITLQAAGFQVILCNGKFTKNIKGKKTDVKDAQWIQKLHTIGLLTGSFLPDEATEQLRTYCRHRTNLLQQAADTIRKMRKYLRLLNLRLDVVVKDIAGLRGLTIINAICKGEKSPEKLAGLRHGNCKKSEEEIAKALQSNGRKDYLFGLEQEYQLYVNFQEKMKECDIEIEKLLNEQINSDDEKRQHVIDKKVYKKVNKNTPKNLDINLLSYQYFGGVDLLAIEGVSHATVLALMSEVGNGIHKFETAKQFASWLRLAPNNRISGGKMLSSRIPKGSNRLKIALRNGANAIGNLKDTALSNFFKRIAFRKGRPAAISATARKLAVIIWNMIVKNIPYKPVTDYEFLDQKRKRKVQEMKKLIHKFDIKTDELGLQLSGL

SEQ ID NO: 111566 - protein, 340 aa, unidentified
MEKRYLGIDLHRNQFTCCVRLENGRTYLTNWKLEKLAQFVQKLRPTDEVAVEITGNTRLFHDAVAPWVARVVVVDTNQFRVISRSVKKTDPNDARLLALYLSKGLLPEVRMKSKQHAHLASLTQTRDTLVKQRSALKNKINNVLSARGLNLPKEALSSEKKLAEVLSLPFDEIVLVELRVVADQIRSLNKSVAELEKAIAEASSELEGHRCLTSIKGIGATTSAILLSVIGDVNDFPDEKRLASYFGIVPRVSNSNETERSGRIHKRGTKLGRTALVQSALIAAQYSPYLRSFYERVKTRRGAGKAIIALARKFLGIIYRTLKNKWVFEDFPHFVLAEGA

SEQ ID NO: 111567 - protein, 459 aa, unidentified
MGRKGRRTSGMEEAHPFAGMSRVNANAAGIDIGAVEIVVCVAGDEATQIVRAFGNYTVDLQAIGRWLKGHGVETVAMESTGVYWIPLFEELEWQGFECLLISSRSMRRVSGRKSDITDAQWIQTLHTYGLLEGSFRPQAELVALRTLLRHRSQLVEHRSPHIQHMQKALLQMNVQLSQAVTDVTGITGRAIIWAILAGERDPKKLASLREPGCKKSEEEIGKALTGTWREEHLFILKQSMQMYVFYTEQIQACDDEIERVYGLTRPDWDGGELKPVSVRKRNSHSKNRPQNPESIRKHLKRISGVDLSAVDGFGVSLAQTVIMEVGTDMGKFPDEKHFCSWLGLAPKHEISGGKVLKNKTLKTKNRAGQAFRMAAQAVKQADCVFGVMYRRLKARLGPAQATVATAHAIARVVYRMLKYQVEYETISVEEYEKKYREQQLKYMKKKAAKLGYQLVPIPI

SEQ ID NO: 111568 - protein, 410 aa, unidentified
MPEPTYALYVGVDWGNQTHQVAVLDTARGLRGERGGAHDGPGLHALASWLAELAAPGTVAVAIEVPHGAGVDTLLERGFAGYALNPRPMDRFRDRDTVAGAKDDRRDAQVLAAALLTDRPAFRRLHVDDPQVVQLRELTRIEAELSEELRRLANRLREQLLRFYPQALELCPAADEPWFWALLTQLPTPTAAARRRRGPVAALLREYRIRRLTADEVLTVLRRTPLTVAPGTLEAATEHIALVLPRLELIATQRRACAPRVETMLAVLAAAGQQQGHRDVTILRSFPGVGRVVAATMLAEASQLLAARAYHRLRASGGAAPVTRQSGKQRGVPMRYAWNPRLRNALYYWAFIAARHDPATRQHYEGLRARGHSQGRALRGVADRLLAVLIVMLKTQTLDDPSRREAKFAA

SEQ ID NO: 111569 - protein, 341 aa, unidentified
MGRSLGVDLHKNSFTVCVYESEERYTFKTYRVSRVGLAAFRKQLKAEDELAVESTGNTAFFVREIVSCVKRVRVVNPVQFKVIANSVKKTDSIDALTIARFLHRDLIPEVRMRSKEESQRSSLIGTRDKFVKLRTALKNKLHNILNANGIVSKPEMFSGEKGLEKVLAVPLEASYRFEIELLVTEIRHLNEAIKRLDEELKRQGTQLPGHQNLTSIKGISDTGATIFLTAIGNLADFKDEKALASYFGIVPRVYQSNQTCHYGRITKRGNKIARTTLVQSTLVAIRYSPYLRAFYDQVKARRGSGKAIIATSRKLLGIIYNTLKHNWVFEDFTTFKLATSS

SEQ ID NO: 111570 - protein, 341 aa, unidentified
MQITTIGLDLAKNVFQVHGIDAAEKVVVRKQLRRRQMLEFFKALPPCLIGMEACATSHYWARELTKLGHEVRLMPAKDVKAYIKRNKNDAADAEAICEAVRRPTMRFVQIKSAEQQGQLMQHRARDLLMRQRTQVINAMRAHLAELGIPARQGREGLKELMAIVADDDDTRVPVNARASLMVLAAQLQALQTLIGSIEKRIIKQHRVNEASQRLESIPGIGVIGATAIAATVADPKVFRSGRDFAAWIGLVPREASTGGKQKLGPISKQGDRYLRRILVVGACAVLKLARQKPEKYPWLTQLLGRRPFKVVAVALANKMARMAWALLANGGTYRAPRIAAA

SEQ ID NO: 111571 - protein, 369 aa, unidentified
MPHVTSIGLDVHARSVAAAAFNPFTGEVVHRDFGTDAAEIAEWALGFEEPRACYESGPTGFHMARELRALGLDCAVAAVSKMQRPAADARRKNDRRDAEFIARMLATHNIVEVPLPDAAVEAARDLDRALDDAAVEYRRARQRLNMFLIRLGHVWDERNADGTRKGSWTRAHWRWISGIRLEGPQRDVLEYYVTAARCAESDRRQLEKKVLALARTDRWRPAVEALSCIKGIDALTAFRLAAEAGSFTRFRTAPAFASWCGLVPSERSSGETERRGGITKTGNRLARTALVESAWHYLTCTPRPKAPAPGADVPAAIRARADDCTARLCRRREALAAAGKSPCKANAAVARELACWVWEIGRRAEGTLG

SEQ ID NO: 111572 - protein, 372 aa, unidentified
MNSNGITWVGMDAHKNSIQVAALFPDRAEPVEWTEVTTPEAIRRLGRKLQRQAPGEVRCCYEAGPTGYGLQRLLEAEGVICEVVAPSLTPVKPGCRIKTDRRDARKLAELLRADVLTAVHPPSETDEALRDLCRCRDDVRVDLLRARHRLGKFLLRRHCIYRQTKHHWGTRHWAWLEQLRFDDPMSQATLDSYLLAVRQLEERQHRLDAQLEEYGGQGPYREPVGWLRCFKGIDTVTAVCLVAELHDFRRFRSARELMSYVGLVPSENSTGLSPRRGSITKTGNRHVRRLLVEAAWHHRHRPMISAPLRRRREGQPARVLAVADRAQERLCARFRRMTQRGITPPKTIVAMARELTGYLWAVLHPDATATRS

SEQ ID NO: 111573 - protein, 369 aa, unidentified
MNKTIKNIGLDVHKNSISIGIADDDRDGDVRYYGKIDNDMNQLDKVIRKLISKGAVLRFVYEAGPCGYSIYRYLTKNDIDCVVVAPSKIPQQSGNRLKNDKRDCLSLARLHRAGELTAVYVPSEEDEALRDLVRAREDATRALRTAKQQLGAFLLRYDSVYSGKTKWTKAHFNWLADIAMPHPAQQIVFQEYIDTVADCSNRVQRLTEQVRQQSKQSRLYELIKALQSMRGISLLVAATIAAELGDLTRFETPEKLMAFLGLIPSEHSSGERVKKGSITKTGNRYVRKALVEAAHAYRFPARKSRALRKRQEELPKGVIAISWKAQCRLCTRYRYLTAKGKKANIAKTAIAREIAGFSWAIARELPRAA

SEQ ID NO: 111574 - protein, 367 aa, unidentified
MKKVSTVEAKQSRKISQPKLSIGLDLGDRTSWYCVLDEAGRVLLEQRVSTTAKALREVFGAMPRSRMALEIGTHSPWISRLLSELGHEVIVAHARKVRLIGESRKKDDRLDAQTLARLARIDPELLSPVKHRSAKAQADLTVIRARAGLVRARTALVNTARGLGKSYGERLRGCNVCNMNPEKAEGLSPELQAALQPLLGALESLSERIGEYNEGIEKLAKESYPQVALLKQVKGVGTLIALTFLLTLEDAHRFRKSRDVGCYLGLQPGRRNSGQSEPQMHISKEGDPYLRTLLVQGAQHILGPFGVDCDLRRWGLKLAERGGKSGKKRAIIATARKLAVLLHRLWVSGEVYEPLHNSKQSALPAAA

SEQ ID NO: 111575 - protein, 397 aa, unidentified
MYIVGIDIAKRKHEAAVINGDGAVVIKPFSFTNNCSGYNRLLAMLAKAKLPLDEVSFAMEATGHYWLALFTRLQKEGFRVQVINPVQTNSIRSFYIRQAKTDPRDALLIAEVIRFGHFSESTLHPENIYELRELCRGRHAIVSMQADVKRKVVALLDQVFPEYETAFTNLFGDTSMAILQTCPTPKELSEMCLEELCHLIEVSSHKRFRMAKAQELQELARNSFGFAMAGDVFSTMIRLYAKHLVFLKQQVQEMDRKIAEIMDTLDTLITTITGIGPTLGAYILSEIGDISRFSSAAKLAAYAGIDPTMRQSGEYNGVRNRMSKRGSPYLRHAIWLAASSAVLHDPALKLYFQKKRDEGKPYMASVGHACRKMVSIIYAVMRDNKAYTPYIPNEISA

SEQ ID NO: 111576 - protein, 312 aa, unidentified
MNRTPHNTTRYAAVDISKDKLDVCDDHGSLTVANSAEGIARLLERLAGPGRPLVVFEATGGYERLLIATLRKKKTPLVMVNPARVRAFANSEGVKAKTDPIDARMILKFARSKALRPLRLPSPSVLRLAALLDRRAHLVEELSREKNRLQNSDPLIHRSIKRMIRIMEKEVAAIEAAIEKTIDSKPQLRSAADIIQSIKGVGRVTAWHVLAYLDEIGQLNRNRLVALAGVAPFNRDSGKSKRRRSIQGGRAKLRKTLYMAAHTAARSNPVIKPYVRKLRERGKPYKCAIVAAMRKLLIHIQSLLKKSELFPC

SEQ ID NO: 111577 - protein, 403 aa, unidentified
MKYFAGLDWGSVEHAACVIDEQGTVVAQLDVKHTAEGLQKLLAQLARFSPDQKLPIAIERPSGVVVDTLVDAGHPVVPIHPNALKACRPRYRAAGGKSDPGDAYILADVLRTDGHRFRPLRPLSDEVRALRATVRTRDDLVAERVAVANQLRALLDSFWPGAVAIFRDIDSPIALDFLESYPTPARAKSLGPKRMARFLARNGYSGRRSSAELLERLRSAPAGLAGPLEQEAKGVAVLDLVAVLRTLVERIRRLTSAIEHAVAQLSAGQVVMSFPRAGKLNAAQIVAELGDDPERFLTEDQLAAEAGVAPVTHASGKSRGVVFRYACNKRLRRAITTWASNSRHSSPWAASVYARARARGCDHPHATRILARAWVRVLWRCWRDGTPYEAARHGAAKPFLEAA

SEQ ID NO: 111578 - protein, 361 aa, unidentified
MKIAGIDVHKKVLMVVIVDGSAPEEKPTRRRFATMPSQLHQLLIWLQGQGVEEAVMESTAQYWRSVWLELEPHMRLHLAQAFSNRAPRGRKHDFKDAERLVRRQIANELILSFVPNGEQRIWRSMTRMKLQLTRDRVRLQNQMECLLEEMRIKLSIVVSNLLGASGLRILQALAQGETDPKKLAELGDERLQCTEEQLVDALTGRVQPMHREMLSLQLQRLQLIDQQMAQLNGMIAQAMKAHQDAVIRLAEVPGLGADSAQQIIAEVGAQASTFPSAAELTSWVGTCPGKEESAEQNRSSRSAKGNKYLRRVLNQAAHAAVMKKGSYFQGVFRRLLPRLGYQSAIWAIAHRLCRLVWKILA

SEQ ID NO: 111579 - protein, 425 aa, unidentified
MSSSDAHSSPVDASGFAYVVGIDMGSQAYVYSVLQPDKRPVSKPTELANSRVGFEQLHGCLRQLAVPPQRVLIGLEATSRYSENLYQFLKEQGYALCLLHPRQTHQFAQQRGLRAKTDRLDATTMARLLLSGEARRGYVPDELIATYREVERLHSQLTDDSARYQNEIQALLVVLFPEFVQVFADPCRPTALGVLKRYPSAQAIVAAGVEALTTTLRELAPRHYGRPTAQELVRLASQSAASGLATPARALSLRVLCDQLEHTLANLAQVAQELDQLLDRDQGASGLKSTPEFGRKTVAVLRAELGDVTRFQRVDQVVAYVGLDLQVRQSGQWKGQVKLSKRGSGRVRRVLSMAALRCICLPASAFGAYYRRLVARGMKGRRALMAVMRKMLIVAYHLLRSHETYDPTKVCALACTPARTPSSGS

SEQ ID NO: 111580 - protein, 418 aa, unidentified
MFKIFRKNCCGLDVHKTWIYACIGITDANSRTEYFQARFSAFSKGLQELSHWLDKYNCKEVCMESAGKFWIPVFNILEKTCLVTLAHPKYTKPQKGNKTDRKDAKWICDLFMCDMIKPSFIPPPAIRHLRDLVRYRRKLTNMLTGEKNRAQNCLTVSNLKLDDVFADVFGKSARSITEYILAHPGEPFDVAQFVDRRCKSPLSEIQAAVDGAVSPEQAVKLRQCLDHIDQLRLLRQRLEQEILRICEPFADILQFLRTVPGLGNDPMTAIAVLSETGGDMSVFPTAKNLCSWAGCCPRNDQSGAKVKSTRISRAGSYLKPLLVQVANALIHSRKHPEFAERYRRIKARRGHKKAIIAVCKMLLTAIWNILSKLVPYSPAGFLSTSHDLPPSKSLTVAQGLSLLRRRGFILTDDPLSAP

SEQ ID NO: 111581 - protein, 332 aa, unidentified
MNIVSTVGIDLAKNTFSVHGIDASGAIVVRRAVSRAKLTELIAQLPPCLIGMEACSGAHEWARRFSAFGHIVKLMAPKFVIPYRKSGKNDGNDAEAICEAVGRPNMRFVPIKSIEQQSDLSLHRVRQGFIDERTATLNRLRGLLAEFGHVVPLRAIEVRRRVPELLDQLPTRIAGCLRDLLEHAARLEAKALEYEREIKAHVRSNALARRAQTRSGIGPITASALAATIGNGHDFKNGRQFCAWLGLVPRQYSTGGKTRLGHITKRGDSYLRMLLVMGARSVLQNANRLNDPLSRWALAVQQRRGYHRACIAIAAKNARVAWALLAKEPVAA

SEQ ID NO: 111582 - protein, 430 aa, unidentified
MKSNTQNAKIEAITEKTLVLGIDVGSETHYARAFDYRGIEYSKKPFKFSNTEAGFVTFKEWILDLKERHEKDKVVPGMEPTGHYWFNLGKFLQDNEMKPVLVNPHHVKKSKELDDNNPTKNDRKDPKVIAGLVREGRYMIPYLPDGVYADLRTVSNIRFQLQAELTRIQNRISRWFNIYFPEYKTVYGKPDAKSGILILKAAPLPEDILTLGINGVNQIWRDAKLRAVGKARAKTLIEAAKHSVGSKEGAVAARMEIRMLLEDYESRNIRLQEVMTLIEGLIKQIPMAEKLLEIKGVGIRTVSGFLAEVGDISRFNNPKELQKLAGLALVENSSGKHKGETTISRRGRKRLRYLLFEVAMSLVAKNPEFRELHNYYTTRRLNPLKKMQSLMAIAAKLIRVFYVMLTKGVNYDPKKMVNDIKRPAVYLQTA

SEQ ID NO: 111583 - protein, 332 aa, unidentified
MMAQNEVVVVGIDVAKDKVDACIRSLSQRQTFASTAEGRRALIRWLRKHRVGKAAMEASGGYEQDWAKALREARIEVRIVDPKRVRSFARSAGRLAKNDPIDAEMIAWFAETFTEAPGQAYDAARERLVKIVNARQGLLDLQTNLKNSGEHTVPDVVQKMQARLLKKIAVEVAKLETAIAAQVKATPHFAELAEIIESVPGLGKITSAGLIATMPELGQVNDNIVAALLGVAPYDDDSGQRRGSRHIKGGRRKARNLFYMPCMGAATRHNPVLKAFYERLIAKGKEPKVALTACMRKLIVILNTMIARRQKWDANRYKVSDPARLPPSACPA

SEQ ID NO: 111584 - protein, 350 aa, unidentified
MPRKFDTAVVTIGIDPGKNTLHLVGLDARGEIVLREKVARTKIVSRLANMRPCLIGIEAGMGTHYVTRDLLALDHDVRQVPPVYAKPFRQTHKNDFRDAYAVAEAVQRPTTRCVPPKTDEQLDLQALHRVRYRLVGQRTAIINQIRCFLLEHGITVRQRLHWLRHALPDILAQRTDVLSPRMVRILEDLAQDWRCLDDRIEAVSGEIDALSKNTELCRHLMTIPGIGPIISSAVVAAIGDGAAFTRGRDFAAWLGLVPKQISTGDRTILGRITKRGNRYLRMLFLQAARVVLLRPRNWMQHSFGPWLAAAAKRLHHNVLATALANKLARIAWSVLVQHREYEARLSVAAT

SEQ ID NO: 111585 - protein, 341 aa, unidentified
MLCKGAAAQGVRAMLGIDVSKATLAYSLLAAGTQQVVAAGQVPNTPAGIAQLAALAPAEHPWVLEPTGVYSRAVVQRAQQDGRTVLLAPPKEAKAFLAVLHPRAKTDRLDSQGLAHYALALPLRPFPVKAESVVQLEQLLAARKGLSESLAQLTQQRQVLPYAAAPLAAAIAALRAQQRELDAQIAQLCQQPELAIAHTLRQVPGIGPVTAAALAACFASHTFTHPDQFVAYLGLDVRVRDSGAYVGRRRLSKRGQPELRRLLYLCAQANLRRRDPDNPFKLQYERERAKGLSSTAALNAVARKLARTAWSLVTHGTQYDPERVHHPPHPSMPDPPLDNQP

SEQ ID NO: 111586 - protein, 387 aa, unidentified
MPQPNDLSRSLVALDQNSTIIAVVELSHSSWLVGGVVPGIERQPRKKLEPHPERLLALLHRWRDEAVKAGRTITRIALAFEAGRDGFWLARWLETRGVEAHVIHASSLAVSREHRRAKTDRLDTELLKRGFLGWLRGERGHCSMARVPTIAEEDAKRPNRERDCLVGERTRIVNRIKSTLARLGIRNFKPTLRKAAERLATVYTPEGMPLPPNTLAELQRDMARLGVVISQIRQIEEARQKRLEQQHETGPHAMVRLLARIVGVGVETADMLVHEVLTRPMRDRRAVARYAGLTGSPDESGAQRREQGLARAGNARVRRGMIQLAWRFLMFQKESALALWYRARTADSRRGTRKTMIVALARKLIIALWRFVTTGEPLEGVVLRPVT

SEQ ID NO: 111587 - protein, 411 aa, unidentified
MEQIHDRVAGLDVHRDEVAVCVRRPGPRGGVHTDKARFSTTAGGLAAMASWLAECAVTLAAMEATGVYWKPVYYALEGRFELWLCNAHHVKNVPGRKTDMSDAEWLADVAAHGMVRPSFVPPPAIRELRELTRYRKTQIDVRAAEIARLEKVLQDAGIKLTSVASKVLTQSGRAIIEALIAGQRDPRALADLAKGKLRPKIPQLTAALAGHFGAHHAIVAACILGHLDFLDAAIGGLDEQVAARVADGYQPAARLLADVPGLERRSIEVIIAETGADMSRFPSPGHLASWAGLCPGNHESAGKRRRVATTPGNQWLRRTMIESARAAARTKGSYFGAQYRQIARRRGPNKAAVAVAHSLLDVIWHILTTGEVFTDLGEDYFTSRQDKEHQARRLIGQLEKLGFTVQLTEAG

SEQ ID NO: 111588 - protein, 360 aa, unidentified
MAKIKRSAKTNKKIPLMKSEKLWIGLDVHKKSNHVAVWSSERDLIATWVTPSDPDTLCKQLKPLLPHAVRVVYEAGPTGFTLARKLSAAGFSAQVIAPSMVPQIPGKDAKSDRLDCRNLAKLASHRMLQPIHIPSEQEEADRQILRLREQALKKRRRIKQQIKSFLLLYNLKEPEGLAHWAKRAVAQLRTLALGEELRFCLDMMLDELTQCNSNLERVTSKARELSVSERYKQRIRLLRSVPGVGMLTSMIFCTELTNPGRFTHQGQVVKMMGLAPRVAKSGETTRQGRLMKSGNARVRTILVEAAWRWIRLDLTAKAKFQRLLRNTGNPKKAITAMAHKLGVILWRITIDQTSYRPVAA

SEQ ID NO: 111589 - protein, 355 aa, unidentified
MESIKYIGLDVHQATLSVAVLDGHGDLVMQSVMATQAATILEFLRGLRGTLQVTFEEGTHSAWLHDLLWRRVARVVVCNPRKNTLLKAGNKSDAIDACKLAELLRAGLLSPVYHGESSTSTLKQLGRSYTALTEDTTRVKSRLKALYRSQAIPCAGQKLYGQRHRGEWLAQLRDTGLRRRGERLCQQMDALQALRMEARRELIAESHKHEAVKLLRTIPFLGPIRAALLIGRVQTPHRFRTKRQFWSYCGLALETRSSADYRLEDGQLLRARKPVFVRGLNINHNHELKSLFKSAATTASAMQGPFRVFYDALLAKSMQPAMARLTLARKIAAITLHVWKKGEPFNAEYLKQQAA

SEQ ID NO: 111590 - protein, 427 aa, unidentified
MQTETERLAAYRQLRTGIRGSEKHLIAGIDIAKDKHYAFFGTATGKTLCKQFTFPNSNEGFELLCSKAETLRLQHQLQQVVIGVEPTANYHKPLADHLVRHGLLVVQVSGVAVKKNRELLDGRWDKHDRKDAANIADLIAQGKCQFYDYPSPAIRELRELLHLKHTLKQEEHRIKTRIRNNLLAQFFPEMDQFMTTCQQDTLAVIGTCCSPEQIATLDYESFFAKVVTVYKGKRQEEHLLRIWQCARASIGCLAGNAPIYEGKVLIDQLLHLRQIIKELDEQIATLCSGFEEYPCLLSIPGIGPAISATILAAIGNPYRFDTTKQVIKLAGLDLSASRSGRSAVNATPIISKRGQAELRYALCQAALVAGSRNTFFRCWFAKKLQGRERERGIVGILRVKLAAKLLVIAWTMMKKKEMFAYERLNNC

SEQ ID NO: 111591 - protein, 417 aa, unidentified
MAMKIVRFNCCGMDVHKNLVVATIGITDRKTNITEYFQRSFSTLNSDLYRLKDWLKSHHCSDVCMESTGKYWIPIFNILEDEINVRLTHPKYVKAIKGKKTDKKDSKWICDLFKHDLIKFSFIPPREIRELREIARYRYKLVCMRSSERNRYQNCMTVSNIGLASVISDPFGKTASNIMKEVMKSNVIDDDKILKLVHRNCKNKDKILDSLHGYRIESDQRFKMEKSLDHMEYLDQLIDSCEVELIKRAYPLRRSFQHITQIKGISALSAILIISEIGIDMSQFESDKQLVSWAGLSPANNESAGKKKSVRISKAGQYLKPLLVQCALSAIKDKASYFGRKYSNIKKRRGHKKAIIAIARMMLVSIYHMILTGEEFQPTDYESLMNPKSNTDQSLTVEKALNFLKRSGIDISSILVN

SEQ ID NO: 111592 - protein, 352 aa, unidentified
MTVYIGVDLHVRTQTVCWMDTADGEIHHHTLDHARDDLRAFYAQFPAPAVVGVESSGYSLWFHQLIEQAGHRLLVGHAYTIRQFARRRQKNNRRDAELLLDLLRRDEFPIVHRPAPASQDTLALLRYRHRLVRIRTVVKNGLQAVALNHQLQLGFRLFTPRGQQRFAALPLGRAYALQRQQAQVLLATLQAQIAAVEEELQRRAEADPRVVRLRTHPGVGRLTALAVVHTLEPVTRFDRARRIAAYCGLDPQEYSSGDTMRFGHISKQGSRLLRYLLVEAACSAVRHEEDLQRFYRRLRARKKPHAVAAVAVARKLVLRLYRMLREGIDYEQFRSRGRAQSSSGAQRARIDA

SEQ ID NO: 111593 - protein, 378 aa, unidentified
MSQSTTTAATVYAGLDVHKDSIDIALAEAGRDGEVRHLGAVAGGVNAVSKALRRLVSQGHFVHVVYEAGPCGFVLQRHLAALGYHCEVVAPSSIPKRSGDRVKTDRRDALMLARLARAGELSAVRVPDAVDEALRDLVRAREDAVREQRNARHRLKALLLRNGVMYAGKCAWTAAHLRWLASLALPHAAQQIAFQEYLHAVSESGARIARLEQSLRDALQGWSLAPVVAALQALRGVQLIAAVTLVAEIQDFHRFANPRQLMAYLGLVPSEDSSGQRRRQGAITKAGNSAARRMLVEVAHLYRYPARVSAVIAKRQSELPKTVTDIAWTAQLRLCARFRRLAARHVPHNKIVVAIARELSGFVWAIACEVTPPPAASR

SEQ ID NO: 111594 - protein, 403 aa, unidentified
MERTAGIDLASEEHRLVIVDADGRQLEQRRIKHSESGVEALVARLLELEVARVAIERPNGLVVDRLLEAGITVVPVHPNQLAAARDRYRSGGGKSDGFDGYVLAELARTDMHRLRVLTPDSDETRALRALTRARDDLVGQRVALANQLRAQLEAFWPGAARIFAEVDSPIALCFLERYPSPEDARTLGEKRLAAFLARNGYSGRRSASELLARLRDAPTGRTGELESEARRQIVLGLVAALKPSVEQIKLLTSQIRGAIDSHPDGQIFRSLFRDPKSVVTAAELVAEIGDRRDRYDSRDRLEARAGQSPVAIESGKKKVASFRWACNKTLRDAVGVLADSSRKHNPWAQKIYADAIARGHDHPHAIRILGRAWLRIIWRLWHDRTPYDQARHGNLNRLLAAEG

SEQ ID NO: 111595 - protein, 427 aa, unidentified
MNCTQNYKIDQVTEQTLVVGIDIAKRTHCACFVDDRGRVLRKSFPVLQSKKGFRQLYEGIQEAMQEFAKSDVIVAVEPTGHYWLNLACFLEEKGIPLVMVNPAHVCRSKELDDNLPTKHDAKDALVIARLAKDGRFLVPRLLHEIEADLRVGSTLKEKLRKEQTAVKNAIIRWTDRYFPEFWAVFRDLGKTALSVLEWTPFPADMAGRTAEELIEVHRQNEGLKCPQKAKIQALIDAAKDSIGVTEGTTMARFEIAALVRQYRQFEAEIAALDAELKALVQTTMEDQWLKTVDGLGDATIIDLLAEIGSFTHYRDPRQLVKLAGLTLKENSSGQRKGQKRISKRGRKRLRSVLFRAVIPLIRHNEAFRALHEYDTTRSVNPLTGKQSIVALCRKRLNVLFAICTKKQAFDAERMMQDVLSQVQNRAA

SEQ ID NO: 111596 - protein, 427 aa, unidentified
MSVAQNEKIRQVTETTMVIGVDIASDTHWARAFDWRGLELSKAVKFENSAEGFHYFLCWASELAAEQKKGRIMVGLEPTGHYWFTLAAYLQGGSMKMVLVNPYHVKRSKELDDGHPSKSDKKDPKTIAKLVLEGRYVLPYIPQGLYAELRVAMNCRWRVQKELTSVQNQIQRWLKIYFPKHKTVFGEFEGIGSMALLHAAPLPSNLVALGVDGINQIWRQMKLRCAGLKRAQRAFEAAQNSVGCTTGIEAARMELQILLEDYDAKLQQYERIMKVVESLCRQIPEVEELLKIKGIGLITVAGIFAEVGDLRRFSSPRQLQKLAGLAITENSSGKHKGQTEISRRGRAHLRAILFRAVMPLVARNEECQKLHHYLTTRAENPLKKMQSIIAICCKLLRVFYAVATKGCAYSAEKMLADIRRNQPLKAA

SEQ ID NO: 111597 - protein, 309 aa, unidentified
MGKVYVGIDISKDSLDVAVYASDKQWRFSNDQSGITSLCKMLVKLKPALVVFEATGGYEMPLYLSLDKAGLPAAPVNARQIRDFARSTGKLAKTDSLDARAIAHFGYAVQPVPHPVPDTQELKVAQGRRLQLIEMITAETNRLRGVPKALKTRIEAHIAWLKRELADTDRELKDMIEKDPVWREKDSLLQSAPGVGPTLSTTLISQLPELGNLDRRQIAALVGVAPLNRDSGIFHGRRTVWGGRVHVRTVLYMATLVATRYNPVIRTFYQRLCHAGKRKKVALTACMRKLLTILNSMLKHRTPWSYSPC

SEQ ID NO: 111598 - protein, 411 aa, unidentified
MGLVVVPDKRATASADPGPITTGRCVARRPSNSFLEPISRGVMVWTAPYGIDCARMRLLRSQTREPSVNQIIRIGMDTSKHIFQLHGVDATEQVVLRRKLRRNQVLEFFAKLPPTVIGIEACGAGHYWARELRKLGHEVKLMAPQHVKAYVKRNKNDGRDAEGLCEAMSRPTMQFVPVKTEEQQAALMLAGVRQQMIARRTQLGNAIRGYAAEFGLTTAKGLDKIEPLLAQIAQDETLPEMARELLAFQGRDYARLQIELKAIEAKLMAWHRANPDSRRLAQIPGVGPIGATALVMKAPDPRLFPSGRHFAAWIGLTPKDHSTAGKTRLGKITRAGDEMLRSVLVAGATAVIKQAKHGRGSPWLLALLKRKSPKLAAVALANKIARIAWKLLTTGESYDGARMPRASALAA

SEQ ID NO: 111599 - protein, 309 aa, unidentified
MAMTVNVKEFGIDVAKDWLDIFDGNEVVRIENQQQAIRTFLKSLPDSCAIAIESTNTYHELMVELAIVAKHTVYVIDAYRLSRYRDAVGVRAKTDANDATLLHRYMRSEKQQLIAFKPLPKAVKRMNRLLKARAKLAQLKTAMGLSLTGVAELALTRKALLKRFDDAMAVIDKRLLDCIKLAGYLEDYQRCLSIPGIGPLNAAALVSLFHRGRFSKSDAFIAFMGLDVRVRESGYFKGKRKLTKKGNPEMRRLLFNAARSGAKTKKWNAYYLAMRARGHSTTATAVALSRKIARLAFALMRDQSEYRPI

SEQ ID NO: 111600 - protein, 439 aa, unidentified
MTTLPVLNPKAAAVDVGSEQMHVSIAGDAPKVFGSTTAQLQALRDYLLERGVNTVAMEATGVYWLCLYEVLEKAGLEVAMVNGRHVKNLPGRKTDMKDCQWQATLHAHGLLRGGFVPKEQIRRLQDYQRLRADHITMAATHQLHMQKALERMNIKFHDVISHLTGVSGLKVIRAVLSGERQPEALLALCDPLIQKKKAARVRESLVGTWKEEHLFALRQALAGWEFYQGQIAECDRALEQVLKEIAPGDSNKPDAPGWGRRTGINAPQIDGLSGLLCRLCGGKNPTAIPGITDYTLLQLVAETGTDLAKHWRTEKHFTAWLGVAPGSRQSGKRRGNQKRSRNRAGRIFCVIARSVGRTVDKALGGFYRRLKSRRGGLVANVALARKLAQLYWRAMVHGLGYVEDGLKKYQDRVVQTEQRWLQKLAKKHGMILQPQIKTN

SEQ ID NO: 111601 - protein, 380 aa, unidentified
MKKFITHVGMDTDSRGFDIAIGEGFGSNNREVRSWGRIPATLAAVDKLIKQLRKQGYQELRFVYEAGPCGYGIYRHLQDKAGIVCVVVAPSKIPRQPGERVKTNRRDALKLARLDRAGDLEAIYVPSEEDEAMRDLSRGRAAAVEAATRVKQQLKSLLLRHGIKYPGKGESWSSDYRQWLRRLQLPHEAQAYVLAEGLVALDEAEARVTRLTQRIRELLPGWRMQPVVAALQALRGVALVTAVEMMAEVGDLTRFSNPRELMGYLGLVPSEASTGDKRRQGSITKTGNGHARRSLVESAWAYARPPRLTRALKQRQQGLSREVIEISWRAQVRLCGRYRRLSARGKNKKKIIVAIARELCAFMWAIAVAGSGQQRSTRAA

SEQ ID NO: 111602 - protein, 364 aa, unidentified
MSTITLGVDLAKSVFSVCEVDGSGHVLRRLDFKRDAFAVWLAHVPAGTVVAMEACSGAHHWARRCIKHGLQPRLMAAQLVKPYRLSQRSKNDRNDAEAIATAARQGNMRFVPVKDIDQQVRLSWHRVREGYKAESLAIGNRLRGLLAEFGIVVATSDMALRHVLGDLDQAGLPGEFKELLRRLEAHWTEVRKALDACDARIDVHAREDARCVRLRAIIGIGPITADAMVASLGLAKDFKNGRQMSAWLGLVPTQHSSGGRARLGEISCRGDAYLRTLLIQGARSSLQRAKAVSVEKSTPEQIWIRQLACRVCFGKVLVAIANKHARQLWAMLAHDQTYDADAWLKHPMVQRPAGKHAITVAAMA

SEQ ID NO: 111603 - protein, 366 aa, unidentified
MSKTERLPRICVGVDLHKLQFTVCAINEETGEVVLTGVFKTNSEGYKEFCENMHAAEAEQECSVELAVEATGNARYFKNKMEAEGFSVVVVNTSKFKVITTSTKKTDANDAATLAFYLSKDMLPQSHLCDQTSEEIRRMLKTRSILVSSTVKIKNQIHGMLLGYGIETKSSQFQSKKKRQELLKDLADQGYSQFTASSLKVTLSILDEICAQVKRIEAQIKEMVKEDEDVALLMTMPGIGFVGATTIASYTKDIERFGGDFKRFSSYLGIVPSVHNSADTVRMGKITKRGPQDLRTAFLQVAMGIIRQPQNTSEWKLMKDYQTMKVSKGSGRAIIALTRKVARIVFAMLNKKEAFNPELMKKASVA

SEQ ID NO: 111604 - protein, 322 aa, unidentified
MDEHGKLLKETKVASDPGALNACIRSMPGVVEAIGIEAGPLSQWLHKSLTDLGLPVVLMETRQVKAALKAAPVKTDRRDAAGLARLLQMGWFRPVHCKSLSAQELRVLLGARRSVQEAAINIEMSIRGMLRNFGLRLGRIGKVSFEDRVRELTGGNKLIQLSIEPMLRARAALRSELVRLERLARDITREDPVCRLMMTMPGIGPVVALTVRSTIDDPGRFRRSKDVGPSIGLTPRRYQSGETDIIGGVTKAGDLDMRTALYQAATVVIHRSKKPTWLRAWAERVVRRRGAKRAAVALARRMGVVLHRMWVDNTEFQAARQV

SEQ ID NO: 111605 - protein, 489 aa, unidentified
MKSQAAKKGPKDKQESKKTSGKSTPGKWEEMNRKQRREIMRQMQSEDLNLEVVHPHAAGIDIGNASHYVAVPPSRDPQPVRCFGCTTAELKTMAEWLKQCGIRTVAMQSTGVYWIAVYEILEEAGLEVYLVNARETKNLPGRKTDVQESQWLMKLHTYGLLRNSFRPSQDIRTLRTYWRQRQDLVRSTGRHIQRMQKALTQMNIQLANVISDISGVTGQAILKAILDGQRDPRELAAYRDCRVEASEEEIAQALEGNWQEDQLFVLRQEQAGYEFCQKQITECDQQLAQYLARLEDRTQGATLPEETRKGRRKKKKGNPQFNLREELFRMTGVDLTQIDGIDVMTAMTVVSEVGWDMSKWKTENHFVSWLKLCPDNKISGGKVMGKGRMPTNNRATTVLRMAATTLRESDSYLGAQFRRFRTRLGPPVATKAMAAKLARLVYRMLRYGMKYVDQGAELYETKHRKQQVIHLKRKAAQLGLQIIEVAAAA

SEQ ID NO: 111606 - protein, 361 aa, unidentified
MNTVIRVGIDLANYLIQVHAVDASGKVVTNRALKRGKFLLWCADLPAGCVIAMEACSGAHHCSRKLIDRGFDARIIPGSSVAPYRIQGRTGKNDANDAAAVCEAASRPHMNFVPPKTLAQQGMLCVHRLREGLKEERTACINRIRGLLAEFGVVLPQSPEILRRHLIDIVEDASNDIAGVARLVLQRAHEHWRELNAHIKWCDQRITDHQKLDEQVQRAAELMGVGSITASALVATVGDFRQFRNGAQFAAWLGLTPKQHSSGGKTSLGSITKRGSVYLRTLLIQGAKAIVLTRQYDNPIFLWAHKLRERIGWQRAVVALANKNARILWAVMTREKRYDAHHVSCIPLLAAVTAPALVSVA

SEQ ID NO: 111607 - protein, 439 aa, unidentified
MCGGTVNGFSLFFQKGVLPVKVVYQTCCGVDVHKSFLVATIIKTTSGVQPSYQKKRFSTFNNSILEFKKWLLDNSCRDVCMESTGKYWVPVFNLLEDELNVTIANPKWVKAVKGNKDDTKDSKWIGDLFRLGLVPGSYIPCKPIRILREFTRYRYKLTSCRSSEKNRFQNALTVCNVALDSVVSDIFGKSATSVIDYLLEQSDNSINHEEISSRLLRSLKKKSESVIESIEGYQMTDAQKYRMRLVHAHMDYITSTLTDIDSMINSLVEPYENAVQLLCTIPGVDRNSAITILSEIGTDMTQFSNSKRLCCWAGLTPGNNESAGKKKSVRITRAGVYLKPALVQVAHAAVKSNKSPYYKAKYERIMKRRGKKRAIIAVARMILTAVYHMLSTGEAWNPTDLYKIDMPKPLKNKQKEKAVKQAMKLLIAEGLIKESQLVS

SEQ ID NO: 111608 - protein, 381 aa, unidentified
MSKIIRIGMDTSKSVFQLHGVDADEKPVLRKKLRRREVLAFFAKLEPTRIGIEACGGSHYWARELRALGHEVVLLPTQLVKPYMGQRKKNDAADAEAICEAMSRPRMRFVPMKTAEQEAAQMLMGVRDRLVRCRTQLTNAIRGYAAEFGLVTAKGLDKIEPLLARIESDPTVPGLAKELFAAQAKEYAQLKMRIREIEAKLKAWLRQNELCRRLAEVPTIGPIGACLTVMKVPDPHVFRCARDFPAWMGLTPKDHSTAGKTRLGVITRAGDETLRKTYVAGATAVIQQVKKGRGNPSPWLLDLVRRKPPKLAAVALANKTARIVWKLMVSGERYNPHAARGATTPVSRSGRRAPLNGGSATRPSLPSCPTARDATVATMRA

SEQ ID NO: 111609 - protein, 354 aa, unidentified
MNARSDAACFVGVDLHKDTLTACTIAAKDREVSYRKIACVAREKVREFLADLPRPSVVAIESVGFYRWLWTEAEPIVDQVVRADARADARGCRALAGRRIKTDREDAFNVAELLMTGRLPTAWAPPNNIQRLRDLTRHRNGLSRDHAKTLHRVKSIMNRLNRPGPARMDAAGLQRYLLASVERIEADDLMMLWQHQRRLVEVEQDRSAIERRIIDVMRAEEFRRLREILESIPGVGLITAATAIAEIGDFSRFPDAKAIGRYAGLTPTGYSSADKHRLGRICKTGSPDLRWALQQAAWTAIRCEPAFKKVASKISKGEKKKKAAAVAVARKLLVLMWTLVRKDELYKAREPLAA

SEQ ID NO: 111610 - protein, 344 aa, unidentified
MVDTSRPVTGGVDTHLDVNVAAALDSIGGLLGVAEFGTDTKGHDDLLVWLSGFGRVAKVGVEGTGSYGAGLARFLREAGIAVVEVDRPNRQARRRQGKSDAVDAVEAARAAQADRQLGAAKSRDGNVEAIRALVVAKRSAKATKIKSLNQIRHLGFTAPEEIRQSLQGLSAHMVAVRCARMRPRAGTDPVVFATKTALAALGRRVLALDAETAAIDELLDSLVAQTAPKLLAVFGVGTDTAAALLVAAGDNPDRLRSEAAWAHLCGVAPIEASSGKITRWRLNRGGDRQANAALWRIVITRMSNDSRTRAYVARRSEEGRTKGEIIRVLKRYVAREVYPIMVGP

SEQ ID NO: 111611 - protein, 344 aa, unidentified
MTDYRVIAIDLAKTKFHFVAMNYENKVILKQKMHRQEFFDKIESLFPSPKTFAFEACGGCHYVAQRLEKLGHKVILLKPKDVKPYAKSRQKNDLNDAIAIARAALDPEIKHVKHKTIEQQQVAYLHKSRQNTIQQRIQRSNSIMTSLQEFGYIAKCGKSQFAKDCHDFIKNALESGYIAKPVYDQMLLDCDEIKQLIKRERELDKEIISSNKSSKAAILLETIPGIGPINASILGNKSMETYEDARDFAASLGLVPKQSTTGGTIRLGSITKHGDRYARTMLVQGARSLLMRAYKPNIPDNRIYKFIEILKKSGKGFNVICVAVANKLARIAYACIMKKTAYGV

SEQ ID NO: 111612 - protein, 360 aa, unidentified
MSFNGTSVGLDVHALSVVAHAVDEETGRVKRARLCPDHAEILAWLHQLRSPVRVACEAGPTGFGLARTLTAADIDCVVAAPSKLIRPGGDRVKTDARDAAHLTRLLRLGEITAVTVPDADVEAGRDLVRAREDARADLMRMRHRLSKLLLRQGRVYSGGQAWTAVHDIWLRRQRFDDGHTRAALDHHYDAVLTATAARDRLDEQIVAVAASPRWADQVDRLGCLRGIAALTGLALTVEIGDWTRFTGSSIGAYVGLVPTEYSSGATRVQGSITKAGNAHVRRLLIEAAWHHRSSYRTSGPTMRARWAKVDPALKARGHAGNKRLHQQWCRFNERKKPRVVANVAVARQLAGWCWSLATLE

SEQ ID NO: 111613 - protein, 332 aa, unidentified
MSYCIGIDVSKATINVHISKNNQDLVLENNLKSFKSLFAKLKKIYKKEIEDVIFIFEPTGSYSEALRKYCSEKSIKCFIINPKQFSNYAKALGEEVKNDVNDARVLSKALHLAKENQVNVPVFNEDVEHIKELMSFYKFTKKQTTQQKNHLESLTSKDGDKFSIKELKKSIKESQEKELRIIEQIQTLIDSTDEYRNAYENITSIKGVGQIAGIVLLHLFLKYPEANQRQITSLTGLNPIYRQSGSSIQTGYKIAKSGASLYRSILFMSVLAAVQHDKNFKAFYERLKSNGKHTTSAQIAVMRKIILTAHSLYKNNSKYDENFNSQKASKIE

SEQ ID NO: 111614 - protein, 297 aa, unidentified
MSYEVKYIGMDVHKEAIVIAVLNESRKLVMESVIETKASSILQFLHGLRGELHVTWEEGTWAAWLYDLLLPQVQHIVVCNPRRNAFLKEGSKSDKVDARKLADLLRTGMLRPVYHGENGLRTLRELGRSYQTISKDLTRVMNRLKALYRGWGIPCAGTQVYAARAREEWMSKIPQAGVRRRAELLYQQLDGLQALRRNVRPEFLAESRKHKAAKLLRQIPCIGPIRAARLIALMQTPHRFRSKRQLWTYSGLGIETHDSAQFRFVSGQLQRSKKPQQIRGLNRNHNHEMKEIFKSVI

SEQ ID NO: 111615 - protein, 360 aa, unidentified
MAKARTLVGLDVHAAKIVAAVLDADTGELEVFAMKGDVVAAAGFCAGLPRPVRVAYEAGPTGYTLAREFAKRGVECVVAAPSKIPRATGEKVKTDRRDAEHLVRLLLAGKLHPVRVPGPEEEALRDLVRARETLRLDLMRARHRLSKMLMRHGIQFDDGRAWTDRHRAWLKTVCLEWPAAQTTLLDLAGVIDVLVHRRDHLEREIVSNLSGSPWETQVGRLRCLRGVDTLTAVGLCAEVGDFERYARAGQLMNYLGLVPSESTTGNSRRLGSITKTGSAHARRLLVEAAWHYRKAPAIRKTLTDRQAGQPAEAVAVAWSAQRRLHRTWARLEARNKRRTIIAVAAARELVGFCWAITQIE

SEQ ID NO: 111616 - protein, 349 aa, unidentified
MDDIATVVGVDIAKTVFVAVGMNDRGKVLWRKKLSREEVLPFFATLALVKIGMEACAGAHYWARRLNAQGHDTRLIAAQHVKPFVNGSKNDWNDAQAIAEVRSRGETKYVPINTEAQQDMQMLHRARQALLSERNGVICRIRAFAGEYGKVFPLSVSKFRKGIAEWLGDDAENGLSGNAVQTLRELLEQLDEKEKRQDAYDARIALAAKEDERARRLMQVPGIGKLTATAVVASVSDPRHFPSSRDLSANLGLVPRQHSSGGKDRLFGITKRSDGYLRTLLIHCARSALRCAGEKPDRMLRWALQVQQRRGAKIAAVALANKLARIVWAMLVSGDEYQPVLQRSASAPV

SEQ ID NO: 111617 - protein, 333 aa, unidentified
MMAQTDRVVVGIDVAKDKADACIRSLSQRQTFPSTTEGRRALIRWLRKHKVGTAAMEASGGYERDWAKALREAGIEARVVDPKRVRSFAQSAGRLAKNDPIDALMIAWFAEVFIEAPGQTGDTARDKLVQIVNARQNLLDMQTSLRNRSEHATPDVVQKMQARLLKKIASEIVELEAAITAMVKATPHFAELAAIIESVPGLGKTTSAGLIAAMPELGQVRNEVAAALLGVAPYDNDSGQRRGDRHIKGGRRKLRNLFYMACLGAATRHNPVLKAFYDRLIAKGKEPKVALTACMRKLICIINTMIARRQKWDAARSNLCNPARHLPSACPAQ

SEQ ID NO: 111618 - protein, 313 aa, unidentified
MNPNKDKNTRDIVAIDVSKEKLQVHSSPELFETTNDKAGHKRIVKLASTLPKALVVCEPSGGYERPLLEALRQAAVPFALADAKQARYFALSQGQKAKSDPIDAKMLHAFAMQRDMQPDISPDRACAAVAELLDRRSQLSDDASSEKNRLDKCGKALLGSVRRHIAYLEKEIQRIETLVVEAVAEDRRHQAVFAALREVKGVGKVTAWAIIGYLPEIGRINRGRLSSLAGLAPFTRESGKWKGKRCIGGGRCKVRDPLYMAAVSGKQHNETLKSFYDRLKASGKPFKLCITAVMRKLLIHLQSVVKKVELELA

SEQ ID NO: 111619 - protein, 389 aa, unidentified
MKIFVGIDIAKLNHFAAAISSDDEILLEPFKFTNDADGFQLLVSKLESFDKNSIIIGLESTAHYGDNLVRYLVAEFYQVCVLNPIKTCQMRKNNVRKTKTDKVDTFVIAKTLMMQDDLRFITFFDLDMMDLKALGRFRQKTIKQRTRLKIQLTTYVDQVFPEIQYFFKSGLHHHAVYALLKEAPSPKEIASMHMTHLANLLKVNSHGHFTKEQAKELRVLAQKSVGANDSAISIQITQTIQQIELLDSQLEKIEAEMTDIMKFNDSVIMTIPGIGYINGGMILGEIGDIHRFSNPNKLLAFAGLDPSVYQSGNFQAKTTRMSKRGSRVLRYALVNAAWNVVRNNATFKAYYDAKRAEGRSHYNALGHCAGKLVRVIWKMLTDEVEFNLE

SEQ ID NO: 111620 - protein, 420 aa, unidentified
MQVIYERCAAVDVGKDEIAVAVRVPGKGRDGRRTEKRTYRAFYGVLREMAKWLESQGVTHVAMEATGTYSMPVYHALMESGFEQVLVCNAGHVKNVPGRKTDLADAEWLAQLLECGLLRGSFIPPADVKAVRDLVRYRAKIAQQRVSEIARLGGVLQDAGIKIDSVASSVATKSGRAMIEALIDGERRGAVLADLAKGRMRSKIPDLSMALEGRFGEHHAMLCRLHLDHLDHLEAMTARLEARIEAMMQPFRAARDLLITIPGISLLAAAAVISEIGPSPREHFPAAAHLASWAGLCPGNHESAGKRRSGKHRHGNPHLQPVLVEIAWSAVRHDGYLKSLYHRHVMRNGGYRNPAAKGKAIFTVAHAVLVIIWNILTTGKPYDDLGSGYFDRRADPDREAQRLIARLQALGKHVTVEDAA

SEQ ID NO: 111621 - protein, 466 aa, unidentified
MGTLTLGIDVACRTSHQASLADDQGRFRFVGRRFVTASVDLEALWHDATRGGDDITVVLEPTRNAWVPLAAWFRRRGARVVLVPPEQSADLRAYYSKHTKSDRLDSKILARLPMLHPDGLHAENGLGPGDPLRRLVKIRSSLVRNRTTHLARIDAQLEILGPDWFAALGGDLARTTALRFLAAGYADPNTVKRLGAARLGRFIYRHSRGRLGDEEARMLVEAAEESIRLWSTELDFADLADDIALHARLILQINVEIKDIDDRVRVLMEKLDPTGIITSAPGVAQVTGAAILGRLGDPSRFRSLAGVRSYTGLTPSLDSSGLASRHGAPTKQGDAVLREAIFMAADHARRVDPQLAAKYHRLMVKAGKHHTSALCHVSMTLLTRIVATWRRSEKYVIRDCDGRAISMEEGRAIVLERFTVPSDLRREAALLEQRRYIAHGRRASRRVKESTFAPSSGSPRLKLHRN

SEQ ID NO: 111622 - protein, 332 aa, unidentified
MSCYLGVDLHRNCFTVCTLKEDGQSELRKWSIHALGEFAQTVQATDAVAVEATGNTRYFCQSLKDRGCRLVVVNPQQFQVISRSVKKTDTHDAKTLAQFLARDLLPEVRQKDALLAEIASLLQTRDKLVKLRTTLKNKINNLLAGRGILIRRESLSSDKGLEQVLQASVIGLERVELEVLIGQIRHLNGSIQKLEAAIKKQGPKLPGYQNLKSIKGLGDIGSSTLLSTIGDINDFASEGKLAAYFGIVPRATNSNETARSGRITKRGNKLGRTTLVQCALIARRYSPYLAHYYARIKAARGTGKAIIALARKFLGIIYRTLKNGWVFEDFDY

SEQ ID NO: 111623 - protein, 453 aa, unidentified
MSKTKARSKSDGLPIIHPFAAGIDIGSRFHVAAVSPDLCDEPVQTFQAFTSDLERMADWLVATGTKTVVMESTGVYWVAAYEVLESRGLEVVLANAREARAVPGRKSDVNDAQWLQRLHACGLLRASFRPGRDIAELRAYLRARERHTDYAAAHIQHMQKALTFMNIQLHHVIATITGVTGMRIIRAIVSGERDPDKLAAMRDVRCKESIETIRAALVGNYQPEHLFALKQSLALYDFYQQCIDECDAEIERTVAGLNIDRPVPTEPLPKAKHRSKMPSDPNFDVRSAMYQLAGTDLTQIHGVGPFLALRLIGECGTDLSRWPTAKHFTSWLTLSPGCKISGGKVLSAHTRKTSSRITVALRLAAVTVGRSNTALGAFYRRLAGRIGNAKAVTATARKIAVLFYNAMRYGMDYRDPGADHYEQQYRDRVVKQLHRRAAQFGFALQPQESIANE

SEQ ID NO: 111624 - protein, 430 aa, unidentified
MKSNTQNAKIEAITEKTLVLGIDVGSEMHYARAFDYRVIEYSKKPFKFSNTEAGFATFKEWVLDLKERHEKDKVVPGMEPTGHYWFNLGKFLQDNEMKPVLVNPHHVKKSKELDDNNPTKNDRKDPKVIAGLVREGRYMIPYLPEGVYADLRTASNIRFQLQAELTRIQNRISRWFNIYFPEYRTVYGKPDAKSGMLLLKAAPLPEDILTLGIDGVNQIWRDAKLRAVGKARAKTLIEAAEHSVGSKEGAVSARMEIRMLLEDYESRNTRLQEVMVLIEELVRKIPMAEKLLEIKGVGIRTVSGFLAEVGDISRFNNPKELQKLAGLALVENSSGKHKGETTISRRGRKRLRYLLFEVAMSLVSKNQEFRELHNYYTTRRLNPLKKMQSLMAIAAKLIRVFYAMLTKGVDYDPKKMVSDIKRPAVYLQAA

SEQ ID NO: 111625 - protein, 342 aa, unidentified
MDIAVLGIDLGKNSCSVVGLDGSGKVILRRRMQRKTIVVLTSKLSPCIVAMEACCGAHHLGRVLSAQGHTVRLMSPEYVRPYVKAQKNDDRDAEAIAEAATRPAMRFVALKSEEQLDMQTLHRARDRAVGERTSLMNQLRAVLLERGVIVPQGRAKLRLRITELLRQPPEQISSRIRLLIEDMLMRWQALDERIAVFDGEFAAEAKRDEAARRLTSIPGIGALNATALVAAVGNAQTFARGRDLAAWLGLVPRQATTGGKPRLLGITKRGSKYLRKMLIQGARAALPTLSRSNTRLGQWLRGLLARAHSNTVVVALAAKMARTVWALLRYGTTFEPRAIATI

SEQ ID NO: 111626 - protein, 308 aa, unidentified
MVFVGIDVSKDRLDVHVRPSGEAFAVARDGDGLAWLVDRLRGLSPERVAVEATGGFETVVAAALAGGGLPVVVVNPAQVRHFARALGQRAKTDPIDAAMIARFVEATRPALRPLADEATRLLADLVARRRQIIAMIVAEKNRERRAPAGRIRKSIVRLIAALEKELASLDADIDAGVRGSAVWRAKEDLLASVPGVGPTIARTLLAELPELGTLDGKRIASLAGLAPFTRQSGQWKGKSMIAGGRKTVRSALFLAALVAGRHNPVLRAFRSRLIAAGKPKMVALIAVARKLLIILNAIVREQKPWQNA

SEQ ID NO: 111627 - protein, 355 aa, unidentified
MSSLKYIGLDVHLATISIAVLNASGKLIMEVTIENQATVLLDFLRGLRGALHVALEEGTYAEWLYSLLAPRVARMVVCDPRQNPRRRGEKKSDRLDARKLAEWLRLGTLKPVYHGRPQGHALRELARSYRTLVSDATRVMNRLKALYRGRGIPCAGARVYAPRFRPQWLEQLREAGVRQRAELLYQQLDLLLALRRQARGAMLAESRRYAAQKILCSIPSLGPVRAALLMALLGTPHRFRGKRQLWTYAGLALVTRSSADYRVANGELVRSRQPALVLGLNANHNHELKALFKDAAASALAHPGPLREFYNTRVDQGMKPELARLTLARKIAAIALTLWKKGERFNAEHLKPQAA

SEQ ID NO: 111628 - protein, 333 aa, unidentified
MTTFCGIDLHSNNSFVVVLDEADRVVYGKRLPNDLATILEALAPYREELAGVVVESTYNWYWLVDGLQEAGYRVHLANTVAIRQYDGLKHSGDAADARHLAHLLRLDILPTGYIVPKAQRAVRDLARKRLQLVRARTAQVLAVENLFARNTGSRPSANSVKRFTGEDIDLLGFDADVALALKANVAILGALNTEIERLEARLLERVAPRPEFVWLKSAPGIGDILAMTIWLETGTVTRFAAVGNFSSYCRCVDSARVSNGKKKGEGNVRRTATSTWPGRLWRRRTSRCASAPRPSASTSARRLAPTPSWRSRRSRTSSRAPATTCCAKASPSS

SEQ ID NO: 111629 - protein, 411 aa, unidentified
MRLFVGDDWAEDHHDVELMDEAGRVLARKRLPEGVAGMARLHALIGQQLGEDAEDAEVVIGTETDRGPWVAALVAAGYTVYGVNPLQASRYRERHGVSGAKSDTGDAHMLTDMVRTDSHQLRAVAGDSPDAGAVKVVARTHKTLIWERTRQVQRLRHQLLGYFPGALEAFEDLDAPDALELLGKAPDPARAARLTRAQVSAALKRARRRDIPGKATAILAALRSAQLGQPPAVTAAYAVTARALIALITVLNEQVKVLEEQVGTHFGRHPDAEIYLSQPGLGPILGARVLGEFGDDPGRYASGKARKNYAATSPITRASGKKKVVAARFIRNQRLTDALMAQALSALTVSPGARALYDAERDRGTEHNPALRKLANRLVGILHGCLKTRTPYNEATAWPQQENIHQSDLAA

SEQ ID NO: 111630 - protein, 368 aa, unidentified
MIERVHGIDRHKQFSTISVLNRQGEEVQFQGACREFGKYVEGLGPTDVVVLEASTGSFWWADQIEAKGAKCFVVDPRKFRIIKDSWNKTDKQDARNLAKALWVHVVTGEFGIPTVYKPTGVVRELRKLFAQYCLLNRQIATHKNNAQAIFVENGVELKKEAKSRLWAPESGLEVLKEMNVSAASRVCLELTLQVLWKVAEAKERLAVEILLAGEPLKSQVELLISIKGVTPLIALAFLADVADVRRFRTLRKMNAYLGLVPRASNSGGKSRPGHITRESRKLTRTILTQCVHHVAASSESLDRYYRELREKRGTGRARIAVIRKLCGMMRRMLLSGEQYRWMDRGLYEKKLMQYERVLKRAKEERPAA

SEQ ID NO: 111631 - protein, 371 aa, unidentified
MEHSSKTLYVGLDVHKDSIAIAYAPEDRGAEVVSLGTIGTRQCDIDTLIRKLQSKGAALVFAYEAGPCGYWLYRYLTRKGFGCHVVAPSLIPRKAGDRVKTDRRDAVTLARLMRSGDLTSIYVPRVEDEAIRDLSRGREDAMRDLKATKYRLKAFLLRQDIRYEGRANWTAAHLRWLSEVVCPTPAQQIVFQEYIRAVTEQTERLRRLENELHEQVKGWRLYPVVEAIQALRGVELTGAVILIAELGDLTRFDTPRQLMSYLGLTPSEYSSGERRRQGGITKAGNTHARRALVEGAWAYRYPAKVSRHLQLRLEKLPAEVQSIGWKAQVRLCKRYRQLSARGKHANQVVVAIAREMAAFAWAIARTVPLAN

SEQ ID NO: 111632 - protein, 400 aa, unidentified
MRTVFGIDVSKASSEVAILVNGERVHGYTMPNDIIGFSRLLEDLKTVSNPEIIFEATGVYSRRLQAFLEENSYDYTRLNPLEAKKQLDSLRVRKTDKIDAEKLASSQFVLNRKPTYVQEEVYQNLHDLSRFYQNLTEDIVRTKNRLHKVLQVAFPEIENLLSTPTGEQYWNLVSIFPTKHWVLELSEVELKEAIRNSTSKRISENRVGNLTEKLVGLAKQSYAGISKTSPMIEEVKYNAQELIRLTNRREQVLQQLIELAEPLPEYEILLSIPGIAETTATSIIGELGDIRRFKSANQINAFIGIDLKHYESGDFLGQEHITKRGNPYARKILYKCIHNIASASHTNPCHIADFYEKRKRQSQITSTKPHTIASIHRLIRTMYYLIMHNKLYDYTLAQSH

SEQ ID NO: 111633 - protein, 347 aa, unidentified
MIIIGCDFHARFQQIALLDTETGAVEERRLEHENGEAQAFYGGLQEPALVGMESMGYTQWFEELLAEFGHELVVGDAAKIRKMEVRKQKHDRRDAEHLLNLLVKGDFPRLWLPSAAERDARVWLEHRHQLVQMRTRTLNGLQAVALNHGLCLRQKLWTKHGQAELKKLPLREGRARRRADLLALRAQLDGWIAELDQRIAQEVAHRPDAQRLLTHPGVGPLTALGTVLILGPVARFPDAKHVTSYVGLIPQEESSGGRQRFGRLTKQGNGLLRFLLVEAAQTASRLDPGLRRAYRRLTFRKGRASAKVAVARKLAIRLYIMLRDQIDYEEFCRRGSHAGMLGEVALA

SEQ ID NO: 111634 - protein, 443 aa, unidentified
MTRKRSNRLEVIHPDCAGIDIGKSKHYVAVGAHCCDDPVRHFGAFTDELEELAQWLCECGVRVVAMESTGVYWIPLYEVLDRVGFEVHLVNPRATKQVSGRKSDVLDCQWLQQLMSYGLLKGAFRPPDEVCVLRSYVRQRARLGQDAARSIQHMEKALSEMNVHLDSVLSDIMGKTGQQILRAIVNGERDGAVLAEYRDRRVKADVQTIARSLRGTWRDEHVFALTQALARYDFFQAQIQACDDHIAATLETLSPDERECEPLAAPARGGRERALQTALRRALGVDLTAIPTIGPETALTIAAEIGPDLSRFASREHFCSWLTLAPGTRISGDKKLRGKPVKRLNRAGQALRMAATSARNSQSFIGAAHRARLSRLDTPRAIKATAHQLARLIYAMLTRGEEYVDRGIEQFEQQKRERQLRSLHRKARQLGLSLVDNDQKSAA

SEQ ID NO: 111635 - protein, 317 aa, unidentified
MGTHKTVVAGIDVSKESLDVSLLPSGASQRFSNNESGCAELVKLLTGAAPTRVIFESTGGLETLAVGLLSAALLPVVVVNPRQIRDFAKACGLLAKTDKLDAKVIAMFGQRIEPEIRPLKDEAAQELSALISRRRQLIDMQTAEKNRLTAAPKAVRAGIVQHIEWMEQQIASFDDNISRFIHSSPVWKAKEQILTSSKGIGPVTAATLLASLPELGSVSRHKISALAGLCPYNRDSGKYKGKRSIWGGRAAVRSALYMATLSAIRFNPVIKTFYERLRKAGKLHKVAITAAMRKLLVILNAMLRDNRRWDNSLYSFT

SEQ ID NO: 111636 - protein, 358 aa, unidentified
MSEFETGGHEPEFAAFVGIDWADQKHVWCLQSRDSTKRESGELKHTPEGVEAWVAQLCQRFGNRPIAVALEQSRGSLVFMLAKYEPLHLFPVPSTMSASMRKALYPSGSKDDPRDADLLLDLLLQHRNKLRRLSPDTEATRRIQNLVEERRKLVDEKTEHTNRLTSQLKIYFPQMINWFEHLDTELVCALLERWPTLEALQKVPPAKLRTFFAKHHCRNQELIEWRILTIRQSIPAIHDRAVIEAKSAAVKVIVQLIRVLLEGIADLDEKIKEAAAAHPDFFIFKSLPGAGPALAPRLLAAFGSQRERYRNATEVQTYSGIAPVIEKSGKKQWIHFRWACPKFLRQSFHEWASHSIGY

SEQ ID NO: 111637 - protein, 445 aa, unidentified
MSNGSGLSRGDRNRNARLARLRELVPLGNAIVGIDLADDKQAAVVTDHDSRVIARRRVSARAWELGGLLDWAVVAAAGAGFASVTVACEPTGHRWRVLDQLAVERGLALVCVQPLLVYRAREGEDLTWDKSDPKDAVIIARLAAGLRCYEPERADAVWARLRHLGARRSALIADATAEVNQVRDLLECAWPAVLAAAGVPFRSATWRAALAVTLDRCAGDLARVRRLGPARFESAVRRELPRWGARRPCLRIIRAVFAALADPAGVRVHRPGALERARLVLGDWRETRARLADVEARMVAVLDDLGLTGLVTTIAGLTPAGAAAILAETGDPARFTSPRALVKHAGLCPRDNASGGYQGKTSISGRGRPALRVAAWRAVWAALPNNPVMAARFAYLTNRDHNRLARQQARTACAAALLRWIHVVITRRIAWDPAIAGRTPPCRAA

SEQ ID NO: 111638 - protein, 343 aa, unidentified
MKLSHVGVDLAKNVFQLHGVDRSGKAVWRRRLRRHQWLSALIKATDTSCVIGMEACTSAHHWARQLQAHGYEVKLIPPQFVKPYVKSNKNDANDAEAICEAMSRPCGRFVAVKSVEQQDIQATHRIRAELKDQRNAKTNRVRGLVAEYGLVAPPTLLALRRAIPDWLEDAENGLTDYFRSLLHGLWGDLLVLDDRIKELDKQIEQLANSNQITRRLQQLRGVGPMVATALVATVGTGEQYRKGRQMAAALGLTPRPNSSGDKHRLFGISKRGDACLQTLLIHGARAVVSQARQRDDQLSRWVTDIAKRSHPNVAAVALANKTARMAWAMLRNKTDYDPGLATR

SEQ ID NO: 111639 - protein, 386 aa, unidentified
MTEGRSTNVVERHGARQTEGALVEPQTAPQLGRLAQLASNPNSCQGDRGAWPARICKDGPSTARQRRGRGMSESVRTAVGIDVSQATLDVAVYPQGDHWQTSNDEVGIGALVERVKAVAPTLIVLEASGGYELAVLATLGSHGLPVVAVNPRQVRDFARSTGRLAKTDALDAQVLAQFAAVVQPELRPLADAATRELAALLARRRQLVQMRTAESNRVARAVEAVRPEIREHLRYLDKRIRELDRELHDRLRRSPLWRAKDDLLRSVPGVGPVLSTTLLAEVPELGTLGHKQLAALIGVAPLNRDSGRMRGRRTVWGGRARVRAVLYMAAATAIRHNPACRALYERLTRAGKAHQVAIIACMHKLLRICNAIVRTNTGWGYQPLDN

SEQ ID NO: 111640 - protein, 411 aa, unidentified
MIYCGIDWAERTHDVALVDESGQLLAKRHITDDAAGYKILLDLLADHGDCEDNPIPVAIETSRGLLVAVLRTGKRQVFAINPMAASRYRDRHSVSRKKSDPGDALVLANILRTDMHAHRPLPQDSDLARAVAVLARAQQDAVWNRQQIANQLRSLLREYYPAALAAVETWKKGLCRPEAHELLRLAPTPTRAARLTRAQLRSALKRAGRQRGIEAEADRLHEILRGAWAHQPPLVEDALGKQMLALLIQLEAASKAATDLEEAVDEAFPQHPDADIILSFPGLGVQLGARVLAEIGDDRQRFSDARGLKAYAGASPITRASGKKSSVTRRWVKNDRLNHAGYLWAFSAISASPGAKAHYRRRRDDHGDWHAAAQRNLFNRMLGQLYHCLQQHELFDEQTAFPTTAEALEAA

SEQ ID NO: 111641 - protein, 339 aa, unidentified
MKLYGAIDLHSTNSVVTVIDEQDRVVYQKRLDNDLTVILQQLAPYRSSLEGIAVESTYNWYWLVDGLMEAEYRAHLVNTAAVQQYEGLKYTDDHSDARWLAHLLRLGILPQGYIYPKEQRAVRDLLRKRSQLVRHRTANLLSIQNLVTRNTGSSISGNRIKQLTAESVETILSQRDQALAAQSNLLVLRCLEEQITKLERVVKERVKLRPQFRYLQTVDGIGEILALTIMLETGEIKRFAGVGNFASYCRCVGSEKLSNGKRKGSGNTKNGNKYLAWAFVEAANFAVRFNPQIRRFYQRKKAKTNGIVAIKAVAHKLARACYYIMRHEVPFDVARAFAG

SEQ ID NO: 111642 - protein, 421 aa, unidentified
MRFYTTPHRYYCGIDLHARRMYICVLDAEGQIRVHRNGPATPEHFLTVIAPYREDLVVAVECIFTWYWLADLCAQEGIAFVLGHALYMKAIHGGKAKNDKIDAHKIAVLVRGGMLPMAYVYPREMRATRDLLRRRCHFTRKRAELLTHIQNTASQYLLPALGKIAYPGNRVGVAERFRDPEVRKSVETNLALVDEYDRLLSELELHLTQTAKVHDVNAFYRLRSVPGIGKILALVLLYEIHDIHRFPRVQDFVSYCRLVKCAKQSDGKHYGYSGTKIGNAHLKWAFSEAAVLCLRKNPVAQRYVARLAHKHGKGKALTILAHKLARAVYYMLRRGQAFEATKFFLVTAGGERPSRPENERVALAKDHDASRSGPTRHDLEGGRYLDPPEIKRRAARRRGHDRDGVTTERVGGAAARVAEER

SEQ ID NO: 111643 - protein, 343 aa, unidentified
MSITMIGLDTAKSVFQIHGVNETGKVELRRKLRRSELIAFFEKQESCTVVMEACGAAHHWARMLTGLGHTVKLIAPEAVKPFVKKGKKNDAADAAAICEAASRPNVKFVPVKNLEQQGILALHAARSLLVKQQTMLANAMRGLATEFGITVPKGMQKLDELMTLVNTDESIPKQAKQAITGLHDYGKELNEGIETFEAEIVAHARHDETARRLATIPGIGPITASLIAATVVDISLFKTARPFAAWLGLVPRQNSTGGKTRLDRITKAGNREIRKLLVLGATSMVGRADGWNSAVGAWLRDILQRRPARLVTVALANKMARIAWAVMTRKEVYRPKGGIAVAA

SEQ ID NO: 111644 - protein, 412 aa, unidentified
MEVLYRVCGGLDVHQKTVVACLRFPGPKGKRGEEVRTFGTTTRELLQLADWLSAAECTHVAMESTGVYWRPVYQILEGGVQLLLVNAQHVKMVPGRKTDIKDCQWIAQLLEHGLLRSSFVPPAPLRELRELTRYRRQLIEEHTREVNRIHKLLETANIKLGNVASDVFGASGRAMLKALIAGERDAAKLADLARGLLRKKEAQLREALMGRVTEHHVFMLRSLLDHVEFLDRQIAVFDARIEEQTRPFAAALARLDTITGVARRSAEQIVAELGDDMSRFPTAAHAASWTGICPGNNESAGKRKSGKTRKGNRWLRATLVECARGAVRARDSYLAAQYHRIARRRGDKKAIVAVGHSILVAAWHVLRDGVVYRDLGPSYFDRLNRERLIRHHTRRLAELGMAIAVAPVPIPA

SEQ ID NO: 111645 - protein, 351 aa, unidentified
MFVGIDVHKHTHAAALLDERGGELGVLTFANSPAGYRRLIGWLADRGAAPAVIGVESPGSYGRCLVAALAAAGHEVLHVPAWRTHRERHRQGPGKTDPDDALAIADVVRRKHPELSPALEPELVRALAMLELQRRRFVRDRTQAIQRLRSDWTQLDPVSEAKVLRLDRQRELRRLKRIRFGDSLTEQIAARCIRELARDIEDLNARIADLDHEIAELLVEHGNPVADLLGAGTLIAATLIAQAGDVRRFKDAAAFARFCGTAPIPCGSGQTSGRHRLHRGGNRQLNAALYRIAIVQQRHHPDAKAFLARKLREGKTPREARRALKRHLANVVYRRLLAWADTTPAMNPLLT

SEQ ID NO: 111646 - protein, 343 aa, unidentified
MQTITTIGFDIAKTVFQVHAVDAGGQVVIRRQLKRRSVLAFFQKLPPCLVGIEACGSAHHWSRELQALGHTVRLMPPAYVKPYVKRQKNDATDAEGICEAVTRTNMRFVPTKTAEQQSGLVLHRARHLFIRQQTSVINAIRAHLAEFGIVAPVGRHGVEELLNVVTDPNDKRVPDIARACLSALGDQLQRIKEQILEFDRLIRAWHRSNEMSMRLEEAPGVGPVLATALVAAVADPKSFRSGRNFSAWIGIVPKQHSSGGKNRLGNISKQGDRYLRGLFVAGALSVIRYAKIHGTKHRPWLTALLARRPTKVAAIALANKIARMVWAMMARGERYKEPVALAR

SEQ ID NO: 111647 - protein, 348 aa, unidentified
MIVGIDVHKRSHAAALVDEHGAPIATLTIPNSRAGIARLCRWLSEQSADGVAVGVENAGGYGRLVCAVLAAAGHEVLNVPSWRVKRERVHQGPGKSDPGDAVAIGQCVLRHRDKLGPALEPPLIRAIALLETHRRQSVTRRTDAIQRLRAVWAQLDPEAESATSNVATRRALRHLKEIDFGDGLAEHAAARCIHDLAREIEALNARVAELEHELADLLAAPGDPFAEVRGAGLATTVTLIAESGDVRRFRGDAAYARYGGSAPIPCGSGSTAGRHRLHRGGNRQVNACLHRIAVTQARVDPRARAFLERKMAEGKTKREARRALKRHLSDVVYRRLYAWAERALPPAT

SEQ ID NO: 111648 - protein, 345 aa, unidentified
MELHTIGIDLGKTVFHLVGLNLRGEVVVRKKFSRKQLLHFTANLQVKLIGMEACGGSHFLGRALREQGHEVRLMPAQYVKPYVKTNKSDYIDAEAIAEAVGRPKMRFVPIKSDDQLDLQSLHRVRERWVMRRTAVINQIRGLLLERGITLRQGRGHVDAALPGILEDASAMLSGALRMLLAQLKLELDHLQIRIDEADAMINKAAGENEACRRLVAIPGIGPVTATAIIAAIGNGAAFKKGRGFSAWLGIVPGEYTTGGKQKLLGISKRGNSYLRRLFVQGARAVLQQSAKQSSGLSAWLAQLTSRTHRNVAAVALANKLARMAWAVLAKNEPYRPPMLAAAATT

SEQ ID NO: 111649 - protein, 453 aa, unidentified
MDKVKKKTGVKKITQFEIIRPNVAGVDVSDNGGMMVAYPINATEVAVEEFECYTRDLHRLSQTLQSYKIESIAMESTGVYWIPLFLLLQEYGFEVYLVNANHVKNVTGRKDDEGDAEWIQKLHRCGLLSASFQPDNQTRSLRSVVRHRSSLVKTRSTYLNRMQKALELMNLKIHTVISDIDGKTGLAIIQSILSGERDAEKLADLCDPRIKAPREEIIKSLEGFWAEEHLFELSQCYRLYEFHNEMINECDKKIETILQETIQSKNNGLMPQLGILKRKRNYKTEPNVDITNYLYALNQVDIASVEGITGISEITALTIYSETGNNLDRFKNAKHFTSWLGLAPNTKISSGKIISSRVPKKRHPGGQAFRMAAMSMCNNKGPLGDFYRRIRSAAGKQKAIVALARKLATIYYQMNTTKEKYNPQSLIEYQEKWRERKIKSLEKYLNKLKGVAC

SEQ ID NO: 111650 - protein, 346 aa, unidentified
MERKLSLQWIKLEEVESIGLDVSMEKIDVCLSNHWQKQYYRIQNNSQAISQFSKELQEWWLNSNVPLVIESTGMFHLEATLKLSEDGWNVKEINPIITNQQIRCTIRWTKTDKTDSAILAELWQTKENELPTFSRDITTMSLRKKMSVLNFIDKTIINMQKSRNNYVKTMEILKVDCTWLAEFDQAIEHLKNLKQEIEKSMVKETLDEEWKRKVEIFDSIYGISTLIAIICYALFGNINFKNKKQMLAYIWLDPKLKQSWKSFSWYRLSKRWDSYIRKKLRQAAHCVTLKNCYFKSIFEREIQKWKHYTEAILTVAKKMVYIMFSLLKKNELYDENYVLNFENTNI

SEQ ID NO: 111651 - protein, 371 aa, unidentified
MKIYNLKAAPVANVKLLKDEKRPKAKQILLGADTHLRGYQVGRKVDHGAIGAVENFRSEEAFLLFVLKQLERAERVVVVYEAGPLGYSLYRKLKELAVECYVCAPDSSEQQKKRRKNNKIDARNLTSKLFNYVNGDQNALQMVRVPSEAQEQLRMASRQHDQLVEERKRLGAKGNAMLLSQGFGSWSNWWRPKAWARLSSLVPAWLLERLQVWVEVLKMLDEKICQAKVGLARGCSGPRPKGMGALSQMQLQSEVLDWHSYSNRRKIACLAGMVPSEWSTGQKERRGSITKVGVPAIRRIIVEMVWRMVLFQPQYKPVQKWQEVLRGSNPALKKKAVVAIGRQLIVDLWRLATGRVTAQELNLVMIEAAGV

SEQ ID NO: 111652 - protein, 346 aa, unidentified
MRIIGCDLHARQQTISMVDIETGEVTEKVLLHEGEAVREFYAALPKPVLVGLEATGSMYWFLRLLEELGIEYRVGHPAAIRKAETRKQKHDRRDAELIRRLLEEKRFPQIWLPTVEQRDLRTLLQHRQQLVRMRVMTQNGLQGLALSQGLRRGAKLWSQAGQQELQGLELAGFAATRREQLQQLRQELTERLRQLDQAVKEQAEQRAGARLLLSHPGVGPITALATEVFLGDARRFPNGKAVASYVGLIPSEHSSGGKQRNGRLSKQGNPLLRQLWVEAARAAARKDARLKQFYRKKLVQKGLGKAVVATARKLGIRLWILLRDQIDYTEFCRRAEQRCPHAGMPE

SEQ ID NO: 111653 - protein, 321 aa, unidentified
MKAHTSYLGIDTGKKDLHLGSTNKFLHKFDNTTAGHHAMVKHLKTLRPACIAIEASGGYERSVVEALQDAGLPIAVVQPGCVRHFAKSAKVLAKTDVIDSVVIARYAQAHRPEPTAKIPQAVRHIRALRDRREQIVQDRVREQNRMETRADRDMLRHLRQSIRRLKKQQDKLDQLIEQHIQHDGQLASKAHAMTAVTGVGDKTASTLLAHLPELGSLNRQQIAALAGLAPHPREFGNWKGRRSIYGGRSAVRKALYMAAKSAARFCPVISLFYQRLREAGKPYNVALIACARKILIHLNTLLAKLNPQTTPKSAPEGAGIT

SEQ ID NO: 111654 - protein, 430 aa, unidentified
MQTCFITLDFPVDFKEWAIIIKPDQLVYVGVDLHKQHHTAVILDCWNHKLGEIKFDNKPTAFPLLEKEVKKHTPKRMSAVYGLEDVGGYGRALAVYLTEKGCFVKEVNAKLANNRRKSHVTIQKSDSWDAECVAKVLRDELHNLPDAKPIDLYWAISQLVTQRNWQSKNLTDGVKRLHQQLGYHYPSYKKFFSEIDGKTALAFWHKYPSPNHLSGMKVEELALYLRKLSNNGLSTKKAEQILSLIADDGDTTRDFQDKRDFIVKGLVRNIRFYKREMRRGEGEIRKLTDQLGFQLESMTGIDLVTAAELVAEIGDIYRFATPDKLARFAGIAPVIVGSENKVRNYKSKQGNRVLHDIIKSLAIRQLLVTRSTKVPQNPYFHWYYEQKLAAGKTKQQAVVCIMRKLVNVIFYLMKTKKVYVIPEVSISEAG

SEQ ID NO: 111655 - protein, 414 aa, unidentified
MLKIVYRICCGMDVHKSFVVVCIASTNEQGVTTYKSKRFSTFTGDLRRCAAWLSENNCKDVCMESTGKYWIPVYNILEPTCSIVLAHPKYVKAIRGKKTDKWDAKWIADIFKHDLIAGSFIPPADIRQLRDLVRYRWKLTSFTTGEKNRAQNCLTVSNFKLDDVFSNAFGKTASAITARILENPTEKITDVSDFRTKHMKATDVEILAAVDGEMCAEQAEKLRSIRSHMDSLELCKLNLDSLILSTAEKYLSQLNLVMTAPGIQSFAAIGIISEIGVDMSVFPTSKHLCSWAGLTPQNNESAGKKKTTRISRAGAYIKPLLVQCALCTIRAKQFPEVRNRYLALKKRRGHKKAIIAIARMLLTAIYNMLKKNEPYTPELYRKGDQPPAHREVSVDEAIFILQRQGYLVTALTTS

SEQ ID NO: 111656 - protein, 346 aa, unidentified
MGKSITDLSSVTTVGLDLAKLVFQVHCVDASGRVVVAKAIKRNKLLEFFASLPRCLVGLEACGSAHHWARELIKFGHDARMMPPAYVKPYVRRQKNDATDAAAICEAVTRPSMRFVVIRSLENQAALMRHKAREMLVSQRTQLLNGPRGHLTEVGVIAAQGPRHARELAGLIEACDENIPIEVREALAELVHQLHRLDEAIARLDRTIVKIARKDETARRLMSIPGFGPITASAMAASVQDASSFAGPREFAAFLGLTPKQNSSGGNQRLGRISKMGNRDLRKLLVVGAHAVLFHRKRHTDPLRTWAKKLIEKKPFKLVAVALANKMARIAFAILRGKTTYREIPV

SEQ ID NO: 111657 - protein, 316 aa, unidentified
MTQNEAFVGIDVAKHELVIHLHPQGESWRVENTPMGRDKLVRRLRRLAAKHVLRIGFEASGGYERKLAILLESKKLTGYLLDPSRVHSFGRAEGKLAKTDPLDAALIARALAALHGDLTPYRHDPVAERIAERVRLRELMVVQVGQFGNQLENMADPAMRKIVKAQVARLKAQMLRLEAMIASLIASCPDLARREKLLRSAPGVGPIVAATLIAHMPELGSVSSREVASLAGLAPFDRQSGTSRKPGRCQRGRPAIRRALFMAALSIFNKDIPIAQLAKRLLEKGKPKKVALTATARKLLVALNAMVKHGVVFQAG

SEQ ID NO: 111658 - protein, 340 aa, unidentified
MSVTTIGVDLAKNVFHIHGVDAEGRSVLRRKTSRAGFERLMAGIPGCRVGMEAGSGSHHWARQLHAHGHDVKLMPPRYVRPYVKTNKHDAADAEACCEAVQRPGMRFVPVKTVEQQAVLMLHKVRDHLVCQRTGTINALRGHLAEFGITAATQRRGLSELIGLVENETDSGLPEDARKALLLLVEQIHAGDKQIKDLDRQIIEAAKVSEVCQRLIAVPGVGPIIATALTAHLPCPDQFTSGRHFAAWLGLTPRQHSSGGKDKILGISKRGNAYLRRQLVNGARAVVRVAPGRAGILWSWTNQLLSRRPFNVVVAAVASKLARIAWSMCAHGTIWGKPEAA

SEQ ID NO: 111659 - protein, 427 aa, unidentified
MPYKIAGIDVHKKMLHVVFSDVEVDGEYQFERRRFDTSPSQLRLLADWLLEQQVEEVAMESTAQYWKPVWGMLERYWKPICQKRKGAGTASGTLHLAQALSNRGRRGRKRDFRDAERLVKRLVAQELTLSFVPDPEQRLWRTVMRTKYQLTCNRVQLQNRLEALLEEAHIKLSSLVSDLLGASARRMLKAIADGETDAAALAALADQKLRATQEQLCDALGACTELNSVYRRLIKMVLEDLESIEKRIYQLEQEMADLLRPHQDQVERLAEVPGLGVGSAQQIIAEVGATAATFPSEDHLSSWVGACPGDEESAEVNSNRRSPKGNRHMRRILNQAANAAVKHKGSVFEILYRRYVPRMGHNQTIGVIAHKLCRLIWKILHQAARYEERGPAVSKTSKQKRTQKMIRELRKLGYRVELTTSQSPIPA

SEQ ID NO: 111660 - protein, 320 aa, unidentified
MMAQVDLVVVGIDVAKDKVDACIRSLTLRQTCPSTAQGQRKLVALLRKHKVNKAVMEASGGYEREWVRVLHQAGIEVRIVDPKRVRSFALSAGRLAKNDTIDAEMIAWFAETFSAAPGQPHDAAREELRALVKARKHLLDLQTRLKSQNEHAAPGPVQKSYARILKSLAAEIAKLEAAIAVEIKATPDFAERAEIIESVPGLAETTSATIIAGMPELGQVSNKICPALLGAAPYDDDSDHRRGERHIKGGRRWVRNAIYMPCLGAATQNNPVLKAFYHRLIAKGKEPKVALIACMRRLIVIINTMIARRQKWDPSRYALN

SEQ ID NO: 111661 - protein, 345 aa, unidentified
MHIASIGIDLGKTTFHLVALGERSKVLVRKKFSRAQLLAYTANLPSSRIGLEACAGAHFMGAALREQGHEVRLIPAQFVKPYRKSNKNDFIDGEAIAEAVTKQNMRFVPIKTQEQLDVQALHRVRDRLVQRRTALINEIRGFLLERGLTFPAQPIHLRKNLPTVMEDAEQNLTPRLRWLLDRLWQEWKQTEVDIETVTDEIARISNEDERCQRLRQIPGFGPLVSTAMVAAIGNGAAFGRGRDFAAWVGLVPRQYSTGGKAKLFGISKRGNIYLRRMLIHGARAVLFRIKYDTAGLGQWVHRLSQRAPRNKVIVAIANKLARIAWAVLSSGKDYRHQPLPQRAAA

SEQ ID NO: 111662 - protein, 404 aa, unidentified
MDRQRTVAGLDVHKDSIYLCVMGHDEAIIFQKTYGTLTPGLRQMCADMVAHGVTEAAMESTATYWVPVWNALCDSMSLKLVNPYFIKQLPGRKSDVKDAQWIAECLLKNLIKGSFVPDGIVQDMRKYNRRIFDLNDDMVYNTNKLDAALQRCGFRLSNYVTKVKGKSYRSCIAAIINGTTDQAELVKLVHGKTVNKHGREVIMAAVTADFHQADIDLIRQYKEMIDIIERQIKDCQSALTALCRKHFPTQYERLQTIPGVKERAATAIIAETGADMSHFQKSTNLVGWCGLRPRNDESNRKIKSNKITHGNKFLRKILIEIAWTASRTRNCFFSNFSYVQCTVRRKTKMKVQVAIARKILVAVWHMLSNDEDFIDVYLRGLAKEAEEHRQKQESIQRIELSMVN

SEQ ID NO: 111663 - protein, 315 aa, unidentified
MTNPSGSTVILGIDVSKEWIDAHLLPQETSWRVPNDAKELATWADQLPEGITLAVLEATGGLEVQPAIALAQTKIPTAIVNPKQIHSFGEAMGQRAKSDPIDAKLIAQFGEKIQPQPKTLPDEAQSQLKELLARRRQLMADRVAEQNRLGSMRSKEAQKSIKAHIQWLTRQIEKIDQQLDDTIKKSPLWLVKEQLLKSVPGIGPHTARTMLAVVPELGQLNRREIASLAGLAPYTRESGKWKGKRFIGGGRREIRAALYMAALSSTRRDSAFSKFYRSLRDQGKPHKVAITACMRKMLTVMNAVIRDQKPWSECV

SEQ ID NO: 111664 - protein, 345 aa, unidentified
MHIASIGIDLGKTTFHLVALGERNKILLRKKFSRTQLLAYTAKLPLSLIGLEACSGSHFLGAALREQGHQVRLIPAQFVKPYRKSNKNDFLDAEAIAEAVTKQNMRFAQLKTQEQLDWQAMHRVRDRLVQRRTALINEIRGFLLERGITFAAQPIHLRKNLPSVIEDAERNLSSRLRWLLERMWQEWKQIETEVQAITDEIERISNDDARCRQLRQIPGFGPLVSTATVAAIGNGAAFRRGRDFAAWVGVVPRQYSTGGKQKLYGISKRGNVYLRRMLIHGARSVLFRVKYDTGGFGQWVRRLAQRAPSNKVVVAIANKLARIAWAVLSSGRDYRHQPLLQLPAA

SEQ ID NO: 111665 - protein, 383 aa, unidentified
MKKTQETLRIEDSIKEAILYIAFELSNSKWKLAFSDGSRIRHKAITAGNLAQLQVEIDLAKRKFKMIEDVRVVSCYEAGRDGFWIHRYLESQGIENLVVDSASLEVNRRKRRAKTDRIDVRKLLRMLLRYWGGEKQVWSVVRVPSETDEDARHLHRGLEDLNKERTMHRNRIKGFLVLHGIKVSNPSHKRFLEQLEKLRTWDGRQVPPDLKSTIIREYERLQMVEEQIRALEREKTERLKNPDTDSLQKVVKLASLYGIGSVSSWTFVMEFFGWRQFQNRKEVGALAGLTPTPYDSGKSLREQGISKAGNQRVRALAVEIAWAWLRFQPQSKLSQWYMKRYANGGKRMRRIGIVAVARRLLIDLWRYLEYDKIPEGARLKSAT

SEQ ID NO: 111666 - protein, 362 aa, unidentified
MTESITIIAFDQHAQSVVAAVLGPHDSEPALHPLASDLPTIGRFITQVRTRGPVRCCYEAGPCGFALHRFLTAHGVDCEIIAPTLIPRRPGDRIKTDRRDARQLAVLYRAGALTPIHIPSELEEAIRDLLRCREAINADLLRARHRLSKFLLRHDRRYTQTKSAWGPRHAAWLRSLRWPLPALDQTFAAYLRGVEEIATRLAVVDDELQAYFTSEPFAEPVRRLRCFRGISDLAALTIAAELGDARRFPTAPRVMGFVGLVPSEHSSGSRRGRGAITKTGNAHLRRILLETAWHYRHHPYVGPKLRVRQRGAPPDVISRAWAAQHRLSRTYRRLTGRGRPPQIAVTAVARELVGFIWATLAS

SEQ ID NO: 111667 - protein, 343 aa, unidentified
MTKTPIAVLGIDLGKNSCSLAGLDAAGAVIIRRRMTREGTIKFVAALPACVVAMEACCGAHFLGRTFASQGHTVRLMSPEYVAPYVKAQKTDNRDAEAIAEAATRPTMRLVTLKSEAQLDLQVLHRARERLVAGRTRLINQLRAMLLERGVILPKRRAPLIKRLDELMAGELPISQRARQLLQDLRDEWMEQDRRIKAYDDELMALTREDGAARRLATIPGIGVVNATALLAAVGDASAFAKGRDLAAWLGLTPRQHSTGGKTKLLGISKRGNKYLRTQLIHGARAAMAHFANKATPVGTWVRQLLTRAHPNVVVVALAAKLARIAWAVLRHGSNYDHRTATV

SEQ ID NO: 111668 - protein, 315 aa, unidentified
MTNLKKSKTRINVGVDVGKEYLDIYIYEKEIHWQEENTEQGVKKILNRLTRYDVERLVMEATGRYEFNIAQAAHVKQIPVCIVKPLLIRKFAGAMDQLAKTDKIDARVIALFAVKMKPAITPRKSKNLIAIKDLIARRRQLMGLRTQELNRLKIMGKAIEVSCKRILRCLDAEIKRMEDKLSKHVEDESEWAAKKLLLKTVPGVGDTLIYTLLGDLPELGELNKNQVAALVGVAPVNKDSGRLRGKRRVQGGRANVRTVLYMATLSATQCNPVIKAFYKRLVAQGKHKKVAITACMRKFITILNAMVRDQVEWAL

SEQ ID NO: 111669 - protein, 339 aa, unidentified
MKVSTLGIDLAKNVFQLHGVGCNGQTVLKKKLTRDKFLPFLMQLEPCLIGMEACASSHHFARVLRQYGHEVKLIPPQYVKPYVKTNKTDAADAEAICEAVARPNMRFVQIKTAEQQAILVLHTERNILIRERTACANSMRAILAEFGIIMPRTLSQLYKKIPEILEEYDNELSPFVRCSVARQLEHLQGVEDQITLIEQELSRWAKTQPACQRVMKVPGVGLMTATYLVASVGNGQQFHSAKQSAAWLGLVPREFSSGGKQRLGRISKRGDRYFRYLLVHGARAVAAVIERHKDNMPWLYRLLNKKAYNVAVVAQANKTARILWSMLVHHTEYRTLSAV

SEQ ID NO: 111670 - protein, 436 aa, unidentified
MTHYYFGGDVSKGYCDFVILDQNKKIVEPNFQLDDTFEGHLRLHQVLTTFFSTHPNCQLLAAVESTGSYENNWIQCLLNYASEFPIKVARLNPFAVNLNSRADMKRNRTDKISAKDVAEYLIVHPEKIIYIKEMPAETIKEQYDYIELLKKQKTQLLNRLGIDLYKANPQLLVYCRNGIPRWILNLLQLYPTAKHLAAASSEALQTIPFISTRKAAKIIAQAKKSIASSLDQITAERIRELATDILKKREQIIAHKNKLISNKKMFPKQVKTLTSFKGIGIYSAVGLLIHFDDIERFANCKKISSYFGVHPIYRQSGDGSAGFHMSKQGDAAVRNILYMIALSAIVNNPLIKEVYQRHLMRGKAPLFAMGVCMHKILRIVYAMLKNNTPFDPAIDRRNQEKQYHATARKKQSPDRRYQHNDEMAPISRRQAKKRKE

SEQ ID NO: 111671 - protein, 361 aa, unidentified
MSSLHATVADFYRYVVGVDTHAATHSYAIIAAPNGALIDQASFPTAPAGLRRARDWIGRRTDGDLDGVLISAEGTGSYGAVLGDVLADAGYRVVEAPMPRRDRGRGKTDALDAVLAARSTLVVGLSELRDRRAGEVHAALQVLCGARDQLNADRLRCINMLTALLRAHDLGLDARRALTSQQIATVAGWRRREESLGAGTARAEAVRLAKRVVVLDEELASNRAAITALVDAQAPELLDLPGVGAITAAVVLTVWSHPGRIRSEAAFAQIAGTCPIPASSGNTVRHRLNRGGDRRLNRALNTIVLTRMRTDPVTRAYIERRLAEGKTTKEIRRCLMRYVGRQIFRTLAAAHPAPDVLVSAA

SEQ ID NO: 111672 - protein, 371 aa, unidentified
MPESSKTLYVGLDVHKESIAVAYAAEERGSEIVALGSIGPRQCDIDKLIRKLQSKGMRLVFVYEAGPCGYWLYRYFIRQGLSCHVVAPSLIPRKPGDRVKTDRRDAATLTRLMRSGDLTPIYVPRVEDEALRDLSRGREDALRDLKASKQRLKAFLLRQDIRYEGRATWTAAHRRWLAEVVCPTPAQQIVFQEYLRAVSEETERLERLERELHEAVKGWRLYPVVEAVQALRGIDLTGATILIAELGDLTRFDTPRKLMSYLGLTPSEYSSGERRRLGGITKAGNGRARRALVEGAWAYRYPAKVSRHLQLRLEHQPAAIQAISWKAQVRLCKRYRQLSARGKHVNQVVVAIAREMAAFAWAIARIVPVTA

SEQ ID NO: 111673 - protein, 366 aa, unidentified
MKKTSTVQALKSKLFKEQKLTIGLDLGDRWSFYCVLDEAGQIILEQKLPTTPEAMKQTFGKIPRSLIALETGTHSPWVSRVLTELGHEVIVAHAQKVQWITKSNRKDDRHDARTLARLARVDPQLLGPVRHRSAKAQIHLTVIRARAELVSARTALVNAARGLVKSYGQRLPKCGTYQVNEKLAEGLSAELREVLVPLFREIESLNERVKEYDERMEKIAKEVYPEVSLLKQVKGVGTQIALSYVLTIEDPYRFPKSREVGCFLGLRPGRRNSGESEPQKGISKEGDRYLRTMMVQGAHYILGPFGEDSDLRRWGLKLAERGGKNAKKRAVVAVARKLAVLLHRLWVGGEVYEPLRNSQKAMREVA

SEQ ID NO: 111674 - protein, 463 aa, unidentified
MARNNKGKKHKKPVRSLKAIQPDAAGIDLGSREHWVAGPPLQDNTPNVERFGTTTPELLRLADWLKEQKVKTVAMESTGVYWIPLFEILDSRGFEVVLVNARQVSHVPGRKTDMLDCQWLQLLHACGLLRGSFRPSDDICRLRSLFRERNTMIDQRSDWIRRIQKSLDQMNICVHHAVSDITGATGMAIIRAIVDGERDPRTLAQLRDRRCKKSEDQITDELTGNWRPEHLFNLRQALKMYDQFYEIVTEYDAEIFAYIKTLQPGVDDDQCAPPPASKSKARNIAKKGQEPMRQTLYQLTGFDLTTIDGIGVDTAAVVISELGLDFSAFPDEGHFVSYLRLAPNLSISAGKKVPSKLKGTTTSRVATALRMAALALRNSKTALGAFSRRISSRKGASVAVFATARKLAQIIYRLVCYGQAYIDIGSQAYEAQFNNRRLKYYTIALKDMGYKVKPLAAAQANAT

SEQ ID NO: 111675 - protein, 352 aa, unidentified
MEMVSGLDLHRSQITFRTVDLRTGEVQRGKIYPGAREAVREWLERLEPGTDAHFALEGTTGWRFVVEEIEGRGFTAHLADPAELSERRGPKRRAKTDHADCELMVNLLLEGRLPGSWIPPAHILELRALVRLRKTLVDQRIEWQQRLQAQLFHQGVVPGLRLRNPSDRRRLAGMEMSPAGRQTMQTGLIMLDDFDAQLGPLSAQLVALAKTQPGCRALESQLFGVGWLTAVAIVAELGECRRFHSADQAVRSSGLDITVHESNGRRPGGHLARQGPAVLRWALFEAAQCAARRSSPDHAYYLKVRDHIDHNRACLSVARKLCRRACHILKDLGDAAMAPPKPPSVRRESSAA

SEQ ID NO: 111676 - protein, 351 aa, unidentified
MRIIGCDFHPSWQQVAWLDAETGETGESKLVNGDGEAEQWYRSLTDPALVGVEACGNSQWFVEMLQQLGHEVWVGDAAQIRASYVRKQKTDKRDAAHILKLLVENRFPKLWMPSAEQRDVRQLLIHRHHLVEMRTRVKNGLQHLAMNRGMQKKNRLWSAVGQKALRELPLQGWAERRRQDLLSLLKSLDEQVGHLDQAVEEEAQRDKMAQLLRTQPGVGPITALAFVVTIGDVSRFRRGKQVASYLGLIPRERSSGGRQRLGAISKQGNRFVRTLLVEAVHNVTRLDDGFRKTYQQRCHRMAKGVAKVAAARKLAVRLYWMLRTNTAYPEIVRIENSPRVPLVSPSRRTRS

SEQ ID NO: 111677 - protein, 389 aa, unidentified
MKIFVGIDIAKLNHFAAAISSDGEILIEPFKFTNDADGFQLLVSKLESFDKNSIIIGLESTAHYGDNLVRYLVAEFYQVCVLNPIKTCQMRKNNVRKTKTDKVDTFVIAKTLMMQDDLRFITFFDLDMMDLKALGRFRQKTIKQRTRLKIQLTTYVDQVFPKIQYFFKSGLHQHAVYALLKEAPSPKEIASMHMTHLANLLKVNSHGHFTKEQAKELRVLAQKSVGANDSAISIQITQTIQQIELLDSQSEKIEAEMTDIMRFNDSVIMTIPGIGYINGGMILGEIGDIHRFSNPNKLLAFAGLDPSVYQSGNFQAKTTRMSKRGSRVLRYALVNAAWNVVRNNATFEAYYNAKRAEGRSHYNALGHCAGKLVRVIRKMLTDEVDFNLE

SEQ ID NO: 111678 - protein, 391 aa, unidentified
MTILVGIDVAKDKHDCFIMNSEGEVLAKPFTILNNKEGFDFLYEKIQSVSSSDKIKVGLEATGHYSYNIIGFLLNKGLATFILNPLHTNLYRKSLSLRKTKTDKIDSKTIAMMLLSDVSLKSYSDISYHNEDLKSLTRYRFSKVEERAKLKTSLSRLAQILFPELEKLVPTLHMTSIYQLLEEFPSASAIASVHLTMLTNLLSKASKGHYDRETAIKIRDAAKNSIGSNMPAKSLELKHTIKLIRALTIDIGEIEAEISKMMDKIASPITTIPGIGRNMGAMIISEIGDFSRFSSPDKILAYAGFSPSIYQSGKLDNCYAHMEKRGSRYLRYALFHATKLVCHWDKTFADYLAKKRAEGKHYYVAISHAVKKLVRVIFHIEKTKQAFLKAS

SEQ ID NO: 111679 - protein, 403 aa, unidentified
MDVHKSFVVACIATTNERGVTTYKSKRFSTFTGDLRRCAAWLAENNCKDVCMESTGKYWIPLYNILERTCNIVLAHPKYVKAIRGKKTDKRDAKWIADIFKHDLVTGSFIPPADIRQLRDLVRYRWKLTSFTTGEKNRAQNCLTVSNFKLDDVFSDVFGKAAFAITTRILNNPAEKITDVSNFRTKGMKATDEQVLAAVDGAMCEEQAEKLRIIRSHMDSLHLCNLNLESLILATAEKYLPQLNLVMTAPGIQSFAAIGIISEIGVDMSVFPTSKHLCSWAGLTPQNNESAGKKKTTRISRAGAYIKPLLVQCALCAIRAKQFPEVRNRYLALKKRRGHKKAIIAIARILLTAIYNMLKKNEPYNPELYRKGDRPPTHREVSVGEAIFILQRQGYLVTAPPTP

SEQ ID NO: 111680 - protein, 429 aa, unidentified
MKTTQMIDSVSSATPFVAWIGLDWGDKEHAFCLSCPDSPTIQSGKFRHSAETLHGWLQDLAQRFGGRPVALALESHQGALLHVLTQYPWLTIFPVNPVTSARFRTAFVPSGAKDDGPDARILLDLLRRHQDKIRPLDWEDENTRKLSGLVQARRDTVDRRTQAVNQLTGLLKTYYPQTLELVGDDLSAPLALQFLRRWPDLISLKAARLSTLRHFYYGNHVRRPELVEKRLQRIQQSVALTTDDAVLSVCLLQLKLLLELIGSFNKHIARFEEAIETAFASQADAVLFKELPGAGPALAPRLAVAFGSDRTRYPDAASFQKYAGLAPVREKSGGQLWTHWRWQAPVFLRQTLVEWAGQTVVWSPWAKNYYQRMKAKGKKHHVILRALAFKWSRILWKCWFTRTPYNENIYLKSLTRKKSPNLPPTAALV

SEQ ID NO: 111681 - protein, 338 aa, unidentified
MSLYCGIDLHSNNCYLAVLDEQLRPVLGRRTPNSLETILAALAPHQEQIAAVAVESTFNWYWLVDGLLDAGYPVKLVNTSAVRQYEGLKYLDDRHDARWLARLLQLGILPTGYIYPKQQRALRDLLRRRAFLVRQRTANLLSIKNLYSRQTGAQVPTKDLKRLSAEQVAEQFTDPWLVQAITCGVNVAEALQTEIVGLEKTILEQARQCPQYALLESIPGIGKTLAMTILYETGSLSRFADAGHFCSYCRCVPSRHLSNGKVKGKGNTRNGNPYLSWAFIEAAHFAIRFEPLAKKYYERKKARSCPLVALRAVAHKMARACFYVMRDQVPFQAAQAFG

SEQ ID NO: 111682 - protein, 347 aa, unidentified
MDKPETTPTATVFCGIDVSAATLAAAVIEQGQPLQQREFANRASGHDALIAWLGKRKAQVRVSLEATGTYSLDLALALEAADGIEVAVLNPKMVNRFAQTLRRSKTDAADAQVLAEYSQRMPFMAWQPPSLNGLRLRAVGRHIAALVAQHTREQNRLHAVAGSQAASRCVLQDLKRSLVSLQQRIVKMRRAARELIRADAQIEQRFRLLTSMPGIAETSAVQILGELVLLAPQLTVRQWVAHSGLDPVHQDSGTSVHKRSRISRCGNRHLRRALYMPALSAVRWDPHMKAFYEALQLRHKTKLQAIIAVARKLLHAIYGIFKCRTPYDGCKLFPQLTLTTELQSASR

SEQ ID NO: 111683 - protein, 465 aa, unidentified
MAARKQKRMSAQVVEDEDYQLRYEVAAGIDVAKDSAVVCVRMPPAKGRKHRTSHLQTVPATVPAIGELAAELKAAGVQMVSMEATSDYWRVWFAVLEEAGLAVQLVSSSQARNLPGRPKTDKEDARWIARLTEMGMLRSSFVPPPEIRALRVYTRHIWDLTADRTRYWQRLEKLLEDALCKLTSVVSRLAGHQTARAVIEAMIAGERDPRVLAALGQGRMRNEKLPALAEALSGMRFGPQHAHAAASLLRSIDLLDAELRDLQERVTAHLAAIPGSWGVDAGGVTGPGAGQAADAVALPAAERLDEIPGLGREAAMALIAEIGLDMSRFPTPQALVSWAGLTPTARQSGPRKGRGKKGHGNAYAKRIAVLAAYAAANTDTFLGERFRRLSSRPGGGGRKKAGCAVGRSILIIVWHLLNDPAARYRDLGPDWHARHTDRSRKARNARRQLEALGYDVIITLREDAA

SEQ ID NO: 111684 - protein, 373 aa, unidentified
MGESSKTTTLYVGLDVHKDSIAVAYAPEDRGAEVVSLGAIGTRQCDIDTLIRKLQSKGATLVFVYEAGPCGYWLYRYLGRKGLACHVVAPSLIPRKPGDRVKTDRRDAVMLARLMRSGDLTSIYVPGIEDEALRDLSRGREDAMQDLKRSKRRLKSFLLRQDIRYEGRASWNAAHLRWLSEVVCPTPPQQIVFQEYVRAVTEQQDRLHRLERELHEAVKGWRLYPVVEAIQALRGVELTGAVILITELGDLTRFDNPRQLMSYLGLTPSEYSSGARRRQGGITKAGNSHARRALVEGAWAYRYPAKVSRHLQLRLEKLPAEVQAIGWKAQVRLCRRYRQLTARGKHVNQVVVAIAREMAAFAWAIARLVPLAS

SEQ ID NO: 111685 - protein, 339 aa, unidentified
MNSVGIDLHRSRSHVAVIDADGELSLSRRIANDPDVFLELLGGLSGETRIAVEATYGWEWLAELLEDAGYELHLAHPLRTKAIAAARVKTDAVDARTLAQLLRADLLPEAYVAPRELRDLRDLLRQRVVLTQMRTALKNRVHALIARQGIAHGHADLFGSAGQSTLARLPLRPEPRRRLEVLLRLITDFDREIDALASEIDRLAKQDARVEVLTQIRGIGRYIAMLIIAEVGEVERFPSARHLCAWAGLTPTVRSSDGKARLGHISRLGSSTLRWALVEAAQHTQRGGGPLRQSFERIAKRRGRQVAKVAIARKLLTLCYYGLRDGEIRCLNVPDRRSR

SEQ ID NO: 111686 - protein, 284 aa, unidentified
MPLYSGIDLHANNSVVVVLNEQDQVISQRRLANHLPEILESLAPYQADMIGVVVESTYNWYWLVDGLMAAGYRVHLANPAAMQQYSGLKYTNDHSDARWLAHLLRLGVLPEGYIYPQAERAVRDLLRKRAHLVRQHTAQVLSVQNLMVRNTGVRFGTKRIDEFTPSELASLLPNAEQVLAVTSSLAVLHCLRQQIKTLEKAVQQRLKHTPAYAQLQTVDGIGTILAQTIVLETGDMGRFPTVGNYASYCRCVGSTKISNGKRKGQGNVKKGIHLTRDTFMTSRT

SEQ ID NO: 111687 - protein, 369 aa, unidentified
MDDITFVGLDVHKATVCIAVAEGGRGGEVRQLGIFENRLEILSKVASRLSKGGRRLSFCYEAGPCGYGLHRLLTGYGHECIVVAPSLIPMKAGDRVKTDRRDALMLAKLHRAGELTAIWIPDAAHEAMRDLVRARATAVRALAKARQHLQGFLLRHERIYHGARAWTLAYRRWLTTVRFEHPAQQIVLQDYIHAVQEAETRRDRLTQQIEELLPNWSMAPVVAALQSMRGVALVVAVTVVAEVGDFRRFANPRQLMAYLGLVPSEHSSGSSVRRGGITKAGNALARRVLIEGAWTYRMSARVSRKLHDRLEGLPAAVRDIAWKAQLRLCSRYRRLAATGWPIVVVTSAIAREMVGFIWAIARLAQPAPV

SEQ ID NO: 111688 - protein, 370 aa, unidentified
MRDGSTLYIGLDVHKDSIAVAYATTDGPTDPVHVGAMGTRQCDIDALVRKMQSKSAQLAFVYEAGPCGYWLYRYLTGKGLTCLVVAPSLIPRKPGDRVKTDKRDAVTLARLARSGDLTPVYVPAVPDEAIRDLARAREDALHDLNAARFRLKALLLRNDIRYVGRANWGADHVRWLARLVLPTPAQQIVFQEYVRTVTERTELLQRLEAELLEQAKPWRLYPVVEALQALRGVQFTVAITTIAELGDLTRFDNPRQLMSYLGLTPSEYSSGDRRRLGGITKAGNGHARRVLIEAAKAYRHRAKVSEQIQARQQHLPAPVRDIAWRAQVRLCGRYRKLLARGKHPNTIAAAVARELAAFMWAIARTQALSA

SEQ ID NO: 111689 - protein, 428 aa, unidentified
MNDVIRYDLFCQFRKTIRGSTEHLLVGIDIAKDKHHAFFGTATGKTLWRRLLFNNDLFGYQRLIEQVDLLMKQHQLKKTAFGIEPTGNYHKPLAHWLITKGHMVVLVSGKAVSDNRQLLDGRWDKNDSKDSANVADLISQGKCQFYEQPDKQIVAVRNLLSVRKRLKKQEHSLRMQMRNGLLAKYFPEMDKYWRQNIEENLAILRGYLDPRKIAATDFEQFVLDVTSTSRGGRQLRRLQSIYDAAKHSIGLPVDSSATFEAKLLVERFNSVREQIAHTMKQISERCRGLYGYRLLQTIPGFGPYIAALVLATVGNPHRFSSHGKVLRLAGLDLNAKRSGKTSDAGVPKISKKGDADLRYGLYQAALIASYHNKHFARLYSRMLEHRHAERGIKTKARVKLAAKMLTVAWAMLKNNEPFNPNALISRVR

SEQ ID NO: 111690 - protein, 393 aa, unidentified
MICVGIDVAKDKYDCFILSSEGEVLADVFTIPNNAEGFDTLLQTIRRCARPEDKIKVGLEATGHYSYNILGFLLNEGLDTYVINPLHTNLYRKSLSLRKTKTDRVDARTIAAMLMSDVDLKSYTDTAYHNEELKSLTRYRFDKVRERAKLKQSVSRLVTILFPELEKLVSTLHTASVYALLSEFPGAKQVAGAHLTHLKAVLYDASRGRYGRDMATTFRDAARCSVGSVMPAKSLELRHTIRLIHELDAEIEDIEAAIQSMMDEIQSPITTIPGMGVRMGAMILAEIGDFSLFDSPDKILAYAGMSPSTYQSGQLSLSGAYSHMEKRGSRYLRYALYNATKYVCLWNPTFAAYLAKKRAEGKHYNVALSHATKKLVRLIYALEKSKRPYSTAA

SEQ ID NO: 111691 - protein, 400 aa, unidentified
MAVMIGIDPHKGSHTAVAVGAAGEPLGKLRVRACPDQAAKLVAWAQAWPERTWAVEGARGLGRLLAQQLVAAGERVLDVQPKLAARVRLLEAGDTNKTDPDDARPVAVAALRSKGRQEVTADGHAVVLKVRARRHRDLSRARNQVVCRLHAVLCELIPGGVPDEITAGQAARILEQVAPAGAVAQARCELAAELLAGIRHLDAQRREVKKKLAAAVTASGTSLTEVSGAGPVIAATVIGDVITVARFPSRDHFAAYNGTAPVEVSSGQRKIHRLSLRGNRRLNHAVHMAAITQIRHKHSDGRAYYQRKLAEGKTHKEALRCLKRRISDAIYARLRADARKAGPGGQPGNDTGSSVTGSHPGHRLFGQATSGPEPSLRAPATFTQATPAPEPSAKKIQRAT

SEQ ID NO: 111692 - protein, 400 aa, unidentified
MQQRLEPRRVLRRGARVEQHAIGGADDVDGPAPSIQVQGPERSIFDQHRKRSHVMRQIVRIGLDIAKRWFQVHAVDEAGKEILNRKLPRDKVLGFLGSLPACDVALEACSSSHHWGREIGQLGHRVRLISPNYVKPFVKRGKSDAHDARAICEAASRPDMRFVRVKTEKQQAALMQHTSRQLLIDQRTAVANSLRGQLAEFGVIEKQGIENLADLVRRLDEDDSDIAHIPETALAVMKILADQLRAVEANLAMLDEQIEAWRQSSASAQALKTIPGVGTLISAALAAYVPDPSAFSSGRDFAAWLGLVPRQNSSGGKDRLGRITKQGNPYLRRLLVLGATASLRWLNKRTDPLAMWTRQLLQRRPARLVTVALANKLARIAWAIMTTGELYRREALSVVA

SEQ ID NO: 111693 - protein, 350 aa, unidentified
MEHHAGLDVSLKETSVCIVDGAGKIIRETRVASEPEALVGYFSSLEIKVVRIGLEAGPLSQWLYAALTQAGFEVVLLETRHVKAALSAMTVKTDRRDARGIAQLLRMGWYRPVHCKTLPAQEVRAIITARKTLLGKLIDIELSMRGILRGFGLKVGSVTRKSFEIRVRELMAGQVTLTTIMEGLLNARATLVAEVTKLHRELLAIARADEVCRRLMTVPGVGALTALTFKTAIDDPTRIAKSRDVGPLFGLTPGRYQSGETDIIGKITKVGDVMVRTALFEAATVMLTRTTKTSRLRAWALDLVKRRGTKRAIVALARKLGVILHRIWVDGSTFRCAKEGAAMPALITAK

SEQ ID NO: 111694 - protein, 366 aa, unidentified
MKEQNNRSEFTIGLDLGERRHRFCVLDEAGEVVEQGSLSNERVALARLTQRYRGALVVMEAGTHSPWISRYLKELGSEVIVSNPRKVRAIYQHERKSDQRDGQMLARLGRMDRALLYPVRHSSEQAQQDLLRIKLRDSLVRARVGLINSVRFSLKSLGYAVSNPSRERFHKVAMERLPERMQQMVAPSVQALAELSARIKVLEREINVVARTKYPQTLWLQQVPGVGALTALYFVLKIEDPQRFENVRDVGAYVGLCPRRDQSGQSDPQLRISKRGDAYLRRLLVSAAQYILGPFGPKSALRAYGLMLAADGSARAKKRAVVAVARKLAVLLLSLWKNRSHYEAFPHWQTIEDKRSGTIAIHRVEA

SEQ ID NO: 111695 - protein, 422 aa, unidentified
MKSRAYRAVDVNGVDVGAWLRERDESLVHAGLDIGKEFIFCTLRWSGDDFDRPWRARNPSDVGRLAELLREVGRGRRLVVALEPTGTYGDALRQALERKEVPVHRVSPKNASDYAEVFDGVPSQHDGKDAAVVAELAAQGRCWPWPLPKPTETEQELAYHVRWMDDQRRQMMVWCGRVEALLSRHWPEATSIVPLTSGTLLRCLAKYGGPGGLAAATDALARVRKSGGRSVSAEKAQALVVSAGATVGVAVGRWEEERLRRYAQEIQNCRREMQSSRRRLRALTRGHEVIEAMGSVVGVPTACVLWTELGDPRLYSCGSAYRKGMGLNLAERSSGKWQGKLKISKRGSSKVRRWLYMAALRWLKQEPVRSWYLRQKAARRGEGKAAVVGVMRKLALALHRVGGRGERFDPNQLYQSLTQTVK

SEQ ID NO: 111696 - protein, 319 aa, unidentified
MPGTFIGVDVSQDHLDGYVRPAALRRRFANTADGIAELIAWVRPHNAERIVFESTGPYQKAAVGALLAQGLPAVVVNARQVRDFAKAMNYLAKTDKIDAAVIAHFAAVATTTVRPLEAQEIRDLRELYDRRGQLVHMLAMEKNQRHSASVGQASARVLKSIDQHIAYLEARVRELEERMDQLVEGCAAFRARDEILQTITGIGPQVSRTMLAYLPELGTTTRQRITALVGLAPFNDDSGDHTGQRHIRGGRSKVRRGLYQAAVAAIRHCPRMRAVYAALKARGKASRVALIAVARKILVLANALIRDMVPYKAPANSVC

SEQ ID NO: 111697 - protein, 443 aa, unidentified
MSEEVRHTSEPEFAALVAIDWADKKHVWRLEVIGTGQRERGELEHTPEAIEAWASHLAERFSGRAIAVGLEQSRGSLLYTLTKYAHLVLYPIHPTTLARFRAALFPSGAKDDPMDADLLLELLLHHRGFLRPLQPDTLETRRLQFLVEQRRQLVNEKTRQTNRLTARLKMYYPQILQWFEEVDSPMVSALLLRWPTLQKLQRARPDTLRKFFHQHNCRGAQRIEQRLEQIGQAIPATHDAAVVETCVVAVQLLARLIATLRRGIAELDRRIEKVAASHPDFALFDSLPGAGKVMAPRLIVAFGTQRERYSSAKEIHAYSGIAPVLERSGKSTWTHFRWTCPKFLRQTFHEWAGHSLSKSHWARLYYQQQRAKGKAHHAVIRALAFKWIRIVFRCWQNRTPYDEQIYLRALQQRRSPLAATESPTVNLQWIKSGGFWKLSTDPS

SEQ ID NO: 111698 - protein, 402 aa, unidentified
MKTTGGEYCAEGSATVVEEVVLGVDTHLDFHVAMVLDHLGRRLGRRLGESKVPTTTGGYRSLLSWAEGFGPVRCAGVEGTGSYGAGLARYLKSTGITVMEVERPKRRHLKRNGKSDPKDAEAAARAVLAGEAAGEPKSAEGRVEMIRVLRAARCSALKARSQAANQLQALRVTAPERLQRRLCGLATNELVATAARFRPGNDLDGVETATRFALRSMARRHEALSEEIAELDAQLDRLVAEVAPGLISLPAIGTHHAATLLVVAGDNPERLGSEASFASLCGVSPVEASSAKVVRHRLNRGGNRDANRALHMICVVRMGSDRRTRSYVARRTAEGKSKREIIRCLKRYIAREVYRVLLSSPGAQGLGMDGRDRAPPQEAGSRRGDDGVGEGVQQRGNPHRFG

SEQ ID NO: 111699 - protein, 330 aa, unidentified
MTNAAGQDRSATVDFVGVDMARDAFVWAVHGVAQTHSCANDSAGFQALLDGLQGRNVGLIVIEATGGFERALAEFLLRHGLPVAVVNPRAAREFARSMGHLAKTDAIDALALAHYAQTLAGKADQSTVRLALPSAEVQALQALVARRAQLLSMRTAEKNRLGATVRVLQPSIRAVIKTLEREIAKLDKSIDALLSKHFKAQAKQFDDIKGVGVTTCATMLAFMPELGKVANGRAAKLAGLAPLNRDSGKLRGKRHVWGGRSIVRSTLHMAMLSAVRYNPVIKAFYDRLIAAGKPKKVALTACSHKLMRILNAMARTGKPWNPQLHGITTA

SEQ ID NO: 111700 - protein, 348 aa, unidentified
MIIIGVDFHPEFQQIASVDTDTGEIQEKRLAHREDAETFYRALAGQKVRVGMEASGHARWFERLLAELQLELWIGDAAVIRTKRVRKQKTDRQDAQLILQLMLEDRFPQIWVPSWENRDLRQLLWHRHRMVQARTRIMNQLQAVALNEGLRCKKRLWREHGREQLESFRLAPWASRRRLDLLELMDRLNPTIAELSQAIEQEVEKCPEAQRLRTHPGVGALTALAFVLIIGKAERFQCGKQVASYLGLVPLEDSSGNRRRLGHITKQGSSILRFLLVEAAQVTVRSLPEWRSKYLHLMMRRGRKIAKVAMARRLAVRLFWMMRQGWDYQQWVKFGSHAGQPGNRHGAQ

SEQ ID NO: 111701 - protein, 407 aa, unidentified
MNPVIGLDVAKGESQVQAYLERKKPYKKSFKVKHDLDGLASLLDFIKELEEISGERPPLVMESTGHYHTPIVQYFEDRGYLVIIVNPLISYKAKSSSLRKVKTDIIDANHLCELYYKEDLEPYKKRGIQLANLRNLTRQHDNITGMFVQTKLQFQAVLDQVFPEYSNVFGDLYSDVSLKILHAFPTSEDILKANNEVLATKIKEFCNSRSLQWANKQAEKLMAAAAQNPFQKALYSSLALSLDMYINMLFEYKKHLSMLENEIDALSKSIEESKIIRSIPGIGEKIAATIVSEIGEIERFNHPKKLVAFAGLDPSVFESGTFKGTYNRITKRGSSRLRQALYMAVKCAIRDCRKQKTTNEILPRNKKLRAFYDKKREEGKPFRVAVIACANKLLHWIYALLKSKTSF

SEQ ID NO: 111702 - protein, 417 aa, unidentified
MIRKVMEVIHQCVGGLDVHKKTVMACRRRLLEDGQVESETLEFGTTTLELRALSKWLSEWSCTQVAMESTGVLWIPVWNVLEADFKLLLTNARQLKKVPGRKRDVIDAEWIAQLMQCGLLKGSFVPSREVRHWRTLTRQRMKLNDQHTSVVNRMHKVLQQGNIKLSSVATDVMGVSGRAMILAMIEGESDAETLAKLAKGRLKSKHEQLVESLEGRLNQDDRWVMKELWEQMEYLEEEIARYDDQIKEKMSAYEESLERLMTIDLIERRSAENILAEIGPDMSFFPSDDNLVSWAGLCPGSEESAKKNRSGKTPKGDQWLRRALVEPAWGAARRKDGYLGAMYRGIAVRRGEKRAVIAVARTILQAAWHILSKGAEYNELGGDYFDRQNSEQTKNKLIRRLERLGYEVEIKPKQATV

SEQ ID NO: 111703 - protein, 343 aa, unidentified
MDYYAGIDVSLELSSVCVVDSLGKIVRETKVASEPEALLQHFADLGLPVIRVGLEAGPLSQWLREGLVDAGFEVVLLETRHVKAALSAMPVKTDRKDARGIAQLLRMGWYRPVHAKSADAQEVRALLVGRKLLQAKLLDVELSIRGILRGYGLKVGEVSRGRFEARIRELIEGHDMLATVIGAILQARAVLWNEFTRLHRAMLKIARVDPVCQRLMSAPGVGALVALTYRSAVDNPGRFAKSRTVGAYFGLTPKKYQSGETDIDGGISKVGDGMVRTALYEAAHIMLTRATRFSALKRWAMDVAKRRGMKRAKVALARKLATVLHRMWADVSQFRWGKDTVTA

SEQ ID NO: 111704 - protein, 425 aa, unidentified
MTEKTAVQFAAWVGIDWADRKHDICLQPGSEGKRELLVLEHRPEAIDEWANALRVRFAKQPIAVCLEQRKGALITALRKYEHLVLFPVNPRLLAGLRRAFSPSGAKDDPSDAEIALDILLQHRDKLQAWAPEDARTRQIQALVETRRRVVGQRVRTSNRLSANLKGYFPQALTCFDGFDTVLACDFLTRWPSLGEAKRAREETLRAFFLTHNVRGQALIAERIARLKNAMALTSDAGVILPALLATRTLVAELRTLIGGIAEYDTAIANAFKAHPDAFIFASLPGAGPTFAPRLLAAFGRDRARFASVRAMQEYFGIAPVTERSGRSTWVHWRWSCPKFLRQSIVEWAGMSIRYSCWANAYYRQQREKGKKHHAAIRALAFKWLRIIFRCWKDRRPYDEAKYLLALQRRHSPLLQYIAEPLTKAT

SEQ ID NO: 111705 - protein, 429 aa, unidentified
MSYRIAGIDVHKKMLAVVVSDVEVDGEFRFERRMFGSNPEQLRTLAAWLLEQEVEEVVMESTAQYWKPVWETLERYWKPLREKREGASRKSGTLHLALAQSNRGRRGRKRDFPDAERLVKRLVARELTLSFVPDAEQRLWRTVTRRKYQLTRDRVRLQNQLESLLEEAHIKLSSLVSDMLGASAQRMLKALADGETNPAALAALADRKLRATPEQLCDALGACTDLKPVYRRLLKMALEQLQFLEQQIGQLDQEMASLLSPHQDAVERLAEVPGLGVDSAQQIIAEVGPTAATFPSEKCLSSWVGACPGDDESAGVNYSHRSPKGNRHMRRVLNQCANAAARTKGSIFEIVYRRSVPRLGHNQAIGAIAHRQCRLIWLILHQGVRYEERGPAVTKQSKQNRTARMIRQLRSLGYRIEQTNPQPSQAQAQ

SEQ ID NO: 111706 - protein, 350 aa, unidentified
MGEVSTIGVDIAKSVFQIHGVDAAGMVVIRKRVGRAKVLEFFAGLPPCLVGMEACATAHQWARELKKFGHDTRLMPPTYVKAYVKRGKNDAADAAAICEAVTRPSMRFVPIKSVEQQSALMLHRTRDLLIRQRTQLINALRAHLAELGLVAAKGHEGLHQLVTAVAESSDERLPSNARFACQAIVAQLSAVQTQINGIDTRITQAHRANADSKRLDAIPGFGVILSTAVVATMTDPKAFKTGREFAAWIGLVPRQNSTGGKERLGSISKQGDRYLRRLLVLGAISIVGTARTRPDKYPWVTELLGRRPAKVVAVCSREASGAGAIGCASLASSSMRAPVHTCGRIGSTAR

SEQ ID NO: 111707 - protein, 423 aa, unidentified
MENTAARKRKQVPEGYLIIGIDPHKKRHAAVAITQDFTTRDKFKFDNTREGLEFLLRRARMEMVKSGCRGVMFAIETGGHYWRNIAYYLEERGLPFRFINQFTLKRRREGKDLNRRKNDYRDSEVAAQLLCTGEFTESKVPQGVYAELRTAHNAYRRLVKERTRITNLIKGLLDGLFPEFTLVFKDPCGLTALSVLSTYAIPGVIAGMTEDEFVAIIEAKHQGRLMRRKLRALHYSARTSIGIDAGARSVSSEISFLVEKLELIRRHIRIIEGTLVRLVDETEEGKYLLSIKGLHYIAVGGLLAELGCFKSYHSAKQMIKMAGSNPTESESAGKRGSRTPMSKQGRPVLRYCAWTSVIPMLRLNPDFRAWAKRLRERPAHANPLGGREIVGAALNKLFRLAFAMVKNQTYYQVSKPELTLVAV

SEQ ID NO: 111708 - protein, 308 aa, unidentified
MSKPTIISLDLAKKVIQVCKVNPYGELLFNKAMSPQKTRDFLANSPPCVVAMEGCASFHYWARVAQSFGYEVRGMTPKKVKPYISNQKTDANDAIGIAIASTQLGMTFCQVKDLSQQNIQAIQISRKWFDRTITSLGNHIRALCFEYGAIITLGKKSLRQAITHFISPESTDLPEQIKPLLMILWQQYQTTEEHYKAVTLQLKQWVTQSEPCKRLIKLEGVSHIGAAGLLACLGDGQGFKNGRHAAAFVGVTPKQHSSGGKVVMIGIDKHGGDKYLRSIFYQPVYPDSVNNATISIRTEGANRSLARR

SEQ ID NO: 111709 - protein, 448 aa, unidentified
MQEGMDKRKGLSLECIELNAAGIDVGATEIFVAVPPDRDVQPVRRFPTFTADLRAMAAWLVRCRITTVAMESTGVYWIPPHEILEEAGIRICLVNSKHVKHVPGRKTDVQDCQWLQYLHSVGLLKASFRPDSQICAIRSLSRHRASLVESAAVHVQHMHKALTQMNLQIHHVLSDITGQSGMAIVEAIVAGQRDPAQLAALCHQQVRSSRETVIKSLAGNYRSEHLFTLRQSLISYKHYQALMADCDREIERLMRSLNGRIDPTRNGPVPPSDPRVQKRRKNQFHFQMSPELTRIFGVDLTAIPGISALTAHTLLAEIGPDLSRFPNVAAFASWLALCPANKKSGGKVLSSRTRKTNSRANCALRIAAQTLARSRSRLGCFYRSMRARLGGPQAITATAHKLARIVYHLLTTGQSYDETVFLEQDRKQAQRYEKRLRNQAKDLELIRK

SEQ ID NO: 111710 - protein, 328 aa, unidentified
MSVSRFVGIDVSKSRLDVFVRPDDEAVCFSNDEPGIASLTQRLRELAPERVLLEATGGLEIPLIAELAEAGLPVVAMNPRQVRDFAKSVGKLAKTNAIDARIIAQYAELIRPPIRPIPDEQSRLLGDTLARRRQVVEMITAEQNRWRQAKGEIQQQILQHLLYLKRELANLDDELGKQITQNPNWHEKDEILRTVPGVGKVLSRTLLANLPELGTLSNREISLLVGVAPLNRDSGLMRGRRCIWGGRASVRNPLYMASLVATRYNPIIHAFYFRLLSAGKAKKVALVACMRKLLTILNAMLRHRSPWSDDHTGYPPIPSAQPAAAYAA

SEQ ID NO: 111711 - protein, 289 aa, unidentified
MEYIALDVHKKYTWARVENAKGDRLYESRLQHAHGTVKNFVNRWSAGSPVAVETVGNWYWVVDEIEAGGGQPQLVNARLAKLMMGMVNKSDKLDAKGMNRLQRTGTLPTVWIPPSSVRDARELPRTRMVLSRQRTQLKNRVHATLGKYGYTVEGASDAFGKRGRQIVAELMAKLPPHTEQALGRVLDQLDHVCENLQGIEAKMVEVFAPCSQTTWLKTLPGVGDILAVVIWTEIGTIERFGRAEQLASYSGLVARENSSGGEDPLRSGTPRCQCVLEMGLCGSRQQCPP

SEQ ID NO: 111712 - protein, 416 aa, unidentified
MNAVGIDVSSRKSTVAVLRPLGEVVCLPFDVTHDIAGLASLVEKLKAIDGETRVVMEHTGRYYEAVAKALHEAGFFVCAVNPLLIKEYGANSLRRVKTDKADAIKIARYALDNWADLRDFTPMDAIRYDLKTLNRQFQLASKQRTASANNLIALLEQSFPGIRKCFDSPVRSDGTQKWVDFAHSFWHVDCVRKQPFPAFCERYRKWCKRHAYFFKLRNAEKVYALAKRAVVLTPKSKVVKVLVQEAANQLISISRSVEVYRAEMDRLAAMLPEYPVVMAMYGVGKSYGPQLMAEIGDVRRFERKQALVAFAGIDPMPNQSGDKNVRSNKSSKRGSPYLRKTLFNVIRTYLQCAPQDEPVFQFLNRKRAEGKPFYVYMLAAANKFLRRYYAKLRDFFASLDTLQPVAPIPTILKATL

SEQ ID NO: 111713 - protein, 393 aa, unidentified
MICVGIDVAKDKHDCFILSSEGEILADVFTIQNNAEGFDKLLQTIRRFTRPEDKIKVGLEATGHYSYNILGFLLDKGLPTYVINPLHTNFYRKSLSLRKTKTDRVDARTIAAMLMSDVDLKSYTDTAYHNEELKSLTRYRFDKVRERAKLKQSVSRLVTILFPELEKLVPSLHMASVYALLSEFPGAKQVAGAHLTHLKTVLSIASKGRYTRDMAENIRDAARRSVGSIMPAKSLELKHTIRLIRELDTEIEDTETAIQAIMDEMQSPITTIPGMGVRMGAVILAEIGDFSRFDSPDKILAYAGMSPSTYQSGQLSLSGAYSHMEKRGSRYLRYALYNATKYVCHWDPTFAAYLAKKRAEGKHYNVALSHATKKLVRLIYAMEKSQQSYRSAA

SEQ ID NO: 111714 - protein, 369 aa, unidentified
MAKPITYVGLDVHKDTIAVALAEAGLRGEVREHGKIPNTPTALKALTVKLAPAGRELRFCYEAGPCGYGIQRQLTGMGHECAVVAPSLIPRKPGARIKTDRRDAINLAKLHRAGELTAVWVPDQAHEAIRDLVRARQAAVRTLRQARQQLSGFLLRHGCHYHRPAWTQLHRRWLASLKFDQAVNHIVLEDCIAAVEAAIARRDRLEAHIEAALPEWSLAPVVEALQALRGVRLVAAATLVAELGDITRFTNPRQLMAYLGLVPSEHSSGRTRRQGGITKAGNGAARRMLIEAAWSYRFPARIAREQLLRQERLAKPIRDIAWKAQERLCRRYRKLARTGKQPTVITAAIARELAGFIWAIAKQVQPMAT

SEQ ID NO: 111715 - protein, 383 aa, unidentified
MNKCHSNTELSSHEETRCQFNGGTGAIKLGIDVHQDFYVVVEQVGGSNPKPPQRFQKQAFVHWAAKLKSQATEVYAVYEACGFGFSLQRKLSALSIKCYVVCPQKLDEQNRRVKTDGLDAKALCLKLDRFVQGNRDALAIVRVPSEEEEQARAIHRQREQLVKARKQLEAQGGSLMVNHGLEPVQNWWKPRTFAALAMPQWMKELLANSQPILVALQQKIAALTVQLQSAASPNQPRGLGKMTSVVIDREIGDWNRFNNRRQVASYTGLCPGEYSSGNTRLQSCVTKHGNPRLRAALVELAWRLVRFQPDYHPVRKWRQVLAKGALATGAARKKAIVAVARQLAVDLWRIKTGRLRAEELGLNQLVKFEGNRKGGASRTGITA

SEQ ID NO: 111716 - protein, 344 aa, unidentified
MANLNQFCDFMNLIGIDIAKSVFQIYSCDTQTGEITNEQVKRDKVLESFANCGKCHIGMEACGSSQYWVRKLQALGHTVRLMDPKLVKPFVRHNKSDKADAEGVYHALVSGVRAVAVKTETERDIQTLLTMRALLVKQRTARINHVRGLLAEYGHVMPKSVDQFDKKVDECINSLEGDAVQLVIDTLRDTVKSIRDDQDRIKTLQREISRLANQTRNAKHFLTVPGVGNTIMAYMCVLLADPTQFSSGRQFAAYLGLVPMHTGSGGKTVTTKIPGRCDKALRALLVQGAHAVARSKCRTDWVKNILAKKPKKVAMVAIANRMARQCWAVASKGQDWRRMPVTAA

SEQ ID NO: 111717 - protein, 372 aa, unidentified
MNYNTVYVGMDVHKESFTLCAYTIDAEKGSHFQRTEADYKNVLKYLEFLRTVYGNDANFICGYEAGCLGYTLYHQLTEHDVNCVILAPTTMLEQRSKRRIKTDRRDAEIIGKCLAQHNYSPVHIPTATDEETKEFLRMRDDHKLALKKVKQQILAFCLRHNYRYDGNSHWTAAHIKWLKSLSPEALYKEILDEYLLTYTTLSDKVERLDKRIEELASKDEYRESVKKLCCFIGIKTHTALSVLVEVGDFQRFASAQNFASYLGLVPGEDSSGDGQTRLGITKAGNRHVRMLLTEASQCYARGQIGFKSKELKSRQAGNSPQVIAYADKANERLRRRYYKMVLGKSKKHNVAKIAIARELACFMWGMMTEHIA

SEQ ID NO: 111718 - protein, 398 aa, unidentified
MTESSDYESVQVFIGVDVGKDTHHAVAINRSGKRLFDKALPNDENKLRSLISDLKQHGQILLVVDQPATIGALPVAVARSEGVLVGYLPRLAMRRIADLHAGEAKTDARDAAIIAEAARTLPHALRTLKLADEQIAELSMLCGFDDDLAAQTTQASNRIRGLLTQIHPALERVLGPRLEHPAVLDLLQRYPSPEKLASLGEKKLAAQLCKLAPRLGKRLAADIAQALAEQTVVVPGTNAAAVVLPRLALQLITLRKQRDEVALEVEQRVLAHPLYPVLTSMPGVGVRTAARLLTEVACRAFASAAHLAAYAGLAPVTRRSGSSIRGEHPSRRGNKALKRALFLSAFAALRDPLSRAYYTRKMSQGKRHNQALIALARRHCDVLFAMMRDGTFYTPQGS

SEQ ID NO: 111719 - protein, 375 aa, unidentified
MVQRKELNFEGQNIYIGIDVHLKTWHVSILTESGCLKKHSQQSSAQALFEHLKKHYPNGNYLSAYEAGFSGFSTYYSLLDFGIECLPVHAADIPTGQYESVMKTDAIDSTKIARALKSGLLRGIYIPKKEVLDDRNVMRLRITLKRQLSGYKSRVKHLLYNNGVIYPECFQNSKSHWSKRYLKWVHEDVQLLSESRNSLDLLLRQVELFRKSLLEITRLVRTLSRNGRYGEAYENIVSIPGIGMITGMCLLTEIGDIHRFRNERQFASYLGLVPTSHSSGEKTSHGEMTFRGNKRLGPLLVESALVAIATIKETLFLGEGALVAIRQDRALAAAYGEYCKRMLPQEAIIRITRKLSNRILIILKSGKKYEHDRCY

SEQ ID NO: 111720 - protein, 388 aa, unidentified
MQTVADRPEAPTAIRTDLGAIFVSLELSRSTWLITSLSPGGGEKMSKQVVRGGDVAGLLERFARLREKARARTGKVFPFVVIQEAGLDGFWIDRALQNEGIESHVVDPASIATSRRRRRAKTDGIDGEALVRALLAYKRGEPRVCAMVKAPTPEEEDRRRLCRERKVLIGERVQHVNRVKGLLFSQGISGYEPLRRDRRERLDTLQTGDGRLLPVHLKAQVCRELDRLELLLEQIKAVEAERDVLLAAQQVAAPVPAATLLDIKGIGPEFAAILWSEGLFRHFDNRRQVASYAGLAPTPWQSGSVDREQGVSKAGNPRLRTTLIQLAWLWLRHQPQSALALWFEERVRRNGGRLKKTTIVALARKLLVALWKYVTAGVVIEGAVMKRT

SEQ ID NO: 111721 - protein, 344 aa, unidentified
MWIIGCDMHARFQQIAAINTETGELVERRLEHQGGETQKFYESLSSPVRVGMEASVGARWFEKLLVDLGHELWIGNASEIRAAVVRQQKTDARDASHLLRLLVEGRFPRVWVPSLEERDVRQLLLHRNRLVRMRTALRNQLSAIARSHGLDRKRKLWNEEGRQQLNALPLDRWAAVRRHDLTSLLDSLESRILTLSQEIKAEAERRPHVVRLMTHAGVGPITALGFALTLGPVERFTRSKQVVSYLGLNPREYSSGGNQRLGSISKQGNKLARWLLVEAAQTAARYDSQLHRLYVRLKVRRGSKIAKIAVARKLAVRLYWMLRSPDAVAQRVSTQGSPGRNLAA

SEQ ID NO: 111722 - protein, 344 aa, unidentified
MEHFAGLDVSVNETSVCIVDDGGRIVREVKVASEPDALSAVLKGDVYHFKRIGLEAGPLSQWLYSAFAEAGLPVICVETRHMRAVLKAQINKTDRNDARGIAQMMRAGLYRPVHVKTLRSQKLRMLLTHRKLLQSKAIAVDNDLRGTLRNFGLKVGVVGAARFEARIKELVENLPDIVALVEPLLIVRRVLREQIAVLHRRLLVIVKDDEVCRRLMTVPGVGPVVALTYRATVDVPARFRNSRAVGAVLGLTPCKYQSGESDYTGAISKCGDEMMRVMLYEAAQILLMRSTQWSWLKAWAMQIARRRGVKKAIVALARRLAVIMHRIWIDGTEFRWTREEAAAA

SEQ ID NO: 111723 - protein, 390 aa, unidentified
MDVLYQSCAGIDVHQATVVVCILHGPLTSTRPKREMAQFDTTTKGLKACHDFLSQFHVEAVGMESTGVYWRPVWHELCDDFELILAQPAHMKAIPGQKTDKKDAHWIAQLTRIGLLPRSFVPDETIQELRELTRQRKHYVESRNRETNRIHKILQSVGIKLTTYIEDIMGASGRNLLQLLIDETPLTPRMIHQSVYTSLKRKVPQLLEALDGYFSAHHRFMLGQSLEIYDFYQKQIDCLEERMNGYLNLYERPVEILDSIPGIDLITAFVIISEIGVDMSQFPTAGHLASWAGLCPGNNESAGKKRSTKIRHGNSYLKRCLCQAVFAAKRQKGSPLAERYYQIQSRRGPQKATIALAHQLLKIAYILLKENLTYQEFVLQKKATRDEPVA

SEQ ID NO: 111724 - protein, 342 aa, unidentified
MKDMMIGVDLAKNVFQVHGALRTGEVQFRKKLTRKQFPAFMAKQEPCLVIFEACGSAHYWAREMETLGHEVKLIAPQYARPFVKRQKNDAADAEAIVIAARQPEMRFVELKTVEQQSRAAVFRGRERLVHQRTADVNALRALLYEHGHVFPAGIRYLDRMKALVEDAASELPGLIREECQDLVTQIAEKTARIIERTAKLKTLAAQSDRARRLQTMPGVGPLTAVAVEAFGPDMAQFKKGRDFAAWLGLVPRQHSSGGKERLGRMTKAGQADIRRLLIIGAMSRLNWLGQRSIVEGSWLSRMLARRPKMLVAIALANKMARQLWAMLTKNEDYKDPALAGTA

SEQ ID NO: 111725 - protein, 276 aa, unidentified
MLYTGLDLHRSFSYITTMNDKGEILGQKKLPSNGEIVEFLKEFDETMEVAIEATPSWYWLYDQLEDEGFEVKLSHPLKTKAIASAKVKTDKVDSATLAHLLRSNLLPLSYVPEKPVRLNRELLRYRASLVKIQAKVKNKIHTILAKNNINHSYTDLFGEAGIAFLRSLCLPDNYKMAIEGYLSILETVKREIQTASRKVQLLAKEDQDAMLVMTVPGVGYYTALLTKSEIGDVRRFPSAKQLCSYAGLVPSTYASGNTCYHGHITKQGSRWLRWIL

SEQ ID NO: 111726 - protein, 401 aa, unidentified
MSKKNTRNALDTSLSYAVIGLDLAKADCAVAAVPCADDELGLIDRMDYESLFEQAEKLEPTLFAMEPCCGYSQISLRLQNMGHEVKVISGHAVKNWIATHKSNQKTDLNDATALAKLALYDHDLQPIRVKNVEECRIASVQAIRIQLRTQATKSLVCFKSLCQCWGIVIRRGSLNTKKMAEAVAAVEKLLGAEVASSLMILRDAYKFTMKQINALDKLLDALVEANEQARTMKTVLGIGTQTAARLAVTTGDIKRFPMPRSYVAYFGLAPRNIITGHSGTPSPSKRGALKPVSSRGQGKVSRRGDRVARSFIIQGAATIYMLYCKDMLPECQLRRWLHEQIKRGKPYGKIIVSLAAKLLRIVWALLTYGEKFDSHKAGVPRSVLAAMEKPLKHDAAAESAA

SEQ ID NO: 111727 - protein, 316 aa, unidentified
MKNYIGIDISKATLDVYNGKKSYKFENDENGFKQIISLSEDIKNTILIFEPTGVYSYALSEFCSKKKIQVVIVGPKESRDFARSLKVRSKTDKIDAKVLYKYQSHVEPEMVKIPIVNHQAIKIQEMLNAYESIQSSKQRFKNQIESTSKLNKDLLRTLNRLIDNLDTEAQRLFNKIEVLLLKEKETKDRYDAISKIPSIGQKSALYLCAFFLKYPFANAKEITALLGLDPMIKDSGTFRGKQRISKHGGQQIRNLLYLPTLCAIQHNSRIKKFYEGLTARAKTKKLAVIAAMRKLILMAFSIFKSKEEYQPLLATI

SEQ ID NO: 111728 - protein, 347 aa, unidentified
MRTPSYEGKQVYMGLDVHREFFVASCICDGVVVKRCRMPGTAEAVISLASKEFNGARVRAAYEAGYSGFWLYRKLVAAGIDCIVVHAASIEVSSRDTVKTDKRDSLKIAQQLAAGRLRGVRVPTEEQEQQRLLTRTRDQLMNKKRRVMVQIRMRLHYFGLFPASIQRRIKLQDVDEILGSLDGDLQRTVVMQRDEWVELAKRIKEIDRLLIEQAKEDPLDAVYRSVPGVGPLISRILSAELGDMSQFRNERALFSFTGLTPSEYSSGGHICRGHISRQGNTRLRHMLVEAAWKAVRKDPVIKEYYIKLSERIGKRKAIVAVARKLAGRIRAALRKHEHYTLDYRAAA

SEQ ID NO: 111729 - protein, 342 aa, unidentified
MQISTIGLDLAKHVFQVHGIDADEKIVVRKQLRRSQVVAFFEKVPPCLVGIEACASAHHWARELEKLGHTVRLMPASDVKAYVKRNKNDAADAAAICEAVRRPTVRSVAVKTPQQQARLMQHRTRELLIRQRTQLINALRSHMGELGLAVAQGREGLRELLAIVKDETDHRLPDDARASLSVLAAQLMACTTQIAHLEKRIHAQHRANEASRRLEAVPGIGVVGATAITATLTDPTAFRTGRDFAAWVGLVPREDSTGGKRRLGPISKKGDRYLRRILIAGALAVLRHARAHPEKHPWLSQLLARKPAKVAAVALANKMARIAWALLAKGETYRAPALAARV

SEQ ID NO: 111730 - protein, 343 aa, unidentified
MHGVTTIGLDIAKSVFQVHGIDAIGKVVIRRQLKRRYVLAFFQKLVPCLVGIEACASSHHWSRALTALGHTVRLMPPAYVKPYVKRQKNDAADAEAICEAVTRANMRFVDTKTAEQQGCLMLHRTRHLLIRQQTAVINAIRAHLAEFGVVAPVGRRGVEELLDIATASSEERVPEVARACVGALGVQLRLLKAQILEFDRQIMAWHRSNETSKRLDEIPGVGPALATALVASVADPKAFRSGRNFSAWIGLVPKQHSSGGKDRLGSISKQGDRYLRSLLTAGALAVIRYAKIHGTRHRPWLAALLARRPTKVAAIALANKIARMAWAMMVKGERYKEPAALAA

SEQ ID NO: 111731 - protein, 400 aa, unidentified
MIAVGIDVSKYKSTVAIISNTGEILLPPKVYTHTYSALLSLVSLLKKQNDDIRIVMEATGHYHYPILKLLLGHHFFVSVVNPYIIKKYNDNNLRKVKTDKQDAIRLAFYALEKSYCLNAYVPAGEKYADLKFLYQQYTQRIHIIQKEKINLCHLLEESMPGLYDMLSTSVRNPSKNLLYSFVKRFKSFNRIKRMGKERFLNSYFKMAAEIGSRRRKNYALDIYEMAKDCIATGSTEPYSTMAQEECLRSLILAEEAANRLCEQMNSIANTLPEYPLVRSMYGVGDKIAPQLIALIGDIRKFKSGKALNAYAGNDAPPYQSGQFESKNRHISKRGSTELRKVCFEIMCCIKVHKSSEDPIYKFMQKKENEGKAKKVAIMAGINKFLRIYYARVNEVYQKAL

SEQ ID NO: 111732 - protein, 340 aa, unidentified
MSEITTIGLDLAKHVFQVHGIDAQGTTVLRRRLRRNQVLAFFSRIPRCVVGLEACATAHYWGRELGALGHEVRLMPAQYVKAYIKRNKHDAADAEAICEAVQRPTMRFVPVKTAEQQATALLHRGREPLVRQRTMLVNALRAHLAEFGIVAAQGLRNVGELIAIVRDDGDTRLPDVARQVLQVLANQIEQIQTAVAALERQLLAWHKTNPVSQRLASIPGIGPIIATAIATTVADPKAFRSGREFAAWLGLVPRQNSTGGKTRLGGITKRGNRYLRRLLINGASANLLRSKATKADPWVIGLRRRRPPLVVAVALANKTARIAWAVMLREKEYQPRAVAA

SEQ ID NO: 111733 - protein, 341 aa, unidentified
MQVTTIGLDLAKNVFQVHGVDATGKVTVTKKLRRSQVLALFEKLPPCLVGIEACATSHHWARELKALGHDVRLMPASYVKAYVKRGKNDAADAAAICEAVTRPSMRFVPMKSAEQQAVLMLHRTRDLLVRQRTQLINAMRAHLAEFGLVAARGRDGRKSLIAIVRDEANRLPDLARRALRAILSQLDALQQQIGDIERDIHAQHRSSEASRRLETIPGIGVIGATAIAATVTDPTTFKSGREFAAWIGLVPRQNSSGGKERLGSISKQGDRYLRRLLIVGATTVVQHARKHPDKHPWLISLLARRPAKVVAVALANKMARIAWAVLARGETYRAPAIAVRV

SEQ ID NO: 111734 - protein, 387 aa, unidentified
MHTVTSTTVVAATARANDITLFASLELSKSKWVVTINSPGSEKFSKHVIEGGDGAGLLDLLSRLRAKAEQRYGVQVKTIVIQEAGLEGFWIHRLLIANGIESHVVDAASIAVPRRHRRAKTDSIDGETLLRTLMAWARGERRVCSMVCAPSAEDEDRRRLTRERGTLLKERIQHTNRIKGLLNGQGIRDYNPLRRDRFERLEGLRTGDGRELPSMLKAEIRRELERIAVVTTQLAAVERARDALIRTDAEEPSNPAGMLLKLKGLGPEFASLLWLESLFRSFANRRQVAAYGGLAPSPWQSGGVERDQGISKSGNRRLRKTMIELAWFWLRHQPDSALSRWFRARVGAAKGRVRRIAIVALARKLLVALWRFVTQGVVPEGAVFKAA

SEQ ID NO: 111735 - protein, 337 aa, unidentified
MKYCGIDLHGNNHWVVIIDEQDRVLYSRRHANDLPRLLAVLAVYRSELRGIVVESTFNWYWLVDGLQEAGYRVLLANTAAIKQYDGLKHRGDESDARQLAHLLRLGLLPEGHIMPKAARAVRDLARKRMQLVQQRTAQILSIESSLSRHSGWKLSSNRIKCLRQADLDEMQLGEMPMLGLKANVAVMQTLQAQIDSLEKVLADYCRTEPGYQLLRTVTGIGEVLATVILLETGGIERFADAGNYASYCRCVGSAHLSNGKKKGQGNTKNGNRYLAWAFVEAANFAVRSCEAARRFYQRKKAARNSTVAIKAVAHKLARACYHMLKTQQPFCVDRCFA

SEQ ID NO: 111736 - protein, 426 aa, unidentified
MEKETDQRWAGIDWGDQEHYLVIVDAKGHAVASRSIKHSAEGLDDLVAALREHGPIAGVAIEKTRHLVIDKLLEADDPVYPINPKIAKTWRELLKVDPPKGDPGDAFSLAYNVRLHHEHFRVLRPDEPRLRELRLLCQDEQSEIGERTAKANQLKDCLKQYYPEVLGWFPKFTTTTAADFILAFPTPAALREASDGDIRDFLRRHHVGLSATWKKRLASRNAGARWPHDDATSAAKSLRAKSLAAQIKTQNIQLKEYRTRIEELFGEQPDAAIFASLPGAGAKLAPRLLSHFGSDRTRYDDAGPLQALSGTVPVTKSSGKSKHTHFRWACQKGFRNAMFHFAFGSIERSVWARAFYDRARARGQSHSEALRNLGAKWLRIIFRMWRDRALYDERTHLASLAQHDSPLVDHIRTSKKCAKIMEKTLT

SEQ ID NO: 111737 - protein, 370 aa, unidentified
MKKNIATKSPRRKAGSRQSDRVTIGMDLGDKTSRYCVLDDQGEVMAERSVATTKKGMLQAFGAMERCRIALEVGTHSPWISRLLTKLGHEVIVANARQVKLISASSRKNDRLDAQMLARLARVDPKLLSPIRHRSEEAQADLNLIRVRAALVDGRTALVNAARGFSKASGERLPKCDTDQMDVERMAELPVELREVLKPLIEQVESMTEKIRECDKKLEQIARDKYPETKLLRQVKGVGTLIALTFVLTLEDKDRFAKSRDVGCYVGLRPKRSESGESQPQLRITKEGDVYLRKLLVQGAHYILGYRGPDTDLRRWGLKLAERGGKNARKRAIVAVARKLGVLMHHLWATGEVYEPLHNAQETASRKKAA

SEQ ID NO: 111738 - protein, 344 aa, unidentified
MCSVTSQVVFVGLDYHAESVQVCVLARDGKVLVNRPCRNDWRTITAAVREKCGSQTAVEAAIESCCGAADLADELVGKARWSVNLAHPGYVARIKQSPDKTDFSDARLLADLQRVGYLPRVWLAPEEVRELRRLVRYRQRLTKERKDLKLQIRATLREARQKPPAEMNPWTKVWQVWLRKTAVLSPNARLITDCRLARLAELARHIRAMERLLAEQTRHDPLVRKLLTLKGVGLVTAVTMRAEIGRFDRFRTGKQLARFCGITPRNASSGQRQADAGLIKAGNRGLRTVLVEAAHRLMRYEERWMKFAARLSLRGKPVSVINAAVANRWLRWLFHRMQPGELAA

SEQ ID NO: 111739 - protein, 525 aa, unidentified
MLRGTVAADISLAVIHKRAKRPGTARRSELVNNCAAGENLAGERPAPARSQSQSPHPKRVIGRQLAEPEALAPTSNRKTPPEGHYISKMDGRAKRRKNHKKQKQTMNDSQQWQLHRAFGALDWASEKHSVVLVNQTGKVIEDFEIEHSALGWKKFREKLHPYGSIPFAIETSQGVAVEQLLEAGMLVYPLNPKSAQAYRERKAPSGVKDDRLDAWSFADALRVDGQDWKALRPEEPLIKELRLLCRDEVTLIEQRTAFINQLRHALAEYYPAALEAFEDWTSVSAWMFLQRFPTPELLAQAGKRQWQKFLHSRRLWGSDQGPRRMEIFAHATEFTGTASTVKAKSLLAQSLVQMLFAVEKQLAVYRQRIEELFARHPDHDLFGSLPGAGPKIAPRLLSEIGDDRQRFGGDPQNLQCLAGSAPVTKRSGKQRKYWPVHQRWACDKHLRHAIHLFSEQSLSRCAWAEIYYQQHRQKNQSHANALRRLSHRWLKIIYKMWIDRTPYNAELHHRNQLQHGSWIFQLQKS

SEQ ID NO: 111740 - protein, 433 aa, unidentified
MERVYERCCGIDVHKKMVVACLILVADGQRHKEARTFRTTTQDLLLLLDWLSSAGCTHVAMESTATYWKPIYNLLEGHFELLVVNAQHIKAVPGRKTDVHDSEWIADLLQHGLLKASFIPPASQRDLRELTRYRTNLVEERARASNRLQQTLEGTNLKLGDVATDILGKSGRAILEALLAGQTDPAVLANLARGRMKAKRAELEQALVGTLTAHHRFLLRQQLDHIDTLNEAIGRVSNEIEERMHALDHVEQNPCPSQQTPQEQEPLTWNGAIELLDTIPGINQRAAEGILAEIGTDMARFTNAHHLASWAGMCPGSNESAGKRLSSRIRKGSPWLRTLLVEAAHAAAHSKNTYLSAQYRRLAARCGAKKAAVAVGHTILIIIYHVLQEREGYRELGGNYFDERDRQTTEKRLVRRLEKLGYEVAIKSPSPAA

SEQ ID NO: 111741 - protein, 311 aa, unidentified
MKTAMNQNINVGVDTGKYQLDIYLRPLDIYFTVSNDEKGIKEAIDIIKKYNVERIVIEATGRLEMSFIMACAKVKLPFVIANPVYIKRFAGAIGQRAKTDKLDAQLIAHYGDVIKPKLSQLKPSTMQAMSDLVARRNQLLVMQTMEKNRLQILPKELAMTIKPILTAFKHQISKIERKLVELIESCPDYQAKNKILQSMNGIGKIAAASIISNLPELGYMTSKQASALVGVAPINKESGRFKGQRKIQGGRHQVRTVLYMAMMSVIQSNPVFKETYQRLVAAGKPKKVAIIACIRKMVVILNSMLRDGVMW

SEQ ID NO: 111742 - protein, 482 aa, unidentified
MSNNKKQGKTRPPKTQAQLGRRKKQKGMCLADRPCLESNAAGIDIGAREIFVAVPPDRDERPVRVFDTFTEDLQGMTRWLKACGITTVAMESTGVYWIPLYDILEAHGIRPCLTNARHMKNVPGRRTDWHECQWLQYLHSVGLLRSAFRPKADVCAVRAVIRHRGELVQMAVQHVQHMQKALTQMNLQIQHVISDLTGTTGLAIVDAILAGERDPAVLAQRRDPRIRATAETIQKSLVGNWQPEHLFVLRQSRLLYQTYQQQIAGCDQEIEKLLGAFEPRVDPGQKPLPADRKRNRNASKKRNKRGLPATRFDLRTEAYKLFGVDVTQVPGVETSVLPLFSEVGRDLANRWPTAPHFISWLNLCPDNDISGGRVLWRGTRKGQNRAGQIFRMAAYSLHRSPTPLGNYLRRMKAKLGPKAATTATAHKIAVIFYTLVTKQIEYDESIWAARDAQRQKRLENKIRRQAKQLGYQLVPTEQKPAA

SEQ ID NO: 111743 - protein, 333 aa, unidentified
MSSDGSIAEETKYNNTLHEAEIFAYSIVKKYGECVAVCESTANLWLKTYQAFEKYNIGVKLANPLKTKAIAEAKIKTDTLDARTLAHLLRSDLVAECYIAPREIREDRSLLRLRINLVQDRARVMNRVHSLLDKYDVKCDYDNIFGVKGIRWLKSLKLSDNDQILLHEYVMQIEFLNTEIKNIESKITCEASKNESVKILMSVTGIDYFSAMMIASEIGHITRFSTPEKLVSWSGLCPSIHQSGNSLYMGRMKDGNKKVRWILIQAANTAARKDYRLRKFYLRIAKRHGHHVAITHVANKMITIIWHMLVNKKLYNERKQSLYETKLKRIQKT

SEQ ID NO: 111744 - protein, 345 aa, unidentified
MTTMNYIGLDVHKKTISYCVKDVSGRIQQEGKIGSTRRELDCWMKTLPQPWTVAMEATIFSGWIYDHLLPHATQIKVAHPLMLRAIAAAKKKNDQIDASKLADCLRCDFLPECHMMPRAIRDRRRTLRYRHLLVRQMVQMKNRVSGLLMETGVEYNKQRLHKVSYFRELLSANGEVPPSIRPLLKLSRETIERCQKTEYALVSSLQRDPVLADRIKRLRTVPGVGPITALTWALEIGDVSRFGSIKQAISYCGLCGDERSSADKAMRMPLSKQRNKHIQRALVEAAKLAPRQNHEMAVIYDQERQKGNSNRATLAVARKMVAYLLAVDRQQRDFVPAEERRTTAT

SEQ ID NO: 111745 - protein, 350 aa, unidentified
MIAINKDIIATIGVDLGKNTFHICAMNDKGTILLRERLTRAALPKRLANIPPCRIGMEACAGSHHIGRQLTALGHDVRLMPAKYVKPFLKSHKNDYRDAEAIAEAVQRPTMRFVPFKSDEQLDLQALHRVRSRLVGQRTAVINQIRAFLLEHGVAVRQGPGALRLALPSILAQRTDVLSPRIIHLIEDLTGDWRRFDERIADVTREIEQLANQDQYCKGLMGVPGVGPMTASAMVAAIGDGAAFSRGRDFAAWLGLVPKQISTGDRTILGGISRRGNRYLRTLFIQGARSVLQRSDGWEKKSFGCWLIAASKRLHKNVLAAALANKLARIAWAVLYNAREYDTTLAPKAT

SEQ ID NO: 111746 - protein, 416 aa, unidentified
MDQRRYNVCCGADIHKKFLVATVLLLDGTKLTKRFSMNLRSLLEFRDWVNANGCEAVAVESTGSYWVPIYRVLEGHVELIVGNAYKIKNVPGRKTDTIDSEWIAELCRNGQIKPSRIFPKDSRDLRSLTRARERYVDDKTRVKNRIHHILDSNCIRLSSVLSDIFGKSGRYILNCLLEGTDIDEIIAGIPAKRIKKKDDQIREALIMQLSCTDIILIRGYLEQIDSIQKNIEELESEIRKRIAPLRKDMAIVMSVPGIGFISALVILAEIGNYNDFHKAEQLAAWCGLVPSVYQSADKIYMGSITKQGSRHIRRILVEVAHVIARTKGRSKLKSFFLRIKAKKGTNIAAVALARKVLSVLHHLLTAQEMYQEEEKDGDAELEYLGIPSQGISLDDMIRHLANAGYEVRKRAPGAGG

SEQ ID NO: 111747 - protein, 359 aa, unidentified
MRGQRNEISFRGQKIYIGIDVHLKSWSVTVLSETSVLKKFSQHPSPEALHGFLARSYPGAEYHSVYEAGFCGFWIHERLTALGIDNIVVNPGDVPTKSSEKLRKSDAVDSSKLARSLRANELKGIYTPDSASLEMRSLIRLKNSITKDTTRQKNRIKSQLRYLGIGIPQEFLEPFSNWSKRFITWLKEVETLTPSGRQAFDIQIRHLEELRLQKLEMTRALRTLAKTDRFREPLRLIMTVPGFGQATGMAFLSEICDIARFRNAEQLAAYIGMIPMCHSSGEKDGTGDITVRRNAVMRCNLIEAAWVAVRQDPAMNLFFTEQCKRMPKSKAIVKVARKLVNRLYFVLKHQTDYVNSVMS

SEQ ID NO: 111748 - protein, 345 aa, unidentified
MEITTIGLDIAKRVFQVHGADATGKGQLRRKLQRADVLTFFASLPPCLVGIEACSTAHYWAREIRALGHEVRLMPASYVKPYVKRGKTDAADAEAICEAVTRPTMRFVPIKSAEQQAVLMLHRTRDLLVRQRTMLVNALRGHMAELGIIAPQGISRVGDLLAALMGEDGAKLPKLARQALQGLAAELEAVGDRVKQIDAAIMVWHKENEVSRRLATIPGVGPITASAIVATVTDPAQFQSARQFAAWIGLVPKQNSSGGKERQSGISKQGDRYLRRLLVLGATAVIRHARTKATAETAWLRGVLDRRPVRLASVAQANKTARIVWALMARGETYRTPAAAQAVAA

SEQ ID NO: 111749 - protein, 432 aa, unidentified
METRETKTAPTPQPAPPLVAWVGLDWADQKHVLCLQAVDSEQVESIVLEQKPEVLGEWISQLRRRFPQGRVAIALEQSRGGLLYALLEYEFLVLYPVPPKSLARYREAFYPSGGKNDPVDAELLLEMLRTHGDRLSAWVPDDVATRQLRLLAERRRQLVNQRTRLTNRLTALLKEYFPQALEWAGPLGSPEACEFLTRWPTLQALQQAPSSEVRHFYLAQGARQVEGWAQRGEEIRRAQPLTSDPAITEASALLAESLAEQIRSLLPGLKRFDQALQEKSKQHPDYEIFASFPGAGEVLAPRLLVAWGSDRQRYQKAAEMQSFSGIAPVTEQSGKSCWVHWRMACPKFLRQSFHEFAGQSRLRSVWARAYYEQRRLRGCGHHAALRALAFKWIRIMYRCWKDRTPYDERLYLEALRRHTSPLLSARPSSHTT

SEQ ID NO: 111750 - protein, 349 aa, unidentified
MTVYVAVDFHAREQTVSYCDLADGEIHRRKLRHQHDDVRAFYQQFTGAVIVAFEASGYSAWFEQMLAELGHTVWLGNPAEIRRKAPRRQKNDRRDADLMLDLLLKGDFPRVHGFSEESRTVLRQLRYRHKLVKVRTIAKNSLHAIGINAGLPLKRRLLTEPGIAQLQALSLSPVLTQQRDEWLQLITLMNERIATVEAQLQQRAKDDAAIALLRTHPGIGLLTSLALRYTLLPTARFSTTRQVTAYVGLDCMEDQSAERRRMGSISKAGSKLLRFLLNEAGHTAARHDPELKKFYRRLLHRRDKPKAKVAVARKLLVRSFIMLRDQIDYAEFVRRGVAARVAREAHSLP

SEQ ID NO: 111751 - protein, 407 aa, unidentified
MNAVGIDVSKGKSMVAALRPMGEVALPPKEYPHTEIGLERLACDILRLGEDTRVVMEATGRYHEPVASALHEYGIFVSILNPLYIKQSGAGSIRKVKTDKADAMKIAKYGLDNWVELREYTPMETVRQQLKLCSRQYNLYMKTIVALQNNLISLTDKTFPGVNELFSSPERADGHQKWVDFVMTFWHCDCVNLVGVKAFTERYQKWCKRKGYNFSEDKALDLYAGSCGHFTTLPKNANTKLLITTAAQQLLAAKTTLVAMRTEMLRLAGQLPEYDTVRAMYGVGKITAAQLMAEIGDVRRFPRRSALVGFAGVDPAVNQSGKHEAHSSPTTKRGSPHLRKTLYQVVCTYLKKSPADEPVYQFLDKKRAEGKPYFVYMTAAQNKFLRIYYARVKECLEALAPSEAEQP

SEQ ID NO: 111752 - protein, 325 aa, unidentified
MKSRVQIKHDSGILYVGIDVSKDKLAVYAGDLFEEEIDNTRRAIARMVKTIGRGVDRPIRFVLEETGCYSLPVHLELDRLGQQVCVVNPSRVRHYAIGCGVMAKTDRIDARIIRRFAEANDCEPTPIPSETRMLLRELIRTRGLLVKIRTMIQTLRKMTVSPSSRTLLGEVDRFLRTKIDKLEAEIVRHGKEDEEIERVSRKLDELPGVAALTATTIATLAPELGTLGKRQAASLIGLAPFVHDSGKYKGQRRIGGGRWDLRHALYMPVLTAVQKDATLRAFYRHLVDDRGKRKKVALAAAMRKMFIHMDRLIAGLNGKEEAMPT

SEQ ID NO: 111753 - protein, 403 aa, unidentified
MSPEHSIDIFLGLGVGKSEHHACALDRDGNKVFDKPLPQLESELAGVFHQLQKLGTVLVIVDQPNTIGALPIAVARDCGCEVGYLPGLAMRKAADLYPGRAKTDKRDAFIIADTARTMPHTLRAVDRNDEVLSALKMLSGFDDDIARDCTRTVNRLRSVLTQIYPSLERVFAGSTLTRTPILELLIHYKGPQGLKRAGYQRVLNWMIKRTRKDPTPLVDDIFTALKAQTVTVPGSDAAELVIPQLAANIQALKEQRNTIAEQVEEMLADFPLCEVLMSMPGVGIKTAAQILLAIGDGSDFASAGHLAAYAGIAPVTRRSGSSIRGEFPARSGNKRLKNALFYSAFAVIRSHEPSRRYYERKRAEGKRHNAAVICLARRRCNVIYAMLKNKEFFREIPPRPVAA

SEQ ID NO: 111754 - protein, 316 aa, unidentified
MNVVGFDVGKDSIVGARIDASMQVKQRFEITNTMDAIAAALLSLRGQYKHLLIASESTGEYHYALAHCCLDLDIPFRLLNPITTKQFVKATVRKKKTDPSDAWVIAKLAAQGEGVLVTAGLFNDTKPILRTSTKLAQLNDIVNRIDRRISELLPTERKLHEQLVTCAYQLGIAVTVFRQRAIEISPKDLTKLLTSIPGIGVTIAPTLITEIGDITRFKNPKSLVAYAGLDPRVRQSGYSLQRNTRLTKRGSPYLRRSLYIAASIAQRCEPQYKATFDKKRAEGKRYKEATIVNARKILNCVYAVWTCNTPYKRPNT

SEQ ID NO: 111755 - protein, 372 aa, unidentified
MKEFSTYVGLDTHKDSIAVAVAQAGRQRAQYWGEIANTPEAIGKLLNKLSPEGEVLAICYEAGPCGYGIWRQVSAMGHECTVVAPGLIPRKAAERVKTDRRDALTLARLHRAGELTAVWVPGVQQEAMRDLSRAREDMKAAERRMRQRLSAFLLRHGHVYRGKSRWTQAHWRWIEQLKMATPVQQIVLSEYADAVQDAQRREQSLVRQIEQALPGWSLAPVVHALMALRGISLINACTVLAELGDITRFDHPGQLMAYLGLVPSEHSSGGARVQGGITKSGNTHVRRALVEAAWAYRFAARKSRTIQRRAERTSEQVQAIAWAAQKRLCARYRHLIEAGKNSKQACTAVARELAGFIWDIARHTPVQLAAGA

SEQ ID NO: 111756 - protein, 313 aa, unidentified
MAQMAPSVGVDVSKDRLDIAFYPGEERFSVSNDAAGWRELSRRLRPLGVRAIGIEASGGYEHGVIGALLDAGLPVRSVNPWNLRQFAKAAGMLAKNDRLDARAIALFVATLPCRAIARDPARDHLAELVNARRQLVDVKQQCDHQLEHLRDAALRRMQQRHIRQIDADVVCLDRRIAAAIAAVPAFASRDKRLRSMPGVGPVLAATLLALLPELGSIGNRQIGALVGVVPYDFDSGRMKGLRCIFGGRARVRRVLYMAAQAAALWNPVMKAFKQRLLAAGKKPKVAIVAVMRKLLTTLNAMLRDDHDWNPQTA

SEQ ID NO: 111757 - protein, 439 aa, unidentified
MQEATQHDAVDVFVDVDVDVDVGVDVGKGQHHAVALDRNGKRLYNKALPNDEVKLRALIAELKTHRRLLFVVDQPSTIGALPVAVARAEGVLVAYLLGLAMRRIADLHAGEAKTDARDAAIIAEAARSMPHTLRSLRLADEQFAELTMLRGFDDDLAAQLTQTSNRIRGLLTQIHPALERVLGPRLDHPAVLDLLERYPSPSALAAANEKTLANRLTKLAPRLGKNWAAEIVQALNEQAVIVPGTQAATIVMPRLAQQLAALRKQRDEIAADVERLVLAHPLWPVLTSMPGVGVRTAARRLTEAAPKAFATAAHLAAYVGLAPVTRRSGSSIRGEHPSRRGNKVLNAPCSSPPSLPYETQSHGPIPRARSSRASATTKHSSRSHGDAATSCLPCCATAPFTHPSQPLTLDERHRAPARAVPQHRRAAPRPCAGCDPAPM

SEQ ID NO: 111758 - protein, 358 aa, unidentified
MRIIGCDFHPSYQQMAMVDTETGDLWEGRLEHEQGEARRFYQALQGQVVRVGMEAVGNSQWFEQMLAEMGHELWIGDAARIRRLVVREQKTDRRDAKHILDLLLDGRFPRLWVPSTQMRDVRQLLRHRQKLVEIRTQVKNQLQHLALNQGVRRKSRLWSRQGRQVLEQLPLQGWTARRRSDLLAMLDRLQEQVGELDGAVRAEAEQRPEVRLLMTHPGVGPVVGLAYALTLGPITRFPRGKQVASYLGLIPKEHSSGGRQKLGSISKQGNTMMRTLLVEAAQTAARLDQQLRRDYGRLKAKKHAGPAKVMVARKLAVRMYWMLRENKSYTQLYAQRPVAGMQGSSGHSVVAGGDRSLE

SEQ ID NO: 111759 - protein, 316 aa, unidentified
MVPSPLFVGIDVAKATLDIAVRPTAETWSVSNDATGIDALVLRLGALAPTLIVLEATGGYQGPLVAALVAAALPVVVVNPRHIRAFAQAVGILAKTDRIDARVIAHFAEAVKPAPRPLPDAETQELRALLVRRRQLVEMVSAERARLDTVPPSIQDAIQAHIAWLTTQIAGLDDALTRASQTHPVWQAKDDGLQSIPGVGPVLARTMLGQVPAWGPLGPKPLAALIGVAPFNRDSGTLRGRRTVYGGRAEVRAVLYMGALVATRHNPVIKTFYERLLAAGKAKKVALTACMHKLLTIMNAMVRDLKPWQPQEVPSA

SEQ ID NO: 111760 - protein, 348 aa, unidentified
MMVSLGVDAHKRTHTIVACDEAGAPLGEVTVAATTVGHLMALRWAAPFEQRRWALEDCRHLSRRLEAELLSAGEEVVRVPPKMMAGVRRSARTRGKSDPIDALAVARAAVREPGLPVARLEGPAREVRLLVDYREGLVRERTGLQNRLRWRLHELDPDLDPAAGSLDRYRVLDEVLARLEAFAGMVADLARREITRIRDLTAEINQLERDIAGRVGDVAPSLLEVPGCGALTAAKLVGEAADITRFHDKNAYAMWAGVAPIPVWSSNTERFRLNRGGNRQTNAALHRIAITQMRIHPDARRLITRHLSAGKTKTEALRILKRRLSNVVYRTMIKDTNQLSQAAPARAA

SEQ ID NO: 111761 - protein, 338 aa, unidentified
MEHVAIDLGGRESQVCVRSGDGTILDERRCATRALRAYLEKRPTSRVIVETCAESFSVADAALALGHEVRVVAATLVRALGVGARKTKTDQRDARLLSEASCRMDLPSVHVPSLESRQRKAMCGMREALVTSRTQLVNNVRGWLRTQTHRVRRCGTDTLTARVREAFGSQLPTYVERQLQVIDELSTQIGKADQELVAAAKQDATCRRLMSVPGVGPVTALRFVAALDRVDRFESAHKVEAYLGLTPGEHSSSDRQQRLSITKAGPPRMRWALVQSAWAARRAKGSHPMVAWSFEVEKRRGKRIAIIALARKIAGILYALWRDGTLYDPNQGVGRPAA

SEQ ID NO: 111762 - protein, 338 aa, unidentified
MKKYIGIDLHSNNSVVVVTDEEDRILYQKRQAKNLNEILAALAPHRDEAVGVVVESTYNWYWLIDGLMDAGYQAHLAHPAAMKKYEGLKYSGDFADAAYLAQMLRLGLLPEGYIFPRELRATRDLARKRMQLVRCCTTQILSIENTLARETGGRMDKRQIKRMTTEGIEALGLKSDVTLAMESNRVVCQALQQQIVVLEKRLEAQVKLQPEYQLVKTIPGIGQILATTIMLETGTILRFADVGNFSSYCRCVDSLHESNGKKKGSGNTKNGNKYLAWAFLEAANFALRFCPEAKRFYERKKNRTNRVVALKSVAHKLARACYYILRDQKPFEGTRCFV

SEQ ID NO: 111763 - protein, 344 aa, unidentified
MLKSNIIGIDLAKNVFQVCVISKDGELISNKVVSRQKLKEILAKSHPAVVGIEGCGSSHYWGRFAEQFNHDVRIISPKKVKGFLQGQKTDANDALAIANAAMQIGLKYSKPKNEEQQILQSLEASRVYLSRNITSLGNHIRAMLYEYGIVSAKGAAGLRKVVMETLDEQHPLPANLLSTLHQLWAHYQSLKEEFTIQEKAKNALVRQLEPCKSLMALEGVAEVCAGMLYSALGNGKQFKNGREASAFVGLTPKQHSSGGKVFMMGIDKKGGIKELRSALYQGAISIVTHLPEEPKTAKQKWLIQLLQRIGIKRTCIALANKTVRTAWAMLRYENQYDQQLLIKN

SEQ ID NO: 111764 - protein, 405 aa, unidentified
MIDTSDIGAFLGLDVGKGEHHATALTPAGKKALDKRLPNSEPKLREVFAKLQAKHGTVLVVVDQPASIGALPLAVARDAGCKVAYLPGLTMRRIADLYPGEAKTDARDAFIIADAARVMPHTLRSIELADETVAELEMIVGFDDDLAGEATRISNRLRGLLTQIHPSLERVLGPRIQHPAVLLMLQQFGSPAQLRKAGRRRLVNLIRAKAPRMAERLVDDTFTALDEQTVVVPGTDAAALIVPSLADQLKSVLDQRKLLANRIEELLEDHPLSKVLTSMPGIGVRTGARILIDVGDGSSFPTPGHLASYAGLAPATRNSGSSIRGEQPSRRGNKQLKRAFFLSAFAALSDPASRAYYDKKINQGKHHTQALLCLARRRADVLFAMLREGDRSLSHQRHDAPFFPG

SEQ ID NO: 111765 - protein, 397 aa, unidentified
MYIVGIDIAKRKHEAAVIDGEGAVIIKPFSFTNNCSGYNRLLAMLAKAKLPLDEVSFAMEATGHYWLALFTRLQKEGFRVQVINPVQTNSIRSFYIRQAKTDPRDALLIAEVIRFGHFSESTLHPENIYELRELCRGRHAIVSMQADIKRKVVALLDQVFPEYETAFTNLFGDTSMAILQACPTPKELSEMPLEEFCHLIEVPSRKRFRTEKAQELQALARNSFGFAMAGDVFSTMIRLYAKHLDFLKQQVREMDRKIAEIMDTLDTPITTITGIGPTLGAYILSEIGDISRFPSAAKLAAYAGIDPTVRQSGEYNGVRNRMSKRGSPYLRHAIWLATSSAVLHDPALKLYFQKKRDEGKPYMASVGHACRKMVSIIYAVMRDNKAYVPCIPSEISA

SEQ ID NO: 111766 - protein, 385 aa, unidentified
MRSEATRAGETNVGAQVLYMVLELSERSWKVLFASAAGRRRERAVAGRDVAGLLEEIAAAKRRLGLSAQARVVSCYEAGRDGFWLDRALRGHGIENLVVDSSSIEVPRRARRAKTDRVDLVKLMGLLLRWVGGEKKVWSVVRDPDVDAEDVRQLSRSIERLKAEHGRHVTRIKALLATQGIRLGHIGRRDWAKRVGELRRWDGSALGVWLQRDLVLEGERLAVAAAQLAALKAERDKLVAQGGEVAAVKARELARLGAIAKESSFVFAAELFGWRTFANRRELAGSVGLTGTPYSSGDSAREQGISKAGNRRIRTMLVEIAWCWLRYQPTSALARWWQGRFADSGGRTRKIAIVALARKLLVALWRYLERGVVPEGAVLKTRVSA

SEQ ID NO: 111767 - protein, 359 aa, unidentified
MKIVGCDFHPSWQQVAVFDRETGELAELKLVNGDGEAERFYRALEAPALVGIEACGNSQWFIELLERLGHLVWVGDAAQIRASYVRRQKTDRRDAGHILKLLMENRFPRLWTPSAEQRDLRQLLIHRHKLVEIRTRVKNGLQHLALNRGVQKHFRLWSVRGRAYLEKLPLEGWTSRRREDLLKLLAELDRHLEELDQAASQAAEEHPQARLLMTQPGVGPITSLAFVLTIGEVSRFKHSNQVASYLGLIPREHSSGGKQRLGAISKQGNRFMRQLLVESVQTVNRLDEGFRKEYAARCHHKPKGVAKVAAARKLAVRLYWMLRQNVGYPEIALIESSPRVALTGASQVVTLNERSRIQQ

SEQ ID NO: 111768 - protein, 423 aa, unidentified
MAMRKREDDEVYPNAAGIDVGASSHWVAVPRTADHQPVREFGTMTGDLHAMADWLLACGVDTVALESTGVYWIPVYEVLEQRGLTVWLVDARQMKYVPGRKSDVQDCQWLQKLMSLGLLRAAWCPAGEVCVVRAVVRQRELLLTEQGSWVQRMQKALLQMIIRAIVAGERDPKVLARFRHSLVEASTEDIIRALTGNWREEHLFVLAQALAMFDSLAERILECDAKTEALLVPLGRHDVQLAGPDKKRQKNAPRFDARTALARWTGVDLTRINGLSVATVMTILSEIGPDLSRFASVKHFCSWLRLCPATKISGGKTLSSGTRPSANRARQALKMAAMSLSRSDSALGAFYRRLCSRMDKPRANTAVAHKLARMVYFMLTRGEAFVDQGQQRYQEQQRQRSIAALRRRASALGFQLQPNAPTP

SEQ ID NO: 111769 - protein, 365 aa, unidentified
MNKKLNHLGIDVGKRKCRASLKDDKGKILDEFFFGNNSDGISDLIKRIYNHRTKKCNAVLESTGNMWMRIHDTLEDNGIDIILANTYKTKIIAQAKIKSDKLDARILSDLLRTGLIYESYVPVKEFRDKRSLVRHRIVLSRTRTKLANKIHAILDKYEYRIELTDIFSIHGKQWLKTLSVSPIDRIILDTTLSSIESIDNQREIITKEIARYAWQDSNNNKDVKILLSITGIDIFSAMLISTEIVDIQRFSTPWKLVSYAGLAPSMRESSGKIKMGRITKQGSPLLRWILVQCALSAIRHDHHMRTFYERIKQRKGHGKAIVATAKEMLVIIWYMLTRQQLYRYMNSTRYEQKLERLKKIGSQER

SEQ ID NO: 111770 - protein, 441 aa, unidentified
MKYYTSTTEYNCGIDLHARQMYVCVMDRQGKKLVHTNVLNNDFSYFLKLIEPYKHDLTVCCECMFGWYWLSDACQKAGLTFVLAHALYVKAIHGGKNKNDRVDSEKLTHLLRSNLIPPAYVYPADKRPLRALLRQRLFFVWRRSELTARIYSHQLAHNRTPARQTRRIRDSWEEALLKAEDHPLRQLALKNDLAMIKHFDEQIFQLEEELQRQTKKVAGRDYELLQSVPGIGETLGLTILYEIGEIERFPTVKDFLSYCRLVKGTVASAGKIKGLRGAKLGNPYLRWAFGEAAVIAKRDHYLVGPLSQRLEAQMGGNKFKSNTVVAIKLARAVYFMLKNKTVFDPERLVASMQKCFGRKSRAPLSRPAGQPSSPKRLAVTMEKRFSPGRRQPGRLTGCAKKASPLPAADHASCASSTPVCVGPTSNPAPSIGTCGQALPPS

SEQ ID NO: 111771 - protein, 429 aa, unidentified
MRRRAYGALAVNHVSAAKLAQTHRGEAVMVGTDIGKFEVRAICRWAKGEWERPWRVKNPSQLAELVAVLQELRQGRELAVAMEPSGTYGDALRQALHDAHIEVQRVSTKATHDYAEVFDGVPSQHDGKDAAVVAELAAYGKGSVWEYQASSAWEQELKYWVDWMEGQRRILQMWLGRIEALLARHWPEATRLLKVSSATLLKAMSCYGGPAALAADAEAAARLARWGGKYLRADKVTELLASARSSTGVRQGAWEVRQLRDYATQAFEARRAFRHSQRQLRRLAEGHTVLQAQGRAVGVPTACVLWTCVGDPRDYDSGGAYRKAMGLNLVERSSGTYQGQLRISKRGHPRSRQWLYFAALRLVQKAGVKRWFHAKKARDGQQGKRALVAVMRRLVLALHRVAVHGQTFDARRLFPAEAQARSKPSASVP

SEQ ID NO: 111772 - protein, 354 aa, unidentified
MKILALDLGKYKTVGCEYERETGKHRFRTSLTTPAALAQLVKEVKPDRVVIEVCNIAGWVCDLLRGLGVEVQVANTSEDAWRWRKVKKKNDRCDALKAAQLSAVNQLREVHIPNIEVRQWRALIAFRQQLVRRRGKVKNHIRDLLVREGQILPRGAKCWTQLGLAHLEELAKDFSELEMAELWRGQLQLELRQLQELQCEIEQVEAKLDAIAKAEPRIALLRTIPGVGPRLSEAIVALLDQPARFHKAREVSAYVGMVPKELDSGETMRRGRITKHGSRLVRSLLVEVAWAGLRYNPWVRETFQRISGGKKSRKKIAIVAVGRRLLVRCWAMLRDGTSWRPLTMQHYLVSQAPK

SEQ ID NO: 111773 - protein, 414 aa, unidentified
MFAVGVDVSNGRSTVAVLQTKTSALMKPFEIPHTAEGFASLAGKLAGLDGEVRIVMEHTGRYYESFARAMHSAGFFVSAINPLAIKNYQDGINIRKVKTDKADAMKIARFALDKWEILPQYTPMDTIRYDLKTMHRQFQLSSKTKTALSNNLVALLEQSYPGANRYFDSPARPDGSQKWVDYVDTFWHVDCVARVSQNAFVERYRKWCKRHGYNFSQQTAIDLHTDARQKFALVPKSDTCKLLVREAVSQLNAVSRTVETYRTEMDRLASQLPEYETVMAMTGVGKSMGPQLMAEIGDIRRFPHQKSIVGFAGTDPIKDDSGDKVSDSKPSSKRGSPHLRKTLFVIMSILLQLHPQDDPVYQFLDKKRSEGKPYYVYMTAGMTKFLRIYYGKVRDCLKEQGLWEQTSDAPGMAD

SEQ ID NO: 111774 - protein, 312 aa, unidentified
MNPAPSPPTAFIGCDVGKATIAVFDSRSGRSTVIANRPEALARFAATLDGSCLVICETTGGYEAQLLDALAQAGRAVHRADARRVKAFIRSLGRLGKSDAIDARALARYGQERHTGLARWQPVSAERDRLHALVMTRRDLVAARTAWSNRLAAPGGEQAAKFLDAVIGCIETQLAVIDADIATLIEASEQLARRVRCLRGISGIGARTAAALVALMPELGSLDRRQCAALAGLAPHPQQSGQRDGYRRVHGGRPEIKRLLFMAAMSAVRYHPRLRDFYCRLRQNGKKPLVALVAAMRKLIVICNATLRANAM

SEQ ID NO: 111775 - protein, 392 aa, unidentified
MGCPMPQRNDLSRSLVPFQQDGTLVAVIELSRSSWLVAGIVPGLERHPLKKLAPDEDALLRLLHRWRDEAAKAGCTITRLAVAFEAGRDGFWLARWLRAREVEAHVIHPTSIAVSREHRRAKTDRLDTGLLKRAFLGWLRGEPGHCSMAAVPTLEEEDARRPNREREGLVGERTRIVNRMRGCLARLGIRGFGPASRGAPDRLEALCTPEGVALPPNTLAELRRDMARLRFVSDQIAEIEAARLERLRQAPAEDRPHAMVRLLARVIGVGVETADMLVHEVLRRDLRDRRAVARYAGLTGSPEESGARRREKGLAKAGSARVRRGMVQLAWRFLRFQEGSGLAGWYRARTADARAGTRKTMIVALARKLLIALWRLVTTGEVPEGVVLRPAA

SEQ ID NO: 111776 - protein, 411 aa, unidentified
MDKTGMAHEVIRFVGMDIHRSYATVAAVDGNQQVVLTARRIDYEHFDEWMRKNLRPSDAVTLESTGNAWYFHDLLAPLVASVTVANPIQVALIAKARVKTDPRDALTLARLLAARMLPSVWVPPTEVRELRALVAHRHRLVKQRTQVRNRLRAVLIRHNLVAPASEIFGSGQRAWWEGLDLPTSEKLRVRHDLSILDSLEPLVKEVEAELARQSNLAPWEDLAAFLLQLPGIGVPSAMQLLAAIGDINRFPTPHQLVGYAGLGAGVHSSGQEHYGGRITKQGRRDIRKTMVDIAWVAVANHFYWKAVFDRLADRIGRNKAIVAIARKLLVVVWHVLAKQVADRQAIAERVAGKFLDWSWKVGRVNRRGLTSVQFIRRQLCRVQVGDKLTTVSRGKKTLRLPRPEPVAHAVG

SEQ ID NO: 111777 - protein, 443 aa, unidentified
MMILRAPKAARVAVERQEGARRMLVLYQRCAAVDIGKDVIAVAVRLPGDGPEHRQTIKRTFKTFYGVLKQAARWLTEQQVTHVAMEATGIYSMPVYHALIEHGHFEKILVCNAGHVRNVPGRKTDLSDAEWLVHLLECGLLRGSFIPPPQIKAARDVVRYRTKLSESRTSELQRLGNVLQDAGIKVDSVASTITAKSVRAMVEALIDGERRPLVLAELAKGRMRAKIPDLQRALEGRFDDHHALMCRLHLDHVDHLEEMIARLDSQIEDMMQPFRAQRTLLTTISGIGPFAAAAILSEAGADTAESFPSAAQFASWIGLCPGNHESAGKRHSGKPRKGNKYLQHVLVECAWAASRTPGYLQSLYRWHVRKFGGSRSPTAKNKAIVAVAHKLSIIIWHVLASGVPYADLGADYLDRRVDPAKETRRLLARLQALGHTVTIEPAA

SEQ ID NO: 111778 - protein, 443 aa, unidentified
MSPENQTHIRGERGQAFADQIRGLNQEQILCVSLDISKYFHVVMIHNALGEIVTPTFEIDIFKTGFEQLCQAIDAALIRTQARLVLLGMEPTGHYFENLARHLQQRPQPVTMISSYAVSLNRQQQLMRREKTDPIDVAAIGDLLRRGEGSPFRPLQGLYLELQHLDRVRLSKVKIQTMLKNQIIGHLDRIFPGLVLIGPEARARYTPLFVTDFWECQTLQHLIRVCPDPHRLAAMTPAELVTAFHAHHFKMGPKTATKIITYAQKVLLPDPELVAIRSELLHHDLILLDAVQQRLAAMEDRLVDLVAQTPYRIWTTLKGLSDLQVARLAAAIGDPAHYARAKQVFRRSGLVSGRNDSGVHQHQGKGCPVLKTGDVHLRRALMDAISTFILHQPVLFKYYAKLKLSKPDLVARVATARRTTGILWATLRDQHSITLVCKQGARM

SEQ ID NO: 111779 - protein, 360 aa, unidentified
MNALKVNLGIDAAKDNCECNLSKLTAQLDVKVIASKIFLNTDHGLKELLKWLIKNTPAECSQLHVVIEASGVYHERFALGLQDAGYCISVVLPNKAKKYMEALGLKSKNDRIDAKGLARMGCEQKLEEWSPLSPFYQKLRTYTRLHEDIQQKKTETTNQLHALKHSAVQMKDAIKVLERLVKVFDEELFKTKKLIEDQIAGNAEVKERMDKVCDIKGVGTLTVATVVAEANGFNLIKNIPQLISYAGYDVVEDQSGKRAGKTKISKKGNAHIRRILHMPALNMMTYKVGAMPALFERTLNKHGIKMKSYVALQRKLLVLIYTLWKNNKSFDENYHKDTSARVQEAEASSRLSLEEAGKAA

SEQ ID NO: 111780 - protein, 459 aa, unidentified
MGRHKSQVSAWEGLKVVHPHAAGLDIGSEEIWAAVAPAENQEPVRKFGTFTPDLHALADWLLACGVDTVAMESTGVYWIPVYEILEARGLQVFVVNARHVKNVPGRKSDIQDCQWIQGLHSVGLLRGSFRPAGEIVALRAYLRHRAGLIEHRAAHIQHMQKALQQMNVQLTQVVSDITGVTGLAIVRAIVAGQRDPQQLAALRDRRCKKSAREIAKALTGNYRPEHLFALQQALALYDFYTAQMAACDAEIERQFANLRPVSDDLPPLPPSQKLNSHSKNAPTYDARSHLYRITGVDLVAATGLNESTVQTIVAETGTNLDSFPTEKHFSSWLGLAPHNDISGGKRLRSRTLPTNNRAGQAFRMAAQSVSKSPNSAFGAFYRRMKARLGAQQAIVATAHKIARAYYHMLKHRTPFHDMGGEEYERRARQREIHNLQKRAAKLGLSLVETQTLGALAGSF

SEQ ID NO: 111781 - protein, 408 aa, unidentified
MDVVYPVCCGIDVHQAHLTACLRRVQEDGHVTKDVQEFATTYPALLILLDWLIAQHCPVVALESTGVYWKPVYHVLAGSLEVLVGNAQDMQQRPGRKTDKADARWIAELLAHGLIRPSFVPPPAISALRDLTRTRVALVQTRSQAKNRGHKVLEDTNVKVASVVTDLFGVSGRRMLAALIAGERDPQALAGLALGRLRRKLPQLEVALTGQFTHHHATIIQASLELVDLLNRQIADLDSQIGELVTPLEPQITQLDSIPGVDKIAARDILAEIGTEMSRFGSAARLASWAGVCPGNNESAGKRRRGKSRKGNRYIRRVLVQCAWAARKTPTYLGRTFRRLEVRLGGKKAAVAVAHKILVIVYHLLAEGTLYDEERYDRLQPRQEAQQRQRAIKVLERLGYHVNLERVA

SEQ ID NO: 111782 - protein, 357 aa, unidentified
MREYIAFDSHKRYTIMERENAQTSVARQRRIDHAPGAIRHALRDCQAGTAVAVEATGNWYWIVTEIEQAGLRPLLVHPRKAKLMMGLINKTDQLDVHGLNRLQRNGTLPTVWIPPAELRDLRELTRVRMVLAAQRTRLKNRISATLAKYGLAVTDASDPYCQKARRQLGELLGQLPPQTQWATGTLLAQLDFVEGQIREQEQRLKQLIAVTPAMQRLMSLPGVGVILSAVIWLEIGTTERFASAERLASYAGTTPRVHASGGVVRYGRLRPDVNRYLKWAFVEAGNSVAVNHLRCPQRHVSELYRRLKARKGHAKAIGAVARHLAEATFYLLNGNQSYQDPSLCPGRSKGGVSAALS

SEQ ID NO: 111783 - protein, 400 aa, unidentified
MGIDLGKRTNVAVVIDQQARQLSRFSFGHDQEGYAYLIRQLQRICKQVGTEEILVGMEPTGYFWKLIAAELDRYGIKYRLVNAYTVKKHREGDQLDRSKDDNRDAFAIADLLRTGKFTETQRLTGVYAELREYHVTYYRLTQEIGRLKGLLDTTVGQCFPELRQLFKSLTGKTVQAMLRQHAAAQAISQLSASEFLTRVETDFTGKRLQRKKLYQAHQLAQVSVGLADRGAHQVTIRCLLDELALKEAQLAEVKEHLMTCFLSCPEAEYMLSLPLGDVTTARILAEIGDPRRYSSAKQLVKLAGIQPTPNHSGQKTRSPTPMSGKGRAALRTMLFFGCLHLIRTDPAFIAYYQHLKTRPKNPLSGLQAIGVLMGKVLHILWALIRQQTHYDPASWQLVYQ

SEQ ID NO: 111784 - protein, 318 aa, unidentified
MEKLYGGIDIHKEKLAGCIMDIDGNITREHTFPSSKKAVERFLCGIPSSGITIAIEACGMRRGTYKILTDMGYDVKLANPKKTHDIACKKKTDRIDAKILADLLRTKYLPEVWIPDEQTLKFRDLARHKSNLTRLKTQVQCKIKSYLLRKGVKYGKLWNEKTLSTLAEEDQDIQNLINVYNSLKKEEKEVMKRIKQIARNRKETTLLMSMPGIAEFSSLMILAEIGDIQRFPSPKELVSYAGLCRGIYQSASTERSVRNTAVNKWLKWIIYECSGRAIMLDQRFQQYFYPIQKRKGENTARRATARKMLTNKETYRAS

SEQ ID NO: 111785 - protein, 374 aa, unidentified
MVDHSEAFVAFDTSKLHNAVAIAETGRTGEVRFLGEIETTEAVTAKLVKKLAGKYRRLTFCYEAGPTGYGLHRLIKNLGHDCIVVAPSLIPKKAGERVKTNRRDAVALAKLLRAGELTAVWVPDPRHEAMRDLTRAREAAVEDLQSKRRQVLSLLLRLGRYYPGKRTWTQTHMNWLASQKLEHAEQRIAFEEMLLAVRQAQERVARLEVAIRAAVPDWSLAEVVTALMAIRGFDLVSATAFLAELGDLTRFGTPRELMGYLGLVPSEHSTGDKVKRSGITKAGNRRARRILVECSWSYRHPPRVGKEKLAKVAAAPRAVQEIAWKAQSRLSARYRALTRRGKRPTVVVTAIARELSGFIWAVNRAVMAHVAPAR

SEQ ID NO: 111786 - protein, 376 aa, unidentified
MAEITRALIARVGVDLAKNVIQVHAVDGAGRRVVTRSFKREAFMAWCAQLPAGCLVAMEACSGAHHFARRLRTMGLDARLIPAHFVSPYRMEGKGGKNDMTDAAAVCEAASRPTMRFVPIKSCEQQGVMSLHCVREGFKKQRTACINQIRGVLAEAGLVFGKSPKVLHAVVDDVIEDAGNELSALARVVLQQVVAHWRALNEQLRWCDRQVGQHVRSSPAAQRAAKISGIGELGASAITASVVDFKQFKSGAQFGAWMGIVPRQNSSGGKASLGRITKRGDEYLRTLLIQGAKSAVMSAAKRDDPISRWLVQLTARVGWQKACVAMANKNARILWSVMTREHDYDPHHLSVKPLAKQHLPPAPRPVQPLALQACMA

SEQ ID NO: 111787 - protein, 453 aa, unidentified
MTKRKTGGHPDLNVVNPNAAAIDIGSTMHMAAVNPDTAAMPVRAFGTFTQDLHDLADWLQSCGVTSVAMESTGVYWIPAFEILEAHGFEVILVNARYAKNVPGRKTDVSDAGWLRQLHSYGLLRGSFRPEAEIATLRAYMRQRERLTEYAAAHIQHMQKALMEMNLQLHHVVSDITGATGMRIIRAIVDGERDPEVLAAFRDIRCHSSLDTIKGALVGNDREEHVFALTQSLELYDFYQEQIEACDRRLEAAVGALTARADGELAPLPKARIKGRQHNAPSFDVRAALYGVLGTDLTQIHGLGPSLALKLVAECGTDLRAWKSAKHFTSWLCLAPGNKISGGKLLSSRTRRSSSRAAALLRLAATTIGRSDTALGAFYRRLSSRIGKQKAVTATARKIAVLFYNAVRHGMSYKDQGAAAYEERHRKRLLSNLQRRAKTLGFVLAPIHETAAVS

SEQ ID NO: 111788 - protein, 380 aa, unidentified
MHSENIAAYIGLDVHKETLAVAIAAPERLGEVRYYGTINNEAQAVRRLFQKLQGLYGNILSCYEAGPCGFGLYHQLTAMNIKCQVIAPSRIPKSPTDRIKNDHRDAISLARLLRAGELTPVWIPDLTHEAMRDLIRARAAAKRDSRVARQRILSMLLRTDKHYAGKHWTGKHRTWLANQSFSQPSQQIAFQHYCQSLEQIEDRILQLDQEISRLLPEWSLCNLVCQLQALKGVGQLIAITLVAELGDFSRFSNPKQLMAFLGLVPGEYSSGNSIRPRGITKVGNSELRRLLYEAAWSYRTPAKVGAWLIYYRPDSVTQYSKDIAWKAQQRLCSRYRSLTAKGKKSQVAITAVARELTGFMWDIALAAQSSFSQQKQNYTL

SEQ ID NO: 111789 - protein, 416 aa, unidentified
MRTLKLTLKGLKMYHVGIDVAKEKHYVCILDDSGELATKPFWIYTDVLGLRELIKRFTELSLDNDDFIVGLESTGAFSENLYEYIIDSDYKAILLNSYQTAKFRDFSTMKKIKNDAIDALVIAELLCTGKYKESHISNEAYHSLKVLGRTKKSLMDKIKTIKREISTVMATVNPEISKVFPNIFTKTALEMIKAYPTATDIAQATPKKLTRLFRHIKGNNFSEDKARILIDLAKSSVYAGRACKARASLLSSYIRILELYCQEKEEIEAQIKKLIEEEIDAVDNTVENLQSIPGVSIKTISAILGECGDIRRFDSAKSFIGYLGLYPTQYQSGNSLSVGRLAKRGIPIAKHALYMAAVGSVLHNPQLNKLFKDKVSSGKSKKEALIILSKKIAMIMYAIVKYNKPYDSHRVFMPRK

SEQ ID NO: 111790 - protein, 367 aa, unidentified
MKKLSTAAMIAKSRTERQELTIGLDLGDRTSWYCVLDESGAVVLEQRLNTTPKAMREVFGGMPRSRIALETGMHSPWVSRLLAELGHEVIVAHARNVRLIGESRKKDDRLDAQTLARLARIDPQLLCPVRHRSARAQADMTLIRARAGLVRARTALLNTARGLVKSYGERLRGCNVRNMNPEKAENLSPELQVALEPLLNAIESLSERIAEYNERIERLAQQSYPQVGQLKQIKGVGTLIALTFLLTLEDPHRFRKSRDVGCYLGLQPGRRNSGQSEPQMHISKEGDPYLRTLLVQGAQHILGPFGEDCDLRRWGLKLSERGGRNGKKRAIIATARKLAVLLHHLWVSGEVYEPLHNSQHRAVMAAA

SEQ ID NO: 111791 - protein, 322 aa, unidentified
MESQVSFNQVVSRGCGIDVHKKMLVATISGEGLRTETREFGTVTRSLTELKDWLLENRVTHVVMESTGVYWKPVYHVLEPSGLTVWIVNARHVKNVPGHKTDKQDSRWLCKLLLAGLLKPSYIPPREQRELRDLTRYRTKLVQDISSNKNRIIRILEDCNVKLSSVLSDTSGVTATRLIDKLCQGKEVTMGDIEEVYHKKIEATKEELFEACNGYITDHHIYLLGTIRGNNRHLESLIRDLDEKIKHALAPYENALERLREIPGLNRKSVEDLIAEIGLDMDVFPNEKHLSSWVGVSPGNNESAGKKKTDAPPTGTSRPNPS

SEQ ID NO: 111792 - protein, 360 aa, unidentified
MDKYIGFDIDSKKTVACVVQKGKKDKYTRLRTDVEQMKKFLQSQQRPGEKLHLTFEIGGEAGHRYDSLVDFVEDITVSNPTKMTWIYRTAKKNDRIDARKQAILLSIGEVPRVHIPSREVRQWRVTIQHRRKIVNSICQVKNRIRALLKSNGFVQAAQRGSWWKAANRVWMRQFVNEVEMSGQQLWRMSLGDMLEQLELLESQLKRVTKYLDGYLERQAGGKLLMSIPGVGPRTAEAVLAYTDDVHRFARGKQYCAYFGLTPRLDESGLTRRLGHISKQGPSVVRWLIVESAWRAVKKSPGLRRFYERVMCGQKNRKKIAVVAVARKLLSIMRAMQISGELFNEQLVCKECGFVNVKKLG

SEQ ID NO: 111793 - protein, 350 aa, unidentified
MTTATLLHHVLGHDLDTSKSVFQLHGVNTAEQPALRKKLSRREMVKFFEKAPPTTIALEACGGSHHWARLLSSFGHEVKLIAPQLAKPYVKRGKNDAADAEALCEAMSRPTMRFVPVKTADQQAALMLVGVRERLIRNRTQLANAIRGFAMEFGIVAAKGMCRIEPLLERIAADQSLPELARELFAMHGVEYRDLLTETKAVEEKLIALHRSDECSRRLAEIPGVGPVGASLLMMKTPDPKMFKSGRDFAAWIGLTPKDHSTAGKVRLGVITRAGDEMLRSILVVGATALLQHVRLGRSRHTSRWLIELLQRKKPKLVAVALANKIARVAWKLMVSGETYRRTEGQTQAV

SEQ ID NO: 111794 - protein, 307 aa, unidentified
MCCVLMVVIAPKKFANTTKGHDELVSWLKGHKIDHAHICIEATGTYMEPVAECLYDAGYIVSVINPALGKAFAQSEGLRNKTDTVDARMLAEFCRQKRPAAWEAPHPLERALRALVVRHQALTDMHTQELNRTETAREVQRPSIDAHLLWLEAELKRLEKQIKDLTDDDPDMKHRRKLLESIPGIGEKTSAVLLAYIGLKDRFAHARQFAAFAGLTPRRYESGSSVRGASRMSKAGHVSLRRALYMPAMVATSKTEWGRAFRDRLAANGKKGKVILGAMMRKLAQVAYGVLKSGVAFDASRHNPVAA

SEQ ID NO: 111795 - protein, 427 aa, unidentified
MKKADLLSTLFVGIDISSRENVVAVVDFESTKPIASFAVPNNEPGAEEMARKISTFITPESGLKKLVIGLESTFFYGVHIANYLSTCRELMPFHTEVYCLNPKSIANYKKSYIGLSKNDYIDAFVIADFARVGRITTKPWRGCQYLALQRLTRHRLHLVKALTREKTYMLSNIFLKFSEFTMLDTEEQPFSNEFGATASAVLTEFLSTEEIVDMSMEKLVEFICEKGRNRFPDPQRTAKLLQVAARNSYRLDKCLYEPLTVAIASSFTMISTYNAEIKKVNQAIEKTIKGLNTNAFLSLQSIPGIGPVMAAGIMAEIGDITVFKSQESLAKYAGLVWRENQSGQFKADDTSMSKAGNSYLRYYFLEATSHIKLHCPEYREYYSKKYAEVKTHQHKRALALTARKAIKLIFGLLAKNQLYSRNRVGQA

SEQ ID NO: 111796 - protein, 477 aa, unidentified
MGKPTSVNIRGLRGDQRAQELDGLDLSRVLVVAIDSARDFPKALICNYFGKVLENPFFFAVNSEGIFTLHAKIQHWVSCVKALRVFVGVEVAGCYHDAIGNALSRHGYQVDLVNSYTTASNRRMMIDFSKTDDKDLLAIAQAVIANNGLSPKRVTGFYEQMQTVCRTRRQLVHEASALKAQIRQLMSIVFREFQGLTCSNTLKQEKVFSSFWASKSRLIMSYCPLPGQLLEMGEEGLKELARFKGLKLKEHEIKLLLQAAQRDLMTTPDQVACFNAEQVKFRLTQLNMLEEQIDALESEMETMLVKTPAILLLSVKGISIVSAAEFISEVGSIFNYTYNRQLVKLAGINPVLSQSGGKKAKGYKISRQGNPALRYIVTMIGKNLCNKKCCNRIFVDYYEHLQRRGKCSNQIYAAAGNKFLRIAFSMLKSHTLFYVPGYEDSSSDIIIKLNHKENKTAAKTALALLTEKENKKTTVAL

SEQ ID NO: 111797 - protein, 421 aa, unidentified
MLQMWGHFILSNGSFIGKPFKIVHSDPRSRDLAVAKIKEAQETYSLKSRCFLESTGIYHIPLLCFLRDKGFDCSVINPIITKNSTNINIRKLHNDKFDSKKAALVGLNVSLKTSIIPDDSVVDLRNLVRDYYYFKDLQSAVALKLTAELKVSFPAYAKVFSKVTTQSSLKLLSSYPLAEDMLAASKDDIVKIIRSTARFGEAYALRKYDTIIAAAQDAAVFGRALPSNAVRIRLYIDTYQEYQKHLDALLKALHETVDRLQDTLIYDQICLLQSLRGIGFLSAIVLIAEMGDFKLFSSPKKLYAYFGLDPAVKQSGKLNGDKVHMSKRGSSLARRVLHMVALNNVKVDKGSGTPVNPVVYDYYTRKCSGKKKTVAMGAVMHKICNIIFAMLRDNKPFEVITPEEHCRRFAAEHPDKIRKAA

SEQ ID NO: 111798 - protein, 386 aa, unidentified
MQKLNDLSRSPSPLDPDGTLIAVIELSLSSWLVAGIVPGVERQPLKKLAVDENALLKLLNRWREEAAKAGHRIKRIAVAFEAGRDGFWLARWLRARDIEAHVIHASSVAVSREHRRAKTDRLDTELLKRSFLGWLRGERDHCKMVAIPTTQDEDAKRPNREHESLVGEQSRIVNRMKAALIRLGIRGFNPKLKKAAERLDGLRTPEGEPIPPNTLAELRRDMARRRLVSDQIRQIEDARLERLKQAPSDGPHAMVRLLARVIGVGVETADMLVQEILSRSMRDRRAVARYAGLTGSPDESGRKRREKGLTRSGNARVRRGMIQLAWRFLMFQKDSVLAQWFRTRTENARGTRKTMIVALARKLLIALWRLVREGVVPDGVVLRPAQ

SEQ ID NO: 111799 - protein, 338 aa, unidentified
MNITTAGLDIAKSVFHFYGVNQFGKLVQKKMLKRNVLAKFMAQLAPCTIVMEACGGANYWARVFRLFGHEVKLIAPQFVVPYRRGNKNDYNDAQAIAEAALRPDMAFVSIKNIEQQDIQMLHRIRQRLVKQCTALVNQVRGMLAEYGIVIAEGKSAFRKSMPDILEDAENELTPISRALFSQLREEFVALEEKLTGYDKQIQQENKINAVCQRLDAVPGIGPITATAIYAAVNDGKDFKNGRHFSAWCGLVPRQHSSGGKNNLLGISKRGNTYLRTLLIHGARAVLKYVDKKDDRFSRWARELKARRGFNVACVAVANKLARIAWVVMAREEAYRPAA

SEQ ID NO: 111800 - protein, 409 aa, unidentified
MRRVKGKRSASSIVGCAPKCAEPHAETPEGVLPQTFRGGRPVSETITSFVGLDVHKDSTAIGEAEAGRENPRFIGTVGPDLGQLLKALKSLGKPETMLVVYEAGPCGYGLARQLRSRGYSCEVVAAGKIARRPGERIKTDRRDALTLARLARSGDLVKVIVPDEGDEAMRDLSRAREDGVRARLKARQQLKALLLRHGHRYGGKSAWTLAHERYLAAVSFAHPAQDIAFAEYRQAVREGHERVERLTEALRTQAEHWRLKPLVAGLATLRGIDFVAAVTLTAEIGDFGRFAHPTELMGFLGLVPSEYSTGDTRRQGDITKTGNSYARRVLVEAAWNYRFPARLSRVLQIRQEGQPKAVREIAWRAQLRLAHRYRRLSSRKLHPNKICVAIARELAGFLWDIARQVKLAT

SEQ ID NO: 111801 - protein, 335 aa, unidentified
MEFDFFIGIDVSKNELDFAVQQGGRFLFHREIANEPPAINAFIKELCKLPGFSLNKAVFCMEHTGIYNNHSLMCLYKKKAHICLEAATQIRNSLGNIRGKNDKVDSIRIAGYAYDKQNKLRLWVPKREIVQQLAHLAATRLRLITIKKQLKAPLKEHAAFSSGKVARQNLQVCCHSLKAIDEDIDRADKAIEQLISTDTELRRLFGLVTSVSGIGKVTAVQIIVATNEFKDINNPKSFACYCGVAPFKDDSGKVVKKARVSHMANKKVKTLLHLSAVVAIQYNADLKRFYERKVLEEKKNKMSVINAVRNKLILRIFACVNQNRPYEKNYLKLVA

SEQ ID NO: 111802 - protein, 320 aa, unidentified
MQTPTEVLNIGADVAKEEIVVACSQGSIPVRKLANQRSALLAFLKDLPAGSRIGMESTGAYHELLADAAHKLGFVVFVLNPKDARHYAKAVGLRGKTDRVDAELIARMVAHEHTKLHPWIPPTAEQREMARLIKRRAKLSSLRQALAMSLKGLEGFATDLKALRARFDQVLVRIDQRVKALVEASPDRKQHVTHLRTICGVGPVVSAALVNTLERVPLKSADAFVAFTGLDPRPDDSGQHRGKRRLSKRGPAELRRLLYVAAMSAKKKQAWKPLFEHYRAKGLSSTAALVIMARRIARTAWSIYTYKTDFDPARLTKSLT

SEQ ID NO: 111803 - protein, 419 aa, unidentified
MSFKILKNNCCGLDVHKTWIFACIGITDSRSRTEYKQARFSSFSKGLQELCDWLAKYNCTDVCMESTGKYWIPVFNILEKNNVWVTLSHPKYTKPQKGNKTDRKDARWICDLYMCGMVKPSFIPPADIRELRDLVRYRYKLTCMITGEKNRAQNCLTVSNLKLDEVFSDVFGKSSRSITEQILQHPGEIFDVTPFVDGRCKTPIEEIQAAVDGAVSTEQAVKLKQCLNHIDELEMHKAEIDREIFRLSDKYEEALILIRTVPGFDKNPMTAIQVLSEIGGDMSVFPTAKNLVSWAGCCPRNDQSNQKIKSTRISRAGSYFKPVLVQVANALIKSKKNPEFTTRYRRIKARRGHKKAIIAICRMLLTAIWHILTDLKPYTPEGFLVSRPVNESKVLTTSQALNLLKQRGYIIKDDVVPVS

SEQ ID NO: 111804 - protein, 336 aa, unidentified
MNTISAVVGIDVSKKKLDIALLVDGKTRAKVVENSVAGHQALLAWLEKSKVSISTLHVCMEATGVYSEPVALALHRAGITVSVVNPACIKGFGHSENLRNKNDIIDAGLIARYCAAMRPEPWVPAPLEQRQLKAWSMRVQTLKDIRQQEENRLEALNVSGVEDVAQHVQQLIDWLSKEIAKLEKDINDHIDRHPNLKHDAELLASIPGLGMTTVAKILGHLGDIKRFDSAKSFAAFLGVTPKQRSSGSSVRGRTMISRTGSTSLRAALYMPSLVARRHNPILHRFAERLAETGMAKKAVIGAVMHKLTHLIYGVIKTGKPFDANYLAKGLAIQDGI

SEQ ID NO: 111805 - protein, 393 aa, unidentified
MKKIVHYLGLDVHKETIAVAIAPAHTTEVRHYGIIGGTLEALDKLIRKLSTPNIELRFVYEAGPCGYVIYRHLKSKGIPCVVVSPSLIPKKATDRVKTDRRDADQLARLFRAGELTPIHVPDQEDEAIRDLVRARTGAMRDQRQARHRLKGFLLRLGYRYTGRTSWNEAHKRYLSGLLMPQPAQQIVFQEYIHAIDDASERLDRLNHAMADALPGWKWEPIVAALMSLRGVQVLTAMTLAAEAGDMTRFEDPRQLMNYFGLTSSEHSSGGKRVQGGITKCGNTHCRRVLIEAVWHYRLRPLVSEAMQKRQEKQSKEVRLIAWKAQQRLHKRFKQLSARKKSVVAATAVARELTGFVWAIACAVKPAAQEVKPEILRTCKGRVYQLNNPKKDQK

SEQ ID NO: 111806 - protein, 304 aa, unidentified
MHELFVGIDVSKDKLDVHVRPSGESITLGTAPAGLHELVERVHAWGPALIVLEATGGYEVVVAAALASAALPVAVVNPRQIRDFARATGQLAKTDALDAAVIARFAEAVRPPVRPLASPAAQARQLLEMLGAERNRQAQARDQQVQRQLGTHVRWLTKALADLDRDINDTIRSSPVWRATDDLLKSVPAVGPVTAHTLIAQVPELGQLGRRQIAALIGVAPLNRDSGTLRGRRMIGGGRASVRQVLYMAALVGVRYNPQLAAFYSRLTGAGRPKKVALVATMRKLLTILNAIVRDQRPWQPQNA

SEQ ID NO: 111807 - protein, 434 aa, unidentified
MTRYVGLDLHKHVVQASLINEEGKRLESHRFPCTQESLLTFARERLGPEDQIALEATTNTWAVVALLRPFVARIVVANALRTRAIAEAKVKTDKVDAESLAQLLRCDYLPEVWQPDQETQQLRELSVQRSGLVADQTRLKNRVRSLLAQRLISAPMPTLFGVAGRQWLRQAVLTPTDRVIIDGFLHLLEGLEAEQERIEKRLAELSYPKEEVRLLMTLPGVGAAAAQALVAALGDWRRFADGDVAASYLGLTPRVHQSANTCHYGRITKAGNPQARWLLTQAAQQVAQHPGPLGVFFRRLKAKKNHNIAVVATARKLVVIAHLMLKNREPYRYAVPATTRDKLAGLRVAATGVRRRKSGPLREPMQSQPEGIRVHKTPALNEVYSDEGLPAAKSLSELGAGETKMLTEMKLLEHASNVQMRKQRFCRRHTQKTG

SEQ ID NO: 111808 - protein, 360 aa, unidentified
MTTSIPSKTTVSYDSVKLGIDAHAKYYWVSRQLDGATPQPVQKMTYDELLLFVVKQQKLTPNLVTCYEAGAFGFHLHRKFEQLGIKNYVVQPQDWDERGKGVKNDRLDAAALCQRLDRYQRGNTKAFSTVRVPSEDQERERAISRQRQQLMRERQRISAMGRSLLATHNIHVTGKWWKGKTWTVVQKLAPAWVVERLEVFIIILKPLEEQELKLMHQLQEAAQEQKIPRGVGPLTFEILRREVGDWGRFNNRRQVSSYTGLCPREHSSGGKRRFGSVSKSGNPRVRAMLVEMVWRMKRWQPEYKPLRKWAHVLYSLTPNAAAKKKAVVAIARQLAVDLWRIFTGQCKAETYGLIYLPEAA

SEQ ID NO: 111809 - protein, 342 aa, unidentified
MTFVGCDLHTRMQQVAVLDTGTGEVSERRLDHDGLAVEEFYAALPRPVTVGIESTGYAVWFHALMQRLGHTLLVGDAAKMRAMVVRKTKTDRRDALHSLDLLRHDRFPTIWVPDPATRDLRALLTHRMRLVRIRTMVKNGLQAIALNARLAWGSKLLRQAGLVQLPALALPPHTARRRDQSLELLAGLTTQIRELDDAITTAALAHPDAPRLITHPGVGALTALTTIVVLGPVSRFHDSKQVVSYVGLAPALNASADKYHLGHITKQGSPLLRFALGQAAAHAARMDPDLQRTYGALVHRRGRPKAKVAVTRKLLVRLFIMLRDQIDYDEFCRRGRSAPASA

SEQ ID NO: 111810 - protein, 373 aa, unidentified
MDQSSKTLYVGLDVHKDTIVVAALFPGHQEPVRWDVPNEAMALRRLARKLRRQGGDQVLCCYEAGVCGYAIQRRLQAEGVRCVVVAPSLIPVKPGQRIKTDARDALKLAQLLRAGLLTEVAPPTSQEEAVRDLCRAREATLGDLNRSKNRLTKMLLRKGIIYREGQKAWTLTHRRWLGRVTFESDTERFIFEDCRLGIDQLEARLQSLENAIEALAQQEPYRQAVGWLCCLRGVKTLTAMTLLSELHGFRRFTSARQLMGYLGLVTSVHASADSMHRGHITKAGNAHVRRILVEAAWNYMRRPEVSPALRRRRQGQPAWAVALADKALVRLHQRFQALTRRGKPHNKVVVAVARELVGFIWALLYRETMNQAV

SEQ ID NO: 111811 - protein, 338 aa, unidentified
MKIIYLGIDLAKNVFAVHGIDEFGKGVLVRPNVRRDQLLELIATLPPCVIGMEACSGAHHWARAFAEFGHTPKLIAPKFVAPYRMSGRRGKNDAADAAAICEAVQRPQMRFVPVKSVDQQGMLCLHRVRQGFVEERTATINRIRGLLSEFGIVLPQKAEVVRRQAARALEALPGWANRSIGDLLSHLHALDTRIDEYDAHVKEIAQADARSRRLMQMPGMGPVTASALVATIGNGGDFKCGRQLAAWLGLVPGQYSSGGKTRLGYITKAGDPYLRTLLILGARSVLAAAPKRTDRLSRWALSVKERRGHGKAQVAVAAKNARMAWAVLAKGEAFAPLQ

SEQ ID NO: 111812 - protein, 341 aa, unidentified
MQITTIGLDIAKNVFQVHGIDGDEKVVVRKQLRRSQVMGFFRELAPCLVGLEACATAHYWARELAKLGHEVRLMPAKDVKAYVKRNKNDAADAAAICEAVRRPTMRFVPVKSAEQQAQLMQHRARDLLMHQRTQLINAMRSHLAELGIIAPQGREGVKELLAIIANEATTHLPNDARASLIVLAAQLQALQTTIAAIEKRITVQHRANEESKRLQTIPGVGVIGASAITATVTNPKIFRSGRDFAAWIGLVPRQMSTGGKPKLGPISKQGDRYLRRILVVGAVSTLRRAKLNPERYPWITRLLARRPFKVVAVALANKMARIAWALLISGKTCRAAWFATA

SEQ ID NO: 111813 - protein, 366 aa, unidentified
MKKLADPVRKVNTQCVGLDVHKSLTVFCVLDGEGKTIREERMASTREAFEALVCEIHAAGPAHFTFEASRSSLWVHGLLIEMMGAEFVHVAQAKRIRAIANSNAKNDQRDAWWLAYLTYEGRLPEAHVPSASILELRIATRERAVAVRMRTKIINRLKGHFAQTGNVVPSSSVRTQAAKLFMAKTALETPGIRGQAMRSCLGDLDYQDAAIKEWEEAIDSLLVDLPAVDLIAKEIPGTGKILAATIVAEAGDIRRFHSAKAFGCATGLTPSDHSTSGITKHGGITRDGNPHLRWAMTQAAMGCLRSRRGAGLAVGNWIRAKEKRMGNKAKARAAGGRKLSESIWRLFKYGELFDAGRAFGSRGVSK

SEQ ID NO: 111814 - protein, 347 aa, unidentified
MRFYNRQHRHYCGIDLHVKTMYVCILDTAGQVLVHRNVKSNPEAFLETIGPYRDDLVVAAECMFTWYWLADVCAAEGIPFVLGHALAMEAIHGGKAKNDKLDSFKIATLLRGGLLPQAYVYPAAMRSTRDLLRRRLHFVRKRGQLLAHIQNTRAQYQLPEFRRRLAYPANRAGVSEHFTDPNVRKSIDGDLALLERYDDLITDLEVTIVREAKRHDGDAFHRLRSVPGIGTVLALTILYEIHDITRFDRVQEFASYARLVKCAHQSAGKTYGTGGAKMGNVHLKWAFSEAAVLFLRHAAGGKKLLAGIENKHGKGKALSILAHKIGRAVFYMLSRGTVFSMEKFLAA

SEQ ID NO: 111815 - protein, 409 aa, unidentified
MAKDTMRAAGDWATLRLFEPGGSWPMRYIEQTEAARDGAVVFVALELSKPAWLLAAQGSPSGKTSLHRLDRGDVAGLLALLRRLQAREQRASGNQVQVVLGYEAGYDGFWLQRRLSVEGITCCVMDPGSLQVDRRARRAKTDRLDAAMLLRALMAWWRGDRAACHMVQVPSVEREDARRTHRERQRLIAERVQHVNRIKGLLATQGVYDYRPLRRDRWKRLEELRTGDGRELPPCLRREIEREFKRLELVLEQIAASETERDATIEAPAAEDVDAAKVAQLSKLGGIGPELATVLVREALYRSFTNRKEVAAYAGLTPSPYASGDRHRDQGISKAGNPLLRKAMVELAWLWLRYQPDSALARWFTERVGAVRGRMRKITAVALARKLLVALWRYLTTGLLPDGVRLKAA

SEQ ID NO: 111816 - protein, 346 aa, unidentified
MMIIGCDFHPSWQQVSWVDTETGETGEQKLVHAAGEAKRFYQQLAGPALIGMEATGNSQWFIELVQDLGHEIWIGDAAQIRASYVRKQKTDKRDAAHILKLVVEGRFPRLWAPDREQRDLRQLVLHRHKLVEIRSRVKNELQHLSLNKGMQKKRTLWSQAGQKLLRELPLKPWASCRREDLLGLLAMLDEQIGKLDGAVQQAAEEHAQAKLLMTQPGVGPNTALAFVLTIGDASRFARGKQVASYLGLIPREESSGGRQKLGAITKQGNRLARALLVEAAQIAVRYDPQFRREYLHRCHQKPKAVAKVAAARKLAVRLYWMLRTQVAYPEIVRIESSPRVPLVGAS

SEQ ID NO: 111817 - protein, 353 aa, unidentified
MAPFPSPTAPLKCVVGIDIAKDSFVACVGHSTLDQQLHFGKETTFANTASGFADLLSWVAKQHVSSSPLWFVVEATGVYYEELAYFLTDNQLLLSVLLPNKVKYFARSTELKSKTDQLDARLLCRLGLERALPAWQPPTPALRQLRALARERQVLVRQAAQLKTRAHAYQHSYQPDSRTLARLAAQQQLLVIQLKGLDQDLADLLKAEPELARKLGQLTSIPGIGLTTAIVVVAETNGFVLVENERQLASYAGLDVVQHQSGLSARAARISCRGNVRLRTALYLPAVSSLRYNPQQIAFYARLRARQPSGKPGVIAVMRKLLLLCYSLWKNDCTYDPHYHPAHLTEKEVAPTT

SEQ ID NO: 111818 - protein, 367 aa, unidentified
MTVTIVDVARPVLGGVDAHLEVNVAPGLVTGGVDTHLDLNVAAALDGIGGLLAVAEFPATAAGHRELLGWLSGFGPVARVGVEGTGSYGAGLARFLRAAGVAVVEVDRPNRQARRRAGKSDPLDAVEAARAALSGRARGAAKSRDGNVEAIRALVVAKRSARSAKIQALNQIRHLSFTTPERLRQRLAGVSRHQLAARAAALRPGSREAADPVVAATKTALRLLGRRVLALDEEKARIDALLTGLVTQTAPQLLALFGVGVDTAAALLVTAGDNPGRLRSEAAWAHLCGTAPIPASSGKVTRYRLNRGGDRQANRALWGIVITRLRNDPRTKAYMDRRLGEGRSKPEVIRILKRYVAREVYHHLPRT

SEQ ID NO: 111819 - protein, 355 aa, unidentified
MNSIKYIGMDLHSATISTAVVNEAGKLNMEATIATEAAAVLDFIAGVQGTLHVTFEEGIHAAWLYELLLPHVAEVVVCDPRQLPRHRGENKNDKIDAQQLAQWLRLGVLKPVYHRPTGLRTLRELVRSYRTLVSDATRVMNRLKVIYRARAIAAKGARVYSPRYREGWLKQLREPGVHHRAELLYRELDLLLSLRQEAKKAMLAESRKHAAQKILLSIPTLGAVRVAVLMAVIQTPHRFRRNRKLWTYTGLGLVTRSSANYRLVEGQLTRARKPALILGLNLNHNHVLKEIFKDAAATAVSRQGPFREFYARQLATGKDPEIARVIVARKLATIVLTLWKKGERFNAEHLKPQAA

SEQ ID NO: 111820 - protein, 313 aa, unidentified
MAEKIYDVIWGIDVSKNWLDISISGKVQKVDQTQRDIEEFIKKNSVSDKKRLAVLESTGGYERLAASCLSSAGFVVHVAHPNRVREYAKARGQLAKTDKLDARILEGYGEFIDPLSIHDLPTAVERKFRELSGRLGQLKETRHQEYCRLGMAVEKSIKRSHKSVIGLMDKEITQLEGELNCLIESDEELKKKNDLLRSMKGVGPVLAMTLLAELPELGKIDKKAIAALVGVAPITKQSGKHAGKSMTQFGRAGVRKILYMAALVACRHNERLKEFYQHLVAKGKPKKVAVVAVMRKMLVILNAMVQHNTAFKA

SEQ ID NO: 111821 - protein, 409 aa, unidentified
MRIIGMDIHRVFAEAVVLEDGEIKRLGRIGMTRDHLEDFARTLLPTDHVVVEATGNATAVTEILAPHVARVAVANPLQVHLIAKAKIKTDAIDARVLAQLYGAGFLPEVWIPDAATLARRRQVTRRRQLVRQRVRLKSIVQSVLHANLIPPCPFADLFGGKGRAWLRAQYLPDDEREAVERHVEEYDRLSEALKGVERDIARAALADTNVTRLMTIPGVDMVVAVGLMAAIGRIDRFDRPDKLVAYIGLNPSVHQSGIGPAHHGRITKRGRSDARHLLVEAAWQTVRGPGPLHAFYERVRAKRGNHIAAVAVARKLVVIIWHLLTKAEDYSWVRPSLHAKKIRDLELRAGYPPRRGQKGASYDYNIPQRRRDERNRAQQAEEAYRRMTSGWRRSGPRSEPTGATNEERQ

SEQ ID NO: 111822 - protein, 378 aa, unidentified
MYGATHRGEPTVPTTKTIDRGRIHLGLDVAKNSIAVAILRPDELEPDTEKIAHDEASVRRLIARLGDPRDLFACYEAGPTGYDLSRLLTSIGVRTDVVAASLIPKAPGDRVKTDRRDARRLARLHRAGELTAIRVPTPVEEGIRDLCRARQVVVEDRRRARQRLGSFLLRHNEIYREQTAWTAKHEEWISSRHFADQATESAFSFYRAAVAERDVTLQAITAEVAPYFDEAPFAEPVHRLAAYRGIDYLGALTIVCEVCDFRRFAHAGAFMGFSGLVPSEYSTGESVSRGHITHAGNVHVRTQLIESAWAYQHGPARGVVMTRRQVGLPPETVQRSWRAQVRLCGRFRRLGARKDSRNTVVAAIARELAGFVYAEMTA

SEQ ID NO: 111823 - protein, 314 aa, unidentified
MTAQDIFVGIDISKSRLDVAITPGNQTFTCPNSEDGILKLVRRLEKFNPRIVLLEATGGYEFILVAALRAAGLPACFINPKYVRNFARSAGITAKTDRLDAQVLALFAERLRPQPRTLPDERQQELKQLLTRRRQLLEMIQMEKNRLDPTPSPRVKQSLQQTIQSLEAQLAALHQEIDDFFQQQPLWRDLEKTLTSALGIGHLSALMLIAYLPELGRLNRKEIAALAGLAPFNRDSGQMRGQRHIEGGRSRLRQALYMATLVATRYNPVIQAFYQRLLEKGKAKKVAIVACMRKLLTILNAMVKKQQPWCPQHL

SEQ ID NO: 111824 - protein, 384 aa, unidentified
MQSIVYVGMDVHKESYTLCCYRFEEDKLKFQQKIDPDYKNILKYLEQVRKQYKEEVEFICGYEAGCLGYTLYHQLAEHGVECIIMAPTTMALTNKNRVKTDKKDAGNIAKCLAFRTYSKVNVPTADDDAAKEYIRMRGDMKKSLKMLKQQILAMVLRHGYRYGTGRKNWTVRHVAWLNSLDMGGVLQETLEEYLTEYEHFTDKIERLDQRIEELANGEQYNEKVKKLRCLIGVKTLTAMSVIVETGDFSRFSTAPMYAAYLGLVPGEDSSGERQSRSGITKAGNSHVRRMLVESAQSYTRGRVGYKSKDLKGRQRGNDPEVIAYADKANERLRRKFYRMTLKNGIKRNVAATAIARELACFIWGLMTNKVRGRVTDVAISQTLT

SEQ ID NO: 111825 - protein, 412 aa, unidentified
MQALVERCCGLDVHQETVVACLLVGTPGAQPTKEVRTFRTMTRDLEALRDWLREAGVTHVGMESTGVYWRPVYSVLEGCFELIVGNARHIRNVPGRKTDVKDSEWIADLVRHGLIAKSYVPPRPLRELRELLRYRRKLVESQAAERNRLLKLLETANIKLASVASDVFGVSGRAMLRELIAGEASPEAMADLAKGQLRRKRADLILALDGRLEEHHRFLLAMQLRRLEAIEADIAALDLRIGERLEPYSAAHALLMQIPGVDWVVAAVLIAEIGVDMSVFLSVYHLSAWAGVCPGSYESAGRQKSGRARKGNVHLRTILVGAAISASRTKGSYLKDKFHRLKARRGAMRAALAIAHKILVAAYHMLAKGLAYRDLGEAYLDQISQTRTVANLKRRLERLGYRVILEPNAQAT

SEQ ID NO: 111826 - protein, 408 aa, unidentified
MKKHSNEARVKAAVNTAVKTAVKPAVQAGTKTAAKGQRQRQRGGGTAASRRRQAQDNQAPTIGIDVGDRTSRLCVLNAAGEVVEEGSMATTEAGLRARMARQPRARIAMEAGTHSAWMKRVLEALGHEVIVANARQLRLISHSSRKDDRADAETLARLARADVELLRPIRHRGQQAQQDLSRIRVRAALVEARTGLVNAARGLVKVFGHRLPACDADQLTTQRLAGLPESLREVLRPLLEEVEALTARIQACHQELDQLARQSYPETKLLRQVSGVGPLIALTYVLTIEDPWRFARSRDVGCYVGLRPRRSQSGESQPQLRITKEGDRYLRAMLVQGAHYILGWRGPDSDLRRWGQQLAARGGKNARKRAVVAVARKLAVLLHKLWTTGEVYEPLRNNRCGPQAATAA

SEQ ID NO: 111827 - protein, 370 aa, unidentified
MLDTTTFVGLDVHARSIKAVSLDVMTGEVRAAAFGYDAGAVAGWVRSVDPRARCVYESGVTGFDLQKRLSGLGVDCVVGAVSKMIKPSADRRRKNDRNDAEFLARMLSVGNVVEVWVPDDECEAARDLTRALEDARDDLSRSKQRLSKFLLRHGLAFDERTPTGRRKGNWTRAHWSWIESIRFAEGADNDVLAYYVDAVRRAAEEKARLEGLVGAEARKPRWRRRVDSLRCLKGVDTATAADLVFEAGEFSRFRNARSFAAWVGLTPSEHSSGESDRRGAITKAGNKHLRKALVEAAWHYLTCSGRPKDLAKGQAPDRVARRHAAKGVRRLVERREALLARGVHGNKANVATARELACWVWAVGLMAEEA

SEQ ID NO: 111828 - protein, 430 aa, unidentified
MNYNQNHKIAQITSQTLIIGVDIAKFKHVARAQDYRGLEFGKPYTFENTSSGFDGFLAWIHELTQQHDMEKTIIGVEPTGHYWLNLAHFLREQAIKLVVVNPMHVKKSKELDDNSPTKNDVKDARVIAQLVKDGRYAEPNIPQGVYAELRVARKIRDLLSVDLQSVQGQIHNWLDRYFPEFLTVFKDWEGKAAIQLLKLHALPHEIVKLSDEEILSHLKLAVKRAVGVSKVRDLKHAASISIGIREGANMAKLELCTLLEKYTLIKERFEELDSKIDGLLEQIPGVKQMLAIKGIGKDTVAGFFAEVGDLKYYSHPKQIIKLAGLSLKENTSGKHKGQTKITKRDRKKLRALLFRVIMPLVAKNSAFKALHQYFTKRPQNPLKKMQSLIALCNKLIRILFTIGTKQCEFSEARMLSDIPHMEVTSIAVAA

SEQ ID NO: 111829 - protein, 411 aa, unidentified
MERIVERPGALDVHKASVTACVRIWEGRKLTEQIAEFQTTVAGLLALGDWLAALGVRQVVMEATGVYWKPVWAVLEDSFELMLVNARHVKQCPGRKTDVLDSQWLCQLLEAGLLRASFVPPKPIRTLRNLTRYRKTQINDRQRESSRLHKILEDTGIKLSCVASDILGKSGRDMLDALVTGTTDPVVLADLARGQLRKKLPALQEALVGRFEDEHTLVVGQILAHIDFLDEAIDRLSAEIEERIRPFAAQRDLLMSIPGVKQRAAEVLISEIGVDMSAFPTPKHLASWAKMCPGNDQSAGKRRSGKTGKGNKWLRATLTEATLAATRTKNSYLAAQYQRLRGRRGHSKAVTAVGHSILTAAWHMLQTGELYRDLGGDYFTQRNPDQATKRLVRQLEALGHHVTLQPREAVA

SEQ ID NO: 111830 - protein, 313 aa, unidentified
MKALQSNVFIGVDVSKERLDVAVAPSGETIGFANNEDGIALLADFIKPQAPALVLFEATGGWEMNAVNHLATQRLPLVVLNPRQVRDFAKATGQLAKTDAIDARILARFGEAVRPEVRPLKPVELRKLEALNTRRRQIVEMITAEQNRLVSAPEWVRPDIEELIAILKKRLAAINRDLNKLIRKSPLWREKDKILQSFPGVGPVMASTMIAELPELGNLNRREIAALVGVAPLNCDSGTHKGKRKIWGGRAALRSVLYMCALTATRCNPVIREFYQRLRRAGKPFKVAITSCMRKILVILNAMMRSRTCWQTP

SEQ ID NO: 111831 - protein, 342 aa, unidentified
MQTNVGLDIHKRFIYAVVLDSSGDLLLEKKVKNDPYELDKFLKGIEKDSKIALESCSCWEYVYDYLTDKGFTNLVLANPSRVRLIATSRKKTDAHDAMVLADLLRTNMLPTSYAPSTVIREQRQITRHRASLGRLKGIVKNKIHAILIRNGINQEFSDVFGQEGTRYLMSLDLSVVDRYQMDQYLELIRHYDIQIRKTEARIEEYVEYTPQVRLLMSIPGISFYSGLAITGEIGDIRRFSSAKKLTCFAGLNPSVSQSGDRCYTGHIAKQGNSHLRWMLNQCANIAIMHDSTLAKIYQRIKKRRGHNIAITAVSRKILCFIYVMLKHNIKYQALQVHKAKAS

SEQ ID NO: 111832 - protein, 389 aa, unidentified
MQTARKTATHTIAPVECGAIFVSLELSRSIWLVTALATPVGSKMSRHQVRGGDMSGLLERFSDLQRNVQRRTGQVVPVIVIQEAGLDGFWIHRALVTEGIESHVVDPASIAVSRRHRRAKTDRIDGEALVRTLMAWRRGEPRVCSMVCVPTPGEEDRRRVCRELKTLIGERIRHVNRLKGLFFAQGIDGYEPRNKDRRERLEDLRTGDGRELPKHLKALALRELEIIELLNQQIEAVKAERNALLEKAPVSGSAPEPVRMLLELKGIGAGFAGALWSEGLFRQFENRRQVAAYAGLAPTPWKSGTINHEQGVSKAGNLRLRAIAVEMAWLWLRHQPDSALARWYHERVRRLGPRTRKVTIVALARKLLVALWKYATSGVVIEGARTKTA

SEQ ID NO: 111833 - protein, 419 aa, unidentified
MSLALPAAQFFVGIDWAAETHAVCVMNADGRIVSQFTIGHSADGITLLIRRLAKLGEPGGAMDIPVGIERPNGRLVDLLLEAGHPVVPVSPNAIKTWRESEVLSGAKSDAADAAVIADYLRLRQHRLKTATPYSGETKALRTVVRTRDDLVEMRVAAVNQLAALLDAHWPGAKAIFADLESQIALEFLTRYPTPAAAAHLGEKRLAAFCAARGYSGKRPAAVLLQRLRSAPSGTTDEALTPALHDAVLALVGVVKAVNAAIKDLDRSIAARLGEHPDGEIFTSLPRSGRINAAQMLAEWGDCRQAYKGPDSVAALAGCTPVTKASGKHKAVHFRWACNKRFRKAITTFADNSRHTSPWAAQIYNQARTAGKDHPHAVRILARAWIRVIWRCWHDGVPYNPATHGAATILNQHTTTRSAA

SEQ ID NO: 111834 - protein, 337 aa, unidentified
MNLKRIGLDTSKAVFTVHGVGQDERTALRCSLKRAAVEEFFAKLPATVVALEACGGSHHWGRRLTALGHEVRLIPPQYVKPFVKRGKNDRNDAAAISEAAGRPEMTVVAVKSAERQAGAMILSVHELLVGQRTQLVNAIRGQAAEFGVIAAKGISKIEGLLEKIASDAAMPQAARDMLALLGARVSELDTQIKQVELQMKQQHQASPVSRMLDEVPGVGPIIALNCALRVDASQFKSGRHFAAWLGLTPKERSTAGRQRLGRISKEGNERLRHLLVSGAMAVIKYARPGSKTASAWLLKLLERKPRKLAAVALANKTARIVWAMMSSGEAYRRQPAG

SEQ ID NO: 111835 - protein, 397 aa, unidentified
MSTVFVGIDVSKDYSSAQGLDREGKKLFYLEFAMNGEGFSQLLRELKTRCEDLSGVTVGMESTGCYHINLFAFLCSEGIACVVINPLLITNFARLSLRKTKTDKKDALTIAQFLLAHGSELSQVSYSQNSQDLKDLARERESLAGMMAGMKNDVRRLLQMTFPELEHRCKLFTETMLRFLIQFPSARAIRAAKPKAISKALIHTEGKRKRVFISAEEMIKLAKVSVASESVAKEWILSEKIETLLYLEGKQKRITEALIEACRSMRVDELEIVTSVDGISAITGSTFLAELGEIETFKSYKHVIAFAGLDPSIHQSGQYMGMSRLSKRGNRHLRRVIFLMTLCAVRSHNIFREYFLKRKEEGLPPKKAILATAHKLLRVLFAMLTRKSYFRREVVEV

SEQ ID NO: 111836 - protein, 372 aa, unidentified
MPDVSSNQPVDVRQFVALDVHKLSIVAGTLPPTGGQPEVTRIETTEKAIRRFIKRLGGPDGLAVCYEAGPGGFALWRLLSSMGVACDVVAPSLVPVRAGDRVKTDRRDAKKLVTLYRAGLLRFVQPPTPETEGLRDLLRCREDLRCARTAARHRVSKQLLRHGLIFREGKKSWTKTHLAWVHRQRLADPLAHAALEQMLIHLDGIDRQLATLDARLEQVARDHRWVWQVDRLRSFRGISTLTALGLIAEIGDFARFQHPRELASWLGITPSEYSSGESQHRGHITKSGNRHARRLLVEAAWHYRHTPRRPSSGPDPSDRAWQAQIRLFHRHRHLTQQGKRSTVVTVAVARELAAFLWAEMTDQPARQETLAA

SEQ ID NO: 111837 - protein, 334 aa, unidentified
MVNRETGELIERRLDHSNGEAKKFYAELQKPVRVGMEATGYAQWFERMLAKLGYELWIGDAAEIRAAMVRKQKTDVRDALHILDLLLTKRFPRIWIPSPVERDVRQLLRHRHKMVGLRTSVRNQLQALAMGQGVCRKRKLWAAGGRSELQALRLDPWASRRRRELLEILDRLDPILGELDRAVAQEAEQRAAACSLMEQAGVGPVTALMFVLTIGPVERFRRSKQVVSYLGLNPRESSSGGRQRFGAIRKQGNSMARFLLVEAAQTAARYDEELRRDYQRLKFRRGTAVAKIAIARKLAVRLYWKLRQQHSALPPTRMQGSPEHPVVGASLSRN

SEQ ID NO: 111838 - protein, 373 aa, unidentified
MYYTTLFVGMDVHKENFTVCCYDMIQDKIFYAQKLEPDYNQILKYLTFVRKAFRKDVDFVCGYEAGCLGFTLHHQLTQHGVSCVILAPTTMMKPAGKKKIKTDKRDAALIARCLASNNFSPVHVPTTQDEEVKEFLRMRDDHRLALKKVKQQILAFCLRHGYSYTATKNHWTVAHIAWLRSLKPEGLYSEILSEYLLTFQALSDKLERLDWRIEELAAMKAYSEGVKKLSCFLGIKTHTALATMVEVGDFHRLASANQFASYIGLVPGEDSSSESVNRLGITKAGNAHIRTLLVEAAQSYTKGQVGYKSAALKKRQAGNTSEVIAYADRANERLRRKYYKMILSKSKRTNVAKTAVARELACFIWGMMTDRIA

SEQ ID NO: 111839 - protein, 312 aa, unidentified
MYYIGIDVSKKDLSVFNGKKDLKFINKEGLKSFKKYLKKKYNLSDLVIIFEPTGIYSFYLKEFCAENSIKAYIINPKQSHNFARALGIRPKNDKIDARTLYKFHKLIEAKDIRVPKIDQQAKTLSSYLTSYEFAVKQRVALSNHLESLRDKELITLIKKELKMAKKLEDKIFHDILKYVSKNQNLKEDYQRLLTISGVGDKTAIVLLTLFKTYQGTNRSQITALVGLDPVRRESGTSVKYRVKISKNGKGIYRKIPYLPTICATVHNQKIKIFYQRLLAHHKPKKLAIIASMRKIILIAHAMYRDKTEYVAV

SEQ ID NO: 111840 - protein, 412 aa, unidentified
MNAVGIDVSKGKSMVAILRPLGEVVAKPYEVSHTAAGLKKLADFLKGLGGETKVIMEHTGRYYEPVAQVIHERGIFVSAVNPLLIKEYGGNSLRRVNTDKAASKKIARYGLDNWAELREYTPMDTIRYELKTLNRQFHLASKNRTAYSNNLIALLDQSFPGANRWFDSPPRKDGSQKWVDFVMTFWHADCVRSVSQTAFTERYRKWCKRNGYNFNAAKASQIHGEAKEMITLVPKSVTSKLLVQEAASQLLNLSRMTEVLRAEMNRLAAKLPEYPVVMGMYAVGESIGPQLMAEIGDLNRFESKRSLAAFAGVDPMPNQSGTKDCRSNRTSKRGSPYLRKTLFNLMSMLLQLAPSDEPVYQFLDRKRAEGKPYHVYMTAGANKFLRIYYGKVRDHLASLDVASHDPTSANPL

SEQ ID NO: 111841 - protein, 352 aa, unidentified
MEVTTIGLDLAKSIFRVHGVDTTGEVVVRRPLRRAQMLPFFARLPSCLVGMEACGTSHYWARELIKLGHEVRLMPPAYVKPYVKRGKTDAADAEAVCEAVRRPTMRFVPVKSPEQQAVLSMHRARDLLVKQRTQLVNMIRSLLAEFGLNIPKGLERALLMARRIVDGKAPDVPMEAAKIVSTLSQQALDIHVRLRQIDRDLLVWQRGNDVARRLMTIPGIGPVGATALAASVTDPHQFRSGRQFAAWLGLTPLQKSSGGKERLGRITKMGDKYLRKLLIVGMTSLVCRAKHNPETIEPRLANLLARKPVRVATVAMANKTARTIWAIMTRGETYRAGHQPALAHKNNVTRIS

SEQ ID NO: 111842 - protein, 312 aa, unidentified
METKFVGIDVSKLTLDFDCLPVSAPQQFSNDAVGIAALVALLQNSGVERIVIEATGGWETPGVSALAVAKLPVVVVNPKQVRDFAKAMGHFAKTDKLDAKVLALFGERMKPALRALPDEAQRTLADLLGRRNQLVAMRAQEKTRLATVPAVARKDVEQHIAWLGKRIAKLEGDLGNRLKQSPVWCHKAALLESTPGVGEVTTFSLLADLPELGTLNRQKISALVGVAPFPDDSGKRQGKRYIRGGRAEVRCALYMATLSAITHNPPIKAMYERLTAAGKPFKLAMTACMRKLLTILNAILKNNQPWKIQPTS

SEQ ID NO: 111843 - protein, 373 aa, unidentified
MDRHTTFIGLDVSKDTIAVAIAEGGRRGEVRFYGTISSKPEAVAKLVKTLAAKHGRLAFTYEAGPTGYGLYRELMHLGHACHVVAPSMTPARPGSQIKTDRRDAVVLASLYRAGELTSIWVPDTEHEAMRDLVRARISAVEAVRRARQQLLSFLLRHGRAYKGRGQHWTRAHRRWLGDQRFDHPAQQIAFEEFNRAIEQAEDRRSRLEKEIEALLPSWSLHPVVAAIQALRGVSLVAAVTLVAEVGDFRRFTNPRQLMAWLGLVPRERSSGSTRAQGKITKAGNTRARRMLVESAWTYRLPARVAGDLLRRSADLSQEVRDIAWKAQVRLCARYRRMLRSGRPKNVVTVAIARELAAFVWAIALQTPAPAQAA

SEQ ID NO: 111844 - protein, 536 aa, unidentified
MADKKRNTQRKHIRSEGAYSLDEIRSLTMDDGTRVITSADGDIKRPVCAGIDVHKEILMAAVCKTDPKTLNAVFYVRQFKSTNSDIRTMGAWFQSHGVQDVCMESTGKYWIPVFNILEQCGQRPVLTHPKYVKQAKGQKTDFRDAVHIASMFRMDLVVASFIPPADIRDLRELCRYRLKLTYMRTSEKNRFQNSMTVSKVRLDCVFSDPFGKSASSIMEYLIMTEPEDVSDKQILSMVDRRVKASGEDILDSIHGYEFIGIQRDKLKVINLHLGQINECIRLIDEKLDYFRQKYSRIIRHLATMVGVTEESALYILGEIGTDMSVWRDDASLASWAGLSPANNASAGKKKSTRTGDGGHYLKPLLVQCALAAAKSTKKDPYFHYKYETLKKRRGHKKAIIAIARKMLVAIYHMIRDDADFLPVDHEEVLHSTKKQKGLNLDNVIAFLKEQGADDDTLRLVERQCGAQEMDAAEEMESVSSAEKKQSVSGSAATSQPIQESVNGSPVLISGSQQGHALNCHPKDPAVATATAQNELL

SEQ ID NO: 111845 - protein, 325 aa, unidentified
MSQSVKAVMKVNAAIDVSKDYLDVHVGDVSCRRFPNNTRGLSTLKRILSRFDISLVLLESTGGYENLAVTYLQMVGYDVCVVNPRHARDFARAMGRMAKTDKIDAEMLCRFADIIDSRPDRARFVKPLTDERREYLNVLVRRRRQLVGLKITERQHKAAPVVSSVGIADIDEVIAFLDSRIDIIDREIESHVKSCFSDVSEILCSFTGVGPATAGTLIGALPELGKLNRRQISALTGVAPFNHDSGKMRGRRVISGGRADVRKVLFMAAMSATRFNPVIKSFYTRLINAGKPKKLVLVACMRRIVCILNAMLRDGTRFNQEFCHV

SEQ ID NO: 111846 - protein, 431 aa, unidentified
MLKEQPIETQDKQEQKPDKEQKEKYLPVGIDPGKNICGVVLLHPDSGNDTVLSSMFMDNCSFEDADALIAESRPSGRERAEKVANSFGLKPIFVIEATNILWRPLFSYLKSKGCLVHTVCATQTKSSRGTKMRKTKTDLIDAKHIARIYKQGESHPTKFPEGIHMDLRELVRLHSFFTDMKGRILNRVYGYLFQVFPEFVSFFNSNSFLGTMWTLLKEGLVHPDCLQKVRIDKLTSILRKASMGRFKREKAIMLKEKAKNSFGISEGREGFSSCLKLLACMYEFVEKSIACLEEDKIKPIVDQIPNKLNTIKGLGIAQAYFLAESRKPEEYENVDDVVAWFGFDPRLSESAGKKKKNRHISKCGTKYGREAMFLSTDMVMIHNPTVMVKYRRLRKNGRTNREAKTIIAADLVKACYSMQRDNVPFNPSLIH

SEQ ID NO: 111847 - protein, 409 aa, unidentified
MQPILKSCCGIDVHKSMIKVSIAKGPLDKPPKFFTRTFSTMTSDLLKLKDWLRENEVEAVAMESTGVYWKPIFNILEDEFRIVLANPQYLKKVPGKKSDVKDCEWIASLLRCGLIPASFIPPKVIRELRELNRTRRKLVGMMASEKNRIQKVLEDANIKLASVVSKIDGVSSMDMIQALLKQDKLSKEEIAAMARGKLKRKVDKLVEALNGRMTDHHRFLLRLHLNDIAFLADQVEEIDRQIQKCMIPFRKEEALILTIPGVNKTSASAIISEIGTNMSQFPTEAHLASWAGMSPGNNESAGVKKSGKIRKGDRYLKAILTEVAWAASRTKNSAFSAIYNNIAKRRGKKRALIAVGHRILVAVYRALKSGEPFVDEGAEAVYQRNSKARQQSAIRLLEQSGYAVTKAPA

SEQ ID NO: 111848 - protein, 338 aa, unidentified
MVLIGIDPHKATHTAVAVDTEEIALGELTVKADRHQVERVLKWAIDFPDRRWAIESVNGLGFLLAQQLVAAGEDVVDVPPTLAARVRVLGSGKTQKNDPNDALSTAIAAMRAKRLRSVVAENHGGVLRLLADHHHDLGSLRTQAVCQLHALVRCVIPGGTGLRLSAARASVVLRSVRPTNAVDAERKRMALGHVADIRRLDAEIAASKARIVTAVAASGTSVTELYGVGPVVAAFLIGHSGDMARFVNRDHYASYNATAPIEASSGPRVRHRLNPRGNRRLNHAIHVIAICQIRHPGEGRRYFDRKVAEGKTTKEALRALKRQISNAVYRQLVNDSTR

SEQ ID NO: 111849 - protein, 351 aa, unidentified
MVDKVTKAAVVGGVDTHKDLHVAAVVDQNNKVLGTQYFSTTRQGYRQMLAWMTSFGTLKRIGVECTGTYGSGLLRYFQNAGLEVLEVTAPDRMERRKRGKSDTIDAECAAHAAFSGIRTVTPKTRDGMIESLRVLKTCRKTAISARRVALQIIHSNIISAPDELREQLRNMTRMQLIRTLGSWRPDASEYRNVTNVYRISLKSLARRYLELHDEIADLDVMIAAIVDELAPELIKRNAIGYESASQLLITAGDNPQRLRSESGFAALCGVSPVPVSSGKTNRYRLNRGGDRAANSALHIIAIGRLRTDAKTKEYVARRVAEGHTKMEAIRCLKRYISREVYTLLRNQNVSR

SEQ ID NO: 111850 - protein, 406 aa, unidentified
MEGPIITVDVSKGSCHYQPFIENGHPMRKPKQLSATIDGFQKLGQTIKDLEAKTEREDIPVIFEATGVYHRPLQKYLEDHKIRYYIISPLLSATYRKTDLHSNKTDALDCAHIAKAYYCEKELRQYQAQPQEYKRLYQLSRIYESELVHLRKRKVSLRSMLDIIYPRIDKTFKGNQNLYDPIPMEILKRYPHPSLLLSHREDTIVKTVGHRTGHLKGYTERIVHKIYEKAKECYSGCEINDIEVINLPRLIENVQEQKKKCDSLLKEMIEIARTCPYFASVVSIVGIGENLAARIIAELRDVNRFDNRAAIVVYAGLNPKIQQSGDIDRLHLKISKKGNKHLRCLLYLGAQCNYRLRKEDPLYEFTKKKRQQTQCPLSSKAAYTASAHKLLVIIYSLCKNGTLYHS

SEQ ID NO: 111851 - protein, 344 aa, unidentified
MEAIGTIGLDIAKSVFQVHGVDADGAVVVRRRLTRAKVLPFFERLPPCLVGLEACATAHYWGRELRKLGHDVRLMPPSYVKPYVKRQKNDAADAEAICEAVTRPSMHFVEIKSPEQQSIMSLHRVRQMLMRQRTQVSNAIRGHLGEFGRVAPIGRNGLAQLIAIVADENDNTLPDDVRAAVAMLAVQLRIVNDQILELDRRVRASARATDVGRRLMEVPGVGPVLASALVATVPDASAFKSGRNLAAWIGLVPRQNSSGGKERLGGITKQGNRYLRQMLVVGALAVIRYAQRHGTRRPWLVHLLARRTTKIAAVALANKTARMIWAIMATGERYREPSPASVAV

SEQ ID NO: 111852 - protein, 348 aa, unidentified
MRQETKVYVGLDVHKEFCQACVMNESGKVLSNERFLSTQEALDKFLDRFEDAKFVLESTGIWEFIYEGIEKRGFEVVLAHPLKVRAISEAKVKTDKVDAEMLAHLLRADLIPRSHVPPRDIRNLRQLVRHRAYLVRQCTSIKNRIHAELLRRGIRRPDSLKKTFSHKHVGWMRSLGILTITSSLNCLEGIQAQIREVESFLLAEYNSRKDAQLIATIPGIGFYGALLILAEIDDIHRFSHPEKLCAYAGLVPTVHQSGATSYHGGITKNGSPHLRWILIEAVHVHTNYCPGSKLSKFHAKVAQRRGKQRATVATARKLLHTIYWMLLNKEKFHCQGFNLVEKAASMNA

SEQ ID NO: 111853 - protein, 375 aa, unidentified
MKGVRPLARSTFKDACYLNLGGPMYYVGLDLHKKYITGCALDSQGAVVTTERRLPPVLETVLGWLAPVGQPAAVALEATLYWAWLHDRLTAAGYQVAVAHPQQVKLICHARCKTDPVDARKLADLLRTDLLPAIWIPDAETRARRTLLRGRAWVVRTRTRVKARIQAYLAAENERVPVSDLFSRGGRAWLATVALPPAVRAQVDRLLALVEQLDVQIAGQDRTVRELARATPEAEQLQTIPGIGPFGALLLLAEIGTITRFGSSHELAAYAGLVPSTRSSGGKTAHGSVGPAGSAWLKWLFVEAVQTLKRQPGPVRSQYERLLRAKGKQKATVAAARKLCCYVYWMMKEGRSYDDWLRQRQQREVRPIQAVASVA

SEQ ID NO: 111854 - protein, 384 aa, unidentified
MEKSITLHVGLDVHKDSIDIATAELGRDGEVRHVGSIGGDLASLDKALRKLISRGHRLHVVYEAGPCGFVIWRHLSALGTACEVVAPSSIPKRSGDRIKTDRRDAMMLARLDRSGDLIAVRVPGEADEAVRDLVRAREDAVRECRNARHRLKALLLRNGITYSGRSAWTAAHLRWLATLKMTHAAQQIGFQEYLHSISEATARIERLEQALRDTLPEWSLKPLVQALQAMRGVQLIAAMTLVAELQDFLRFASPRKLMAYVGLVPGEHSSGPKRRQGSITKAGNSAARRMLVEVAWHYQHSPRVSPIIATRQDQLPKPVTDIAWAAQLRLNAKFKRLLARRVMKNKAVVAVARELAGFVWAIGCEVQTSGWQGITIEVAAALAD

SEQ ID NO: 111855 - protein, 331 aa, unidentified
MDEVRRFVGIDVAKVALDVFIGSVGAAFSVANDEVGIRELLRQLEPADFVILEATGGLETPVASALAAAGVAVAIVNPRRVRDFARATGRLAKTDRLDAEVLARFGEAVRPEARPLADEQGQALEALVTRRCQLVEMLTAEKNRRARAPKVLHRSIDEHIRWLEKRLSGFDDELGELIRNTPLWRERDESLRSVPGVGKVLSSTLLAQLPELGMLNRKQIAALAGLAPFNRDSGSLRGSRCIWGGRAQVRRVLYMATVAGVRSNPTIRTFYLRLRANGKHAKPALTACMRKFLVILNAMLHNKTHWQTPALTSSTSPLSPLLGAVSEHGCC

SEQ ID NO: 111856 - protein, 412 aa, unidentified
MKTQIAFEQVIRRGCGMDVHRDTVVATVMGDEITKETRTYSTYTNSLIELSQWLRSLSITHIAMESTGIYWKPIFNILEEHFEILLVNAQHVRNVPGHKTDKKDSVWLTKLLLSGLLKASFIPPKEIRNLRDLTRYRKKLSQQATAERNRFEKILQDANFKMSNVISDIFGITGSKLIEALLSDHTDFEYLLTLCHGRIKAKKEALKEALTGYLTSHHKFMLNAIRQSIDNIKFKIDEIDRQIDDHSVPFKLELQLLQTIPGINKISAACLISEIGCDMEKFATSLHLASWAGMCPGNNESAGKKKSTHILQGNQYIKPILVECAWAASHVKDCYLRGKYESLVARRGKKRALIAVGHKILIAAYYILKEKIPYNDLGYNYLTERRKRNQAQSYIDKLKNLGLDIQINNRIQ

SEQ ID NO: 111857 - protein, 335 aa, unidentified
MKVFYLGVDVSKKKLDLCLRSNGKDILYDVIPNDLSSIKSWLTRTFEKFFLSEDSLVVCAEHTGQYTYPLVCATKSIGVYLCLEDAAKIKYCHGIPRGKNDKIDACRIAMYAERYNDCLQPYTASELIIQKLKNLSTERSMLVADRAKYQSQLKDQVDYMEHSIYIAKCNRVEGIINTFTDYIAQIDLEIKELINQAPVITHQMDLLMSVDGVGERVALKMIMETDAFTSFTDPRKFCCHAGVVPFVYVSGSSQRSKNRVSNRADKSIKHLLHMAALSVSQVKNSPLKKYYDRKVEEGKNKMSVLNAVRAKLVTIMFAVIRTDAFFSRNYQNSLA

SEQ ID NO: 111858 - protein, 458 aa, unidentified
MSKKSSKKAKSQRSRERALLNKVHLNAAGIDVGADTHWVAVPEDRDQRPVRNFGVFTSDLIALCQWLKACQIQSVAMESTGVYWIPLFQMLEREGFEVQLVNAKHVKNVPGRKTDVKDCQWLQQLHTFGMLGGSFRPQAQMCVVRSYLRLRDTLSKDCNSLVQRMQKALTEMNIQVHRVISDITGLTGMRILRAILAGERDCIKLAQLKHPQIKSSTQQIAKALEGDYCQEHLFALQTALELYDNYQLKIMECDKRVEEAMGVFEAKVQVAAPDLSRLRSAQKRQEALRRHHLEQMTGADLTKLPGLDLLAVQRILSEVGLDMSRWPSEKHFCAWLNVAPNNRISGGKILSSKPRKNANRAAAALRLAAQSAMQSKTAIGAFIRRMKVRLGAPTAINAGAHKLARLLYRMLKFGKAYVETGQEAYERLFKERTIRNLQRKARELGFHLTPATPGALVS

SEQ ID NO: 111859 - protein, 438 aa, unidentified
MSNKVIFNLDELFISVGIDVGADFSWMSIALPNQQFVGKPYKILHNSIDSLTTAVSKIKEAEELYSLESRIFLESTGIYHYPLFCYLRDKGFNCSVINPIITKNSTNINIRKVHNDRFDSKKAALVGLKPDLKVSLMPSDLALNCRNLCREYYDLMDNRSAYVNKLQGELRMAFPQYLGIFSKVTINTSLTLLGTYTSPSAFLEADKQEIIDIIKSTARFGLTYAQNKYNAIIQAATDANQFGYIIDSNIKRIRLYISFIRKFDEEINSILESLHELVDANEDSDFVKQIHLIETFKGAGFLSAVSIMGEIGDFSAFSKPKQLFAYFGLDPAVKQSGKFEGTKVQMSKRGSAIARRVIHTLTLQSISISRNREAKNPVLREYYLKKCDSKPKLVAMGAVSHKVCNMIFAILRDNKPFKIIAPQEHIKQYNAAKCDIAA

SEQ ID NO: 111860 - protein, 353 aa, unidentified
MTDTPAIAWLGLDAHSRNCVLAQLDDQGHEIHHWRFPTDPRQLLRHIQAIPATVKRLMLEESNLARWISQLLKPHVQQLVVCDARRNRLISHDANKHDRRDAFALARLLRLNEYRPVWQPTDDQRVLFKRAAQAYENSVLRQTRLKLQLKSLFQHWGLFPTGATVFSQAGRSAWLQQLPYEALRAQARLLYELLDQALAGQARARRLLCQAGRPFPEVQHLRTAPGIGLVGAHLFVAYVQDPHRFAKFSRLSKYCRLSIRDRTSDNKPLGFKQLDRQGNGVLKAISYRAFLQAAKRRSGPLWDFYQASLRHTGSTTHARLNTQRKILLVLWTLWLKDKDFDPNQFSRSQPFDV

SEQ ID NO: 111861 - protein, 339 aa, unidentified
MNNSVIGLDIAKNIFHLFTVLADGKTLKKKLKRHELLAFFANYPASIIGIEACGSSHHWARELTKLGHEVILLNARFVKNYVVGNKTDFNDAEAIYEAVHRPNKRVVAIKTVAQQDIQLVHNIRKDLVDQRTALVNQTRGLLSERGIVINQGIEQLREQLPLIIEDAENSLTDLSRELFAEQYEKIKTLDAEIKAQDQRINRLCNTNDLSKRFLDVPGVGPLTATIVAADIGDGGKGYKSSRDYAASLGVVPKQHSSADKQHYMGISKRGNRYIRTLLIHGARAVLKNCGKKTDKLSLWLQSLVARRGFNKAAVALANKNARILWAMASNGKDYEALVA

SEQ ID NO: 111862 - protein, 341 aa, unidentified
MEQISTIGIDIAKTVFQVHGIDGSGEPVVRRQLRRRQVLPFFGRLSPCLVGMEACATSHHWARELEKLGHEVRLMPPRYVKPYVKRNKNDAADAEAICEAVQRPTMRFVPIKTAEQQSVLMVHRTRHLFVRQRTSLINAMRAHMAEFGIVAGVGRNGVEKLLELISKGKDERLPEAARECLMSLAAQLELVKRQILEADRRVRAWHRTSKTSKRLEAIPGVGPLVATALVASVPDPHVFRSGRDLSAWIGLVPKQNSTGGKERLGSISKAGNRYLRQLLVVGALSVIRRAKQLGYTRHPWLVRLMERRSTKVAAIALANKIARIAWAMMARNESYRAPLPA

SEQ ID NO: 111863 - protein, 407 aa, unidentified
MNMNAVGIDVSKGKSTVTIRKPGDVVLMSPCDIPHTQSAINDLIKQIKSLEGETKVCMEHTGRYYEPVATWLSDAGIFVSAVNPILIRDFGDDSLRTPKTDKADSKKIARYTLDRWAKLKQYGIMDKTRNQLKTMNRQFGFYMAQKTAMKNNLIALIDQTYPGANDFFDSPARNDGSQKWVDFIHTYWHVDCVRSKSLNAFTEHYQNWCKRKNYNFSAEKAAKIYQISSDLIAVFPKNDITKMLIWQAVALLNTASKTVESLRSKMNELASTLPEYPVVMDMNGVGATLGPQLIAEIGDVSRFTHREALTAFAGVDPGKNDSGKHIQNSVRTSKKGSPYLRKTLFQIMDSLIKRSPVDDPVYAFMDKKRSEGKPYYVYMTAGANKFLRIYYGRVREYLSNLSNNETI

SEQ ID NO: 111864 - protein, 340 aa, unidentified
MDTIGLDLHKRESQLCVLTETGEIVERRIVTSRERFTAVLGGRPPAHILVEASTESEWVARHLESLGHEVIVADPNFAPMYATRRRGVKTDRRDARTLAEACRLGAYRPAHRASDGQRHVRAELAVRDALIRTRTRTVALAKALIRRDGLRLPSGGPAHTEAKLAALALPPALAAELAPLRALWAPVNTQIAAADARLAHVAAADPVVGQLMTAPGIGPVTAVAFVATLDVVTRFASAHQVEAYLGLTPREYSSGEQQRRGRISKTGNARMRYLLVEAAWRVLRTKDAAAAPLRAWADGIAQRRGRAIAAVALARRLAGILYAMWRDGTDYGAPPAAAGA

SEQ ID NO: 111865 - protein, 361 aa, unidentified
MQLQDAFSIPKIFIGLDIHKKSWTVSIQTDLFFHKTYSMPSNAEDLYQYVERTFPDHAVDLVYEAGCCGFSAARYFLNLGWNVLVVNPSDVKRGDKERYQKTDALDSKNLSNQLKSGVLRGVFIPTEEHEQFTTLARHRTQVTKKLRQTKLHIKSMLLFHGIKVPDEFDNSNWTIAFIAWLEEIKFSTSCGDLALQGKIRMFKFIKSEYLEIANQMRAYCRKNNKKDYNLLKSIPGIGGYLASVILAECGDLRRFNNEGQFSSYIGLVPGMYNSGESEKCLGITPRSRSQLRSYLVEAAWIAIRKDTEMQNYYQKHQGKNVKSIIIKVAHKMARRILSVIKTETAYQINRNLVPIAIGGIE

SEQ ID NO: 111866 - protein, 426 aa, unidentified
MPFVGLDLHKKIVEAVILDDTGNILWRGSFPATRAALEDFARSRLSPNHHLALEATTNTWAVVALLKPYLARVVVSNPLRTRAIAEAKIKTDRVDALVLAQLLRSGFLPEVWCPDDDTRRRRALSTERANLVADRTRLKNRIHAVLHQRLIEAPAGDLFQPRSRAWLASLELDPEGRQTLDRHLRQLARLEQELAALTDDLAREAHADPRVRLLMTLPGVDFPVAQTLLAALGDVNRFRDGNRAASYLGLVPSTHQSAAHCYHGPITKQGNSHARWMMVQAAQALARHPGPLGVFFRRIARKKNRNVAVVATARKLVSIAWHMLHSNQPYRYAQPATLEAKFSRLRIRATGRRKKTGSGKGAPRPAGYGSGKRTRAVPSLDQVCAEAELPAPDATATGEQRMLLQTGTAAFADSIQQPKRVARRSA

SEQ ID NO: 111867 - protein, 321 aa, unidentified
MYIHESLIHLHPQSKEIPMYYSGIDLHSDNSYITTMDDNGTIVKRQRVANDDKRVLEYFHSLPDPHKAVVESTTGWYWLDDLLTDNGIELILAHAKYLKAICYAKVKTDKIDSKTLALLLRLGLIPRAHKISRELRGLRDTMRIRLRLVQQRTACLLRLYSIHAKFNGAVPDPYRFQLAALEHTRDTFSDQILALEKSLHPVLVPNDDIQRLLNIPGIGKISAFTIYLEIDGIERFDSDKHFVSYCRLVPAADNSNRTVHHRSSKDGNKYLKIAFSDTAVHAIQFYPEYKRLFQKLARRSGEATARVQLLPRNLLKLSIMS

SEQ ID NO: 111868 - protein, 368 aa, unidentified
MIVRIMTYERSTLVNDEKYIGLDVHQATISVAVMDATGKVVMESILETKATTILELVAGLRGTLWVTFEEGTWSVWLYDLLNPHVDKLVVCNPRKNALLKDGNKSDRIDARKLAELLRGNQLKPVYHGETGVRMLRELSRSYLTIVKDLSRVMNRLKAVYRSWAIPCAGRDVYYSRHRAQWLAKIREAGVRRRAERLYEQLDMLQHLRQQARRELLAEGRKHAVTARLRQIPYLGPIRSVLAVALMQTPHRFRTKRQLWAYSGLALETHTSADYRYVEGQLRRSKKVVAIRGLNKDHNHDLKGLFKAAATMASVRPGPFQDFYQAALVKGIKPTMARLTLARKIAAITLTLWKKGENFDAEKLKSQAA

SEQ ID NO: 111869 - protein, 353 aa, unidentified
MSQTPKAIAVIGIDIGKNSFHVVGHDARGAIVLRQKWSRGQVEARLANIPPCLIGMEACVGAHHLSRKLASLGHDARLMPAKYVRPYSKGQKNDFNDAEAIAEAVQRPTMKFVATKTAEQLDLQALHRVRERLVSQRTGIINQIRAFMLERGIAVRQGISFLRTELTTILATRTDALSPRMLRVIEELAGDWRRLDQRIDGLTGEIEALARQDQACSRLMTVPGIGPIISSAMVAAIGTGDVFSKGRDFGAWLGLVPKQISTGDRTILGKISRRGNRYLRVLFVQAAWVVLVRIKDWERYGLKSWIEAAKRRLHHNVLAIALANKLARIAWAVLAKGRAFELTRTDDAGVRPA

SEQ ID NO: 111870 - protein, 417 aa, unidentified
MSIAQPIVGIDVSKAHLDVFELDSGRQSRLANTGEAVAAWTKTLAPQTLVVLEATGIYDQVLRTALAAAGIRAARVNPARARDFARALGVLAKTDAIDARMLAQMGRLLPLETERDADADRQRLQGLNRRRDQLVSWRARERTHRESADPFGQDSIARMLVQLDNEIALVEAQMAELIAASPAIAAQDTLLRSAPGVGPVASRTLLASMPELGSRSDKAIAALAGLAPFNHDSGALRGTRHIAGGRRRVRMALYMAALNAARSSSRFKAIYQKLRLAGKPPRLALIAVARRLLVTLNAMIRDQKPFAHKTRKYSCRLCGRGSAGGGSRQTGQHFRWMGRQPLWGRRHLLSTNPSAASGRQRCSCRDQSFFTQRGPQRDRDIDSPPVENSIQLLRAARPGQHRADGRMRQWKLQGSGW

SEQ ID NO: 111871 - protein, 345 aa, unidentified
MSGAYEGRQIVGMDLHRRRSVVVRMTETGEHLETVRISNDPEYLRQVMARAGEAPEVVLEAAYGWYWAADTLAELGASVHLAHPLGVKMFSLRRVKNDQRDAADLADLLRMGRLPEAWIAPPATRELRGWVRHRAKLVGLRTSLKNQIHAVLAGAGVQVPMSDLFGPGGRGLLAATALATESRSRVDSLLRVITALDFEIDLYAKLVGGRLRADPGYQAIQQIPGVGPLLGAVFVAEIGDITRFQRPQQLASWAGLTPKHHESDTTVHRGRITKQGSRLVRWAAVEAVQRVPAHTRLGQTRDRVGERRGRNIGVVAAARELITLVFYGLRDHHIRCLPATTTGAA

SEQ ID NO: 111872 - protein, 354 aa, unidentified
MMTTILAIDLAKARSLFCWHDVVKGSQRWRTIPSTPRAFHEALTREKVDRVVIEVCDMAGWIKDLCESLQVPLQIANGNTEGWRWRNVKRKTDKDDTLKLVSLSLTDQLPTVNLPDRPTRQWKSLILYRQKLIERRTRIKNKIHALLVSEGKAISGGKKAWSETSLAELSRLAKPIADCTMDELWQGQLHLELEALDDLNHAVDQLDQRLNALGEGDARVIRLQTIPGVGPRLSELVVAVIDDPGRFKNVRQVSAYAGLVPRRYQSGAMDRSGRISKAGCAKLRKLLLEIAWGMLRYNAHGQRVFQRISKGQKTRRKQAAVALARRILGWCWAMLRDQTDWRDPGAAAPSPVMT

SEQ ID NO: 111873 - protein, 408 aa, unidentified
MQYTYVGVDSHKDTHAAVFLDCFFEKLGEVYFENKPSKFGDFLKKADKFKAEGTTLLFGLEDVSDYGRSLMVFLKNKNQSVKHVNSLLVANERKNQDIAHKTDSFDAECAARVLLTKLNDLPDADPQDKYWILRTAVMRRNFIVNNNASLKNHLHTLLTPHYPNYRSFFYNIEGNSSLAFFMRYPSPSTLKGITTEELADFFYEPSQGKVGFERAKLIMESIEDTTVPFQEIRDEAVRSTIRQLQFNMGEIEHLDASLAKLLDMFGCTLTSMAGLDTVTASQMLSCIGDIKKFPTPAKLAKYAGVAPITYASGKRDMKFANQRGNRELNHLFFDLAVRVSMTFGSSRKVINPFFYDYYHQKQSEGKTKRQALKCVERRLVNIIWGMLTYNQEYINPPTYNAPKEKTKE

SEQ ID NO: 111874 - protein, 367 aa, unidentified
MYLAIDQHSKQLTVNLRNESGEVLVRRQVSTRGEAPREFLGEVQQRSAGEGGYVTIVEVCGFNDWLLELLPHCGCRETVLMQADRRSKRKTDRRDANKLGELLWVNRQRLSAGQPISHLRRVRILTRKEREDRRVPQIRKNIGRELTRTINAIKTILRRENLEQYCPTKGIQTQAAARWLKKLELAPLDRMEMDQLLARWKLLTEQKQQVEEDIARRAAAHSDAQLVQTLPGAAAYAALGLAAQVGPLERFPQPRSLANYWGLTPGCRNSGEATDRLGSITKEGSSLARFLLGQLVMHVLRKDSVMRNWYKRIKLRRGSKIARVAVMRRLATIIWHMLKKREPYQIGGPPRKKLKRHEPALTEAGSA

SEQ ID NO: 111875 - protein, 410 aa, unidentified
MDKLFVGLDVSKKDYKVCLMDMEGERVGKGFALKNNADDSQKLVDRIVEAATKTGAQKVFIGYESTSVYGWHLQYFLADAAKLAPFSPTIICFNPTVIENHKKSLGDLPKTDDIDAFAIADRLRGRLPKSVTADFRYLALQRLTRHRFHLVKSIVREKNYYLSNLFLKCSGLCQENVFADNFGTAATGLVDEVDDFEQIADMPLEELVVWLVEKGREKFDNPEATAQKLQAAVKNSYQVHASVDHSLNLVLRSCLENIKSLEKQKKAIEKSIKEQVKFFEPEYLCLKSVKGIGDVIAAGLIAEIAGISRFEDDDALAKFAGIYWNKRQSGDFTADESELRRRGNKYLRYYFTQAADHMRLWLPEYSEFYSRKFKESKTHHHKRALILTSRKAVRLVFALLHDSKLYSPAH

SEQ ID NO: 111876 - protein, 427 aa, unidentified
MSTLFVGIDVSSKTNAVYAMDFEENKYISSSFGNNQPGADKLVNMIAECMHKHKNLNTILIVLESTSVYSVHISNFLSTSEVLMPYKPYVFCVNPKATSNYRKSYIGMEKTDPTDAYLIADFGRVGRTKKLEPWRGGQFIALKRLTRHRMHLSECITREKTYMVSNLYLKFSELQLLEGDDKPFGSLYGATSSAVLTEFLSPQEIIDMPEEELLTFLAGKSRNRISDLSKTSELLRKAARDSYRLDKCMYEPLNVSLASSFNCIHAYQKEIKLIEQAIEKCINGMNPNALIILQSIPGIGPIWASGILSEIGDITVFHSSDALAKYAGLYWPKGDSGDFTSEDNKMSKAGSPYLRYYLGEAANSVRKHIPEYADFYARKYAEVTKHQHKRALALTSRKFVRLVFGLLAKNQLYTGEKLDAEYNIKSN

SEQ ID NO: 111877 - protein, 362 aa, unidentified
MRTDKYVGFDVDKSTIAVVVQNYEGRNLIKTVIDTEGVTVREFLTSLSGKIRVTFEEGGQATWLHDLIYPLVEEVIVCNPRKNKLIQSGNKGDKIDAEKLARLLRLGELVSVYHGENSARGLKELVHGYNNLVSDTTRVMSRIKAMYRGRGIKCSGHGIYRKGERKEWEGKLGEEAARKRAELLFKQLDNDQELRKEARKAMLKEATKQPGYKILIEINGLGPIRSAIIIGVVGTPHRFRTKRQFWPYCGLGVVTKSSADHEIVNGQIRRKKRPAMTRGLNRDYSRQLKYVFKSAAVEAIKTEPFKSINEEMIKKGIRPEMARLTIARKISAIALRLWKKGESFNAEKIGKATLAAEVNAGA

SEQ ID NO: 111878 - protein, 401 aa, unidentified
MPTAPPTVWARVDVGKTHHWVEVVDATGATLLSRRVSNDQTEIDAVIADVVVLAEAVLWAVDIVGTPSALLLALLTAAQQQVRYASGRVVSVMSSAFTGEGKTDAKDAHVIAETARLRRDLSVVDQVTDLARNLAVLTAHRADLVADRVRGINRLRDLMTSVFPALEREFGYASCKGALVLVSGYATPDRLRRVGRARLAAWLRGRHVRSYAQLADRAVTAAGTQHVVLPGQDTSAGIVSELASSVLALDVRIKAIDAQIAATFELHPQAAVIVSMPWFGPFLGASLLAAAGDLRDFPSAGHLAAAAGLVPVPNDSGRRSGNLHKPRCYSPPLRHVFYLSAQTATMRPGPNRDYYLKKRSHGRTHTQAVIALARRRIDVLWALLRDNRPFTEQPPAVTLAA

SEQ ID NO: 111879 - protein, 352 aa, unidentified
MRVERVPGMGRALSSTHRGRATKKHGEAFVGIDTAKTRNAVAIAEIGRRGEIRYLGEYDTTPDAVAKLVRRLADRYEVLHFCYEAGPTGYGLYRQILALGHNCTVVAPSMIPRKPGERVKTNRRDAQSLARMHRAGELTAVWVPDATHEAVRDLVRARSAAVEDYRRKRQQVSSFLLRHGRSFARSTTWKGQHLRWLNAQNFTHPAQRLAYQESLNAAFTAAERVIHLEAMLEEIIPAWTMAPVVAAFQALRGVAFTTAATVVAEAGDLRRFDHPRQLMAFLGLVPSERSTGETRRQGGITKTGNIRARRTLIEAAWTYRYPAGIVASQSCRRTFAILPGKLRYAFARAIGD

SEQ ID NO: 111880 - protein, 409 aa, unidentified
MLLVGDDWAEDHHDVELMDSAGRVLARARLPEGAAGMARLHAMIGEQLGEDAEAGGVRVGIETGRGLWVMALAAAGYAVFGINPLQVARYRERHGVSGAKSDAADAHTLADMVRTDAHQLRPVAADSPAAQAVKVVARAHKTLIWERTRQVQRLRHQLRDYFPAALEAYPDLAAPGTLELLAKAPDPASAAQLTTAQVSAALKRARRRDITARAAAIRAALRGEQLAQPPAVTAACAAVARALAAVITALNTQIKVMEGQVEAHFLQHPDAEIILSQPGLGPILGARVLGEFGDDPHRYASGKARKNYAATSPITRASGKRKTVMARYVHNDRLRDALDGQAFAALSASPGARAYYDRQRARGLSHRPALRQLANRLVGILHGCLKTRTLYDEATAWPHHASQEIKPAA

SEQ ID NO: 111881 - protein, 361 aa, unidentified
MTHRTSVGLDVHARSIAAAALDHLTGEVSQRSFAYDPAAVAAWVLSLEGPARCVYESGPTGFDLQRSLSAAGVECVVGAVSKMLRPSGDRVKTDKRDAVFLARMLAVGNVVEVAVPTPAMEAARDLARAREDCREDLMRARNLVSKLLLRKGVVYGDGRAWTKRHREWLSRIELPDPCERLVLEEYLEGVRSLELRRGRLDAAIAERAKGPDLAPVVSALSCLRGISTVTAFSIAVEVGDFTRFPTARAFMSYLGLVPSESSSGESASRGKITRTGNGHVRTLLVESAWHHARRLGPMSATSLADARGVPVAVAEAAERANRRLASRSAHLRGRGRPANVVNTAVARELAGFVWAIATAAS

SEQ ID NO: 111882 - protein, 391 aa, unidentified
MINIGIDVGKFKHCASVIDDKTGEIVIKPFFFNNDQKGFDLFYSKTKQYIHRKHAVGMEDTGHYMINLTDFLLDKKFTVKFINPRSTCLRRKELGMSAKNDRKDSILIAEMLSEKKFWRSVTRTTQETDKIREITRLYHQLQEQQNEDMNRLQRALDIVFPEVNKLSWTRYSKAYMQFLAKYPTAASIASEDIRNLHNALKTNGRGRQCKLTAEDIKEAAKCSVGEDNIAIALEVQSIIAIINTRKQQIENLENKIEEFSLELNSPIISIPGISHITGMTIIAEIGDIHDFSDAAHLISYAGMEPLVHQSGKYDAAHMPISKHGSRYLRKALYQAVFTVCKYCPIFNAYYTKKRNQGKTHRCAQGHCVRKLLRVIYKLLANNTTFDENLVR

SEQ ID NO: 111883 - protein, 377 aa, unidentified
MKNIRFVGLDVHAETIAVAVAEPNGEVRSLGTIPNREESIRKLVRKLGPVEQLRACYEAGPTGYVLYWQLTALGVKCDVVAPTLIPVKSGDRVKTDRRDAEKLARCHRAGDLTPVWVPDAAHEALRDLVRAREAAKRDQHRARQRLGKFLLRHGIRRPDTMKTAGSKPHLEWIKMKVHFDLPALEITLIDYVHEVEHGAQRLTRLETAIGEAARSAPPCMRAVIQALQALRGVAEIGAVTIVAEVGELSRFPGARQLMGYSGLVPSEYSSGARRIQSRITKTGNAHLRRVMVEAAWAYQFRPWLGGYLLKRQTHLSPEVKEIAWKAQHRWHGRYRELLRQGKNKPQIVTAIGRELLGFIWALGVMTENQHHTLAAAA

SEQ ID NO: 111884 - protein, 368 aa, unidentified
MDEFITGFVGLDAHAESTAIGYAEAGRAAARFVGTVGAKRTELTKALGKLGAPGSLLVVYEAGPCGYGLARELAAAGYRCEVIAPSKIPQRPGERVKTDRRDALKLASLARAGELVAVTIPDERDEAVRDLSRARVDAVRARLKARQQLKALLLRHDRRYSGKTSWTAAHERYLADISFPHPAQDVAFAEYRQAVGTDEARVQRLTEALTREVGTWRMQPVVSAVMTLRGLDLVAATTVVAELGDLKRFAHPRELMGYLGLVPSEHSTGSKRRQGAITKTGNGHVRRVLIEAAWNYRHPARLSRRQQVRQEGQPTAIREIAWRAQLRLSHRYRCLTARGLQHNKVCVAVARELAAFIWDIGRQVGPSA

SEQ ID NO: 111885 - protein, 316 aa, unidentified
MVDHPVYVGIDVAKATLDVAVAPTAERWTLAYTEREVAGLVRRLTGLHPALVVLEATGGLEGPLVGALATAGLPVVVVNPRQVRDFAKATGTLAKTDALDAAVLAHFAAAVRPTPRPLPDAATQTLAALVTRRRQLVEMLTAERNRLGSAPRVLRAEIQAHLTWLQRRLARLDTDLGQAIRTSPVWRVQDDLLRSVPGVGPVLSATLLASLPELGTLNRKAIAALVGVAPLNRDSGTLRGRRRVWGGRAAVRAVLYMGTLVAVRHNPVLRAFYQRLRAVGKLPKVALTACMRKLLTILNAMLKHQTPWSPAYARTM

SEQ ID NO: 111886 - protein, 310 aa, unidentified
MDKVQAGIDVSKATLDVAVSNQKVIKSFPNEESGVKQLVSYLKKHGPELTVMEATGGMEKLLAACLVEAAIPVVIVNPRQVRNFARAKGKLAKTDSLDAWILAEFAREIHPEVRPLSDKQTEEIKAMLVRRQQLRDMITMENNRLWSADIRVIPSIQDHLKWLKQELKNMDKDLEDKIQQSPIWREKDNLLQSVPGVGPVLSLTLLGALPELGSMNGKQIAALAGVAPFNKDSGKYRGKRMIKGGRGRVRAALYMAALVATRFNPVIKAYYNHLLEMGKLKKVALVACMRKLLVILNAMIRDHRSWQCAT

SEQ ID NO: 111887 - protein, 316 aa, unidentified
MYLGIDISKLTIDCCLIADGQNHQKKFQNNKGGFEQLINWLQSHKVTDKLHCVCEATGTYYEALAEYLYLRYTITVENPRKIKGYAIAELQRSKTDKQDAKLIAQYCQDRKHKLKAWKPPAKEQKQLQEIARYLDYLKQQRATEKAKQHEAPDYIKYHIQTTISNLTAQIQIVKKQLLQFYKDNPSYNNLRKRLKTITGIGEQATAVLLSTYKRHEFKNAKQFTAYLGLDPRKFQSGTSVNGKSRISKIGSSEIRKSLYMPALVAYRCNAFPEFVGRLKNKGKHIKLILIAIMRKLAVIAFTLLQNGQDFQVERYK

SEQ ID NO: 111888 - protein, 424 aa, unidentified
MASHEFAAFVGIDWGDQKHAVCLRADGVEVECELSQKAAEIDAWATELRTRFGGRPVAVCLEQSRGPLIYALLKYEFLVLFPLNPLQATRYREALYPSGSKDDPLDARLLCRFVETHHGQLRAWKPDDEATRLLRFLAEDRRRFVDQRTAHKNQLRQRLKEFFPLVLELLRSGDLEDEWFLQLLIKFPSHAELRQASPRTLERMLPKHHRLSDDEPLDPRVAQIRAAVPLVTDGAVVKAGRLQVMELARLILRLNTSITEYDRELAVELARHPEAELFRSFPGAGAALLPRLAAAFGTNRERYVDAQELQQLSGIAPVQIRSGKSCSVRRRRACPKFLRQTFHEYADHSRKRSLWAKAYYRMLRGRGLRHNAAVRALAFKWMRILFRCWQTHTPYDEHRHLAQLRLKQSPLLQFLDLPIPAEQT

SEQ ID NO: 111889 - protein, 346 aa, unidentified
MSKVYIGIDLAAKVCVAAVRDEEGELVCVREFPTSEKSLVSFISCVEGEAVVLMEECDLAYWARRVLLPYAEKVDVADPRRNAWIHKDPIKNDKIDAKKLAEIAQLGSYHPVWHTPDENVYALHLAVKAYDRLTKKVVAQKNQIKAKLRAQGIICEGSRVYGRRGREEALAQVENPAVREIISSDYDHLDFLSAERAKARRRFLALASHVPVTRAWQAIPGVGPVTAARFCAYVKCPQRFSDSRKLWRYCSLGITQCVSGGKELRRQRLDRMGCGALKDASMKAFLAAMRAEGDNRFKRAYANTLANTGSALHARLSTQRKMVAVMWAMWLHGTPYDDANKPDRWA

SEQ ID NO: 111890 - protein, 341 aa, unidentified
MSIVILGIDLGKNSCSIVGLNTNGSVIVRRRMRRDGVIAFAAKLPPCTMAMEACRGAHHMGRSLAALGHEVRLMSPEYVRPYVKAQKNDDRDAEAIAEAATRPTMRFVELKSEEQLDVQTLHRVRDRLVGERTSLTNQIRSLLLERGHVVAQGHARLRRLLGELLEPGAGALSPRMAFLLADMRIRWEELDRRIAAFDAEFATMARTDDRARRLTSIPGIGALNATALVAAVGDAATFDKGRDLAAWLGLVPRQATTGGRPKLLGITKRGSRYLRKMLIQGARSAMPSLARSDTAVGSWLRALLARTHPNVAVVALAAKMARTVWALLRHERIYETVSMPA

SEQ ID NO: 111891 - protein, 313 aa, unidentified
METSSTNTYVGIDVSKAYLDVACLGHTTTHRFDNGEDGFSELASWLRRCDPSKIVIEASGGYEKQVLINLASKGFPIALVNPLRIRHFARSLGRLAKTDRLDAYVLAEYARSIDPPLYRVPSSAQRQLSRLIARRSQVSGMLVAEKNRLHLADATLAPRIQKHIDWLQAELEADMVEIERCVAADPDWQYNLRLLQTVPGVGPVTAFTLLAHLPELGHLPARPLAALVGVAPINRDSGQWRGKRFIQGGRAIVRSALYMAALSGSRFNPVLRDFYQSLIARGKPPKVALTACMRKLLIMLNAILRDQTAWHPA

SEQ ID NO: 111892 - protein, 369 aa, unidentified
MKKIHKYVGLDVHQDTTVIAVAEGGREGEVRVYGQISSDLHALERALSKLGGEGVVLHVVYEAGPTGFVVYRRLQQLKIDCAVVAPSKTPQGKGPRQKTDRRDATQLARLHRAGELTAIHVPDEVDETIRDMTRARADAVDELRRAKQRLKSFLLRHGYRYKGKANWSEAHQRYLRTLVLSLPALKAVLEEALLAIDQAVQRVSRLDELLSVQVPRWRWYPAVQALMCFRGFQLTAAAILIAELGDLHRFRHPRHLMAFLGLVPEEDTSADKRRMGSITKAGNSHARWILVEAIQHALLPPKVSAALAQRQSGQPEAYKQLAWKVQLRLHKRGWHLLSRGVMKAKINVALARELAGFVWALLQQVPAPK

SEQ ID NO: 111893 - protein, 347 aa, unidentified
MVTLGTDSHKQSHTVVAVDENGRQLGELRVAATPAGHREAWGWARQWRERRWAMENCRQLSRGLERDLLVAGEAVLQVSPKLMGRSRRSGRQLGKSDPIDAMAVARVALREPNLPVARLEGKSRELKLLVDHREDLVGERTRIQNRLLWHLHELEPGLQIASGGLTRKVVLNEVNRRLQAHQGVVSEIARDLVERLAELTLSVNRLQRRIEVLAAELAPSLMSLPGCAGLTAAKLLAETADVHRFHSSGAFAMHNGTAPIPVWSGNQQRHRLNRGGNRQLNVALHRIAITQLRLGGEASAYVARRISLGNSKAEAIRSLRRKLSDEVYQRLRLDRSEPLAQPTGVAA

SEQ ID NO: 111894 - protein, 394 aa, unidentified
MKLIGIDIGKNKHFFCVMDQQTGEIISQPVSFSNDKEGFDFLVQEIKSYPKDSILIGMEDTGHYHFALLKYLLDLQYTVALINPKTTDFNRKIQGGITKNDKLDTINICDVLDTPERKKQYRITKVNSFDLYEQKQLTRHHHNLKEEENVYKNRLQKCIDIVFPEFNKLFNSKYGIVYMNILKMFGSAENIANTDIRTIRKCFEIEGRGNRISLTPERLKECAISSIGISSSAEVIQIKHLTAQIELIEEQLTEIDKKIEEFSIQNNSPILSIPGISHFSGTSILAELGDISNYSKPSQIIKFAGVAPLHYESSQFNAQHTAITKKGSKYLRKTLYQIILPVIRHNPVFNKYYQLKISQGKGHRCAQGHCVRKLLRIIYHLLKTNQQFDPQLLR

SEQ ID NO: 111895 - protein, 414 aa, unidentified
MIFMIKENYVYVGIDLHKETHTAVMIDCYNQKLGEITFPNRPADFPKLVTKVKKCNTDGKEVVYGLENAYGYGRALAVWLIDKGYLVKDVNTAISHRQAKHRGAMYRKSDSDDAKAIALATLNMLDKLPDACPNDAYWSLGHLVHRRDNIMKQRTRLVNQLHEQLCIAYPSYKSFFNDISRPTALYFWEHYPFRKYLRGKSVEDLRKELVPVSHNKCSTKTCEKILDAVASDKVKNIDYQDARDMVTLSIVSDLQHYDSQLAEVDKMLEQMYKMLGCTLTTIPGVNVIIAVKILAEIGDIKRFSNANKLAQFAGIAPLHLSSSGKGKDVATKQGNRRLQAAIYFLAIQMVQLSSKGTPRNPVVRAYYEKRKAEGKTSQQTLICISRRLISIIYGMLKNGTEYRMPVVENAGEKL

SEQ ID NO: 111896 - protein, 343 aa, unidentified
MGIAIVGIDLGKNVCSIVEADEVGMVLRRRRVRRDKLVDHLSKLNPCVVAMEASCGAHHLAGQAASQGHEVRLMSPEYVRPYVKAQKNDERDAEAIVEAATRPTMRFVTPKSEDQLDIQALHRVRDRLVGQRTSLMNQIRGLLLERGLTTAQGRARLADFVDALLADDDAPVSSRILMVLKDMRAEWQELDRRVKIFDAEFAAFAKSDEQAHRLVSIPGIGPLTASALVASVGDATAFAHARDLAAWIGLVPRQTTTGGKPRLGGITRRGNKYLRKNLVHGARAALPVLARSQTNLGRWLSNLLTRAHPNTVVVALANRLARIAWAVLTQNRLFQPEVPARTS

SEQ ID NO: 111897 - protein, 282 aa, unidentified
MREPEGLVVGIDVAKAALDVAVHPAGEERHLSNDAAGITELVRWLQTVHPSLIVLEATGGYELPLVADLGIASLPVAVVNPRQVRDFARASGRLAKTDRLDAQVLAHFGHAMRPTPRPLPDEEAQALAALVERRRQLVAMRTAEGNRLGATRVALVRTRIQAHLEWLESDLREIDDELRQRLRASPLWREQDEVLRSVPGMGPILSLTLLAELPELGRLSHGQIAALVGVAPPESRQWDAARAARRLGRPCSGPHGALHGHLARHPLQSRHSPVLRPPLGGG

SEQ ID NO: 111898 - protein, 409 aa, unidentified
MNYKQNEKINQVKESTLVVGIDIGSTTQYARAFDWRGIELGKVFPFSNSREGFESFKAWMQHLQDKYKKLDAIVGIELTGHYWFDLGAYLEDEGILLVMVNPYAVKQTKELDDNSQSKNDRKDPKVIAKLVTEGRYSASYTPDGVYADLRIMVANRKRLIREMTQIKNRFARWFAIYFPEYTDVFGDYEVQSSMLLLKKVCTPEAIVELGAEKINQIWRDAKLRAVGMKRATTLCETAKRSIGLKKGSSAARYEMKLLLEDYEYKKAQLDAVMEEIEKLCRKIPESRQMFAIKGIGVITVAGFLAEVGDVRRFESPGQIQKLAGLSLRENSSGKHKGQTTISKRGRSKLRAVLFNAAIPLIAKNPEFKSLHEYYTTRANNPLKKKQSVIAISCKLIRVFYAILAKGSDL

SEQ ID NO: 111899 - protein, 356 aa, unidentified
MSREVKYIGMDVHKEAIVIAVQNTRGHLVMESVVETKSSSILQFIHGLQGELHVTWEEGTWAAWLYDLLKPHVHQVLVCDPRRNALLKEGSKNDKVDAGKLANLLRTGMLRPVYHGEHGLRTLRELARTYQTLSQDLNRVMNRLKALYRGWGIACGGTQVYAPRYREEWLGKIEHVGVRRRAELRYRQLDGLQAMRRTLRPELLAESRKHKAAKLLRQIPCIGPIRAARLLALMQTPHRFRSKRQLWTYSGLGIETHDSAQYRFVRGQLQRAKKPQQIRGLNRNHNHEMKDIFKGAAIRASCGVGPLRDFYVALLEKGMKPEMARLTLARKIAAIALTLWKKEERFNAEQLKTQAA

SEQ ID NO: 111900 - protein, 519 aa, unidentified
MSRARSASRRSRKTVLVQKPNGVLSGRVQAVGPQCFGIVGIDVAKQRMKMMLCDFFGKCLIPPTEFDQTNGGLRTAIDAVRRAQQQAGLKDLVIAIERTGEYHRPVQRAFRQAGFEVRLVHPLATKQFRQIADPGDKTDDTDLAGIHRAAVNGFGLIEPELPPDYLQLQMLIRHRRDLVRKNSALCCQLREHLHAAMPGYTACFDDIWLSQTAWVVAHATGCANAVCTAGIAGLQRFVDQAGVRCKQNTLHKILAWADTAPPCHPQIESLRRIIRDLDDDRTAKTRQILALERSSAHLLVRTPYIRLLVIPGINVVSTADLAGEMGPIAHYASANAITGRAGLVPSRYQSDLVDHANGSLIRSGNRRLRTALLQIADNLVMCNDYFHAKADLWRVRGKDPRWMRVKVAKSFSRIAYAIVAGNGPFAHRCLQDRHYVLHKLQAFHREHDTPMATLLADLQAAIGQLPKVEYVNEAKPLQEELDSLPRRRGPQPLSEIIPIVLARLGMGTVQSTPEGQDLS

SEQ ID NO: 111901 - protein, 412 aa, unidentified
MEVLHACCCGLDVHKKGVTACVLWAEGKGKKRKEKRQFGTMTRDLLALADWLRACGVTHVAMESTGVYWKPVWNVLEGQFEILLVNAQHIKAVPGRKTDQNDAEWIADLLQHGLLRRSFVPPTAIRELRDLTRYRVSLVQECNRLANRIQKVLEDANIKLASVATDALGASGRAMLKAMIEGEGDAKKLAEMSRGLLRNKIPELQGALEGRMKSHHRFLLKELMEHLEFVESKIARLEQEIGEHLRPFEEEMEQLGTIPGVDWVTASGLIAEIGVNMNQFGDPEHLGSWAGVCPGSYESAGKRRSGKTRKGNAWLRRCLCQAAWAVSTKRNNYLSALYRRLAARRGTKRAILAVAHKLLQIAFYILRDGKCYRELGADYFDRLHPYRVKRHLVRRLESLGFQVNLVPASQAL

SEQ ID NO: 111902 - protein, 411 aa, unidentified
MRLFVGDDWAEDHHDVEVMDEAGKALAKRRLPEGVTGIAQLHALIGGFLGEDADESEVLVGIETGRGPWVTALLAAGYRVFPVNPLLSSRYRDRHGVSGAKSDAGDAHMLADLVRTDSHQLREAAGDSPEAEGIKVLARTHKTMIWERTREVQRLRHQLREYFPAALEAFDDLDAPDTLELLGKAPDPDQARKLTRAQVSAALKRARRRNIPDKAGAILAALRSEQLAQPAALAAAYAATVRSLLAVIAVLNEQVKALEAQVREHFGRHPDAEVYLSQPGMGAILGARVLAEFGDDPHRYADGKARRNYAATSPITRASGKKKVVAARFVHNDRLVDALNAQAQSALSASPGARALYDELRARGIEHNDALRRLANRLVGILHGCLKTGSLYDEDTAWGHRKNLPQSSVAA

SEQ ID NO: 111903 - protein, 345 aa, unidentified
MKHFAGLDVSLQETAICVVDEDGTIIIEGKAASDPADLIRWLAATGLMIARLGLEAGPLSPWLHAGLRAVGLPAICIETRRMKGATAAMAVKTDRNDARAIAHAMRVGWFTAVHVKTAESQELRLLLSNRRTLLEKRVAIDNEIRGTLKAFGLKLGEVTVGTFEARVLELLAKRSRLLVMVRPMLTARAALRQQGDVLHRMVLKAVRASAVCRRLLSVPGVGPIVALTYATGVDDPSRFTHSRDLGPHFGLTPRKYASGEIDRSGSITKAGDGAVREVLVQAALTLLTRVHRWSALKAWGVAIAKRRGLRRAIVAVARKLAIIMHRMWANAAPFNWAREEAVTLA

SEQ ID NO: 111904 - protein, 384 aa, unidentified
MKVVCGLDVHKDSVFCCILCANGEKIQHKFGVLTEELVTLRDLMVSEGVEECAMESTSIYWIPIWRVLEGSVKLHLVNPYFIKQLPGKKSDVNDAEWIATCLSKELIASSFVPDDKIQRLRQYDRRIFDLNASISRNLVKLDQCIQRCNIRISNYISTTDSKGYRSIVKLISQGVTDAEVLVKELHGRTINRHGRETLVKALTGVVSETDIDIIKQLVEEIELQQRHKDEAQQKMTALCMEWFPQEVENLQTIPGVKERSATSIIAELGTDMTHFQTPKKLVSWVGLRPRNEESAGKIKARGITHGNRFVRKTMIECSWGAARMKDSFFAEFSYRQCIERRKNKMKVQVAIARKILVAVWYVLSQGTQYIKPTDHYTAAHMTAV

SEQ ID NO: 111905 - protein, 403 aa, unidentified
MAAICGIDWADQWHDVRIADEAGAALAQRRFCHDEDGIGALIALLGEHDVALAAIERPDGLLVGRLLAAGIRVLAIHPNQVKAARDRFRAAAGKSDEFDSFVLCELARTDAHRLPALAPSGDETTALRALVRTREDLVNARVALANQLRAQLDCFWPGARRIFADPDSPIGLAFLERYPSPTDARGLGPKRLTAFLARNAYSGRKTPDELLERLRNAPVAVIGELETDARRATVLGLVCALRPIVYQISQLTSQIAGAVRAHPDGPIFLSLFRDPKSVITAAGLLAEIGDNRHRYPTRDSLAADAGMAPVAIESGKRRSAVFRWACDKRLRNHLATLADSTRHWHPWARDVYQRARTRGCDHPHAIRILGRAWTRILWRCWHDRRAYNINHHRAATRHLQQEG

SEQ ID NO: 111906 - protein, 318 aa, unidentified
MSDRIVVGIDVAKDTLEVAFGPTGDIQSITNETSGHEALIARLSAHPVELIVMEATGGYELAVASALQAAGFHVAIINPRQARDFAKAMGYLAKTDRIDAGVLAQLAEVLRRHPDREKIVKPLPGEEQQHLQAIVVRRRQLVSMLVAERQRLTTSHSAARKSIETIIKALMKELERTERNMERHISTHHAALAALLGSVKGIGPTTTSTLIAEIPELGRLSRREISALVGVAPFNCDSGTWRGKRRVFGGRASVRRTLYIAALVATRFNSVIRRFYERLLLAGKPKKVAIVACTRKLLTILNAMVKAGKPWDESLHVA

SEQ ID NO: 111907 - protein, 362 aa, unidentified
MPDGIRWVGLDVHAHESTIAIFDQGTGELTTKRVVGRPHEVLERLMDIPVPARMVYEAGPTGYGLVRRARAVGIEMAVCAPGRSDRAPSDRVKTDKRDAVRLARRLAAGELTLVTVPSVEHERLRDLVRCREDIRGDLMRARHRLGKFLLRREIYYQGPGEAWSRRHRVWLASLRFSDRASQLTIADYLHAHDVLLARRDRIEAELQQLADGSPWTVTIARLRCLRGIDTLSALGLCAEVGEFARFEHPDSLSAYLGIVPSENTTGQQRRQGSITKAGSTHARRLLIEASYHYQRHPAIGQALERRQRGQSAQIINIAWRAQRRLNARWRQLKHTRKKPNGIVAVAIARELAGFCWEIALAD

SEQ ID NO: 111908 - protein, 393 aa, unidentified
MIYVGIDVAKDKHDCFIVNSDGEVLYDVFTIQNNMNGFEDLFFKIKTASKDLSKVKVGLEATGHYSCNILGFLHNKGLSTIVINPLYTSLSRKSVSLRKTKTDKVDARTIANMIMSDVSLKPYSDTLYHTEDLKSLSRYRFDKVSDRSKLKQSVSRLVNILFPELEKLVSTLHTKAVYELLSEFPGAHQVASANLKHLTALLASASKGHFGREKANEIREAARRSIASYLPAKSLELRHTIKLIRELNTEISEIETEIKKIMDAIDSPTLSVPGISYALGAVIVSEVGDFSRFDNPDKLLAFAGCSPSTYQSGQIYSTHAKMEKRGSRYLRWALLNAAKYVCKWEPTFAAYLKKKLAEGKHYNVAVSHAAKKLVRLLYHLETTGEKYIPQTLS

SEQ ID NO: 111909 - protein, 405 aa, unidentified
MEVVHARCCGLDVQKRQVVACMLTPDGKEVQTFGTVTAEVLRLGDWLGARSCTHVAMESTGVFWKPIYNLLEGRELTLLVVNAQHSKAVPGRKTDVRDAEWIADLLRHGLLRPSFLPDRPQRELQELVRYRRSLVEERAREANRIQKVLEGANIQLGSVISNVLGVSGRAMLEALAAGITDAQRLAGLARPRLEATPEVLERALEGRVGEHQQQLLGRQLRHIAFLDEQVAGLDREIDARVRPFEAALARLDTIPGVSRRVAQEVLATMGTDMTRFPSAAHLASWAKLCPGTNQRAGKQRSSRTGHGNSTLRTALTEAAWAASYTRSTYLAAQFRRLAARRGRQRAIVAVAHTILRTIYYMLRDGTDYRELGATYFDQRNQDAVAKRAVARLEGLGFRVTLEPVA

SEQ ID NO: 111910 - protein, 354 aa, unidentified
MSNYSTKFFIGIDLGDVENQICIIDHHGEILEKTSIENTVSGINTFFDRFDAPRQVLVAVETGTHSPWISQLLNARGFRVLVGNARKLRLIWDSTIKTDDRDAEMLARIARFDPKLLHPIRHRSRSAHMDLAIIKGRDTLVRCRTTLINFVRGSCKTAGTRLPSCSADAFAKTVIEHIPKDLLPATVPCINTILELTKKIRQFDSQIEALCNEVYPETMILRQIKGVGPVTSLAYILTLEDPTRFRKSRDIGPYLGLVPRRDQSGCTDKSLSITKAGNTYLRRLVVNSAQYILGPFGPDCALKRYGIRIASRGGKVAKRKAVVAVARKLAVMMHHIWKNNTVYDPFYQSYLKAA

SEQ ID NO: 111911 - protein, 338 aa, unidentified
MKITTIGLDIAKSVFHLVAVNKMGRLVKKKQLKRKQVLTYMATLEPCLIVMEACGGANYWAREFIALGHQGRLIAPQYVKAYVKGNKNDYNDAEAIVEAAQRPNMRFVPIKSVAQQDIQNFHRQRERIKKERTALVNQIRGLLAEYGVTLNTGVATVRRDLPGVLEDAENGLTALSRELFAELLEELRTLDQRFEQCERQIKSLNQGNEVCQRLDEVLGIGPITASAIYAAAGEGKDFVNGRHFSAWLGLVPGQHSSGGKSVLLGISKRGNAYLRMLFIHGARAVLRHSANKTDRFSRWAQALVARRGHNKACVAVANKMARMAWVIMAKGETYRVVM

SEQ ID NO: 111912 - protein, 327 aa, unidentified
MAQKMDVVGIDVSKATLDAYALTSQQARQFANDPAGHQGLVAWLQELGVGVAVFEASGGYERAAAQSLRRAGLVAHVVDPKRVRYYARAAGQLAKTDRIDARMIAAFGAAFLLGKPSGVAGGDDPARQDLAELVGTRQVLVDHRTSLQQQADAVTSAIAKKLLLATLKQFDRQIETSDRQIAAAIARHEPFAALARRLDTVPGLGPVSIAALIAWLPELGQLDRRQLAALVGVAPFADDSGKRTGQRHIQGGRMKLRNVLYMATVGAATRHNPVLQARYRRLLENGKKPKVALIACLRTLLTILNAMVAHQQDWNPTKLPATEPVAA

SEQ ID NO: 111913 - protein, 441 aa, unidentified
MAMRKREDSPEVFPNAAGIDIGGSSHWVAVPRAASDEPVREFGTMTDDLNAMADWLLACGVDTVALESTGVYWIPVYEILEQRGLTVWLVDARQMKYVPGRKSDVLDCQWLQKLMSLGLLRAAWRPGDEVCVVRAVVRQHEVLLVEQASWVQRMQKALVQMNLQLTEVLSDIMGMTGQAIIRAIVAGERDPKVLARHRHGRVKRSEADIMRALTGNWREEHLFVLEQSLAMYDDIARHLGECDAKLHALLDQRSRHQPDLGPAPRSGSKQRVEFDLQQRLANWAGVDLTRINGLGVGTVMTLLSEIGPDLSRFASVKHFCSWLGLCPGTKISGGKVLSAGTKRSANRARQALKMAAMALSRSDSALGAFYRRLCARMDKPRANTAVAHKLARMVYFMLTRGEAFVDQGQQRYEEQQQQRSVAALKRRAKAFGFRLEPETAV

SEQ ID NO: 111914 - protein, 349 aa, unidentified
MLIIGCDFHTRYQQIAMAKEETGELLLERRLDHQSGEAHAFYRSLQAPVRVGIEATGPIHWFERLLAELGHELWIGDSARIRASEVRKQKTDQRDAALILDLLLARRFPKIWVPTPGERDFRQLLVHRHKLVCLRTTLGNQLHALALSQGLCRKKKLFTRKGRVELAGLTLGLWASRRRAELLKLLDQLEPPIAELDRAVLQEAERREDAVLLMTHPGIGPVTALAFVLTIGPVTRFCRSRKLVSYLGLNPSEESSGGRRRTGAISKQGNTMLRWLLVEAAQRAARCDPALRQDYQRLKFRRGHAVAKVAIARKLAVRMYWMLRSGADYARLVRMQGSPRGTLVHASTP

SEQ ID NO: 111915 - protein, 347 aa, unidentified
MSISLIGLDTAKSVFQIHGVNETGKVAVKRKLRRSDLIAFFEKQDSCTVVMEASGAAHHWARLLTGLGHTVRLIAAEAVKPFVKKGKKNDAADAAAICEAAARPNIKFVPVKSVAQQGILALHTVRSLLVKQQTMLANAIRGLATEFGLTVPKGLENLGELVELVNADKAMPKPACHAVAELHDRFGELAKGIQALEAEIVAHARSDETARRLATIPGIGPITASLIAATVVDISRFKTARQFAAWLGLVPRQNSTGGKTRLGRITKAGNREIRRLLVLGATSMVRRAGGWNSAVGGWLRTILQRRPVRLVTVALANKMARIAWAVMTRNEVYHPKGGVAVKAQAAA

SEQ ID NO: 111916 - protein, 412 aa, unidentified
MNIVYERCVGIDVHKRNVVVCAITPDAQGQRHKEQRTFSTMMPDLLRMRQWFQSLNVTHVAMESTGSFWKPIFNVLEGHMEVLVVNAQHLKAVPGRKTDLKDAEWIADLLQHGLLRPSFVPPAFQRELRELTRYRTSVVEERSRTINRLQKILEDTNIKLSAVASDLMGQSAREMLAALVAGEADPTVLAQLARGKMRAKHDLLVQALQGQFKPHHRVLISEQLAHIDTLDEEIERLSAEIAQRLRPYEAQLKRLMTIPGIKRRLAEVILAEIGPDMQRFPSARHLASWAGMCPGNRESAGKRLSGKTRKGSPWLRTALVEAAHAATHCKESYLSAQYHRLVLRRGGKKATIAVGHTLLVIVYHVLADEKDYQELGGNFFDEHDRQAVQKRLVHRLEKLGYEVTLTPTSPAA

SEQ ID NO: 111917 - protein, 372 aa, unidentified
MNTIAYIGMDVHTTNYTLCGFTAENDIPFGRATINPEMTELEKYLNKLHERKGFTHFICGYEAGCLGYTLCRTIMAHSWKGFSVECFIIAPTTIPVPKGIRIKTDRRDALLIGQAMRNGTCSYVYIPDQNDESVKEYIRMRNDTQTQLKATKQQISAMCTRQGHHYSGKSLWTQAHLEWLKKLTFSNALFRETLDEYLFTYTQQSERLARFDKRIEEMAQTEKYNSRVRALSCLKGIATHTALSLIVEVGDFNRFPEAKNFASFLGLVPGEDSSSTRIHRLGITKSGNNHLRRLLVESANCFSKGSKIKSKALKARQAGNSKEIIAYADRANERLRRKYMNIQLRSKGAIAKVAVARELACFVWGMMTGHID

SEQ ID NO: 111918 - protein, 360 aa, unidentified
MAKARTLVGLDVHATKIVAAVLDAETGELRWFCVGGDAAEAAGLCAGLPRPVRAAYEAGPTGYGLARELARRGVECVVAAPSKIPRAPGDRVKTDRRDAELLVRLLLAGKLHAVRVPGPEEEALRDLVRAREAVRVDLMRCRHRLSKLLLRHGIRFEDGRAWTDRHHLWLAGIELGWPAAQATFADACGAADALVHRRDALEREIVALLPGAPWQPQLARLRCLRGIDTLSAAGLCAEIGDFDRFARAEQLMSYVGLVPSESTTGQQRRLGAITKTGSGHARRLLVEAAWHYRPRPRIGKALSDRQAGQRAEAIAIAWSAQQRLYRTWNRLEARAKRRTIIAVAAARELAGFCWAITRVE

SEQ ID NO: 111919 - protein, 363 aa, unidentified
MFTERTSVGLDVHARSVAAAAIDGVTGELVQARLTPSHEHIRSWVQDLPGPVAVTYEAGPTGFDLYRVLSAAGIRCEVAAPSKLQRPSGDRVKTDARDAVHLARLLRLDQITAVAIPSVDQEAARDLVRAREDCRGDLMRARHRVSKLLVRHGIVYGDGHAWTRRHDTWLRHDAIAQLSTRATRLAFDSDYENVLAVKARRDRLDAAIGEIAATSEFTPLVHRLGCLRGIGTLTGFALAVEIGDWGRFTGNTIGSFVGLVPSEHSSGSSRVQGSITKAGNTHVRRLLVEAAWHHRPGYVVGKTMRERWELAPAAARARGDEGNRRLHQRWVKFIKRRKKSTIANVAIARELAGWCWSLAILEE

SEQ ID NO: 111920 - protein, 389 aa, unidentified
MLLDHPSDEPTAIRTYIAAIFVSLELSRSTWLVTSLSPGKGERMSKHSVTAGNVAELLTLFAELRRKAEVRTGQSYPIITIQEAGLDGFWLHRVLQQNGIESHVVDPASIAVPRRRRRAKTDRIDGETLLRALLAYKRGEPRVCAMVVAPSPEEEDRRRLCRERRTLIDERITHVNRIKGLLFAQGICGYGPLRRDRRARLEALRTGDGRELPSHLKAQIGRELDRIELLLDQIKAVEAAQDALLATARKPASDEAAPDPVTMLLALRGVGANFAAVLWSEAFYRQFANRRQVAAYAGLAATPWQSGGIRHEQGVSKAGNPRLRTTMIQLAWLWIRHQPQSALTRWFKERSPQGRKRAIVALARKLLVALWKYVTQGVVIEGAAMKPAA

SEQ ID NO: 111921 - protein, 370 aa, unidentified
MSRSVSFSDGVTRMSAKVCGLEAQERRPTVEHCGIDVHVKSSQVTVVDDEGEVLERVTLPTTRVALGRWFGGRPAMRILLEASGSSPWVSRVLREFGHDVGVVDPRRVRMVAESTLKTDRIDADTLAELARLRMRLRTLVWQRSEASQLQRGHLRVRRALVEARARFIVTIRGLLRSFGVRVASCRADRFVARCEATAMGPELTAIIAPLLAAIQDLNERIAAMDAVVEHVGQGHAAVASFQAIPGVGPVVALGYVLSVEAPSRFRRSRDVPGYLGLRPRLRASGELVRRGGITKEGDSDVRRLLVQAAHAHLRSRTDTALKRWAEGLIPRIGKRKAIVALARKLAVLMHRLWLTGEVYQPFPEEVAKAA

SEQ ID NO: 111922 - protein, 341 aa, unidentified
MEQATMIGLDIAKHVFQLHGADAAGHVLFRKRITRVKLLGFLAAQTRCVVAMEACAGAHYWAREIAKLGHHVRLIAPAYVKPFIKRQKNDAADAEAICEAAQRPSMRFVPVKTEEQQANGIVFRARDLLVRQRTQCVNALRGHLMEYGYVFPKGITHVETLIALVEDLQSSLPDSVRVILKLLIDTFTALEAQIAVLDTEINQRSKSDPTARRLMTIPGVGPIASTAITALVPAPEGFPAGRDFAAWLGLTPLQKSTGGKQKLGAVSKRGERTIRRLLIIGASAVVQQASRRGAPKGSWLAQMLARKPKMLVTVALANKMARVIWALLVKGGTYRAPAVAA

SEQ ID NO: 111923 - protein, 370 aa, unidentified
MKKNSTRPQSPRGAAARSKGPITIGLDLGDKTSRYCVVGDNGEVMSEGSVATTRKAMAQKFSGMGRCRIAMEVGTHSPWLSRMLTALGFEVIVANARQVQLISASSRKNDRMDAHLLARLARVDPELLRPIRHRSEQAQADLMTIRIRAALVEARTSLVNAARGFTKAMGERLPACDTDSLGVEKLEALPAALRSRLQPLLEQIEALTAQIKKLESNIEQIARIEYPETRLLTQVSGVGTLIALTFVLTLEDRERFQKSRDVGCYVGLRPKQSQSGQSQPQLRITKEGDRYLRTLLVQGAHLILNRRGPDTDLKRWGLKLAQRGGKNAKKRAIVAVARKLAVLLHRLWVCGEVYEPLRNSRPTPASKQAA

SEQ ID NO: 111924 - protein, 342 aa, unidentified
MQITTIGLDIAKNVFQVHGIDAKEKVVVRKQLRRSQVIAFFSALPPCLIGMEACATAHYWARELRKLGHTVRLMPAKDVKAYVKRNKNDAADAEAICEAVRRPTMRFVRIKSAEQQGQLMQHRTRDVLIRQRTQIINALRAHLAELGIVAAQGDAGVNELRAIVADDRDERLPIDARASVIVLAAQLEALQTLIGSIEKRIKMQHRSNETSQRVETIPGIGVLGATAIVATAADPTVFRSGRDFAAWIGLVPRQDSTGGKQKLGPISKQGDRYLRRILVVGAIAVLRRAQENPGKYPWLTQLLARRPFKVVAVALANKMARTAWALMVHGGTYRAPELAEAG

SEQ ID NO: 111925 - protein, 401 aa, unidentified
MKRLSGGIDVGCESHHITILDEEGNVLYNKKISHRINEFTENIKLFRKLEKQERGKLSFALEGKNGYSAPLDRILLNKGFTLYNVDNLKLKRFREAFAGEWRDDERDSLMLSKMLKLKDHINSQREKVFIKIEKPSPLTQSLKLLSRHQQTLIDEKVRLTNRLSKKLLEVCPQILELGKVKSKKLIVILAKYPDFSKYKRITLKSLLKIKGIGEIGAPFLLKRLNNIEYMPGLTDIYKTIILSYAQRILELQKEIKDIDKSLDEIGNQSKEVNHLKTIPGVAIKLASRLIGEIGDINRFPSEKQLAIYCGIVCVNNDSGKVTKAKAVYKANKICKQTLITMAGCSIRSIHQCKAYYLKKRTEGKSHNHTLRCLARQLIKVIYKMLTEDRNYLIRKELKKVV

SEQ ID NO: 111926 - protein, 353 aa, unidentified
MKKLFIGIDFAKEKFDAAIIEACGLKEFGNREYGTFTNDKKGYRQFFKWVKTNADKSVENEWLFCGEDTGSCSLGLSKWLYGKGLDIWIENAYSIKHSSGIQRVKSDKADSSMIAEYAWRHQDKAVLFEPLSESLSQLREVFLYRHKLVQQHIAMDVRKQDKEAAEPSKAISFIKRKSKHLMSEIDNAIKECDLMIDRIIESDAELKENYAIITSIKGVARQNGACLLIFTNNFRRFDLDARKIACYYGVAPFGKDSGTSIHSPAKTSHFANKLIKSLLGQAAHCAKKFNPEIREYYNRLIGRGKKPQVALNNVKNKLIRIIVALVRKKVYYDPKTYMFYNAKFTDVKQMLNS

SEQ ID NO: 111927 - protein, 357 aa, unidentified
MLSSNVKYIGLDVHKEAIAIAVLNGAGKLVMESIVETKSSTVLDFLHGLRGELHVTLEEGTWAAWLYDVLKPHVREIVVCNPRRNALLKEGSKSDKIDARKLAELLRAGLLRAVYHGENGLQTLRELARCYLTISKDLKRVKNRLKALYHSWGICCAGKQVYAARHREQWLSKIAQVGVHRRADLFYEQLDGLLVLRNTVRGELLAESRKHQAVKILRQIPSIGPLRAALLLALMQTPHRFRGKRQLWTYSGLAVVTHDSAQHRYVDGQLQRSRKPQQIRGLNQNHNHAMKEIFKSTALNASRCAGPLQDFYARLLARGMKPDMARLTLARKIAAITLALWKKGGSFDAEHLKSQAA

SEQ ID NO: 111928 - protein, 301 aa, unidentified
MTRQGGEKTMQCIIGIDISKNTLDAYRLSDGSRLQVSNDKVGYKTLIKWIRQTDVSLTVFEATGAYHRQLEAMLAAAVVPFAKVNPWQARRFAQATGRLAKTDRVDAAMLAKMGAVLGLEQHEPASEDLNELRELLTARRALMKDKVAAKTRLQTTRQTLLQHQIGARLRQIEVQIKEIDEAVAERVMKDELLSKRLAILVSIPGIGKITAISMIVEMPELGTLDGKQAASLAGLAPISQQSGRWRGKERITGGRTFLRRSIYMPALVAVQHNAIMRQRTVSLHWFNSAGQPISASCPLTA

SEQ ID NO: 111929 - protein, 355 aa, unidentified
MIYVGIDVHKKHCQSALMDESGKVLEQIPFRNTGDGLTYLIDRIKPYGEAKAVLESTGNFWLKSYEALEKADIRVSLSNPLKTRAIAQARIKTDKIDAKLLAHLLRANLVAESYVPDKETRAKRALLRHRSSLVKTRTELKNRIHNLPDKYDLQPEFTDLFGKQGMNWLKTLQLPSIEKTILNSNLKLLEALNDQIEKINLGIASNAVNKEDVKLLMTLPGIDYYAAMVIANEIGDVTRFSEANKLVSWTGLAPSTRQSGNRVKHGTITKQGNKTLRWILIQATHNACRNDERLRNFYQRIAGRRGGNKATVAVAREMLVIIYHMLTRKEPYRGVDQELYRSKLKRLERLGSNGL

SEQ ID NO: 111930 - protein, 360 aa, unidentified
MDVVVSRCAGIDIGKAEVVVCLRVPGSRGKRVSEVRTFSAVAREIKRLAEWLAEHQVSHVVMEATGQYWKPVWDVLAERGFELMLVNARHVKMVPGRKTDVADATWLAELLEHGLLRGSFVPPRVIRELRDLTRYRKRLVQAHTSEGQRIAKILEDAGIKLDSVVSHLLGVSGRAMLRALIAGERDPEQLAELARGRLRTKIPALAAALEGRFAEHHAIIIGLALDHFEYLERSVVRLDERIDDLMAAHSAARDRLDTIPRVGKRAAEIIIAEIGADMSVFPTAGHLASWARMCPGNNITGGKRKSGTTGGGNRSLRETLVECASAASRQRDSYPAAQFWRLARRIGKKKPPWQSGTPSW

SEQ ID NO: 111931 - protein, 348 aa, unidentified
MKPITKSKKIEHNLEGFKELLKLKETIRKEYNEDYVVVFESTGIYHRSLQTYLDEHNFKYTIINPLLSAKVRKSDIRGTKTDAKDCASIAKVFFLKELRIYSKIDEIYDDLKEKSRYYDFLMDEMKRWKIEFRRLLDIIYPGFDRVYDDLYGDFIQTFLLEYSHPEIISKRRLDTIAKFLEKHTCHKEAYCIRQAQTLKEYVENCASGCSSKSYLVRQFDTVIHNLNAQIKHLEIVLEEIVELAKTLPNYDSIRSIPGIGNNLAGRILVEIGDVNRFNNASQLVAYAGIDPQIYQSGQISGLHLKISKKGNKKLRCLLYLAVTCMIKTSRNTVIVDFYKKEKGRWISV

SEQ ID NO: 111932 - protein, 409 aa, unidentified
MRVIYRTCAGMDVHKRTVTVCLVWWDAAGQRHQEVRTFRTMTKDLLELREWLRAKGCRIVAIESTGAYWQPVFNLLEDTFEVLLVNPSHIKQVPGRKTDVKDCEWIAELLEHGLLKGSFIPPRAIRDLRDLTRQRGRLMQIRASAVNRVHKVLEGANIKLASVASDVMGVSGQAILKALLEGERNAQRLAELSRGRLRKKKADLVAALEGRFRAHHAKLLARLLAHIEFLDESIAECDAQVEALCRPYALDLERLDGIPGVDRRSAQDLIGEIRVDMRPFPSHKHLCSWAHVSPGNNESAGKRKSGRTGKGNRWLRALLIECAHAAGRSRDTYLGEQYRRAARRRGKKHAAMVVAHSQLEAAYFILRDKVPYHELGAQHFDQINQAQVIRYHVRRLESLGLSVQVTAAA

SEQ ID NO: 111933 - protein, 422 aa, unidentified
MRILEPLQIFILEESVMLNAVGIDVSKERSTVAVLQPGGVIVHKPFDVPHKSRNLHDLAQYIGSLEGDTRVVMESTGRYHEPIRNVLFKAGLFVCTVNPHLIKNYGNNTIRKVKTDSADAKKIARYTLDNWAELREYTSMDTTRTQLKTLNSQFSFFMKQKTAAKTNLIALLDTTYPGVNKLFDSPVRADGSEKWVDFAYSFWHVDCVRKAGITAFTDRYKRFCKHHGYEFQEAKANAIYKDSKELIATLPKEAVYKELIQESIRQLNLLSENVEHIRKTMNELASTLPEYNTVMSMYGVGPTFGPQLMAEIGDISKFQHREALTAYAGVDPGKNDSGQEVHNSSHASKCGPSRLRHTLFQIMTTMLQTGGKEDDAVSSFLFKKKAENKPYLVYMTAGANKFLRVYYGKVKECLRNQEQAEE

SEQ ID NO: 111934 - protein, 428 aa, unidentified
MHGKNYNKQIAKRQRVKRTTLVIGMDIGNEFNAMCLMNKDGEVLGKYSRIYNSRKGFNFFSKIIEAMKKKKGFKDVLIGMEPTGHYWRKIAYFGKDKGYEVRFVRTTALRHQRELDESSSAKSDIRDAVTIANITREGKYIDTVIEDGVFRQLRTLAHVRERIQRYNTGSKHALRAVLDDYFPELNGIFWSMKSKGLWAVLENCPFPEDVKRLGQKELTELIAKSTRRKGSAAKKAAELYHAAKETVGLKQIGIADRYRLKMYLEEVKRSEAQLKDIEEEMKKLLGEVPCAKNILSIPGVGVLSCAVFLGELGNPSNFKSPKQIIKYAGYDPRENDSGQSIGRKRISKKGRWMLRKYLYFMSMRAIHRSKFFSEYYYSKLKSSNRFGQPLKKKEAICAVAIKLIKVIFALLRDNRMFTAKAPALALAA

SEQ ID NO: 111935 - protein, 341 aa, unidentified
MEHTTIAVDLAKSVFEVAVSVHPGQVSERHRLSRARMVRFFRNRPPSTIVLEACSSAHFWARELQAMGHRPVLLPPHATRAYVPRNKTDRTDAKGLLEAVRNRDLRPVPVKSVLQQSLSAMHRLRSGWIGERTARINSIRGILREFGIVLPVGARYVVRRTAALLGDPDVPVPDAVRAVLFAALEEIRQLEERRDTAEAQLAVLAAQLPVVARLQTIPGIGPITATALVAAVGDVQRFPTCRHFASYLGLTPREWSSGATRRLAGISKRGDTYLRSLLIHGARAVLWAARRKAPDRLRTWAVDLQRRQGHNRAAAALANKMARIAWSVWRHDAVFEERPID

SEQ ID NO: 111936 - protein, 391 aa, unidentified
MSMYFVGIDISKYKHDCCIISAADQQIVSKFTVKNDKDGFEHLLTTLNSLSNPEDIKIGFESTAHYALNLELFLENAHHSFMEVNPVLIKEYKKSTTLRRTKTDSVDCESIARWLMTVEYKPHSKGFYHSYSLKSLTRLRDRLIRQRSFYLVKITNVLDHTFPEFKPFFNERLSKTAIYLLENYGSAEKMAHMNSASYDKLRCASRGKFSIQQFLRLKELAANTVGVNNSIFDIELNSLLTLYNSLCKEIKTLEAEITKLIEEVHPHYMSIPSIGPISAAVIYAEYGDISNFSNPGQMLAFAGIEPGINDSGTESHGDRMVKHGSSQLRYVLLNACLPLIRFDITFATYYAKKRAEGKKHRVAITHVAKKLIRVIYALERQDVDFNVQKLR

SEQ ID NO: 111937 - protein, 376 aa, unidentified
MEEVSTAFVGLDVHSQSTAIAVAHAGREAPRFVGTVGARLSELIKALDKLGKPSTLLVVYEAGPCGYTLVRELRAKGYRCEVVAPSLIARKPAERVKTDRRDALKLAALARSGDLTTVNVPDEQDEAIRDLCRARVDAVKARLKARQQLKAMLLRHGRRYTGKSSWTAAHERYLAAIGFEHPAQDIAFTEYRQAVSEADARVQRLTQALAQQIESWRMLAVVHALMTLRGLDLVAATTVVAELGDMRRFAHPRDLMGYLGLVPSEHSSGTSRRLGEITKTGNGHARRVLVEAAWNYRFAARISRILQVRQEDQPAAVRAIAWRAQLRLCQRYRRLSARGMQPNKVCVAIARELAGFVWDLGRQVTPQASTPATQQH

SEQ ID NO: 111938 - protein, 381 aa, unidentified
MVPKTTHRKNDTTVSEHLYMALELSKEEWQLGFTIGFGQAPRLRSLSARDLARLLEEIRLAKDRFGISESAVVLSCYEAGRDGFWLHRYLEAQGIYNLVVDSASIEVNRRARRTKTDRLDVGKLLTMLLRYHQGEKKVWSVVHVPSPEVEDQRQLHRERQALKVERTHHINRLKGLLASQGVMLEVKADFLSRLEAVRLWDGSVLPAGLQGCLVREHERLQQVQEHIHHLERKRKDVLLSSSDPAVEQVRRLLRLKGIGINSAWLYVMEFFSWRAFRNRREVGSLSGLTPTPYQSGESARERGISKAGNRPIRAMAIEIAWSWLRYQPNSQLSRWYEQRFAHGGKRMRRIGIVALARRLLVALWQYLETGIPPKDAGLINA

SEQ ID NO: 111939 - protein, 351 aa, unidentified
MGKKGVMKNISITRYNMGVDFGSEQMDAKLAAQYGDGTRKILFSRRLENKETGFKNLDGWLKEKCRCKDVEIRISCETTGVYHERCCYFLDGLGYYVTVEVPSRVKSYKKSYGFNSKNDKIDATALAYMGLERNLCKWEPINSFYYELRMLTRYHQSVQEMHTSACNQLHAQQAGMRISELVVKQLKANIELYEKQLAELKKAIEEKIASEPEVKRKIDNITEEMKGVNIMTVAVVIAETNGFSWFTNRRQVVKYAGYDIVEDQSGKRRGKTKISKKGNAHIRRALYFPAINMATYNVKPFVDKYERIFERSRIKMKGYTALQKDLLLMLFTLWKNDQTFDPNYQNQQKKK

SEQ ID NO: 111940 - protein, 344 aa, unidentified
MPIVGGLDIHRKQITFDCLDTDTGELRRGRIVPADRTHLAEWLTRHLAGCGEAHLAFEGCTGWRYVAEELARAGVTAHLAEPADTAALRGPKRHAKTDRADSAHLRQLLTDGRLPECWIPPAHILEARALLQTYQDLRVEHTAWVQRIHAVLFHQGARPCSALRTVEGQAELAAITAAELSAAGRLQVATALEMLTALDDHLDTLRRQLINTARHLTGARVLIARLYGVGPITALALTCWLGGAGRFSSARKAVRFAGLDVTVHSSDGKRSPGRLSRQGPEVLRWCLFEAGKVHARNSAPDHLYYAQTQQRIDGKRAALSEARKIVRQACHILTELGDQALTTC

SEQ ID NO: 111941 - protein, 427 aa, unidentified
MKKNRTNQRLEEVTVSTLIVGVDIAKSIQWARFVDYRGVEIGKAVSFHNDRQGFESIVAKIESLCKNKFNKVIIGMEPTGHYWKTLANYLAKKEFKVVGVNPYHTKKSKELDDNSPTKCDKKDAITIARLVKDGRYFDPYLPQDVYAELRVLTNTRISILKRKNAVRNTITAVLDEYFPEITEVFRKPLDGKASRQILKSCPFPYFILELDEDGVVEEIKKAVKKTVGRKKAQQLLAKARESIGVEYGLESAKLRMNCLIAELDMIEANLYEVEASMEQMLGSTNYADKILGIKGIGVVSAASFLGEVGDPLRFDNARQIAKYAGYNLTEDSSGKNKSGTCISKRGRKQLRSVLYKMAFTMVGQNAEMKELYNYLQTREKNPLKKKQALVVISKKIITVIYSLLKKKEVYKPQLVLGAVRREMLLAA

SEQ ID NO: 111942 - protein, 348 aa, unidentified
MLCVGIDVAKDKHDCFILSSESEVLADVFTIQNNAEGFDTLLQTIRRFVCPGDKIKVRLEATGHYNYNILGFLLDKGLDTYVINPLHTNLYRKSLSLRKTKTDRVDARTIAAMLMSDVNLKSYTDTAYHNEELKSLTRYRFDKARERAKLKQSVSRLVTILFPELEKLVSSLHLASVYALLSEFPSAKQVADAHLTHLKAVLNGASKGRYGRDMATAFRDAARCSVGSVMPTKSLELRHTIRLIHELDAEIEDIEAAIQSMMDEIHSPITTIPGIGVRMGAMILAEIGDFSRFDSPDKILAYAGMTPSTYQSGQLSLSGAYVTTAAPTITPAMPIPPPTITPAMAEPK

SEQ ID NO: 111943 - protein, 349 aa, unidentified
MKHYVGLDVALKETAICVVDDGRRIVREGKAPSEPEAIAAFLSATGLTFERVGIEAGPLAPWLCDGLAAAGLPVICIDARHMKAAVSAMPVKTDRIDARNIAFAMQVGWYRAVHLKRPEARKLRLLLSSRQMLLRTRIDLDNHIRGVLKAFGLKVGKISTGQFEARVWELIDEGDAQIRWVVGTLLTTRAAVMSQLALLHHAVLAVVKQDQVCRRLMTVPGVGAITALAFRTAVDEPERFLSSAAVGAYFGLTPSKYASGETDYTGHITKCGDKAVRVLLCEAANALLTRVSRWSWLKRWGLEVLKRRGKMRAQVAVARRLAVIMHRMWLEGTDFRWQREPDAPAGAAA

SEQ ID NO: 111944 - protein, 343 aa, unidentified
MKQYVGLDVSDEEASVCVIDEDGVIVAEGKVSGEPGAIAEFLGREAPHAVKVGFETGPLSTWHWHELTELGVPAVCIDARHAKGALSCRINKTDRNDAIGIAQIIRMGWYREVKVKSYASHHVRSSLRARALLIKTRCDYENQIRGFLKTFGFRIGKTGKAGFAKRVRELIEEHEDLRKLIGPMLEVRESIRREIAKMDKELGDVVKGSETLRRLMTVPGVGPITALSFTSAVDDPSRFRKASSVGAYLGLTPRRYQSGETDRPGRISKAGDGMVRKCLFEAAVVLVTRGGAWSPLKAWGVRLAKRVGMKRAIVAVARKLAVILHCIWVDGTEFEWTRQEANA

SEQ ID NO: 111945 - protein, 412 aa, unidentified
MEVVYERCCGLDVHARRIVACLLTPDAQGGVRKEVRTWGTMTADILALADWLHTAGCTHVAMESTGVYWKPVYNLLEGLFEVLVVNAQHIKAVPGRKTDVKDAEWIAALLRHGLLKGSFIPPAPQRAVRELTRYRSSLVADRARILNRMQKVLEDANIKLGAVVTDLVGVSARSMLEALIAGQMASDALAELARGRMRQKCEVLAQALRGRFQPHHAFLIAEHLSHLDHLDEAIERVTAEIRDRLGAFQALTDLLDTIPGVNPRIAHVILAEIGPDMSRFPTAAHLASWAGMCPGNHESAGKRYSGKTRKGSKWLRQALMEAAHAAARTKNTYLAAQYRRLAARRGKKRAMVAVGHSILIIVYHVLKHREPYRELGGNYFDERDRQAVERRLVRRLQNLGYIVTLQPASQAA

SEQ ID NO: 111946 - protein, 381 aa, unidentified
MQVLGVDPHKGSHTAAAVAPDGTVLGRTRVVSSRRQVQRLIAWAAPWPERVWAVEGATGVGRLLAQQLVAAGESVLDVPAALATRVRVLSGQSGRKTDAHDAVAVATAAIHHPRLRAVQAEDHSAVLRLLSVRRSQLTASRTQAVSRLHGLLAELIPGGAPKNLAADKAAALLRSTRPVTAVDATRKALARDLVEDVRRLDRKLDANQADIVEAVKASGTTLTEIQGIAEITAAKILGQTGRITRFEDRAHYASYAGVAPIEASSGAVSRHRLSRRGNRQLNSAMHGIAITQATHPGRGREYYLRKRDEGKTEGEARRALKRHIIDLVFATITADTERAQRSPGRQVGATRESSAAGQSPTANTSERSVPGLRKQATPRVA

SEQ ID NO: 111947 - protein, 316 aa, unidentified
MENPQPFVGIDVSSQRLDVDTVPVSQPFSEPNHEDGIASLMKRLKPLNPQIVLLEATGGYEIAVAYALYEAGLPVVITNPKNVRHFAKAIGRLAKTDKLDAQVLALYAQRVHPPVQPLRGQEQLELANLMARRRQLQGMIVMEENRRRTCTPKVRANIDLSLAHLRRLLKDLDRDIQDSIRRTPLWHEKAEILQSFTGVGPKVSASLIADMPELGRLPGNKASALAGLAPMNQDSGKHRGKRMIKGGRPAVRRALYMAALVASRYNPVIKEFYQRLRLAGKPPKVALTACMRKLLVILNAMLKNRTYWNPQLPLAA

SEQ ID NO: 111948 - protein, 406 aa, unidentified
MRYYIGVDWADREHAVWVQDESGARVTQRMVAHSAEGFADWGRWLDERRAEGSELWAAIERPDGRVVDFLLDHGVVVFPLNPKALDRARDRFRMSGAKSDPFDAQVAANFLRTDHPHLAPLRPSSEAAQELKAVTRDYARQVRQQTRVLNQLTVTLKEYYPRALEVCPDLKSRWAQEFLAAYPAPAALHGLSERQWTRWARGHRLSAARAAELWPVIAGAQLPVPAHVVRVNARRLAVLLEQLAVTGRAVAGYREAVEGFFARLPAAQWAATLPGGRSGTTVPAVWAELGDAQGRWQTAQHLQGHAGMVPVTARSGKAHVVLFRFACNTHLRAAVQQFAFVSLRHSHWARAYYKGCRARGHAHQHAVRALGAKWLKIIFAMWTRSVPYDEQYHLASIGRHHVGQPA

SEQ ID NO: 111949 - protein, 321 aa, unidentified
MDTQVSFNQVVSRGCGIDVHKKIVVATIDGEGIKKETREFGTFTRSLTELKEWLLENGVTHVAMESTGVYWKPVYHVLEPTPLKIWIVNARHIKYVPGHKTDKQDSAWICKLLLAGLLKPSYIPPREQRELRDLTRYRIKLVQQVASDKNRILRVLEDCNIKLSNVLSNIQGVVGTKLIDKLCDGEAITMEDIDQVYHRKLEASREDLYEACQGLVTDHNIYLLQMIRQDIFAKEAIIKGLNERIKNKLMEYDNVLERLREIPGLNTKTLEDLLAEIGLDMSVFPSEKHLASWAGMCPGNNESAGKKKVDAPIMGTNRSNR

SEQ ID NO: 111950 - protein, 396 aa, unidentified
MTSHHVVSRGGIGHRKKVPLPLMGWTGCFPLEDSLEGLTAAPEKQPMDTNTPALASIGIDIGKEVFHIVGFGTNGKIAFRRKIKRLALVDTFKALPASVVGMEACLSAHFVSRALRQLGHQPRIIPSIYVKPFVKGQKNDYNDAEAIAEAALRPNLRTVREKTQDELDLQALHRVRSRLVSRRTATINQIRAFLIEQGIAVRTGARALRNSLMAILENRQDEISPRMRSLIAGLYEDWAGLDERIETIAGEIEAIGEKEANCQRLMSVPGIGPLISTAVVAAIGTGEAFERGRDFGAWLGLVPRQYSTGGRSILGRISKRGSKYLRTLFIQAAKVILMRPHNWERFSFGAWLLNAAPRLHRNKLATALANKLARIAWSILRNGKVFDVPRHEAMAI

SEQ ID NO: 111951 - protein, 428 aa, unidentified
MPDTTVTSPEPVWAAFVALDWGSQKHAWILQPTAGGQPEQGYVDNTPEAIALWAADLDRRFGGRPVAVALEQKRGSVVNLLLPYPHLVLFPVPASMSASYRKTFVPSGAKDDPGDAAWILDLLLRHRDRLRRLHPDDPNTRLLSLLVEDRRHLVDDKTRLTLRLQDCLKQYFPQLLQWFDVDTSLVADLLQRWPDLQHLQRSHDGTLRAFFRQHHGGEHRLRERIDAIRAAVPATHDPAVLEAGSRKARRLTESIAVLRRQITELERRRDELVATHPDAPIFASFPGAGRATVPRLIAAFGTRRERYQSAFQVQCDSGIGPVHIASGKIDRVSMRRACRAFTRQTFQEFAGQSIPQCEWARSFYRAHCHRPQQHHAVVRALAFKWIRVGIPLTQLTPTCRFRVWRTTRGRSMSLRNAFRPKRVARLTW

SEQ ID NO: 111952 - protein, 336 aa, unidentified
MVQIYGIDLGMSSFDVSFLSESGSVRHLSGVKNTVHGISKFLLSLPSAAVLCAEHTGVYGDLLLRLCTLNRICLCFVPGYQIKHSLGLQRGKSDPLDACRIREYAERFYDLLRPCFYPGEEMSELQELYRTRSLLVESRKRLDTLNIGDNCKSSVSLAAVHARRAVLAELNTQISGLDHEIEALIQNSSEFSRNYQILTSIVGVGPVTSCELIIKTENFRKLDTAKKCAAYAGIAPYPKESGKMKCGHKISPMGDKQLKTLLFLCARSAKEHNKEIRLYFLKKHKVEKKHFFVAMNNIANKLLRLIYSLIHKQQTYDRDYIQRDPRCVVISDTHKC

SEQ ID NO: 111953 - protein, 326 aa, unidentified
MNKIATVGLDLAKNVFHVMCCDHRGKIVRKKMLKRKDVVKFFTQLAPCLVGMEACASAHYWARQLEKAGHQVKLIPPQFVKPFVQGNKNDYNDALAIAEAVTRPQMRFVAPKAVAQQDVQALHRLRERRIQERTALCNQLRGLLAEYGMIMPKGVNVVRRQLPELLEDAENELSGLFRQLLAQGYQQLQQLDEHISFYTKTLEKQSQQDEACQRLQTIPGYGPIVASVFHAVVGNGSAYKRGRDVSASLGLVPRQHSSGGKNTLLGISKRGDRYLRSLLVHGARSVVSRVEGKEDHLSLWIIKIKAVRGFNKAVVALATNSRRFRR

SEQ ID NO: 111954 - protein, 367 aa, unidentified
MLGLDVGKSSHWACLIDRDGEVLSSAPVRNREAELDALFASVPAGTLVVVDQFRNIGSLAVRRARAAGLGVAHLPGLAASRAAGLFAGEAKTDERDAAVIARTALGVPDSLSGVPGRGEALEAARALSSQRDHVVACATRDKNRLRAVLLESCPALEAAVDLSDRRWLELLAGFGGAWGIARSGAEGPQAEAAGEAAAASTAPPPALIEAENRQVRFLAARISEALDEAGALEAETAALLEGDETYACLLTVPGIGPRTAAQLAVSVDIGRFPDHDHLASYCGIAPRVRSSGTSVRSVRASRRGDARLKSLLIFSCNSLVRSSGRYGEYYRACRARGMGHGRALKAVARKRLRAIYAVMRDRVPYRE

SEQ ID NO: 111955 - protein, 406 aa, unidentified
MSTFIGIDWSQDKHDVAFMNVAGAIIARLTIPHQPDGFHKLEATRQQLAVTAADCLVGLETAHNLLLDFLWDHGYRQIYVIPPLVVKSSRGRYGHSGARDDTLDAQLLADLLRTDRPRLHPWQPDSQLTRQIRARVGFISFLTNSANRAHNRLRAALLRYYPQALHLFSGLMIPTTLAFIAAYNTPQALAALSYEAFATFAHQQGYWNRQGLLACYARLQHTPLQASATTVAVYQDEAGLLAQQLRELILAKREVQRDLNTLFAQHPDQAIFTSLPGVGAFLAPALLAKLGDDRERFPSAASLQALAGTCPVTMASGKRKRVAFRHACDHEFRQISQQWARCSLHKSVWAVAYWQQVRPRCASDHDAYRRLANRWLAVLWKLWQSRELYDEAYHLQQRRLRSQPRA

SEQ ID NO: 111956 - protein, 372 aa, unidentified
MDQVTTTFVAMDTHKQTISVAIAEGGRRGETRFLGEISSRADAVAKMVGRLAKKHSKLAFCYEAGPCGYGLYRQIVALGHECVVVAPSLVPTRPGDRVKTDRRDAVTQASLFRSGELTPVWVPDDAHEAMRDLCRARQAAMEALRRARQQVLSFLLRHGRVYSDGKHWTGKHRLWLAAQRFEHPARQIAFEELVQAMDEAQARRDRLAKQMQELLPSWSLAKVVAAIQALRGIAAISAITLVAEIGDFKRFADPRQLMAYLGLTPSERSSGAKTARGAITKAGNTRARRMLVEGAWTYRLPARMGAAILERNTILPQAIKDIAWKAQVRLCARYRRLARAGKPTNVVCVAIARELAAFVWAIATNAAVAAVA

SEQ ID NO: 111957 - protein, 396 aa, unidentified
MTTIGIDIGGRTHVVARCRDGTSRADREILRVNQSRAGFAALDAWLGRQTEPVTLVTMESSGHYWMPLASHLCRRDIPVAVVNPLAAKYFAKSRLARTKSDPADARSLAEMAMRDTPPARDPLTGVELRQAARFAMTLVAEQAKVCQRLIRLVELGFPELGELFDDPTCRTAREILRIAPTARAATRRRTSTLANANAGPGRRRLGTTKAERLQTAAVDSIAVPELDAEVAFEVGLLLDQYDLLERQIEEADRRVASLLDGETARRLQTIPGVGPSIAATLLAEIGDIARFTDFDQLLAYAGVHPAERSSGRKGANPETAWRMSKAGNSHLRAAAYRMALVGIQHNPVIAAHYARKREAGKSKMNALGHCMRKALSIVWGVWRNGRDFDPNWGVEA

SEQ ID NO: 111958 - protein, 339 aa, unidentified
MQVTTVGLDLAKNIFQVHGVTENGEVVFNQALRRAQLFAFFEKLPPCLVGMEACGSSHYWARQLSKLGHEVRLIPAMYVKPYVKRGKSDAVDAAAICEAVTRPTMRFVAIKSEEQQAVLFLHRARDLIVRQRTQLSNMLRGLLAEFGIVIAQGIGSAIKFAKGVLDGDKPGIPEVAVDVLSNLSNQLVALHLRVRWYEMRLQLQARQDPRVMLLRTIPGVGPVTASAVIATAGDASQFKNGREFAAWLGLTPLNRSSGGKERLGRISKMGDRYIRRLLVTGMTSRLRQLKAHPERVDPWARALLERKPTRLATVAMANKTARIIWAVLTKNEYYRPHTA

SEQ ID NO: 111959 - protein, 413 aa, unidentified
MEVIYPCCAGLDVHKETVVACLRRFDSSGHVRHEVKTFGTTTAGLLELGDWLVEHQVPIAAMESTGVYWKPVWNLLEDRLQLMLVNARDIKQVPGRKTDVKDSQWIAQLLGCGLLKPSFVPPVGQRELRDLTRGRTSLLQDKARVANRLQKILEDANIKLANVATDVLGVSGRKMIRALIEGKMTPEQIAELAQRHLRLKIPRLIEALNGQVSKHHRFMLGFLLDQIEHLEQQITQLDQRIEEVMSPLEQQAIKMLDDIPGIDHRAAENILVEIGTDMSRFPTAGHLASWAGVCPGNNQSAGKRRSGKMNDGNRWLKGTLNQSAWAASRKKDSYFQSQFRRISVRRGVKRAIMAIAHSQLRVCRELLKNGQCYQDLGHDYFERRDQEKTRKHLVRRLEKLGYSVALVEKNNAA

SEQ ID NO: 111960 - protein, 366 aa, unidentified
MKKTSTVRVMGNMIFKGQKLTLGLDLGDHWSCYCVLDEAGRIILEQKVATTPEAMKQVFAKIPQSLIALETGTHSPWVSRLLTELGYKVIVAHAQKVRLITKSNRKDDRHDARTLARLARIDPELLGPVRHRSAQAQIHLTVIRARAELVRARTALVNAARGLVKSYGQRLPKCGTRQVSRELGAGLNAELREVLEPLLKEIESLNERIQEYEVRVEKIARESYPHVELLKQVKGVGTQIALTYVLTLEDPQRFPKSREVGCFLGLRPGRRDSGESQPQMRISKEGDRYLRTMLVQGAHYILGPFGEDSDLRRWGQKLAARGGKNAKKRAVVAVARKLAVLLHRLWVSGEVYEPLRNSQKAIRAAA

SEQ ID NO: 111961 - protein, 408 aa, unidentified
MEVLHERCAGLDVHKDIVVACARVRLEATARHAKAEFATTTRELLALADWLEEQHCTHVAMEATGVYWKPVWHVLEGRFELLLVNPAHARNVPGRKSDVSDAQWLADLLAHGLIRPSFVPPEPIQELRDLTRTRKQLVRQVARHTLRIQKTLEDANLKITGVVSDLLGTSGRAILRALIAGESDPERLLEHTTGRLRASRERLLEGLHGRVTDHHRFMLRLHLRQIEALEAGIAQLERQIAKLLRPFRSRIERLTTIPGVSDTVAQVLVSEIGMDMARFPTPGHLVSWAGLCPRMDESAGKRRSTRVRHGAPWLKTTLVSAGWAAASSRDTYLRAQFQRLKTRRGPKKAVVAVAASILTAAYFILRDGVPYQDLGPDYFDRRDRGAVVRRLSRRIEALGYRVELHQAS

SEQ ID NO: 111962 - protein, 366 aa, unidentified
MKQLAYIGIDYHMNTISAAVIIKGQNDFFDTIHMKNNDKTILKYFKKLSKNFEIQACYEASCNGYSFQRKMNNWGFHCDVIAPSLIPKKPGDKRKNDYRDARNLTQFYANGQLTVVHPPTEEQESIRNLIRCRLNLKKDEKNVKLQINSFCLSQGLKWPQSKWTVKHRAWLSKIEFPDAYSQQVLSEYLGHLQYLSSRIANLDKIIEEISCSKVYASSVKKLRAFKGIDTLSAMILIAEITDFRRFPTPRALMAFLGLIPSEESSADKQKGGGITKTGNSRCRTQLIESVQHLMKKPTISYKMKSNLAQVDAASSNIAIKCMHRLHKRFWALVIKGKNRNKAKAAIAREFAGFIWAMMTQPESATI

SEQ ID NO: 111963 - protein, 362 aa, unidentified
MNPVSCVGIDVAKAKFDVALLKPDGKYRSKVFSNNSEGFRQFLDWLEKQEALKAHLCMETTGAYGRSLARFLAQQQLLISVMNPALIHAFGKTELSRAKTDKADARLIARYCQMHRPAPWVPPAEAIVTLQALVQRLDDLLGMQNMESNRLEMAEPAARASIEALLLTIHQQIDAVRRQIQDHMDDHPDLKSQKALLLSIPGIGEATAAMLLAFLSPLTRFHSAKQVVAYAGLNPRIRESGQWAGKSHIAKAGNVLLRKALYLPAVVAKRYNPAIAAFCDRLLIWMPPCSQDDFDVWHIEVGLLSYIRPLMQDNKPAGPDGIRRKSPYLSHVLEGQVTTRFSLPWSDLFCHQSFISLRNAFC

SEQ ID NO: 111964 - protein, 467 aa, unidentified
MKKHDRKRTSKSRKKRSRKQDLRSLPTININAAGIDIGSEEHWVAVPEDRDENPIRRFGCFTSDLHSMADWLKKCGIDTVAMESTGVYWVSLFQILETQGFDVKLVNARHVKNVPGRKTDVLDCQWVQKLHTYGLLSGSFRPDDSICVLRSYWRHRDNLIRYTAAHIQHMQKALTEMNIQLHKVISDITGVTGMRIIQAILDGERDLVKLAQMKDPRIKKSTETIAKALEGDYRPEHLFALKQAVELYFFYHQQIETCNQQIEGYLKQLESKIDSDADVKPIKRNKQRSKNEPSFDLATHLYHIAGVDFTKIDGLNVLTVQTILSEAGLDPEAFGTEKRFASWLGLCPENRVTGGKIKSVRTRKVVNRAAKAFRLAANSLKNSSSALGGYYRRMRVRLGPPKAITATAHKLARIFFRLWKNGGTYHDLGADYYEQKYKDRVLKNMKKRAKQLGFELSLQPIANPGVS

SEQ ID NO: 111965 - protein, 409 aa, unidentified
MQVMHEVCCGLDVHKKSVTACVVWATGRRHQTREFGTFTKDLLELGDWLRSCGVTHVAMESTGVYWKPVWNLLEGQFEVLLVNAQHIKAVPGRKTDQKDSEWIADLLQHGLLRPSFVPPTPIRELRDLTRYRASLAQEINRIANRIQKVLEDANIKLASVATNTLGASGRTMLEAIIHGEQDSQRLAEMSHGKLRNKIPELQQALQGRVTAHHRFLLRELLDHLYFVESKMRRIEQEVEEHLRPFQSEVARLCTIPGVDRVTAWGLLAEIGLNMSQFPDAQHLASWAGLCPGAHESAGKRKSGKIRKGSLWLRRCLCQGAWAVSTKKGNYLSALFRRLAARRGKKRATIAVAHNLLVIAYYILRDKVCYRDLGPDYFDRLDPEGLRRRLTKRLQGLGFKVTLEPLADAA

SEQ ID NO: 111966 - protein, 268 aa, unidentified
MKLTVIGMDIAKHIFQLHAVDANTGEIERIKLKRSQVAEFFTKRERSLVAIEACDSAHHWARQLQALGHEVKLISALSVRHFVLRNKTEAADARAIWTAVQQPEARFVAIKSEQQQTILALHRIRAELMKFRIMQTNALRGLLYEFGEVLPEGYREFSTKISGALAKIADRLPAMLIDSLREQWTRVQAIDKEIAALERRLKVALRDNQECQKIAEIPGVGLLTATTAVAAIGDAKTFRSGREFAAWLGLVPKQTGTGGHVRQLGISK

SEQ ID NO: 111967 - protein, 312 aa, unidentified
MAKIICGVDVSSKTLDARIGEDGPSQSFDRTPEGIRALAAFCKSHDVEFVAMEATGGYEKLPFSLLWLAGVPCAILNPRSVRRFAEAMGTFEKTDDIDAGVIAHFAEVKRIVPQTPASATQQELEALVTRLRQLTDLRTSQTNQRRLVTDAGVLEGIDELVALLNRQIRALEAKIAQSIDADPLWKALDAAFRSIKGVADRTVARLMADLPEIGTISGKKAAKLVGLAPLANDSGKVKGKRSIFGGRANVRSILFVVAELVRRHEPDFCKFHQTLTAAGKPKKAIRVALARKLLVRLNAKARDARKELGLAV

SEQ ID NO: 111968 - protein, 416 aa, unidentified
MNAAGIDVSSRKSMVAILRPFGEVVKLPFEVCHSAEDLSALAQQLKSIEGETRVVMEHTGRYYESIAKVLHEAGLYVSVVNPLLIKEYGANSLRRVKTDKADAMKIARYALDNWADLRDYTPMDTIRYNLKTLNRQFQLASKQRTASSNNLIALLEQSFPGVRKCFDSPVRRDGTQKWVDFAHAFWHVDCVRKQSLNAFSERYRKWCKRHGYFFKQANAEEIYTLAKNAVVLVPKSDVTKVLIQEAANQLTSISRSVETYRAEMERLASMLPEYPVVMQMYGVGKSFGPQLMAEIGDVRRFERKQALVAFAGIDPMPNQSGEKNIRSNKSSKRGSPYLRKTLFNIMSIYLKCAPQEEPIFQFLDRKRTEGKPYYVYMTAAGNKFLRRYYAQVRDYLATLENLPPVDMESTGLQHTT

SEQ ID NO: 111969 - protein, 340 aa, unidentified
MQVTTIGLDLAKNVFQVHGIDATEKVVVKKQFRRGQLVKFFETLAPCLIGMEACATAHHWARELTKLGHRVRLMSAKDVKAYVKRNKNDAADAEAICEAARRPTMRFVAVKSAEQQGRLMQHRVRDLLMRQRTKLINALRAHLAELGIAAAQGREGVKELLAIVAQDKASRLPVDAHASLIVLAAQLQAVQTMIGLIEKRIVSQHRSNAGSRRLATIPGIGVIGATTIAAVVPDPKVFRSGRDFAAWIGPVPRQDSTGGKQKLGPISKQGDRYLRRMVVGACSVLRPARQQPEKYPWLTQLLARRPFKVVAVALANKMARVAWALLAKGGTYRTPQLTAA

SEQ ID NO: 111970 - protein, 438 aa, unidentified
MSNKVIFNLDDLFISVGIDVGADFSWMSIALPNQQFVGKPYKILHSSIDSLTTAVSKIKEAEELYSLESRIFLESTGIYHYPLFCYLRDKGFNCSVINPIITKNSTNINIRKVHNDRFDSKKAALVGLKPDLKVSLMPSDLALNCRNLCREYYDLMDNRGAYVNKLQGELRMAFPQYLGIFSKVTINTSLTLLETYTSPSAFLEADKQEIIDIIKSTARFGLTYAQNKYNAIIQAATDANQFGYIIDSNIKRIRLYISFIRKYDEEINSILESLHELVDANEDADFVKQIHLIETFKGAGFLSAVSIMGEIGDFSAFSKPKQLFAYFGLDPAVKQSGKFEGTKVQMSKRGSAIARRVIHTLTLQSISISRNGEAKNPVLREYYLKKCDSKPKLVAMGAVSHKVCNMIFAILRDNKSFEIITPQEHIKQYNASKCDMAA

SEQ ID NO: 111971 - protein, 344 aa, unidentified
MYFIGVDHHKQVSVMTVLDEEGREKKNGRVLNLRKNVGGFLEGYRPFTAVVEAGRSSYMIADLLRELGGEVKMANALQVKAIAHARIKTDKRDSRTLAQLLRADLIPEIYQRGECNRRAQRVMRIRAFWTRKQTEVKNKIRALLAQQREEVRLEVEKRESGLFGLRGLEFLAKLPLEGQDKMVLDDLLQGYQEAKAHIKKSDGLVQMLYGEIEEASRIDSVPGFATTLSVLVAVEIADVKRFSSSAQLHSYAGLIPSTYSSGERTFHGRITKQGSSWLRWAALEAVWPAIKKDHGLRVLYTRLAKRKGPNVAKIAVARRLLTIIYRLLIEKREYIPDMMKQSAA

SEQ ID NO: 111972 - protein, 295 aa, unidentified
MQAQAAAVYVGIDISKTSFDVDSYPVAQPACFTNDEPGRAAAASYLRGLQPSLIVVEATGGLEAPLVGQLATAGLSVAVVNPRQARDFAKAIGVLAKTDRVDAQMLARFGQAVKPAVRPLKPEETLALEAVLTRRRQIIEMITAESNRLSSAAPRIAKQIRQHIAWLEKRLDEADQDLDGMLRQSPVWQHKAQLMTSVPGVGRVTAVTLLAELPELGALPRREISALVGVCPYSRDSGKYRGRRSIWGGRAVVRAALYMAAIVASRHNPVIRAFYQKLIAAGKLKKVALVAMSFW

SEQ ID NO: 111973 - protein, 416 aa, unidentified
MDTKQRKYDLVKGVLVVGVDTGKRRHVAALRAPGRSVEKRVPFDNDRKGFQRLAEEVDQYRERMKLTRVVLGVEPTGHYWLPLAYWWEENQGPVVLVNPMHTKRAKELEDNSPLKNDPKDAAVISWLISDAKYRECHLPRGIFATLQNLVQQRARCGNDEGRLVNQLHQTVEHIFPELEQAFSSFRVKSCREMLLRYADPEVVAQMRAEDLGKQLREWSRGKLGEERAEKIIGLARESVGLREGKAAINSEVQRLVRRLALVGEERKDLEDKIKNCLPEVPGAALLLSVPDFGVWTVAAILAQTGDLRNYEHPDQVIKLAGLNLYEISSGEHKGRVRITKRGQGSFRKILYMAALRACRRRGTLHSYYESLVGRGLAPTSALVAIMRKLLRVTWTLVKKSQRFDRERLIPAPAKAA

SEQ ID NO: 111974 - protein, 399 aa, unidentified
MFYIGIDVGKRHHEVGVIDEKGQPIGKTLRFENSKSGSEKLLEFFNQHQLAPDNSVIGLEATGHYWLSIFSFVHKLGFKTTVFNPLQSDSLRNFYLRKTKNDVKDAYLIAQVIRIDSPDETPFIKEDLLKLRHLERLRYSFVDQVSDIKRKVISLLDQVFPEYEQLFSDTFSKSSTEVLMNYTLPEDLLEIDPQELANLLQEASNGRYGESRALKKADQLRESALNTFGITIGTDVFKLQIQLLLEQIQLIEKHLKEIEEVMIEISNRQKHYLTTITGISDVTACVILGEIGSIDRFERPEQLVAYAGLDASVHQSGDFNSSNTRISKRGSPYLRRAIWQAAFVASNHDPALSLHYQKLRKRGKAHGTAIGAVARKLTHIIFAILRDNKPYEPRPQSDT

SEQ ID NO: 111975 - protein, 339 aa, unidentified
MDEISTLAIELASRVFQLHGVNRHGKPVLRKKITRSKLGEVVAKLAPCLIVMEACGSSNYWARRFQSMGHQVKLISANFVKPFVKGNKNDRNDAEAIYEASARPTMRFVPIKSIEQQDIQAVHRVRSLLMKDRNATINQIRGLLAEYGILIPQAAASVRRHLPAILEDATNALTALARSVFADLYDRLVDLDTRIVGYEQRVQQIFIASPICKKIEQVRGVGPLIATAVVATAGDGKEFRRGRQFAAWLGLVPRQHSSGGKQRLLGISKRGDKYLRMLLIHGARAVVAQAEGRHDALSRWINGIKSRAGANVAAVALANKNARVIWALLRRDTEYQAPK

SEQ ID NO: 111976 - protein, 387 aa, unidentified
MPVIIGMDPHKRSATVEIIDPDAKILATGRYGTDTAGYSEMLTAAQRYPQRVWAIEGCNGVGRHVAHRLVADGETVIDVPAKLSAQVRVFATGNGRKTDPVDAHSVALAALRSPNLRRVEADPELVALGLLVDRRDELGRARTELLNRIHRLLLELVPGGAKRFLSAMQARALAETVTPGDAAARVRLRLVSELIDDLEVVDRKTKAADKELKQLVLARGSTLMDLNGIGPCGAARLLADTDNIHRFVSRDRFASWNGTAPLDASSGDHKRHRLSRAGNRKINHVLHTMAVVQLRHPTAGRVYYDNKKAAGKTSMEAMRALKRRLSNVVYQRMLADQRRRDTASPGGHSGATTDSSATGPTPHTDPSDKPQLGPTITESTGELPTAS

SEQ ID NO: 111977 - protein, 347 aa, unidentified
MKRIAVDLAKSVYQVAESVRSGQVVQRKRLNREAFRRYIQEQAEPVEWVMEACGTAHYWGRVAQALGHQVRLLHPRYVRPYRRRNKTDRNDCDAMLEAARCTDIHPVPVKSHGQQQLQQLHGLRETWKKSRTQRINLLRGLLREAGIEAPASTAAFIRAASELVDQPELAPLSRLLHIVLAEINLYEQCMAECEQQLKRWHADDDIVRKLDEVSGIGLLTASALTAAVGRPERFASGRQLSAWLGMTPREFSSGERRKLGHISRQGNVYVRTLLIHGSRAALLAAQRCQARTPEKLTQLQRWAVATAARIGHNKAAVALANKLVRICWAVWCHERRFNGNWQSTKPA

SEQ ID NO: 111978 - protein, 396 aa, unidentified
MISVGIDVSKGKSTVCIMKPCGEILESPFDIGHTADELDSLISLIKSFDEETRVVMEDTGHYHLPVATYLSSHNIFVCCVNALRMKKFCSQSIRRAKTDKIDSIKIASFGITYWNELVKAYPSDVIYDELKFLARQYYQVTGMLVKSKVNFSNLLDQVMPKINDVLSNQGENHKLTEFVSRYIHFQNILDMGEMKFTSDYCKWAKKKGYRLNERKVAEILALAQNGIPTLPNSQSVKIAVSEAVKLIHSIEESRNTILAQMQDLCNTLPEYSVVKEMDCIGDTLAPRIIAEIGDVRRFKNKHSLVAYAGIDAPPYQSGAFHASERHISKRGNSYLRKTGYEIMQSLIKHKPADNAVYDFIQKKRSEGKCGKEAMIAGLNKFLRVYYGKVMEFYSEH

SEQ ID NO: 111979 - protein, 416 aa, unidentified
MSTYFNQVYDDNRWWISRYQILEREVNLMIYVGIDIAKLNHFASALSSDGEILIEPFKFTNDNDGFHLLLSKLNSFEKNSLIIGLESTAHYGDNLVRYLVAENYKVCVLNPIKTSVMRKNNIRKMKTDKVDTFIICKTLMMQDSLRFVPYYDLDLMNLRTLGRFRQKTIKQRTRLKIQLMSYVDEVFPELQYFFKSGLHQKSVYALLKEAPTPKEIASMHMTHLAHLLKVTSHGHFDKEMAQQLRVLAQKSVGASDSALSIQITHTIGQIELLDSQLERVEAEMTEIMKFNDSVIMTIPGIGYINGGMILGEIGDIHRFSNPSKLLAYAGLDPSVYQSGNFQARKTRMSKRGSKVLRYALVNAAHNVVKNNATFKAYYDAKMAEGRTHYNALGHCAGKLVRIIWKMLTDEVECNLD

SEQ ID NO: 111980 - protein, 349 aa, unidentified
MVMTIVEAARAITGGVDTHLDVHVAAALDGVGALLGTEAFPTTPAGYQALLSWLESHGEVTKVGVEGTGSYGAGLSKFLTRAGISVVDVNRPNREERRRSGKSDPLDAIEAARSALSGKAKSIAKSKDGAVEAIRTLVVAKRSARVARTAALTQMRHLIVSAPDQLRSRLRGLNVQHLTAEAARLRPSRHGELVLAATKAALSSLAHRVQGLDDELAELDRRIGALLEALCPDLLGLFGVGPDTAAALVVCAGDNPERLRSEPSWARLCGVAPIPTGSGQTSGRVRFNPAGDRQANAALWRIVMVRIAHDPETTEYFLRKVKEGRSKPEIIRLLKRYVAREVYRHLPRR

SEQ ID NO: 111981 - protein, 400 aa, unidentified
MTYDHVIGVDVGKYFHHACVLDPSGTTVQSTRVEQSEAALTEFFTQFTTTGSTLVVVDQPNNIGRLTVTIAKATGADVKYLPGLSMRQLARIHAGNSKTDIRDAFVIAYAGRFLPDALRAVDRTDPIFQQLKALNGIDDDLTRAYTRLINQIRSSLVGTYPEFERVLCGSVIHRRWILELLARYGGPTKLRRLGRSRTITCAKKRKARNPAPIVDALFDAITSQQLTLPGAGEAELGVALAATDALAKLDHRKRIHQQVPEIPDIIDQLPLIPVLLSMPGIGPATAAQPLMTTGDFSDFKTAAQLASYADLCPTTNQSGTSLNSHSVNRAGNKRLNNALWQSSFSAIRHHERSRHFYERKRQEGKRHNAAVVCLARTRLNVLFAMVKNVAFYSEDYANTP

SEQ ID NO: 111982 - protein, 320 aa, unidentified
METPRFVGIDVAKGELVVAALPGEERWTVENDEQGIRTLVERLKRERVALIVLEATGGYELRAVSALANASLPVVVVNPRQVRDFARSTGQLAKTDRIDARMLALFGERVRPEVRVLADEDQQALDALLTRRRQLIEMLSAERNRLGQTLGSKTKLVKKSLKSHISYLERELRVSDTELADMIHSSALWRERDDLLQSVPGVGRVVSLTLLAELPELGRLNRKEIAKLVGVAPLARDSGTMRGKRMVYGGRASVRAALYMGALVATKYNPVIRDLYQRLLRAGKAKKLALVACTRKLLTILNAMAKNNERWRADTTLTTA

SEQ ID NO: 111983 - protein, 410 aa, unidentified
MKTYILRDPKSVEPQKIQFAPSPPPASSCRILFIGLDVHNDSIAVSLAPSDSPEVRRYGIIGGQHDDVLRLIKKLAAAHPGAGLKFCYEAGPRGYPLCRFLRQHGAECIIVAPSKVPRQPGDRVKTDRRDADQLARLFRAGELTGIYVPDPQDEAVRDLIRARYQVGKQQHRARQQLKMFLLRQNIRYAGTKPWTAAHLRFLATVKLPFAEQQFVFQEMVHVISDAGQRLERYEKEIASVVEGWRWAPVVQALMSLRGVALLTGATLVAELGDLERFATAPQLMSYLGLCPGEHTSGTDRQQGGITKLGNGIARKAMIEAPWNNRTPARISRTVLARQQGLPKAVTEAAWNAQTRLHQRYKHLTGVGRKKSQVAAAALGRELSGFVWAIGRMVKPHAAKPESVRPDAVKK

SEQ ID NO: 111984 - protein, 349 aa, unidentified
MRFYNRQHRYYCGIDLHVKTMYLCILDTNGQVLLHRNVTTTPEAFLTAVAPYRDDLAVAVECMFTWYWLADLCAAEGITFVLGHALSMKAIHGGKAKNDKIDAHKIAVLLRGGMLPQSYVYPSAMRATRDLLRRRLHLVRKRGQLLAHIHNTQAQYNLPAFERRLAYPANREGVSLHFPDPSVRKSVEVDLALIDQYDVLIADLEQTLVREAKCDDADAFHRLRSVPGIGPILALTILYEIHHIGRFDRVQEFASYARLVKCTHESAGKVLGTGGAKMGNVHLKWAFSEAAVLFLRHAHTAPVAKFMARLEKHHGKGKALSILAHKIGRAVYYMLARGTVFSLPKFLAA

SEQ ID NO: 111985 - protein, 387 aa, unidentified
MRALLCLKNLAECANGRFSPTARSLELSPFVLEGHRAWRGAWDSSGVFLNPNSCMGLEPEPSKEGSWMMAQDDLVVAGIDIAKDKVDVCLRSPSLRRTFASTAEGRRELASWFRRQKVGKAVMEASGGYEREWANALRDGGIEVRIVDPKRVRSFAQSAGRLAKNDTIDAEMIAWFAETFDEAPGQAYDAKREELHQMVNARQALKDMQAKLTSQGEHAVPAVVQRIHARISKTIAVELVKIEAAISTSVQATPRFAELAEIIESVPGLARTTSAALIAGMPELGHANNKIVAALLGVAPYDDDSGKRRGERQIKGGRRRTRNAFYMACLGAATRHNPVLKAFYDRLVAKGKEKKVALVACMRKLINILNIMIERRQKWDPSRYAVN

SEQ ID NO: 111986 - protein, 347 aa, unidentified
MDYFAGLDVSLETVSICIVNATGDILVEKKVEAEPSAIITVLKHFARPLKRVGLEAGPTSSWLYSELRGNGYPAICLECRHVKAGLSAMRNKTDRNDARGIAQLVRLGWFRQVYVKSEEAQRIRMLLVNRQQLLTKALDLENSVRGSLKVFGLRVGTVTRRTFESRVLELVAVDRVLTAITEPMLRVRRALIEEFERLDRLCRRLARGDIVCRRLMTVPGVGTVVALTYRTGIDAPERFSRSRDVGAHFGLTPRRYSSGQTDYDGRISCCGDAMVRTALYQAANVLLHHGRWSSLRSWAMRIAKRSSVKAAKVALARRLAVVMHRMWVDGSDFRWSSAATAVPTSRQ

SEQ ID NO: 111987 - protein, 367 aa, unidentified
MKKVSTAAVKATKNFSQPKLTIGLDLGDRSSWYCLLDEVGEVLQEQKLGTTPKAMREVFGSMPRCRIALETGTHSPWVSRLLSELGHEVIVAHARNVRLIGESRKKDDRLDARTLARLARIDPQLLCPVKHRSAKAQADLTVILARAGLVRARTALVNTARGLAKSSGERLRGCNVRNINPEKAEGLSPELQAALQPLLAGIESLSERIRECNEGIEKLAQESYPQVALLKQIKGVGTLIALTYMLTLEDPHRFRKSRDVGCYVGLQPGRRNSGQSEPQMHISKEGDPYLRTLLVQGAHHILGPFGADSDLRRWGLKLAERGGKNGKKRAVIATARKLAVLLHRLWVSGEVYEPLHNSHQTAMPTAA

SEQ ID NO: 111988 - protein, 359 aa, unidentified
MDSPTSPNAEVSVTLGVDTHKDAHVAVALDELGKHLGALSVPTTVTGYKRLLGWARGFGTVEHAGVEGTGSFGAGLARFLRVEGIEVFEVIRSKRRDQYRSGKSDPIDAEAAARAVLAGTATGQPKGANGKVEMIRTLRSARRSALKARTQAVNQLRALLITAPEELRSELRGLSTARLVARASRLRPGANPPDVEAATKFALRSVARRYHQLSEEISELDEQLDRLIAQAAPELLALESVSTDTAASLMITAGDNPERLKSEAAFAHLCGVAPIPASSGKIVRHRLNRHGNRDANRALYVIALGRMSRDERTRAYVARRTKEGKTKKEIIRCLKRYIARELYRILTSSSTSACPITVP

SEQ ID NO: 111989 - protein, 415 aa, unidentified
MALKIVYKICCGIDVHKTFVVACIASTNDKGVTSYESHRFSTYTSGLKTLLQWLLDRNCKDVCMESTGKYWIPVYNILESDCSIVLAHPKYVKAIRGKKTDKKDAKWIADLFKHDLVAGSFMPPADIRQLRDLMRYRFKLTCFKSSEKNRLQNCLTVSNIQLGNVVSDTFGKSAQAILDKLLENPADTSFDLEPLVYKSLKKKLPELRDAIDGYITPEQAGKLKVIKAHFENLESRKAELEELILALAAPYQQELTILQTAPGISSDFTAIGIISEIGTNMEAFPSAKHLCSWAGLTPTNNESAGKKKSVRVSKAGCYIKPLLVQCANAVVTSKKHPEIRNRYLRLKKRRGHKKAIIAIARMLLTALYHMLKNGENYNAELYRKSDLPPVNREITVEQALMIARNQGYKIKSATA

SEQ ID NO: 111990 - protein, 349 aa, unidentified
MKTKHPIIIGIDTHKATHVAVAIDTQGARLAALSIPANTKGYLELERWSCGLGSVQAFGIEGTGSYGAGLSRSLLSQEHNVVEVTRPNGQLRYTHGKTDSLDAEGAARSVLAGQATSRPKTQTGSSEMIRHLKIARDTAVKSRSQAMVTLKTLIINAPADLREVLDQIKGKVALIRHIAAFRPGEIHNTLASAKAAMRALARRWLFLHEEILGHDKELERLVTKRAPDLLASHGIATMTVAEMLILVGDDPTRIRSEAAFAKLCGVCPIPASSGKTHRFRLNRGGNRQANAALYRVAIVRMRHEPTLAYVKKRTKDGKSKSEIIRCLKRYIAREIYNKLCVLKSMEIAT

SEQ ID NO: 111991 - protein, 313 aa, unidentified
MILALRCVGIDVSKHHLDIFDEAVGVPERIANATQAITQLVARWRCDALVVFEATGVYDLALREALRQAGIRFARINPARARDFARAGGQLAKTDPIDARMLAAFGRAMQPATEQATTPARNALARLAKRRDQLVAMRAQEKNRRSEAEDLAMAERIGRLIEVLNDEIVEIEAEISALVKAEPELADDAQLMRSLPGVGPVACMQLITQMPELGHVGPKEVAALAGLAPFNVDSGAYRGKRRIGGGRKRVRDALYMAALNAVRRAGRFKVFYDRLRQAGKPAKLALIAVARKLLTILNAMMRDRKPYKIAPST

SEQ ID NO: 111992 - protein, 417 aa, unidentified
MSSSLSASSCEEVAIKYVCGIDIGSQSCAGCICRPDKSLVVKHTAFANTKDGWNVLLDKLSHLDALPGEILIGMEATARYSENLYHALEQRGYQLCLLHPGQTHQFHQRQGLRAKTDRLDAVTIARVLLSGEARAGYIPNELIATYRELVRLHSQLSEQAARYQNQIHALVVVLFPEFTQVFADPCLSSALAVLQAYPSAQAMAQAGEKALYVLLHAQKHAHYGHPTAKKLLSLAATSVSSGRAEAGRSVSLRIVCEQLEQTQKNLERLQGELEHLLANDPAVKALQQIPEFGTKTVAVLRAELGDVDRFGRTDQVIAYAGLDVEIKESGLWKGQAKLSKRGSGLLRQTLYLAALRSIHLEGSAFGAYYRRLAERGLKKGSALMAVMRKMLAVTVYLLKHEQQDYDPSKVGVGMLAV

SEQ ID NO: 111993 - protein, 323 aa, unidentified
MHEEVFVGIDISKDQLDAHVLPKGMHTTVKNDTQGIDSLIEILHAETPMVIVMEATGGYEITVAAQLGLAGLPIAVVNPGQVRDFAKGIGKLAKTDAIDAYVLARFAQTVRPIPKPLPTEDEKQIKELVTRRKQLVDLRASEKNRLHRARSNRVQRSIQTVIAALDKEIEDIDKDVDDLIRKSPLWRETEELLRTFKGVGPITARVLMAKLPELGHVSRHEISRLVGLAPLNKDSGKKKGKREISGGRADVRSTLYMAAVAAITSNVVIKPFYQRLIEAGKPFKVAITACMRKMIVILNAMLKKTAFPGSFSLTRNTVAAGLN

SEQ ID NO: 111994 - protein, 338 aa, unidentified
MRKFIGIDLHSNNSVVVVTDDDDRVVYQKRLPNDLEAIAAALAPYRDETVGVVIESTYNWYWLVDGLMDAGYRVHLAHPAAIKKYEGLKHSGDFADAAQLAQLLRLGLLAEGYVYPREQRGARDLARKRMQLVRYRTGQVLSIEGILMRQTGSRMKGEAVKRLTAEQVDEFGFARDVALALEANRAVSQALGQQIEVLEKRLKERVSLRPEYRLLKTVPGIGDTLATTIMLETGSISRFAQVGNFSSYCRCVDSARESNGKKKGEGNTRNGNKYLAWAFVEAANFALRYCPQARSFYDRKKSKTNRIVALKALAHKLARACYYMLRDQQPFDVTRCFA

SEQ ID NO: 111995 - protein, 415 aa, unidentified
MTESYRIFVGIDWGADAHQVWVTDAAGTAVGEQTVDHTGTAIAALVDWIVGLAEGDARAAAVALETPRGPIVDAFLARGCPVFAINPKQLDRFRDRFSVAGAKDDARDAEVLSSAVRTDRRAFRHVTAEDPLTVQVREYSRQDTELGEDLNRLANRLRDHLLRTWPELLRLVPAADEPWFWALLKRAPTPVEGRRMRPAQVRQLLRDHRIRRITAEALLTVLRAPSVSLAPGVREGVRVRILDLVDQLPVLARQRRAAERRLATTLEAMTQGPDGESVREHTDVTILQSLPGIGTRIAATMLAEAADALRDRDYHALRLLAGAAPVTKRSGKSCVVIMRYACNHHLQTALYHWARGCLQRDPRSRAHYAQLRRAGHGNARALRGVADRMLTVLIATLKTHMPYDATRRRPRAAGA

SEQ ID NO: 111996 - protein, 430 aa, unidentified
MKSKINQRIEEITATTLIVGIDIAKSVHWARFADYRGREVGKVISFTCDRHGFEKIIAKIKELCNSKVFKEQFDGVLIGMEPTGHYWKTLANYLMKAGYRVVCVNPHHTKKAKELDDNSQTASDKKEAMVIARLVKDGRYFDPYLPQDVYAELRMLTTARISVMSRNNEIRNTITAILDEYFPEIWTVWKKPLKSKTARRILKICPFPAFIINMGEVNILTEVKTVAKKSVGLKKARQLIKAAESSIGVDYGLESAKLRLRMLLDELDLIDKNIAEIESSMEQMLNATNYAEKILSIKGIGIVTAAGFLGEVGDPLRFQNARQIMNYAGYNLVEDSSGKSKSGTCISKRGRSRLRSLLYQIAFTMVAKNKEMKELHQYLTSRPKNPLKKKQSLVVISKKIITVIYSLLKKQTAYDPALVLGAVRREMMTA

SEQ ID NO: 111997 - protein, 410 aa, unidentified
MKVAGIDVHKKVLMVVVVDASRPEEKPARRRFVTMPSELHRLLTWLREQGVEEAVMESTAQYWRSVWLELEPHMRLHLAQAFSNRAPRGRKHDFKDAERLVRRLIADELILSFVPSGEQRIWRSLTRMKLQLTRDRVRLQNQIECLLEEMRIKLSIVVSNLLGASGLRILHALAHGETDPKRLAQLGGERLQCTEEQLVDALTGRAQPVHGAMLALQLERLQLIDQQMERLNSMIAAAMKPQQDAVMRLAEVPGLGVDSAQQIIAEVGAQAGTFASAAELTSWVGTCPGKEESAEQNRSSRSAKGNKYMRRVLNQAAHAAAAKKGSHFQIVFRRLLPRLGYQSAIWAVAHRLCRVVWKILHEGVRFIEKGAEVHPREKKKRAQMLARALRKLGYEVTITPLNQLVPKPAV

SEQ ID NO: 111998 - protein, 430 aa, unidentified
MEVIYPKACGVDVHKSFIVAVICDSTSVKPQYLRKRFSTFNNSLIEFRNWLLANDCQNVCMESTGKYYVPVYNALEGHISNVVVANPKWVRCIKGEKDDNKDAKWIADLFKLGIVRSSFIPNKDIRILRELTRYLYKLTNMRTSEKNRFTNALTVGNCKLDMVFSDIFGKTSSAIINTILSQNEYNDEDILKNIDKHCKSSNEDILNSISGISWQDAQKQRMSVIQEHIDYLDKSIKTIREIIDSIIAPYESAINLLCSVPGIDRKSAITIISEIGTDMSQFSSHYRLASWAGLAPGCNESAGKKKSVKISRAGVYLKPALVEVAHCAVKDKNNPYYANKFNILSKRRGKKRAYIAIARKILVAIYHMLSTGEFFNPTDLSKVETSDKDKIKFTKNNFMQSTKQLISLGLTIDELQILIQSKISESTPVI

SEQ ID NO: 111999 - protein, 351 aa, unidentified
MLIVGCDYHPSFQQIAWVDTKSGEVGERPLMHSSGEAERFYRKLKEQGVEVRVGIEATGHARWFERLLAELGYELWVGDAAEIKAKRVRKQKNDREDARLLRTLLVENRFPRVWLPDVGNRDLRQLLWHRHRLVQMRTRVMNQLQALALNEGVRRKKGLWSQAGRAQLESFQLMPWATRRREDLLALLDGLTPRIAALTAAVEKQSEQHPEAQRLTTHPGVGPLTALAYVLIIGSPQRFRCGKQIGSYLGLIPCEESSASRQRLGHITKQGNSLLRFLLLEAAQAAVRCNPDWRREFLHLTMRRGRQIATVAMARKLAVRLYWMWRNGRDYEMSWQFGSHVGQPGTGNGVK

SEQ ID NO: 112000 - protein, 385 aa, unidentified
MVVPLVEVWRIALLEQDDPPCRTMAAVPSRTQSLKEGMAVTIVDTPRPVTGGVDTHLEVHVAAALDSIGGLLGVEEFDTTESGSKALLAWLAGFGTVVRVGVEGTGSYGAGLARHLRRAGVEVLEVDRPNRQERRRKGKTDTVDAIEAARAAQAGRQLGAAKTRDGNVEAIRALVVAKRSATDCRIKTMNQIRHLGFTAPEEIRQQLHGLSTIMLPRKAAAMRPRPGGDPIIFATKMALRTLGRRALALEAEKRELKVLLRRLVSEQSADLLSLYGVGVDTAAALLVAAGDNPERLRSEASWARLCGVAPIEASSGKVTRLRLSKGGNRQANAALWHIVTTRMVSDPRTREYVARRTKEGKSKREIIRVLKRYVAREVYHYLPPL

SEQ ID NO: 112001 - protein, 319 aa, unidentified
MESKKVYVGVDVSKQQLEVALRPQPEQWSQANEAAAVQRLVKRLKELNCERIVVEATGGYETLLVAALWAAGLPVVVVNPRWVRAFAKSLGQLAKTDAIDARVLALYAERAELKVRELPSDEVCQLRAVCARREDLLEMLTAEHNRLEHAQGPVRREIKRHIEYLRKQLKRLDHDIDRTVRGSGLWRQVDQLLDSVPGVGPVLRASLLAWLPELGQLNREQIAKLVGVAPLNQDSGQFRGLRRIAGGRAPLRKVLYMATFAAMRHNPYLRGYYDHLRKQGKVHKVALVATMRKLLLILNAIVKTNTPWRTLSCLHPANS

SEQ ID NO: 112002 - protein, 419 aa, unidentified
MPASTLFVGIDVDSKSNKVRFIDSDGRDLSKPLSVKNTPKGASEIERKILELVNKHGFHAVRIGLEATGYYDWHLAEYLAQSPHRTHIHIEVYRLDPRRIRNFKKSYAKEDKTDPFDALVVADFLRFNRLPKPHRASNPFEALRHLTRYRFHLVRIIVREQNFLLSRLFLQFSGFQQNKPLSDTFGAISQALLENFTPDELVSMPQEKLLEFVIRHGKNRVREPELLVKTLKRAAKESYRLRPALRRTLGLVLCLSLRNIRTLRTALRDVDKAIAKELEAFPNTLTSVPGIGPVYSAGLIAELGEIERFSSHNKIAKMAGLVWPKKQSGHFEAQDLRRAKHGNRYLRYYFVEAANALRVHNAEYRTYYEQKLKEVRKHAHKRAVVLTARKLVRLVFSMLKKNQLYSASYQQPTRSNRSQ

SEQ ID NO: 112003 - protein, 378 aa, unidentified
MNRIIKIGMDVHTTNYTLCIFEPSFEHDGTVHCITQVKPEVKNIIHVIETFKKKHENEELNIVCGYEAGCLGYSLYHELKEKGIECVILAPTTMKTEKGGRKLKNDYRDAKMIAECLAYGGYSAVHVPTELDNSVKEFIRMRDDIKENLKSIKQQIIAFLTRNGKQFEGKSFWTRKHIDWINTVSFSEPLLQDTLKEYMIEYNHLCDRVETLDKQIEEVSLKEEYVEKVQQLQCLIGIKTHTALSLIVETSDFNRFKKGNMYSAYLGLIPGEDSSGNDKNRLGITKAGNSHLRKLLVEAAQGYTRGKVGFKSKDLKARQEKCSSEVVAYADRANERLRRKYCRMILRGKKYNVAKTAIARELACFVWGIMTDHIDLCN

SEQ ID NO: 112004 - protein, 380 aa, unidentified
MISVGIDVSKGKSTVCILKPGGEVVKPPFEMIHNAEELDSFVSLINSFDEETRVVLEDTGHYHIPVATYLSSHGIFVCCVNALRMKKFCAQSIRRAKTDKIDAVRIASFGITYWSELTRAYDAPDTYDELRFLARQYYQITSILVKAKVNLSNLLDQVMPGISNLLQNQKDNHKLTEFVDRYIHFQTILDMGEEKFTADYCKWAKKKGYRCNERKAAEIFALAQNGIPTLPNSQSVKIAVSEAVKLIHSIEESRNTILAQMQDLCNTLPEYSVVKEMDCIGDTLAPRIIAYAGIDAPPYQSGAFHASERHISKRGNSYLRKTGYEIMQSLIKHKPADNAVYNFIQKKRSEGKCGKEAMIAGLNKFLRVYYGKVMEFYSEH

SEQ ID NO: 112005 - protein, 461 aa, unidentified
MSKKKKSKKMKNQFIEQIHFNAAGIDIGSKTHYVAVPPGRDPDGRDVRSFGAFTTDLYTLANWLKKCKIDKVAMESTGVYWIPLFEILDTQGFDVLLVNPRHFKNVPGRKTDVVDCQWLQQLHTFGLLQGAFRPNFQVCELRAYLRQRAMLISYAAKHIQHMQKSLEQMNIKLTEVISDITGTTGMKIIRAIIDGQRDPKKLAALRDPRCKNDADVIAKALQGTWKAEHLFSLQQALHLFDFYQKQIEECEIRIKQSLETFDDRSNGESLPPSKKKSKAHHPMNFEAKSFLYKMTGVDLTRIDGIDAPTALCILGEIGLDMTCWPTEKHFASWLGLSPGSKITGGKVLSSKTKPSANRAATAFRLAAYSLQRSKSALGAFLRRKKAQLGAPKAITATAHKIARIFYLMLKHGTEYIDLGQDYYEQRYRNRMINNLKNKAKQFGCKIEIDPNFKGLTPDLPN

SEQ ID NO: 112006 - protein, 337 aa, unidentified
MKITTIGLDIAKRFFHVVCCNKEGSLIKKKMLSRAQVLTFFQLQPTCLVALEACATSHYWAREIKKCGHEVKLIPPQHVKAFLIGNKNDYNDALAITVAAKQPHIKSVGIKSIEQQDNQAQHKARELAVRQRTALCNQIRGLIAEYGIVLSQGVNNVRKNIVLMLDEETTQLSGAFKVILTQLQKQLNSLDECIDVFGKTITESVKNNAICQRLLTIPGFGPMVSSGYFNEIGNGANYRKGRDVSASLGIVPRQHSSGGKDTLLGISKRGNSYLRCLLIQGAKAVVSRAGTKTDKLSQWINRIVQTRGHNRACVAYANKMARMAWAITVSGEEYSAV

SEQ ID NO: 112007 - protein, 350 aa, unidentified
MEYVGIDWSYRRAAWCALSDAGAIVGEGAVSADEDGLVRLVIKRGTEVRAVVEMMSGAIWVRDTLAAAGWQVQIAHARKVRDVAPLACKTDKVDARVLAELCRRELVPELWVPALADRELRERLRRRMHLVRMRASAMNRIFGLLTQWGLRLSLRRLREPDAMTLLEQRGVPTVWRRSIAEALDVIDLLDARIAPIDAELGPLACADARVALLDTIPGVGALLGLTLASEIGDVARFGSPRKLVGYAGLAPKISQSGDRSRTGALSKAGSRTLRWAAVEAAQHAWRPTNPWHQLYTDVAKRAGKNPAKSAVARKILIATWHVLSRQQPFKPAAPRRPSPASASSRCLLAA

SEQ ID NO: 112008 - protein, 421 aa, unidentified
MQVVAPRCAGLDVHRSVIAACALISDGRGRARKVMSQFVTTRAGLERLVGWLRELGVTQVGMESTGVYWMPVYAVLEAAGGFELIVVNAQHAKGMKGRKTDVKDAEWLADLVRHGLVSGSFVPPQPIRELRDLTRYRRTLVENQGSERRRLIKLLEAADIKLAGVVSDIFGVSGRAILRALIEGGHSAAEMSKLARGNLRKKRGQLIDALAGELAMHQRQLLAMQLARVEADEADIAALDRQIERRLVPYAAQLELLMTIPGIDWVVAATVIAEIGVDMSVFPSHRHLAAWGGTCPGNNESAGKHKPSGARKGNPYLRTALCNAAIAASRKRGCFYKAKYYRLKSRRGGGRAALAIAHKLLVCIYHMLSGNTVYRELGEDYFDMRDTERATRRYVRRLQDLGFTVVLQAQSQTQAHAANAL

SEQ ID NO: 112009 - protein, 368 aa, unidentified
MSKSIRFVGLDVHKDSIMIAVAEDDRCPAEVYGEIPNDWQTLRKTLRRLGKGYSLHCCYEAGPCGYGLYRKMRKAKINVVVIAPSLVPKQSGNRVKTDRRDARKLAHFLRSGDLTPIFVPDEEAEAIRDLERAREDAKNAERTVRQQLGKFLLRHDRRWGKSNWTREHLAWIGGQKFEHQAQQRVLTDYLKAVEDATLREKQLTEDLAEVVKDTSLYPLIQALQAFRGIRLITAVTIAAELADLKRFSSARQLMAFLGLVPSEHSSGQSQQRGRITRTGNSHVRRVLVEAAWSYRYQPRMSKAIRLRNEGLAPGVQRLAWKAQKRLHQRLNHLVKKGKRHEKAITAVARELAGFVWALGQEPELLGKR

SEQ ID NO: 112010 - protein, 400 aa, unidentified
MMTPDDIDVWVGLDVGKSAHHAHALDHDGNTLYDKPLKQDEKAIRTMLGKLSKHGRVLLVVDQPNTIGSLPLTVARNMGIAVAYLPGTAMRRTAQLLPGDAKTDRRDAHVIAWAALKLPETLRDAGPDDETLAALKLLAGHDEDLAHESTRHVNRLRSLLLQTHPAFERALKGERITRDATLALLERYGGPMGVKRAGIEDVKDWAKSNGLRAGRIIDDMFKAIGEQTVTVPGTLMAETIIPSIAHDIKTIRDRRREVGRQVEKLLKDHPLLTVLTSMPGIGVRTASNILLGIGGDIANFKSSAHLAAYAGISPVTGQSGTSIKGERPSRRGNKRLKNALWQTAFVASTKHPPSVAYYKRKREQGKHHNAAIICLARRRCDVIYSMLKNGTLYQEPALVA

SEQ ID NO: 112011 - protein, 368 aa, unidentified
MSNVITSFVGLDVHRDSIAMGVAQTGREPPRFVGTVTPQWAPLSKALGRLGRRQELQIVYEAGPCGYTLARQLRAHGYACEVIAPAKIARRPGDRIKTDRRDALLLARAARAGELVSVTIPDERDEAMRDLSRAREDAVRARLKARQQLKALLLRHGHRYTGKSSWTAAHERYLAEVSFAQPAQDIAYAEYRGAVREAYERVERSTGALGAQLEHWRMRPVVQALMSLRGIDLIAAVTLVAEIGDFTRFARPRELMGFLGLVPSEYSSGATRRQGAITKTGNSHARRVLVEAAWNYRFPARVSRVLQVRQEGQPKAVRDIAWRAQLRLTRRYRHLCARKLALNKICVAIARELSAFVWDIARQVKPVT

SEQ ID NO: 112012 - protein, 350 aa, unidentified
MQYLGIDWGTRRAAWCSLSATGELTEGTISADADGLVGLAVRLGPDVRGCVEMMSGAVWVRDQLQACGWDIRIADARKVKAIAPLACKTDRVDARVLAELARRDLIPEVWVPSLDQRELRERLRRRAHLVRMRTSAINRTFGLQTQWGLRMGITALRKPGALEQLATGGMPGVWCRSIATLLELIDDLDRQLIPMQRELRPIAHADQHTQLLMTIPGVAELLGLTLSCEIADVSRFPTARKLVGYSGLTPTIKQSGQSSRTGRLSKAGPNTLRWAAVEAAQQAWRPNNPWHALYTETKRRHGKSNPAKAAVARKVLIAAWHVLSLNEPFKPSANRATDPVPASSSIRLAA

SEQ ID NO: 112013 - protein, 420 aa, unidentified
MRNAGIHANSLLEVRRMYNAVGIDVSKGKSTVAVLQPGGTVIRKPFDVSHTSQNLNELADYLSSLDGTTKIVMECTGRYHEPMIKVLSEAGLFISIVNPHLIKNFGNNSLRKVKSDPADARKIARYTLDNWTELRQYSGMDNTRTQLKTLNSQFSFFMKQKVAAKANLIALLDNTYPGVNKLFDSPTREDGSEKWVDYAYSFWHADCVRKIGLKAFTERYMSFCKKHHYIFQQDKPEKLFNASKELVAVFPKEKTYKLLIQQSIQQLNLASEHVERLRREMNELASTLPEYSTVMGIYGVGKTYGPQLIAEIGDVSRFTHREALTAFAGVDPGVDESGQHKSKSNRASKVGSARLRKTLFQIMTTLLQNAPEADPVYRFLDKKRSQGKPYYVYMTAGANKFLRIYYGKVKECLRNLEQTE

SEQ ID NO: 112014 - protein, 341 aa, unidentified
MDAIGIDTHKDSLASCAIDALGTVRAEAAFANDPAGHAALGAWAARVAPGARLGFEGSSTFGAAAARRLERAGFDVREVPPHLSRRERLRTRRAGKSDPGDALAIARVAAREADLPPIRRADPTTELGLLVAARDDVLAEATRIRNRLHADLVVLVPGYGGRVARLVAERELATAGRALHRLDGVHAELARARLAELRRQLARARALAARIERLVGGHPLVALPGAGPLTVATLIAETGELGRFRSADAFAMLAGVAPIPASSGQVHRMRLNRGGNRQLNRALHVIALAQARWFAPARAFVTRKIAEGHSWKEAIRALKRHLARIVFRLLQEGAARFTAAA

SEQ ID NO: 112015 - protein, 359 aa, unidentified
MTTTAAEAPTAAGPILAVDLGKYKCVACVYHAADRHTFHAVDTSVAEVERLIRRTRPAVVVIEACSLAGWVHDLCGALGVPCKVANTGAEAWKYKHAKRKTDKDDALRLAQLFALGQLPEVVVPAKPVREWRALIAHRQALVGQRVAAQNRIRALLVGQGLPAPRGAKAWTVSGLAGIGQLAKPLADCAPDELWRGMLDLALTAYRQAEGLVAAAEAKLDAMGKASARVRLLDTMPGLGPRTAEAVVAHLDDPKRFKSGKQVGAYGGLVPRQYQSGEDDRRGRISKRGPAVLRKLLVQCAWAMLRYNPWARAVYDRLCRGKARKKQAVVALARKILVRCWAMLRDGVPWRPDPQPAAAA

SEQ ID NO: 112016 - protein, 342 aa, unidentified
MNKVAIAAIDLGKNSFHLHAQDDRGHELYRKKFTRTALVQHLANLEPCTVVMEACGGAHFMAQQAAKFGHTAKLIAPHLVRPYVKSNKNDFADAEAICEAATRPTMRFVPVKTQAQQALAMLNSTRDSFIKDRTATVNRIHAALLEFGISLPAGFKSINELTALLEASSLSDPIRKLLTRMHDHFDYLHEQIKSLDKELESQVAEDDLAARLMTIPCVGPITSSALAAELGDGKQFKCGRGYSASIGLVPKQHSTGGKTVLLGISKRGDRNQRRLLIQCARVYLMHLDRQKGVLAQWVRHLIATHHHSNHVVCALANKLARIAWAIAAHHTEFDAGPSAMSA

SEQ ID NO: 112017 - protein, 424 aa, unidentified
MKSATNTPSSERPLVLPEVAVNDVTAGIDWARDDHAVCIVDGRGRKVAATMVEHTTAGLRDLVAFLGRHGAGEVAIERPDGPAVDALLAAGVTVVVISPNQVKNLRGRYGSAGNKDDRFDAYVLADTLRTDRARLRPLVPDTEATIALRRACRARKDLVKHRVAAANQLRAHLRNVFPGAIGLFKDLDSEISLAFLTRFDTQDRADWLTAKRLSDWLSKQSYSGRANPAVLHQRLLEAPRGATGEHATSQAPVTAALVALLRTLVEQIKALSTQIDHQLDVHPDAHIFTSLPRSGRVRAARLLAEIGDCRARFPNPESLTCLAGAAPSTRQSGKLRAVGFRWSCDKQLRDAVTDYAADSRHANPWAADLYDRARARGHDHAHAVRILARAWLHIIWHCWQNDTAYEPTQHNALQRVLAQQNEAA

SEQ ID NO: 112018 - protein, 337 aa, unidentified
MGNITMGLDVGDRFSQLGVVDQDGVVIQEDRIPTTRVALCERLAGPPARVVLEAGTHAGWMSRELTALGHEVLVANSRKLRWLYHNEHKTDRVDATYLARVGRWDPTLLAPIRVRSAGADGALRLVRARASLVRARTRLINHVRGAVKSVGGQLPPCDATSFARRVAAHLPAELHAALEPLLAQIAGLTQTIARYDRLVEHLAAQVYPETARLRQVAGVGALTALAFVLTVDDPRRFGDGRAVGAYFGLCPRRADSGAHRPQLGITKCGDGLVRQLLVQAAHYILGPFGPDCRLRRWGLELARRGGKNAKKRAIIAVARKLAALLYSLWVHDTRYAP

SEQ ID NO: 112019 - protein, 404 aa, unidentified
MIILGLDWSRSKHDFVIMDPQGKVIERGAVAHNANALEELAAGVERHVSGVEQVHVGLELNNGALLAWLLVKGYSVFGIQPKSAQRFRDIYRPSGSKDDRIDAFVLAEFVRVNKSRLRPWCPPSEITLQLRELLRWREELVQQRTAAYQRLRVLLAEWSPQLAGLCDNLDCIWQLDLLSQFPTEASLCQAHGNRVRCFIRKHRMHSKKCQQIEDIRRSVPMPTPAGRAVVVEKQTSFLVEQIRMLSTEIDHIEKDLQQLAAQHPDVDIFESLPVRGIVTIASLLAIFGDDHEKALSPDELAAVCGVAPVTIASGKAKKVRQRRACDHTFRQALVHFAFNTAFRDGCWAVQFYQRKRSEGATHYTALRCLAKRWLKIIHRLWKDRITYDEQLHQANQRRNQSHAA

SEQ ID NO: 112020 - protein, 348 aa, unidentified
MRFYTEQHQHYCGIDLHARTLYLCVLDAGGNVLLHKNLPCDRARFLEAIEPFREDLVVASECIFNWYWLADLCADQGIPFVLGHALYMRAIHGAKAKNDRIDAFKTVSLLRGGLLPMAYVYPAEMRSTRDLLRRRTHFVRKRAQLMAHIQNTFHQYNLPRPPGRLVYKYQRAPIPDAFSDPLLKKSMETDLALCDTYDELIRDLEKTVLRQARSHDPQTLLRLNTIPGIGEILSLTLLYEIHDIGRFESVQRFASYARLVKCEKSSAGKRLGTSGHKIGSVHLKWAFSEAAVSVLRHLPQSKRLHDRLKRKYGKGKALSILAHKLGRTVYFMLKRNQAFDANRFLANA

SEQ ID NO: 112021 - protein, 413 aa, unidentified
MEVIHARCGGIDVHKRQVTVCVRIASGSKVDLEVREFGTMTRDLLSVSDWLKECGVSHVAMESTGAYWKPVYNVLEGEFSILLANAQHMKAVPGRKTDVKDAQWIAELHAHGLLRASFVPKLEQRGLRELTRTRTTLLAERARLANRIQKVLEDANVKLASVATDVLGVSGRAMLRQMIAGKDDAKATAQLAKGVLRKKMDSLELALEGRIRSHHRIVLEELLNQVESLDASVARLDEAIGEALKEAEDPFEAAVAILVTAPGAGRVSARAVLAEIGTNMEQFPSAEHLSTWAGISPGNKQSGGKRLSSRINPGNKWLKTTLVQMAQAASHQRGTYLHALYSRIAARRGKKRAIVAVAHSLLVSFYHMLKNGIAYQELGAEHFDKLNQTRTIDRLTARIASLGYKVSLEPVTA

SEQ ID NO: 112022 - protein, 300 aa, unidentified
MFPVGIDVSKNTLDLCILYDGIKGRIKTRNIQNNRHSVENILRWLRLQHCGPEDVHVVMEATGVYHERLATELHDAGFRVSLANPHRSREFARGMGIMTKTDKVDAYMLACYAFLKKPHHWEPPSPEIRYLAALLRRRDVLLGDALREENRLEKYLSTDTPADIISSCRRMAQLLREEVSNIERQIKAHIKASPALRRDYTLLNSIKSVGPQLGMHMLVELRSHNFASAEQAAAFLGVVPIEKRSGTSVRSRPRMSKIGPPQLRARLYMSALCGKIYNKRMRNIYDEMCLRGKPKMGFVE

SEQ ID NO: 112023 - protein, 398 aa, unidentified
MTESSDYESVQVFIGVDVGKDTHHAVAINRSGKRLFDKALPNDENKLRSLISDLKQHGQILLVVDQPATIGALPVAVARSEGVLVGYLPGLAMRRIADLHAGEAKTDARDAAIIAEAARTLPHALRTLKLADEQIAELSMLCGFDDDLAAQTTQASNRIRGLLTQIHPALERVLGPRLEHPAVLDLLQRYPSPEKLASLGEKKLAAQLCKLAPRLGKRLAADIAQALAEQTVVVPGTNAAAVVLPRLALQLITLRKQRDEVALEVEQRVLAHPLYPVLTSMPGVGVRTAARLLTEVACRAFASAAHLAAYAGLAPVTRRSGSSIRGEHPSRRGNKALKRALFLSAFAALRDPLSRAYYTRKMSQGKRHNQALITLARRRCDVLFAMMRDGTFYTPQGS

SEQ ID NO: 112024 - protein, 338 aa, unidentified
MKLYGGIDLHSNNSVVALLDEEDRVVYRKRLPNEAAGVLAALAPHREAIVGLVVESTYNWYWLVDALMEAGYAVHLANTAAMVQYSGLKYSDDDSDAAWLAKLLRLGLLPEGYIYPKGERAVRDLLRRRSRLVQQHTANLLSVQNLFARNRGRSLSANEVKRLNSEAVSRLLPDPNLALAVQGTLLVMRAQEGAIDLLEREALVQTKLRPAYRHLLSVNGIGQVLGLTILLETGPVERFAQVGHYASYCRCVGSERLSNGKRKGRGNTKSGNKYLAWAYLEAANFAVRYNAVINRYYQRKRAKTNGIVAIKTVAHKLARACYYMLRDGTDFEVGRAFA

SEQ ID NO: 112025 - protein, 368 aa, unidentified
MEPIHERVAGIDVHRMKHVVTVLISGDGGAVSSETREFGGFKRDMRALVDWLRSHRIQQVVMESTGIYWKSVFSHLEVAEIPALVVNAFHVRNVPGRKTDVGDSEWLAQLARFGLLRGSFIPPKDLRELRVVSRYRQKLTATLAGEKNRLHKLLDDAGIKLGGVVSDIDGVCARKMVEGLIAGSTPEQLSALGRGKLKSTGEVLEAAMDGDLSPRHRLVLSTILNHLRYLQQELARLDRYLIAAMKPYAWAWRLLQTIPGIDEIAAAMILIEIGDNVHRFGSPSRLASWAALCPGNNESAGKRKSGKTRNGNPHRALSSVRSRKRRATNQNRVPCQIRQLGDPPRPQEDDHRPGAQADPHDLLCPGAS

SEQ ID NO: 112026 - protein, 354 aa, unidentified
MTSTKYIGLDVHTESISMAVRNAAGKIVMECVIETKASTILQSIHGLQGDLHVTFEEGTWAAWLYDLLRPHVVSLVVCDPRRNALLKDGNKNDRIDARKLSDLLYMNKLNSVYHGEHGLRALKELVRSYSTIVKDLARVMTRVKAIYRSWGIPCAGRQVYAPRHRDEWLRKISELGVRRRAEFFYLQLDALRVLRQQVRRDLLVESKKHQAWKRLCEIPSIGPIRAAVLLGVLQTPHRFRTKRPLWKYSGLAIETHSSADHRSVNGQLQRKKKNSVRGLNQNCNHDLKSLFKGAAIVASSKPGPFQEFYAALLANGMRPEMARLTLARKIATIVLIVWKKGVCFDAQYLKPQTA

SEQ ID NO: 112027 - protein, 351 aa, unidentified
MSYKLDSGIAVIGIDIGKNSFHVVGHDKRGAIMLRQKWSRGQIEARLANLPPCLIGMEACVGAHHLSRKLQMLGHDARLMPAKYVRPYSKGQKNDFRDAEAITEAVQRPTMKFVATKTAEQLDLQALHRVRERLVSQRTGIINQLRAFLLERGIAVRQGLRFLRAELPRILAAPCDALSPRMLRVIEDLAGDWRRLDERIEILSSEIEALARQDKNCERLMTVPGIGPIVSSAMVAAIGTGDAFSKGRDFGAWLGLVPKQTSTGDRTILGSISKRGNRYLRTLFVQAAWVVLVRIGPKHWHRYGLKSWIEAAKKRLHHNVLAIALANKLARIAWSVLACGRAFEASKIQAA

SEQ ID NO: 112028 - protein, 318 aa, unidentified
MERLSVGIDVSKRELVIAIDPTGARWTSDTTAPAISAVVERLRSLTPRIIVVEATGGYERPLVAALAAADLPVAIVNPRQARAFAQAIGRTAKTDAIDSAVLAAFGARLDLAARPVADAATQALAALVARRRQLVEMIGMERARLEHAPATGPITRELRRHIRWLERRVADVDDDIGNSIAAHPSWRVNEELLRSVPGIGPTTARTLLAELPELGRLDRRRIAALVGVAPVNCDSGQYRGQRHIWGGRASVRATLYMAALVAARRNAPLAAFYRRLRDRGKTAKVALVAVMRKLLTIVNAMMKHQVRWNAEVARAATV

SEQ ID NO: 112029 - protein, 357 aa, unidentified
MRSSNLKYIGLDVHKEAIAIAVLDAAGKLVMESVIQTKASALVQFLDGLRGELHVTLEEGTWAAWLYDVLKPHVWQIVVCNPRRNALLKEGSKSDKVDARKLAELMRSGMLRAVYHGENGLRALQELARTYQVVSTDLKRVMNRLKALYRSWGIPCTGTQVYGRRYREQWLQKIKEAGVRRRAELFYQQLDGLQGLRLTVRGELLAESRKHAGVKLLRQIPFIGPLRAAQLVALMQTPHRFRSKRQLWTYSGLAVETHDSAQYRYVDGQLQRSKKPQQVRGLNQNHNHAMKEIFKSAALSAAVRVGPFQDFYQGLLARGMKPELARVTLARKVAAITLTLWKKGECFDAKYVKRQAA

SEQ ID NO: 112030 - protein, 321 aa, unidentified
MTYIGIDVSKDTFVVAYSPDKNSKTKTFKNTTRGIHEFIRTISKDEHHCVMEATGNYSALLVYLLSEAGITTSLENPLKVKNFARAMLSTVKTDEIDARLIALYGEKMQPVPYKLRSDAILTLKQKRTVIRQLKKQLIATRNLKGSMEALPFFDAKCRKSVEKTIAFLEKQIKDLEEDLSDLARSEYKKQMDLLTSVKGIGITLAAALIMATGGFTYFDNAKQLTRHLGLSPTYQQSGTSVNFKGHINRNGDSSLRSQLYVAAFSSIRCNTECRACYDRLRSNGKPGKVAVIAVANKLIRQAFAVVTQEKPYVDGYISSKK

SEQ ID NO: 112031 - protein, 363 aa, unidentified
MMTSPVAGIDPHQDTFTVGIVTANGVEVTHATFPNSAAGFVDAIKLLTAHGVSQVGVEGSASWGAHVAIALVAAGFDAREVPPQRSARKRQARRLDKTDVVDSVAVARALLAEPTLGPVQALEVYDPFVAKIEAVLEHRRMLVDIRTLALHHIQDQIAKLPTEIRDRLSATGKIESRLRRLEDLDTATVTTLAGRYRLSWLIAFIDRDRQARREIRQLERDLDELLDEHGTTLRDEPGVGAIAAATLVVEVGDPHRFARESKFARWCGTGAVALSSGEGTGEPVKHRLDFGGNRRINSVLYIASVTQQRDLDEARHYIDRKVSEGKTRREARRAHKRHLANRVIRRMWNDEQRRQKSRSHLAA

SEQ ID NO: 112032 - protein, 334 aa, unidentified
MDKAPSSSSDLAFSLGIDVGKETLEIALCDGEEVSTKTTVANDSDGHEELLRWLQDQGAGPEETGVCMEASGDFEKAIAQRLYEEEYRVSIVNPRRIKGYASSQLQRTKTDSADAALIARFGRREDPRPWTPPSAAESRLQELTRARQALQKEKTRTQNRLDESEDEAVRRAHRGLLDEIERQLEDLKEEIEEHVEEDPKLKDRCSLLDTIPGIGLQTAAIVVSELGSPERFESARQAAAYAGLVPSHHQSGTSVRGNPRMSKVGNGRLRRAMYFPAMSALQCNAAVKAFGERLKERGKENMVVIGAAMRKLLHICYGVLKSGRPFDASLHPTA

SEQ ID NO: 112033 - protein, 403 aa, unidentified
MLAGIDWASEEHAVCVLDEEGRAVDRFTITHSAEGFDRLTARLARHGDPAGVPVAIERPDGRLVDRLLEAGHPVVPVKTNAIKAWREAEVLSGAKSDPGDAEVIADYLRQRRGRLRVLQPFSTETRALRAVVRTRTDLVDQRVAAANQLEAILDAFWPGAKAVFADIWSPIALDFLERYPTPASAARLGEARMATFLTKHGYSGRRPAAELVERLRSAPTGVGEGPEAEARRDTVLAMVRVLRVLGRAIKDLDRSVAAHLDEHPDAEIFRSLPRSGQINAAQMLAEWGDCREAFDSPEAVAALCGATPVTKKSGKHEAVQFRWACNKRFRNAMCTFADNSRRASPWAQSIYQAALDRGHDHPHAVRILARAWTRVIYRCWIDRAPYDPAHHGAIARMERASAA

SEQ ID NO: 112034 - protein, 347 aa, unidentified
MDHVGMDLGKRESQIAILTEDGELIHRRIRTERPRLVEVFGRWPSAKILLEASTESEWVACCLEDLGHEVIVADPNYAPMYGQRRRRVKTDRRDAHALVYACRAGIYRPAHRTSPEHRALRARLAVREAVVRTRAAWITGLQSLLRREGCRLRSGAPETFITRVEELTLPPALTPVIAPLLELLGPLNHQLEVLDKELERLVAAHEAARHLITVPGVGPVTAAAFVATVDDVTRFRNAHQVEAYLGLIPSEWSSSEIQRRGHITKAGNARMRWLLVQGAWCILRRRKRLETAALRHWAERIAGRRGRAIAAVALARRLAGIKFAIWRDGTDYDVTKVRGPLTGRRAA

SEQ ID NO: 112035 - protein, 367 aa, unidentified
MEKKIAYVGIDYHSETLSLAVMVDGEKDFLSSLTMKNNDKNILKYLKKLSKEYEIKACYEASCNGYSFQRKMKKWGFHCDVIAPSLIPKKPGDKRKNDYRDARHLTQLYANGQLTTVHPPSEEQESIRSIVRCRLSLKENEKSVKLQINSFVLSHGFHWADSRWTVKHRQWLGALQLRDDFSQKVLDEHLGHLEYLSARISHLDNLIREIAESEVYAPSVKKLKAFKGLDILSAMILITEVTDFRRFPNPRSLMAYLGLIPSEDSSGGRQKGGSITKTGNHRCRTQLIESVQHSMKKPIISYKMKHNLEHIDPASASIAIKCMHRLHKRFWALVMKGKSRNKAKTAVAREFVGFIWAMMTQNEPAAV

SEQ ID NO: 112036 - protein, 334 aa, unidentified
MDTHADVHVAAALDPVGGLLGVREFPVSPAGYACLLAWLGGFGTVALVGIEGTGSYGAGLARYVAAAGIRVVEVDRSDRQDRRRQGKSDPLDAVSAARAAQSGRARGAPKGRDGAVEAIRALMVAKRSAMGERTRTINQARALILTGPDDLRARFAKHTAAALVTGIAALRPRPGDVAGYATRVALRELGRRAVFLDGQLERLDELIVPMVTARAPGLLALYGVGPNTAALLLIAAGDHPERLRSEAAWAHLCAAAPIPASSGKVTRHRLNPGGDRQANHALWRIAFTRMGSDEATRAYVERRTEEGKSKAEIIRCLKRYVAREVYPHLRPAAG

SEQ ID NO: 112037 - protein, 402 aa, unidentified
MTPAKNQMRRIIGVDLHPDSFAAVQVTGSTIAEMRIEKRFTQIPCSDWEKFLQEQIPGNSIIVCEAGCNSFEFMRIAERLGHQTYVLNSKSAGQLAKAYCKNDPHDALRCAKIYLCGLAAHIWQPDEETVLRREIYSAYQQAVTDQTRASNRIKSFLTGHKVRLTKAQKLRKELTREFIFKAYPWSDSQKFVLTNHFHALDHAAQQRREYLEFIGKTVLQYPIMTQLMQLCGIRLLTTYCIVAVIGDINRFESPKQLVAYLGLAPCIKASGNSVSSCGMMDGGKTQAKSVLVQAAHAVLKSKSACGAALKEWGIKLKMRKSIHVAVGGMARKLAIAVWYAMKGLLPDLLDTEEVMRNKFKKIAEELTEEVIQQIGYKSVKDFAEEYTGLILLRRFTLLGKNT

SEQ ID NO: 112038 - protein, 340 aa, unidentified
MKFYCGIDLSARDCHVCVIDQQLTIVVQQKLRNELPKICELLEPYKANLKIVVESTFNWYWLIDGLQAEGFEVVLAHTLGLYLITGAKVKTDRRDAYALAKLLLVGAVPAAYIYPVETRPVRDLLRRRLHLVQVRAGEYGSLRRLLLRQGILSSKQQEIKTATEAELEQWFEHPLVRLHASQELQRIELYSQQIAELEKTILSLAKTEQSYELLLKLPGVGQTIALTILYEVGELTRFANVKVFSSYCRVVPGIAQSGNVSRRGRASKQGNHYLKAAFSQAAVHAVRCYPKVRRYYERQLKRHQGRGRQMICYNIIAHKLAQAAFHVLKEQTEYREERGR

SEQ ID NO: 112039 - protein, 357 aa, unidentified
MSNKHNSGNASVIGIDIGKNSFHIIGQDQRGAIVLRQKWSRGQMEARIANLPPCLIGMEACVGAHHLSRKLQALGHDARLMPAKYVRPYSKGQKNDFRDAEAIAEAVQRPTMKFVATKTSDQLDLQAQHRVRERLVSQRTGIINQIRAFLLERGIAVRQGVRFLQAELPRILATRTDVLSPRMLRIVEDLSCDWRRLDERIKGLSDEIEELARHDKACERLMTVPGVGPIISSAMVAAIGTGDAFSKGRDFGAWLGLVPKQISTGDRTILGSISRRGNRYLRVLFVQAAWVVLVKLRPDQWQRYGLKSWIEAAKKRLHHNVLAIALANKLARIAWAVLNKGRAFECVKTDTTTARPA

SEQ ID NO: 112040 - protein, 352 aa, unidentified
MIIIGVDFHPEFQQMAWVDTDSGEFQERRLQHREEAAAFYRALAGQKVCVGMEASGHAGWFERLVVELQFELRIGDAAEIRTKRVRKQKTDRQDARLILQLLREDRFPQIWVPSWENRDLRQLLWHRHRMVQARTRIMNQLQAVALNEGLRCKKRLWRKHGRQQLEAFRLAPWASRRRRDLLELIDRLNPTIAELSQAIEQEVEKCPEAKRLMTHPGVGALTALAFVLIIGNAERFHCGKQVASYLGLVPREDSSGNRRRLGHITKQGSSMMRFLLVEAAQVTVRSVPEWRSKYLHLMMRRGRKIAKVAMARKLAVRLYWMMRQEWDYQQWNKFGSHAGQPGNRHGVQSITE

SEQ ID NO: 112041 - protein, 351 aa, unidentified
MRTSQKITGIVTTIGIDIGKNTFHLVGFDQRGAIILQQKVSRGQLERRVANIPRCLIGMEACSGSHHIGRQLAETGHDVRLIPAQYVKPFLKGHKNDYRDAEAIAEAVQRPTMHFVTIKTPEQMDLLALHRVRSRLVGRRTGVINQIRGFLIERGITVRQGPMPLRKALPEILSSDTGALSPRMVGLIAELAQDWRRLDERIAAVSAEIEALAEQDDSCQRLMTVPGVGPIISSAVVAAIGNGTGFKQGRDFGAWLGLVPKQESTGDRTILGKISKRGNKYLRTLFVQAAHVVLERRPSAAMRGLWPWVEQASKRLHRNMLAIALANKLARIAWAVLARGGTYQPRITHAA

SEQ ID NO: 112042 - protein, 387 aa, unidentified
MIDSTTAVVTDDRLFVGMDVHVRNSYLHVSDAGGKTIKRGRVGNSLGELAQFLAPLESHAMRVVVESTTNTRAICQLLQQYASQSGAALSAEPMHARKLRIIAESLSKCDKLDAAVLSELARSNLKLPVCYLPDDQVFALREHLRARADLVTMRTMLKNRLHALLHRRGLLAPVKMDLFSKAGRAWLEALPLDEAGRSILNRQLTTIDQLEEVIEQSTAALKTLARSQRWCKHEALLRTMPGVGLITALTILAELGELTRFKSRAAVSNYAGLVPVVRDSNSKHFGGGITHRGPAALRGALVEAAWVSVGRVPQYAAIFDRISNRKGKQVAIVAVARRMLEDAWTMLKREQVFRAAPAKEQRIDNSTSAAPACAGAALEAVDPNVAG

SEQ ID NO: 112043 - protein, 382 aa, unidentified
MDSTCSWSRIIGLDLSKATFKGCILYGEGFVQRKNFSGEMRQDESGYVLIKNTIQDGDIVLMEAGSSTFNLARYLLRNSGAVDVVVLNPANLRIIWDSQKKNDKADAMKIACIARDMRPEAWPRVAVPSEQEQSERAVITHWVFLRRQETMLLNRFFALFNSLGFPEIDKGRMRSSADFRVQTVNDLLSFNELSFTDALMLEQQISIVQNQLGLMEDRLRAICLNHPRQALSWLSIPGIGLINAATLIAYINDGSRFSRPDQLLNYAGMVPKQNQSGTVDVKGRITKRGCTAIRRSIVQGAQVVMMQPPTCDLTRYAYRRKKECPFNGKVAVAVANRMLRTGLALLHHDDLYRPMIENGFDRLRRKLAEYKLQALAAYLTRN

SEQ ID NO: 112044 - protein, 338 aa, unidentified
MTNDITTIGVDIAKHTFHLVFANQQGKPIQRKQLNRSKFKELIQTLEITTFALEACGTSHYWARTIQQAGYKVKLINPAFVKPFVMSNKNDFNDATAIVVAATQPTMRYVSPKSTEQQDILMLHRIRERLVHQKTALINQIRGLLAEFGIVIKGGAKNLINELPFTLEDAENGLSPLGREQFYLLYQDLKQMDQRLNEQSLKIEMLAKQNPVASKLQKLPGVGFLTASAITASVGDPLEFKNGRQFSAWLGLVPRQNSTGGKNILLGISKRGDSYLRRLLVQGALTAIARTKGNDSQVTWAKKLRQAKCTQVAAVALANKTARIMWSLMAHDKEYQVM

SEQ ID NO: 112045 - protein, 404 aa, unidentified
MVTSMPTEAFLGVDWGGSEHQLCAVDDTGEVLIRRRVGHTTDGLAVLDDTLAELSVLRVRVAIERGEGLLVGHLQAAGITVYCVSPKLSSRARERYRLADTKSDAFDAFVLADTLRQQHDQWRPLAARSEQTALVASLSRDRERITLMQRAVESRLRATLEAYHPAPLHLFSSLDRDIALAFIRDYPNPVAASRMTVDRMARFCRRHHYSGRVDPAVLLARMQPHLLAGRPGTTAGKQIMALHLVDQLEMLNQQERDFNVHLAAAVAAHPDGALFTSFPGIASVIAGVMIGELGDDRARFPAPGALLAESGLAPVTRASGRTRQVRFRYAANKHLRHAIDWWMTVAAREDPWSKQVYDQARAAGHSRYRAYRGLGARWTRILWRAWTDHQPFDPDRGHHTPAGN

SEQ ID NO: 112046 - protein, 360 aa, unidentified
MIRERTSVGLDVHARSVVACGLDRETGEVVERRLTPDHRGILSWIEGLPGPVAVTYEAGPTGFCLARALEAAGIECQVAAPSKLIRPAGDRVKTDARDAAHLARLLHLGQITAVTVPTAEQEAARDLVRAREDCRGDLMAARHRLSKLLLRQGIVYYDGKTWTGRHEVWLRQQRFDRPALQLTYDAAFDAMTACVDRRERLEAAIEALAADSEFTPVVRRLGCIRGIATLTAFGLATEIGDWHRLSGRTIGAYLGLVPSECSSGSSRVQGEVTKTGNKHVRRLLVEAAWHHRSPYRPGPMLRRRWDLASPAARARGQAANRRLHQRWTNFDQRRKRSVVANIAVARELAGWCWSLAVLDQ

SEQ ID NO: 112047 - protein, 421 aa, unidentified
MKPQAPEAFAAFVGLDWADAKHDICLQVAGSTRREFLRLEHRPEVIDAWVCTLRTRFNGQPLAVCLELNKGPIVSALQNYDFLVLFPVNPLTVAKYREAFTPSRAKDDPTDAELQVEILLKHRDKLTPLVPQSPTMRALAQLVEHRRRLVGDKVRLTNRLTSALKNSFPHVLQWFQEKDTAIFCDFLSRWPTLKAVQLARRATLERFFRAHHVRSADVITTRIEAIKNAVALTTDEGVIAPNTLLVHALVAQLRVTLQAIADFDTAIAQRAQAHPDFPLFDALPGAGAVFAPRLLVAFGEQRERFTSAEELQKYAGIAPVTERSGKKSWVHWRWQCPTFLRQTFVEWAAESIRHSFWAQVYYQQQRDKGKAHQAAVRALAFKWIRILYRCWQERLPYDESTSLQALHRRGSSLIQNLAKAS

SEQ ID NO: 112048 - protein, 430 aa, unidentified
MRITCRAEKINLNHVVDVSVDVHKETLYFFFEIGGHEYSDKCQNRTSVIEKRLRRYHAIAFEHNKKSLRIICEPTGQYQNKLFRTARRLGFLTCYVNAESVAKFRLIETNDMNKTDTKDPRVISSLGKLNKTLRFRMLGEGYLMLRKLHKLYDETDVSLTRLRCRISKLLLELFCDYSFKKDFLYSRSGLSLIEHYGCNPNRIVADGFPLFCRTMKKSVPRIRTKTLERLWEDACNSVLNELPVGYVSILESRLDEYLDDFHREQERKEEMSKQMIVLLNHLRDKDPNIPPPTPHVISEKNMARLLGETGPLHDFSHWRKLLRYAGMNICMRQSGTYKGKNKLSKKGRPLLRKVLQQIALPLVRKGYLYGEVYHRKKEEEKRPGTMAMAIVARQFLRKVHGWYRSGKEFNEQRFFTCKSRYIELERAKAA

SEQ ID NO: 112049 - protein, 342 aa, unidentified
MKKCNVIGLDLAKNVIQVCKISSDGELIYNKAVSPNKLRELLVKEKSSIIALEGCGSCHYWGRLAQQYGHDVRMISPKKVKAFLQGQKTDANDALAIAVASIQVGMIFSQLKSEEQQIIQTVEKTRKFLDKSVTALSNHIRAFMYEYGITSPQGKKGLRETVTQVVSDEDHRLPINLHGMLTLLWERYKITLEHLTANEKIRGALVKKIEPCRRLLDLESVGPVGAARLYAALGNGKTFKKGRDASVYIGVTPKQHSSGGNVYMRGINKGGGDKELRAVLFQGAFSVIYKLPMQARTKKQAWLINLVARVGVKRAAIALANKTVRTAWALLVSGEKYKAELV

SEQ ID NO: 112050 - protein, 345 aa, unidentified
MKSMYYVGLDIHKKTISYCVKQVDGRIVQEGVIPARRQELDRWMKQLPGPWIAAMEATLFTSWVYEHLKPHAQAVKVAHPAMLKAIAASKRKNDRIDARKIADLLRADLLPECYMAPAPIRELRRQLRYRNLLVRQMTQTKNKVSGLLMECGIEYNKQKLHQKKYFRQLVASAEHMPPSLPPLLELSRTTLDSLGKMEKQLIQGLEKDPLLCQRLNCLLTIPAVGPITALTWALEIGEVSRFASHKQAVSYCGLCGAEDSSAGQLKRTPISKQRNQHLQTVLIEAAKLGPRLDRELARIHARELEHGNRNRATLAVARKLVGYLLAVDRRQSPFQRDRNTQQPAA

SEQ ID NO: 112051 - protein, 373 aa, unidentified
MKTSITHVAMDTHKKQHQVAWVHPDSGEIQEFTVANTVREIERMVQKIRKQVAGEIHVCYEAGVCGFVLQRLLEKRGCICQVIAPSLVPTKPGDRVKTDRRDAKKLLGLFAAGQWTQVHPPDATQEADRELTRCRECAEMDRKRARQRLHSLLVRHGYIYQDGSLWTNKHAAWLQALVFDQPRVRTVSDEYRSELEHCDQRLESLDKQLAQLATSEQYRETVAALRCFRGIDTLTAMTLLTEIYSFGRFSSPRALMAYLGVTPSEHSSGESRRTGGITKTGNRRVRRLLTESGWHYRHPPRVSKALKARRQDQPAWAIDLADRAALRLYKRYKHLTERGKPLPQAIMAVVRELAGFLWAMLHRLQSSLTPVSP

SEQ ID NO: 112052 - protein, 363 aa, unidentified
MQSVLAIDVAKGKSMVSLISSCGEVLIEPYEINHSINDFTNLLNKINKQKLDNVSVIMESTGIYHRPVERFFLENNFKVFVINALYSKMYKRNLRKTKTDKLDCISLSELFFTTDFREYIKPDDIYLNMNALSRQYHALDELCVNLKNRYKNLVYLCFPEYELIFKKKTIYSDLALSFIEKYPHADIISNTRIDALQNFFKKNGFRHWKKKPATIKEYAINSYPSVSKDDEITSSLSQLARLINTYQKEIEKIKYKIIFLGKKTKYFESINSIFGIGEFTTSLIIAEIGDINRFKNIKELTAYCGLDPSIKQSGKSINIKGPISKSGNKYLRKILFVSILNILSVTRVCHIENDIETYYRKKT

SEQ ID NO: 112053 - protein, 538 aa, unidentified
MSRSLARRKRSSARASKARKPYRLQKPGGILQPRVQRVGPDHFGILCCDCGKHGSKYMLADFYGKPLLEPTRLRHTRGDLDAAIGRIRQAISQHELHDFVVAIEQTGEYHRPLQRAFRALDWDVRLVHPYATSHARQPADPGNKTDDRDLAAIFRVTVNGFGLAEATWPEVYQDLQLLRRHRRDLVEKCSQLQCQIREKLHAAMPGYAELFAQNHFWDNQCAMFLVRRTGSSQLVQQLGASGLTRLLTEANIRSPKSIVHKILAWAEDAPPAHPQTAVLQSIIARLDDDRLEKTRQINEIERPLASLLVRTPFVLLLAIPGINIVSSADLAGELGPIWHYANPNRITGRAGLAPCRYQSEGVDVYGPLRRAGNRKLRGVLMQIADNLVRHNDYYRARAQRWQLRHQDPRWIRVKVAKSFSRLAFAMLISHQLFSHPCCQERHYILGKLLEFHTEHGSMSALFEQDMLAACEQLPRKLLREEAVPVRDLLDKLACKRGPQPMADILMIVLARLELRRLQSSARAEDPNSRAPAQEPTTP

SEQ ID NO: 112054 - protein, 388 aa, unidentified
MLLDHLSNGPTAIRTQFGAIFVSLELSRSNWLVTSLSPGKGEKMSKHSLTAGDVAGLMKLFADLRRKAQARTGESYPIITIQEAGLDGFWLHRVLQQNGIESHVVDPASIATPRRRRRAKTDRLDGETLLRALLAYKRGEPRVCAMVVAPSPEEEDRRRICRERRALIAERITHVNRIRGLLFAQGISDYEPLRRDRRARLEALRTGDGRELPAHLKAQIGRELDRTELLLEQIKAVETERDGLLAAARKPASEAAPDAVTMLLALKGIGSNFAAVLWSEAFYRQFSNRRQVAAYAGLAATPWQSGGIRHEQGVSKAGNPRVRTTMIQIAWLWIRHQPQSALTRWFKERSPQGRKRAIVALARKLLVALWKYVTQGVVIEGAVMKPAA

SEQ ID NO: 112055 - protein, 342 aa, unidentified
MENIGLDLHQRESQLCMLADTGEVLERRIRTTPERLTAVLGPRAPARILLEASTESEWVARHLEALGHTVIVADPNYAPMYATRSGRVKTDRRDARTLAEALRLEAYRPAHRSADRHRHVRAELAVRDTLVRTRTRYVALVKSLVRREGLRLASGAAEHTLTKLTALALSPDLTAELAPLVALLPGLDREIAAADRRLAQSLATDPVVRRLATAPGIGPVTATAFVATLDDVTRFGTAHQVEAYLGLVPSERSSGERQRRGRITKAGNTRLRWLLVEAAWRVLRSPRPDAAPLRAWAERIALRRGKRIAVVALARRLAGVLYAMWRDGTAYQSQRRGDEAAA

SEQ ID NO: 112056 - protein, 459 aa, unidentified
MNRKRSKPKIDRTMQTVHPNAAAIDVGATMHVAAVRADRTPEPVRSFGTFTADLHRLVDWFTECGVETVVMESTSVYWIPIFELLDARGFAVFLVNARDAKHVPGRKTDVSDAQWLQRLHSYGLLRASFRPKGQIAVLRAYVRQRERLLEYAASHIQHMQKALTEMNLQLHHVVADITGATGLRIIRAILAGECDPKVLARLRDYRCHSSTETIEKALTGSYRDEHLFALEQALALYDAYREKASACDARIEAVLKELCIGRGRGSEPLPLPPSRRHRTVQTNALAFDVRTALFALLGKDITKIDGLGPYLSLKLIAECGDDLSSWPSSKHFTSWLCLAPSNKISGGRVLSSRTHRSGSRAAALLRLAAVTVGRTDTALGAFYRRLSARIGKAKAITATARKIAVLFYNAVRHGMEYIDPGASFYETRYRTRVVDNLRRRAKAFGFVLQPTEPTPAVVS

SEQ ID NO: 112057 - protein, 448 aa, unidentified
MSERTIACEAPCISMTPDGTAVRATKGKHMKPWTEITHYAGFDWARNHHDVVIVDRTGHRVADLRFDHSLAGWQQFREHIKNHPALAVALETSQGAAVDQLLQLDCTVYPVNPFSAKSYRERKVPSGDKTDQLDAWSLAEALRVDGQNWRPLHRLDPLTQQIQMLCRDEIALIEQRTALVNQLQQALCEYYPAALQAFDDWTQPFCWDFIVQFPTSAKLVAGGRRHWEKILHTHKLWRPQTADTRLEIFQQADQFCGSAAVTAAKSWLALSLVRVLQALHRQLEGYRQQIEALFKQHPDHDLFGSLPGVAQTLAPRLLGEVGGDAQRCPDTAALQCLAGTAPVSFQSGQIHRVHVRHQCHKVLRHTVHLWAQCSLRVCPWAETYYRQKRVEGKSHACALRCLGQRLLKIPGRMLQTRKPYDADLHARNQKQHGSWVLTLMKPALKTGE

SEQ ID NO: 112058 - protein, 316 aa, unidentified
MTETQHFVGVDVSKRTLDVMVRPTGGLWSVANDEQGIAELRERMLELRPHLIVLEATGGHERELSIALVLAGLAVAVVNPRQVRDFAKAVGKLAKTDRVDAGVIALFGERVRPEARGVPEEEASELGALVTRRQQLTEMITAEKNRLGLAKRTMKPRIREHVQWLQRQLADVELELRRMVESSPIWRARENLLTSAPGIGEKTAYALIAQLPELGRLTSKQIAALVGVAPFARDSGRYRGQRKIWGGRASVRSALYMATFAAIHCNPIIRAHYHHLRNRGKEFKVAMVACMRKFLVILNTMVRFNTPWCPAALPRA

SEQ ID NO: 112059 - protein, 459 aa, unidentified
MNKVKTKTAKTKSIIEMPIVNPYSAGIDVGDKELVVALPEGLAEQRVRTFGTMTCDLEQIVDLLKVCEIDSVAMESTGVYWKPLFSMLVRNDLEVYLVNAGHVKNVTGRKTDENDAMWIQKLHSCGLLKSSFLPDDEQEALRTLVRYRKTLVQDSSRFVNRMQKSLELMNIKFHTVIKDITGKTGKAIVEAIIAGERKAANFLPLIGKGIKADLFTIEKSLQGNWREEHLFTLKESYTIYKQYREHIAVCDIEIEKQLQQYEAKRNEGIIEETAAAKKGEDHESVKKQRAKNHPRFDVRGYLQRIYGVDVLSIYGLNSVGGLEILAETGTDLSKWKNEKHFVSWLNLCPNNKISGGKLISSKLLSKKPSPASIAFRHAANGVQKSDHWLGDYFRRMKTKGGNKYAIIATAHKIATIFYKMVRYKEEFKPMDLALYQQKYKQAKIAYLERKLMELKKQVA

SEQ ID NO: 112060 - protein, 345 aa, unidentified
MLHVGMDLSRHRLDVRVLEDGGATVAELVVAPTEPELRQLAARFKPGGPVRGVIESMNGARFVHDTLELAGWEVEIADAQKVKGLAPLACKTDRIDAWVLAELSRRDLVPAIWLPDPAVRAHRERARFRLHLVHHRVELKNRIHASLITFGHACPTSDLFGRVGRQRLTELEFPEPWASDITAAVELIDHLNAQIATIDTDLRREGADHPYVPLLMTVPGIGWILAYTIAAELGDITRFPTPKKLCGYTGLCPRVYQSGSVDRRGRLAHNGPKYLRWALIEAAVHACRHEHYRDHHQATKVRLGRQRGAKVARVETARKLTEAIWHMLTKGEPFAPQVPRQSLAA

SEQ ID NO: 112061 - protein, 323 aa, unidentified
MKRIAVDLAKSVYQVAESVQVGRVDRRKRLDTGAFARYVQEQIEPVEWVMEACGTAHHWGRLMQEKGHRVVLLHPRYVRPYRRRNKTDRNDCDAILEAARCQDIRPVPVKSVQQQQVQQLHKLREGWKKSRVQRINLLRGILREAGVEAPNGIKPFLRQACELIERPEVRALRGALQVVLAEINLYEQSMRGCEEQLAHWHADDEIVHKLDEVSGIGLLTASAFKTAVGTPERFASGRQLSAWLGMTPSEYSSGERRRLGRISCKGNVYVRTLLIHGARAALLAAKRCKARTPERLTQLQSWALQTAERIGHNKAAVALANKL

SEQ ID NO: 112062 - protein, 391 aa, unidentified
MRERITEMQMMIEGQSHFQPFGLSYWGFEDLNKGVGSMTASYEYHIGVDYHKSYSHLVVQDSSGKTLRSGRVKNDRQSLGGFLERYRENSHAVVEATRNWMVMYDWLDDICDDVVLAHPLKVKAIADAKIKTDKIDATVLAHLLRADLVPEAWAPSERSRDLRVALRERMFYVRLRTMTKNRIVTVFDRYPEQTAQLKKLGDLFGKAGRVQLAQVNVSEIDRIQIDRGLAFIGDIDMRIKQSEATIRSMTKANANVKLLKTIPGIGEFFARLIDAEIDDISRFRHPKKLAAYAGLVPSTYSSGGKTFHGKIIKQGNKWLRWAFVEAVTPAIASDPQLRAQYEQLKIKGINKARVAIARKLLTIAFQILRDQRAYEPRGTATMEGATISRLS

SEQ ID NO: 112063 - protein, 381 aa, unidentified
MKRNKKLTPTSHEQTEAQAEVIKLGIDIHKTKYVVIRQIDNQAAQSPQSFSPDDFVVWAQRQRLLAKRVVSCYEAGCFGFVLHRKLAEVGVENYVVRPRNWDEYGSSVKTDARDARELCGHLDRYLAGNDRALCVVRVPTEEQEQARALSRQRETLAKERKRLQNVGTSSGLYHGVDVPANWWKPKVFAKLCTEIPEFLKRILEPFQQVLEMIDKHLRETTAREERKANRKIPVGLGALTTSILDQEFVDYTRFNNRGQVASFTGLCPRETSSGNKRQQHSINKHGNPRIRHMLLEAVWRMIQFQPDYKPVLHWNKRKASEPFGAAKKKKMAVAIARQFAVDWWRIQTGRIEPEDVGLRIEFPSAYSTRALREGRVSKVYA

SEQ ID NO: 112064 - protein, 359 aa, unidentified
MQTQSNQLNFAGQNIYAGIDVHKASWTVCIFSEKLEHKKFNQPPTVEALKSYLHRTFPGATYHSAYEAGFCGFYIHYKLLEAGIHNIVVNAADVPTTHKEKDNKTDKRDSRKLGRSLRAGELTGIHIPARKVQEDRSLLRLRYTVRKDLTCIKLRIKSLLSFYGIEHPEQFSSPNKHWSRRYMEWLKTIYMEEESGRAVFQILISEVEEMRQVQLDVTRKVRILSQTKSYAKDYELLLGIPGIGLITGMTFLTEIGDINRFPSADHFASFVGLIPSCRSSGEKENNGDITSRAKTILRDLIIESAWSAARKDPALHMAFCDLCKRMEPNNALIRIARKLLNRMYHVLKTKTEYVCGTVK

SEQ ID NO: 112065 - protein, 356 aa, unidentified
MTFAGLDVHARSTHVAALEVASGELKRIRFGPGSEEVIAWLAALPQPVHGCYEAGPTGFALYRAAEQAGLRLDVVAPSKTPRAAGDRIKSDRKDAELLCRLLMAGQLKPVTVPAPAVEAARHLARAREQVRVDLMRCRHRVSKLLLLHGRVYPERSTWTQAHRRWLSRQRFEQPASELAYLDCLAAVDGLVARKQELDERLSRLALEGEWWPTVARLRCFRGIDTLSALVLCLEIGDWQRFARPAQLASWLGLVPSLDQSGESRLQGSITKTGSSYARRLLVEAAWHYLREPRIGVTLRNRQQGQPAHVLQIAWRAQHRLYRLQRRLRERRKPSNVATVAVARELACFLWAAAVAP

SEQ ID NO: 112066 - protein, 425 aa, unidentified
MNFNTNEKINQVSENTLVIGIDIAKRKHYACAVDDRGRILQKSFPIIQSKIGFDDFYERLMTLKEKHEKQEILVGFEPTGHYWMNLAAFLTHYGIPFVMVNPMHVNRSKELDDNLQTKNDQKDALVIARLIRDGRFSYPRLLEGVEAELRNGATLRSKLQEDLNALQNRIIRWLDRFFPEFTQVFKSFGKMAYAVLEKTPLPMDIQRKTPEELLCLYRQVDGLKSPQLPKAKQLVRIAPHSIGLTEGLVMARFEIATLLSQYHMMQAQLDELTCQLTALAKQMTDYDYLASVPGIGDITIVDLLSEVGSLTQYAHPRQLIKLAGLTLRENSSGQSKGQKRISKRGRRKLRALLFRVMMPLILHNSAFKALHEYYTTRTKNPLRKKQSIVVLCGKLLKILHALCKKKVMFDEHQMMTDFTVLKAAS

SEQ ID NO: 112067 - protein, 400 aa, unidentified
MISVGIDVSKGHSTICVLKPYGEIVSVPFEVEHTEQDLQQLVEQIQSFSDGELRVVLEATGIYHLPVVAFLQQQGIFVSVINPLSMKKYASIALRQGKTDKIDSVKIANYGIDNWYHLVDYQPETETYQELRLLSRQYLHYTSLKIKAKVNLTNLLDKTMPGIKPLLRSQSEHSNQEKLCAVVNRYWHFDNITRFTESRFVKDFAAWGEKQHFYANEKKARDIYAVAQQGVTTLSSHLPSTKLLVQAAVRTLKELEATLSLILQEMQSLAELLPEYQVAIEMPGIGPTLAVRLIAEVGDVRRFHSANALIAYAGLDSPPHQSGMLVKKRSISKRGSPALRKTGFEIISSIRKTKPSVDNAVYLFMLKKQEEGKPVKVAKIAGLNKFLRIYYARAKEAYLN

SEQ ID NO: 112068 - protein, 345 aa, unidentified
MEVYAGLDLHSTNTYVAMVDGENKVLYKQRHKNEAPAILSALDPFKKDIRGVVVESTYNWYWLVDALMDSGYPVHLANPSAIKQYEGLKQIDDKRSALWLANLLRLNILPTGYIYPKEERPTRDLLRKRLQLVRHRTSHVLSVKNIFARNLGIRMKSNEVKRLTASEVKILFSDKEMRQAVMASVGLIGHLQKEIDGIEEAITKKLKIKKEFGKLLTVPGIGQILGLTIMLEVGRIDRFPTVGDYASYCRCVTSTRTSNGKVTGYGNSRSGNKYLSWAYVEAAQHARRFNEPIRSYYERKTARTNKIIAIKALSHKLARASYYIMRDGVEYDSQRLTRGEGNQHV

SEQ ID NO: 112069 - protein, 341 aa, unidentified
MSFTNTFDYIKTFIGIDVSKQWLDCIIRPSGDWTRCENQPNGFDQLDRWLRERDVDPQTSVICMENTGVYDDRVLQALTEKGWICCLEKTTILEKVTPDHHRKDDRFDAAGLAEYAERYLDKLNVWEPVDEEIELLRQLFSERRRLVTQRAAVKSKCTQSLHHTQTSSVVAQSWQQQLTFYTEHIDQIESRIRTIIKGHQGMTTYDDLIKSIPGIGEVTSWLWLILFYGQTDLDYKKIASRFGYAPHSKRSGTSVKGKTRSSGHGASEVRQCLCMAVRSASTHCEKFKKYKQKKLDEDKIWPIVRNNLANKLIKTICAIWNSEQPYDPNHTSRFDRQKKAA

SEQ ID NO: 112070 - protein, 339 aa, unidentified
MKLTPVGIDIAKSVFQVHYVDQETGEIANKPIKRAKFLEYFANRAPCLIGMEACGGSHHWARQLTNMGHVVKLMPAKFVKAFNIRNKNDAADARAIWMAVQQPGKAVAVKTEIQQAMLALHRMRQQLIKFRTMQINNLRGLLMEYGEIMSKGRNKLNKEIPVVLERIAERLPAVLIDTFREQWNGLTKLDEQVAEIERRMREWKKEDKAVKAVSEICGVGLLTATAAVSMMGDPKAFSSGREFAAWVGIVPKQTGSGGKVNLHGISKRGDTYLRTLLIHGARSVIQHAKEPGEWVEQMMRRRPKNVVVVALANKMARTIWAVLAHDLPYQKAYVSVKPA

SEQ ID NO: 112071 - protein, 343 aa, unidentified
MQTITTIGLDIAKSVFQVYGVDATGQVVIRRQLKRRSVLMFFQKLPSCLVGIEACASAHHWSRELQALGHAVRLIPPAYVKPYVKRQKNDATDAEAICEAVTRANMRFVPTKTPEQQGGLVLHRTRHLFIRQQTAVINAIRAHLAEFGIVAPVGRHGVEELLNVVADPSDKRVPEMARTCLLAFGAQLRRIKEQVLEFDRLIRAWHRSNEVSMRLDEAPGIGPVLATAVVATVADPTSFRSGRNFSAWIGIVPKQHSSGGKNRLGNISKQGDRYLRGLFVAGALAVIRYAKIHGTKHRPWLTALLERRPTKVAAIALANKLARMVWAMMVKGERYKEPVALAR

SEQ ID NO: 112072 - protein, 335 aa, unidentified
MYYSGIDLHTDNCYITTLDEQGALVKQQRVENISELIVDYFQRLPGPHSTVVESTSGWYWLNDLLEDHGIELVLAHAKYLKAIAYAKVKTDKVDSHTLATLLRLNLIPRAHKISRQLRGLRDTMRLRLRLVQQRTASLRRIDSIAVKFNTTTAVPDPYRFQLSVLEHTRNAFTKEILALEKSLHPVLIPNDDVQHLLGVPGIGKLTAFSLYLEIDGIERFASDKHFASYCRLVPAADNSNRRQHHRSSKDGNKYLKIAFSEAAVHAIQYYPEFKRFYLRLARRSNEAVARTVVAKELAKIVYYILKNKTDYKGFKGQPISRAKSLQWPRRSSSHA

SEQ ID NO: 112073 - protein, 341 aa, unidentified
MGQASTIGLDIAKRVFQAHGADATGRVVFRKRLVRAKVLEFFAGQPPCLVALEACGGAHYWARELGKLGHTVRLIPPAYVKPFVKRQKNDVADAEAICEAAQRPGMRFVPVKDEAQQANTVVFRARDLLVRQRTQCINALRGHLAEYGHVVPQGPAHVDSLVALVEDPKSSVPESARGILQVLIRTLNALEEQLKELDGEIARRAKADPVARRLMTIPGIGPIAATAITALVPAPEGFRAGRDFAAWLGLTPLQKSTGGKHKLGAISKMGERTIRRLLILGASAVVRWASRRGAAAGSWLARMLARKPRMLVTTALANKMARIVWALLVKGGTYRAPAVAA

SEQ ID NO: 112074 - protein, 352 aa, unidentified
MRTSQKTTGIITTIGIDLGKNTFHLVGFDQRGVIILQQKVSRAQLERRLANIPRCLIGMEACSGSHHIGRQLAALGHDVRLMPAQYVKPFLKGHKNDYRDAEAIAEAVQRPTMHFVAIKTPEQMDLLALHRVRSRLVSQRTGVTNQIRGFLIERGITVRQGVAPLRKALPDILSSQTGPLSPRMVSLIVDLVQDWRRLDERIAAVSAEIEALAQQDDSCQRLMTVPGIGPIVSSAVVAAIGNGAGFQQGRDFGAWLGLVPKQESTGDRTILGKISKRGNKYLRTLFVQAAHVVLERRPRAAMRGLWPWIEQASKRLHRNMLAIALANKLARIAWAVLARGRAYQPRIAANAA

SEQ ID NO: 112075 - protein, 339 aa, unidentified
MTVVTVGIDLAKNVFAVHGVNAAGKAILVKPLVRRAKLLELIATLPACLIEMEACSGAHYWAREFQKMGHTARIMAPQLVSPYRMGGRHGKNDAADAVAICEAVARPNNMRFVPVKSIEQLGQLFVHRAHQGYVSERTTLINRIRGLLSELGIVLPQAFKAFLSGVAQVLEDLPGYCNQVIGDLLNELFHIEEKIKNSEKLIQQLARDNSAAQLLMQFRGVGPMTATAIVASIGNGHDFRNGRQFSAWLGLTPRQQSSGGKARLGRITKAGDSYLRTLLVLGAKSVLLGAAKNDDPVSKWALQLKERRGYGRALVAIAAKNARMCWAMLHLKDEFRFPV

SEQ ID NO: 112076 - protein, 412 aa, unidentified
MEVLYPHCAGLDVHKDTVVACVRHMVAGTVKREVRTFKTTTKELLALSEWLAAEGGTHIAMEATGIYWKPVWHILSDGDFVLVLANAAHVKNVPGRKTDVNDATWLADLVAHGLIQSSFVPDEQTQEMRTLLRTRKQLVRECSRHVQRLQKTLEDANIKLDSVISDVMGLSGRRMIEALIAGETDPAALAAMAHRRIKATPDELEAALRGRVTRHHRFLLQLHLQQIDAVNAAIDQIDQEVDADVEPFRATVHLLTTIPGIDELSACVILAEIGRDMSRFPTAGHLISWAGLCPRNDESAGKRRSTRMRKGAPWLKTTLVQCAVAAARKKASYLQAQFHRLRARRGAKKAIGAVAASILTAAYHMLKTGALYEDLGADHFDKRGKGKQIDRLVRRLQNLGFAIEITPVAAAA

SEQ ID NO: 112077 - protein, 454 aa, unidentified
MRKPQVVPDEDHEVICERVAAVDVAKASGVVCVRTPDPGRPGRFVNRIWENVPATRARVAELGEELLRCQVQMVTLESTSDYWRVWYYVLESAGLAVQLVSASQARNLKGRPETDKLDAMWLARLTQWGMLRPSFVPPAAIRAVRDFTRARQDLVHERTRCLQRLEKLLEDAMVKITSVVSDGMKAKSSVAMVQALIAGERDPRTLAGLAKGPLRAKRDALAEALDGMFDSHHGVIARMLLDQVAFLDQRIKEMEDQAVAALAQVQESWGVDVAGETGPGCGTGPDAQVLAAAYRLAEIPGISVWLAIVIIAEIGLNMALFPTPAHLVSWIGLCRSARQSGARHGKGKQKKGNSYARAAAGQAAIGAAGTHTFLGERYARIARRRGKAIAQVAVARSIMIIVWHLLSDPAARYRDLGPDWHARHTNRDKKIRTHLQGLQALGLTVTITDDEQAA

SEQ ID NO: 112078 - protein, 450 aa, unidentified
MDKKSKAIESLQLAVIHPRSAAIDVGSMMMMVAYTDKDGNQNLLEVDAFTASLQHLAATLHKAGVTHIAMEATGVYWIVVYEILEQQGFQVTLVNARHFKNVDAQKTDVKDCQWLHQLHASGLLRASHIADEVYRELRSYLHERNLLQKQKSDTLNRIHKLLTQMNIKVQHLISDIEGVSGMKLLCGIASGITDAKELLALIDVHKLKAGEEDLLKSLQGIYKKQYVTILKNTLRSYDFFKAQMRVYEKLIEEVLNKMLPEDGNGNKAVIKSKTSYTRKNQYRINLKEYLKHIIGVDVTRIDGIDEISALEIIAVTGLNMSKWPSAEHFASWLNLSPRPKISGGKIIGYEKRPTNNNATQAFKMAAQTMWQNKGSLGHLYRRLSAQKGSKKSNKAIARKLAVIFYHMVKNKTEYNKNKLQVNTERQRAKRISFLNKEARKYGYVLQNAVD

SEQ ID NO: 112079 - protein, 345 aa, unidentified
MEYFAAIDVSLELSSVCVVDGTGKIVCEKKVASEPEALAAFFRGSGLILTRIGLEAGPLSQWLHAGLTAAGLPAILIETRHVKAALKAMTVKTDRNDARGMAQLMRMGWFRPVHVKTVPAQEIRALLTGRKLLLGKLRDVELGIRGLLRGFGLKVGQVSKGRYEARIRELTGGHPMLEPVAAAMLQARVSLRAEYGKLHRMLLGIVRTDATCRRLMTVPGVGPVVAVNYKTAVDDPARFRKSKDLGPYFGLTPSKYQSGEVDWTGRISKVGDAMVRTALFEAANVMLSRVTRFSTLKAWALRVAKLRGMKRAKVALARKLAVVLHRMWVDGTDFRWRKMPAATAA

SEQ ID NO: 112080 - protein, 371 aa, unidentified
MKKCSRFVGLDDSKNSIDVAVASEDRDGEVRSYGTIENTPESVRKLVRRLGRPKDLYFVYEAGPCGYGLYRELLSLGANCMVAAPSKTPRRPGDRIKTDRRDALVLARLHRAGELHPVWVPDEETEAMRDLTRAREDATYVQTKARQRLLSFLLRHGRRFPGRSHWTKAHLKWLADQKFAQPSQQICLDEYVEAVKQASARVQRLEAQVRELVSEWSLGPVVSAMTAHRGVSLVVASTVCAELGDLTRFDRVRELMGFVGLVPSLHATGLTRRTGAITKTGNGHVRRVLVEAAWAYRHPARRTAHMRGKLEGQPEEVQAISWKTQVRLCGRHRRMIARGKHPNKVTVAIARELLAFLWATARMVRPMSPVA

SEQ ID NO: 112081 - protein, 430 aa, unidentified
MTKRSSTPADAVLVAIDMSKHRQEVLIERPESGRRRRMTVMATKADYDRLATDLGDIGRPIIVGFEATGNYHRTLAHRLLTAGLELRLISSVALARTREALHNGWDKNDSKDAQVILHMLRIGATQRYVDPLAAGINDLQEMSKTHEAISKAKTQTWHRILTHYLPLYFPEIERFAGNSRSDWFLALLERFPTPASMTVIGQEAFTREAWSLVGRKVSKARLINDIYETACASVALPVAEDSVAITMFRMVIAQARSLIRQRDEIERTAHDLLSENRDYQLLRMIPGIGPINALTILAEAGDLRRFAHHRQFLKFCGLDLATCQSGTFRGRTKLSKYGNARLRRTFWMAAQVAARQRDNSFRDKLGRYMEGHPNDPDRRRKAMTALTAKMARVAHAVIKTGTEYRPFLERADTRWKDPSLLCREGAIATL

SEQ ID NO: 112082 - protein, 341 aa, unidentified
MEEYIGLDVSMKETAVSIRRADERIWRGKCASDPSVVAELIRKRAPSVKRVVFETGPLSVWFYHSLRTEGLPAICIDARHAKAALDMATNKTDANDADGLAQLAEVGFFREVRVKGFDSMLTRTLVAARTRLVRITTELSNQIRGVMKTFGLLVPAGKGSTFEKNVRSLLADRDRLASIVLPMLEAWRGIRVRAAELGRQLVRDARQSRACRILMTIPGIGAITATSFTTAIEEPDNFRKSRSVGAWIGLTTRRYQSGEVDYDGHISRRGDRPLRGLLYEAAAVILTRSSTHSTLRTWGLQLRERIGFKRAAVAVARKLAVIMHAMLKTGELFNPNAGAAA

SEQ ID NO: 112083 - protein, 409 aa, unidentified
MLYVGVDWAEAQHAACLIDAAGAVVRRLTIEHRPAGLARLREAIAAVESEPAAVLVAIERPDGLLVDGLLAAGYVVYALNPKAVERYRERTRLSGGKTDPADAELLARILVTDRDRHRPVRPSGPLVEELRVLARQDEAASRDQTRLQNRLRQDLLAAFPAVLDAFPELLALSALRFLERWPTASAAGTLTVAELVAFLREQGHFRADAAAARIHAALHADILAAPSHLAAARAGAIRLAARQLLLLREQRAVWEKRLRELLSGDRPHPDGEILLSLPGLDARLAARVFGEIGDRRERFPTPAALQSYAGTAPVTKASGRARVVTARAACNRFLRQAALRWAFCSLTHSAWARTYYDEHRRAGKAHFSALRSLANRWLRILHHLLATAQRYDEAVHQRNRAHASAGTAA

SEQ ID NO: 112084 - protein, 413 aa, unidentified
MSYKIAGIDVHKKVLMVVVIDATTPEGKPERRRFATMASDLRRLSTWLREQGVQEAVMESTAQYWRSVWLELEPCMLLHLAQAFSNRAPRGRKHDFKDAERLVRRLIADELILSFVPDGEQRTWRNMTRMKTQLTRDRVRLQNQMECLLEEMRIKLSIVVSDLLGGSGLRMLRALADGETDPKKLAALGDDRLKCSEEQLVDALTGRPEPMHRAMLGLQLERLQLIDRQIAQLNRMIAQAMKPHQDAVIRLAEVPGLGVDSAQQVISEVGPQASTFASAAELTSWVGTCPGKEESAEENHSSRSAKGNKYLRRVLNQAAHAAVRKNGSHFQAVFRRLLPRLGYQSAIWAIAHRLCRVIWKILHEGVRFIEQGSESDPKIRKQRARILARALYKIVPVTPHKITNLRFFLLHSQ

SEQ ID NO: 112085 - protein, 429 aa, unidentified
MTRISAGVDVSKNRSTVCIMDQDGKVIMRPFLVWHSTEELDFLADTLKRLNGEVRVIMESTSIYQYPIALHLKEKGIFISIVNAYKVKKFANTDFRGGKTDKKDSRTIASYGISYWYKLVEWQIPKDTYFNLDLLNRTYMNAKKHRQIILQELQHYIDCAMPGMDKELHSLNLSTKKDFMLDFVEKFWHRDEIVNMTEAEFTEVFTAWAKKKGYRPVEGKAAKIYAIAKSCIPYYPANPTVKTILQCIVDKLSGVNRTLVTIVTQMIEEAKKLPEYQIVREMPGVGDPLAARFFGSAGDIRRFKNSKALVAYAGIDSPPDESGDFSSTHRHITKKGSKVFRDTGYEIMMALRAQKRTWEKVRKNPEVYDYMLKKEAEGKPRKVAKIAALNKFLRIIYARIKELYDNMALAERAKAKTRSKTKAKTKATA

SEQ ID NO: 112086 - protein, 346 aa, unidentified
MVEYVGLDVSKEATAYCVKDEAGTVLARGKVSSDPDALFEVLKAHCLCPERIVLETGTLSHWLARELGKRGLPVTIIDARRAHAVLRLQHNKTDENDAALLAELARTGFYRAVAVKSERAQRWRILLKARAHLVAQRRSRQNVIRGLLGTLGLRFARGSGKFARRVRALLVGRPELAVVFAPLLDELAALERSIAQLDRVVAAEAKAEPACRLLMTVPAVGPVTALAYLATIDEAGRFGKSRALGAYLGLTSRRNQSGEMDYSGRISKQGDSLLRALLYGVANSLLTRVRRAHPLKAWARRVKKRTSHKKACVALARKLAVIMHRMLTTGEAFAWPQADTKESATA

SEQ ID NO: 112087 - protein, 364 aa, unidentified
MERVQYVGLDVHKKAIEVSVLNGENAAPEIEKALPNQETRIKVFFERLKMQGSVIACYEAGCVGFELQRILESIEIPCIIAAPGLLPRRPGERVKTDRRDARKLARNLRNGEVTPIHIPTREDEAVRDYLRMQGDFKVERKKTKQRLLHFLLRHNLIYTDGNHWTGKHEKWLRALEFDNPVLKETFDEYFFHLKELEEKIGRMKEKIEEIALRDSYREPVAKLKCLKGIETLTALSMVVEVGDFRRFMKAEEFMAFLGLVPSENSSGDKRKQGGITKAGNSHLRRLLVEASWHYRFDRGVGKCLVARRKGQPVCVVSYANKAGKRLSRKFNRLIFRNKKSQVAVTAVARELAGFVWGMMVGQTA

SEQ ID NO: 112088 - protein, 438 aa, unidentified
MKVLHERVAGIDVHKDMIKVAIRSPGDKPWTRKTEVFEFRTFYGVLQEMARELRRRGVTHVVMEASGVYTEPVYHALCELDFTEVIVVNPAHVKALKGHKTDARDCARMAELLECGLLHGSFIPSAEQKEVRDLTRYRMKTVQARTSEIQRLHKALESAGIKLGSVLSDITGVSGRLMVDALIDGERRGQVLADLAKGSLRSAGKQADLSMALTARFTEHHAMMCRLHRDQIKLADHAVAKLDGQIAGMAGRWPRELGLLRSVPGFGEVVSAAWLAEIGPAPHRWFPSHDKLASWATLCPGNNISARKRKSGRTGDAGTYIKPMLIQAAWAAIQVRGRLQARYRRLVRRFGGDKNPGAKKKAITAIAHTLLKIAYQVLKTGQPYTDLGADLCTRRESPQQQHAYLERRLQKLHPGCTVTITISPPPGSPPPGTPAEAA

SEQ ID NO: 112089 - protein, 350 aa, unidentified
MSPRNAPRLAAVYGVDIGKNIFHVVGLDSGGEPIQRARFRRDTLLQFFERAAPAVVGMESCAGSQWIARRLHALGHKVRLIPAQFVKPYVKSNKSDIIDAEAIAEAATRPTMRFAAIKSEEQADLQALHRVRDQMIGTRTRLINQMRAFCLEYGIALRQGAGLFKLDLPLVLDDASNDLSPAMRKLLSDLFADLRRLEQRIDDVTREIAGIADREDVARRLMTIPGIGALGATALLAAVGNARQFQKARDLAAWLGLVPREHSTGGKQKLLGISKRGNRYVRKLLVHGARSCFRHLDRTRDRLGSWLDGLQSRMHPNKAVVALAAKMARIVWVVLTKPGALYERRDPAFA

SEQ ID NO: 112090 - protein, 373 aa, unidentified
MPRYSTAFGMDVHLRSTTVCALDAETGEAVTRRFRGNPWGEVAEWMSGFPGPSLAAYESGYLGFAPQRELSGLGVDCVVAAVSKVPRSAADLSSKNDRSDAARMAKAILSHDVTPVWVPSPKIEGLRDLAAAHDAATARLAAAKQRLLAFLARRGYAYGGTTPAGNPRKYWTYGFLRWLDGIHPDDDGGIRALAALRNEVEAADETREALLAEYRAAVAAGPLSAEVEALQSIKGCGFALAAAFASEVGDFSRFRSGRQVTAYFGLAPKQRSSADSVRLGGISGAGNALVRKLAVEGSWCYAQAGHQPKLMPKGSGVPLEIRMHGRKGSERLLRRREEMLERGMPQAKANAATAAELVRWLWALGTMCREAGE

SEQ ID NO: 112091 - protein, 341 aa, unidentified
MKLTTMGIDLAKNVIQVHGADERGKRVLKKQLKRAQVLPFFANLTPCRIGMEACGGAHYWARKLQGLGHTVQLIAPQYVKPFVKRNKNDAADAEAICEAMMRPNMPTVPIKNIEQQAILSVHRARQGFVKARTAQANQIRGLLAEYGMAIPKGIGHIAQRVPEILEDGENDLPGSFRALILRLLDHLKDLDRQVGELETDIQLWHKNNAASQKLAKIPGVGPMTATAMTASIGDARNFENGRQLAAWLGIVPRQHSTGGKATLLGISKRGDTYLRTLLIHGARSVVRVAERKPDADPWIKQLLARRHKNVAAVALANKNARTIWALLAHDREYQAHYAVAT

SEQ ID NO: 112092 - protein, 313 aa, unidentified
MTPKTPIVGIDVSKDKLDVAVDPTGECFQVANDADGWQTLRRRLEEIGPRAIGIEPSGGYEWGVIGALLAAGLPVKMVDAWRLRQFAKASGVLAKNDRLDAAVIARFVDLMPCRAARREPELEPLAELVWARHQAVEDALRYANQLERARHGEVRRLLTRHIRRLEADRLALDKRIAATIAANPVLAERYKILCSAPGVGPVLAATLIAFVPELGSLTRAQVGALVGVVPYDFDSGRMKGLRCIFGGRAKVRRVLYMAAQAGAQWNPVLKAFKKRLIDAGKKPKVAIVAVMHKLIVRLNAMLRDNAKWDQNHA

SEQ ID NO: 112093 - protein, 418 aa, unidentified
MERMFEVAAGIDVHRDELVVSVRRRRASLGDGVETRTFETFHDGLTAMTKWLQEQGVEVVGLESTGVYWQPVVRAIQGSVPQAVVWLVNPAQVRKVPGRKTDVSDSQWLSKLVMYGLVAPSFLAPPELQELRKLTRHRTKLTADQTRHKNRILKELESDGIKLATVCSDALGKTGRALLDAMLKGETLDESAIAKLARGNLRKKMPDLLRAVHSPLTPSTIVVLRQLLRRFDDLTTDISELESEIRRLLSPMAADVQRLIQIPGVDEVAAAAILAEIGPDMSVFPSAKHLASWGGLSPGSEESAGKSKKAPTRKGNKYFRTILVQVATSACQTKGTFWQRKFRRLARLGPKKAAVALARSLAGVIFHLLTSRSDYREPDTILPPPNRIRTRVAALTRQLEALGFKVALTATPAQVPVS

SEQ ID NO: 112094 - protein, 318 aa, unidentified
MTAGPVVGVDVAKDRLDVAVRPSGEVWSEVNDEAEITALVARLRPLGPTLIVCEATGGFERAAIAALAAAGLPIVVANPRQVRDFARGTGQLAKTDQLDAGILALFAERVRPTPRPLPDAAAQLLDAVLTRRRQLLEMLVAEKNRLGFAPKPLHRGIQAHVRWLERQLDDVTKELAGLIEASPVWRAKDDLLQSVPGVGPTVSSTLLGELPELGSLSHKQIAALVGVAPLARDSGTLRGKRMVWGGRASVRTALFMAALCGRRWNPALKAFYDRLKAAGKPTKVALIACARKLLTILNAMVRDHKRWAAPAPSVQYSC

SEQ ID NO: 112095 - protein, 338 aa, unidentified
MKLYGAIDLHSTNNVTVVINEQDQVVYQKRLPNDLSLIAQQLSTYQASLKGIVVESTYNWYWLVDGLMEKGHRVHLANTAAIQQYNGLKYTDDHSDARWLAHLLRLGVLPEGYIYPKQERMVRDLLRKRGQLVHQRTANLLSIQSLISRTTGNSISAKYIKALDIQHVDGVLPNPDLVLALKANLAVMNSADAQIEILEKAVQDRVKLRPQFRFLKTVPGIGPILALTIMLETGEIARFASVGNYASYCRCVGSRKISNGKRKGSGNTKNGNKYLAWAFVEAANFAIRFYPRIKSFYQKKKSKSHAIVAIKAVAHKLCRACYYIMKDQVPFDITKAFA

SEQ ID NO: 112096 - protein, 406 aa, unidentified
MDKPSVETAVLKTDRGGNQLYFVGIDISKFKHDCAIVDEFGDVITPSWSFQNDREGFSLLKELLDALDGEKKIGLEATGHYGQNLKLFLENNDFSFMEFNPLLINRFVHSKSLRKTKTDSIDALMIAQYLMTVEYKPYPPSFYTFEKLKSLTRFRDSLIRQRSRQLVELTNILDKVFPEFKPFFKGRFSATALYILSHYASPEKISNMNSKSYEPLRRLSRGRFSMVDFVELKTLARNTVGSAHDYLLQEMEITIDIYDQLQSKVEEIELQIHDCVLALAPPILTIPGIGAASAAVILSEFGDLSKFNNPSKLLSFAGMEPGYFQSGTSESTGKMVKHGSSHLRYAMMNCAQTVINNEPTFAAYYAKKRAEGKEHRVALTHVAKKLLRVIYTLQTKELSYNPDLVR

SEQ ID NO: 112097 - protein, 423 aa, unidentified
MNSSRTQKFTAYVGIDWADTKHDFCLQERGSDRREFGCIAHQVECIDEWAKSLQQRFGAPVAIALELAKGPIVYALQKYDFLVLFPINPLTLARYREAFRPSRAKDDPSDAELALDLLMRHPERFAALQPQSVGMRTLISLTERRRELVNDRIRLTNRLTHTLKEYYPQALDWFDQHDTVLFCDFLTRWPTPLQARRAHQASLKAFFHAHNAHRPQIIAARLKAIKATVPLTQDLGVIVPCKLHVMVLIEQLRLALQAIEQFDRHIAELAPTLPDYRLFAGLPGAGPHLAPRLLVAFGEDRERFQRAEELQKYAGIAPVTERSGKKTWVHWRWQCPTFLRQTFVEWAGQTINKSFWAGAYYYQQRARGSTYQAAVRALAFKWIRILYSCWKTRTPYDESKYLNALKRRQSPLLNNLVPNPQNA

SEQ ID NO: 112098 - protein, 347 aa, unidentified
MTIVEAARGITGGVDTHRDVHVAAALDPLGGLLGAESFSTDSAGYKALLRWLETFGDVTKIGVEGTGSYGSGLARYLRRLGVEVIEVDRPDRQKRRRAGKSDPLDAIEAARAALSGRATGKPKSRDGAVEAIRVLVVAKRSARQARVKALIQMRHLGYSAPEQLRCRLKGLSVPALVAEGIKLRPTRSADPVTAATKASLSSLAHRISSLDDELAELDQRIEALLIATVPDLLDLFGVGPDTAAALVMAAGDNPERLYSEAAWAHLCGASPIPKGSGKSGGRVKVHDGGDRQANSALWRIVMVRIAHDPETQLYFERRVKEGKTKHEVIRILKRYVAREVYRYLPRG

SEQ ID NO: 112099 - protein, 391 aa, unidentified
MFYIGVDIAKSNHEASIIDSNGKLVSESFSFSNSIRGLEKFQKFISSFSIDSNNCIIGMEATGHYWLSLYSFLIDLGFSCIVINPIQSDAFRKMYIRQTKNDSVDSFVIAQILRFGEFSVSHFSDEDTFALRNLSRFRFALVDEASDWKRKLVAILDQVFPEYSSLFSNIYGVTSKELLSKYPLPEDMISIPADELAKLLSKCSKGRFGIDKAKEIQEKASNSFGVKFALKSFSFQIKQIIAQISFLEDQIADIEDEISSMINSLCPVITSITGIGDVLGAAIFSEIGDISRFERANQLVAYAGLDVAVKQSGNFNATDTKISKRGSPYLRRAIWLAASVAAFKDPALSVYYQKLRQRGKAHGTAIGAVARKLTNIIFAVLRDNKAYIPNI

SEQ ID NO: 112100 - protein, 339 aa, unidentified
MNVMIGGDPHKASHTAVAIGRDEDQIASVKVRSTLRQVDQLLRWAEPFDKRTCAIESVGGLGYLLAQQLVARGEDVLDVPATLASRIRVLATKRSNKNDPNDAHSIAIAALRAPTLRSVEAADHAEVLRLLSKRNGDLGRQRARVTCRLHSLFAELVPGGIAKEMYVSDAEALLEEVTPASPAEQMRHELVLELLDDVRRLDTQLKDSHRRIRMAVKASRTSLTEIYGVGPIHAGTIIGYSGDIRRFANRDAYASFNGTAPIERSSGGWVVHRLSRRGSRKLNHAIHMAAVTQIRNPGTEGRIYFERKMAEGKTKKEALRSLKRQISNAVFRQLVLDAQ

SEQ ID NO: 112101 - protein, 344 aa, unidentified
MLSIIGLDLAKHVFQVHGVDVAGNVLLRKRLRRSEVTRFFAALSPCIVGIEACGSGHHWARELRRFGHDVRLMPPQYVRPYVKTNKHDAADAEAICEAVQRPSMRFVPIKEADQQAALMLHRSRELLVRQRTMLANAVRAHAAEFGLVVPKGIQRLPELCTLIASADPDVLPELAKSVLLTLATQIEAINIRVLALERQLLEWHRASAASQRLATIPGIGPITATAIVATVADAARFTSGRQFAAWIGLVPRQHSSGGRERMRGLSKRGDGYLRRLLVHGARAVIRWQRRANARPLPWLASLLGRSHVNIAAAALANKNARIAWALLTRGETYMPTRQVLSTAQ

SEQ ID NO: 112102 - protein, 391 aa, unidentified
MSMYFIGIDISKYKHDCCIISAANQKVVSKVIIKNNKAGFNELLTIIHSLANPADIRIGFESTAHYALNLELFLENSLLTFMEVNPVLISEYKKSKTLRRTKTDSVDCESIARWLMTVEYKPHSKGFYHAYSLKSLTRLRDKLIRQRSFYLVKITNVLDHTFPEFKPFFNERLSKTALYLLENYGSAEKMARMNSASYEKLRSVSRGKFSPQQFLLLKELAVNTVGVNNSIFDVELNSLLSLYKSLVKEIDTIKKEINQLIEEVHPHYMSVPGIGSLSAAVIYSEYGDISNFTNPGQMLAFAGIEPGINESGTESHGGKMVKRGSSQLRYTLINCCLPLIRFDMTFATYYAKKRGEGKPHRVAITHVAKKLIRVIYALESQDIDFNAQELR

SEQ ID NO: 112103 - protein, 377 aa, unidentified
MKSIIYVGMDVHTTSFTLCCYRFGKDEVFAVAQMEPDYKHILSYLDRVKRSYGGEYQFLCGYEAGCLGYTLYHQLTTHGVDCVILAPSTMPQLRGPIIKTDKRDAQNIAKCLAFGSFNAVYIPSDEDNSVKEYIRMRDDAKGALKRIKQQLLSFCTRNGKMFTGGRNNWTLKHLAWLRKLNFGNTLLQEAFQEILASYYQAADKAERYDRRIEQLAQMESYKERVRRLSCLMGIGSITALATIVETGDFRRFPTAQHYSSYLGLVPGEDSSGKHIQRTGITKAGNSHIRRLLIESANCYGRGVVGAKSKMLAKRQEGNEPKVIAYADKANERLRRKFYRINFRSKRTIAVVAVARELACFIWGMMTDNVLREPLGVK

SEQ ID NO: 112104 - protein, 435 aa, unidentified
MDVHKHTIVVAVTATGEVGKATAYGTFPNTATALETLVKRLRQAGDGPIKFCYEAGPCGYGVHRTLTRMGEDCMVVAPSMIPRKSGERQKTDKRDAASLAVLHRGGLLTAVWVPDAAHEAMRDLIRARLAAVRAVRAARQQLSAFLLRHERIYPDGRSTWTKAHRRWLADQTFAQPAQQIVLEECIEAVRQGEQRRDRVDGYLRAQIPTWSLFPLVQNLCALRGLDMIAGAGLAAAIGDPSRFATAPHFMAYLGMVPSEHTSGPKRRIGAITKAGDVHARTLLIEAAHSYRYPARIGRHKLAAVDAVPEAVRAIAWKAQTRLCQRYRHMMARGKLKQVVVTAIARELAGFVWSIACITSDPAVSGNIVTELYDEGTAQYDEVTILSEEVAQQVQQLTPDTGRPRAPRHQSLKGTARPRRRTPANQAGSVERSRTG

SEQ ID NO: 112105 - protein, 470 aa, unidentified
MGRPTTRMRFERGSLRLAAPATYPGCAASTYRSVSFARWFSPFVNREEVQVQLLRWIGRAIGLDVHRDFCEIAVCEEGVVRSAGRVKTTPEALLVLAESLLPTDRVALEVTGGAWEVARILEPYVDRVVVVSPEDTGIARARAKTDKLDSRTLARLLAGGELDAVWMPDESCRVLRRRLARRQQLVRSRTRCKNEVHAVLMRRLQGKPPVTDLFGVKGRQWLAARELPVEETETVQAAMRQISFLDDELVAVERLITREMLGSHAARRLMTVPGVNVIGAATFLAAVGEIDRFGTSRQLVAYLGLDPKVRQSGEQPARSGRISKRGSSSARWALVEAAWSVVQQPGPLRAFYQRLRARIGASKAIVATARKLAALFWYMLTRGEDYAHQQPSLTAEKLRKLEIAAGAVNNQRPAGVWATREKMRDAERKLGEQAQASYERMVRDWKAATPKKVGASATPGAHQIRPSIGA

SEQ ID NO: 112106 - protein, 387 aa, unidentified
MIYYIGIDISKYKHDFCIISNTGEIIVENSSFENNKKGFQEFLQILKSYNNQDVRIAFEATGHYSMNLEHYLIDQEITFMKMNPLVIHQFLKARSLRRTKTDKVDRYTICQYLMSVSYQPNSRLLYHTYSLKTLCRTRERLIKERSKIMVLLTNHLDLTFPELKPFFNNRISVTLLYILQKYNNTKRISLMKDYISLKNISRGKFTYTKFVKLKELAKNSVGIHDYSSDLIISTYIDLFNLLNKKIEPIEDKISTIIKELNPSILTIPGIGEITAASIVSEFGDISLFSSSAKMLAFSGLEPSINQSGTLDFKGKMVKHGSGYLRYVLMNTSFNILKYNPIFYDFYLKKRSEGKSHRVALSHVAKKLIIIIYTLETKHVDFNPSLLK

SEQ ID NO: 112107 - protein, 371 aa, unidentified
MSDHAITYVGMDVHKKSIAIALLPGTGGPPVEWQEPNELRAVQRLARRLKREAGEAVTCCYEAGPTGYALLRQLTALGVRCQVIAPSLIPMKPGTRIKTDKRDARKLAELLRAGMLTEVHPPSESDEALRDLCRCRDDVRDDLLRARHRTSKFLLRRHCVFSGTKHHWGTRHMKWLSELRFDDGASQATFDSYLLALQQNEERLERMDVRLAEFGAQEPYREPVAWLRCFRGIDTVTAVSIVAELHDFRRFRSARSLMAYLGLVPSEHSSGESERRGSITKSGNRHVRRLLVEAAWHNRHRPGISLPLRRRRESQPDRVLAIADRAQARLSQRYVRMSARGKPNPKTVVAMARELVGYLWATLHPVSTVEI

SEQ ID NO: 112108 - protein, 341 aa, unidentified
MNHYAGIDVSLKDSSVCVADANGKIVRESTVASEPEALIAWFSELGFAVTRIGLEAGPLSQWLYAAMQKAGLAVELLETRHVRDAFKAMPVKTDRKDAQGIAQLMRLGWFRPVHCKSIEAQETRAILSARKLVQSKLHDVEMSLRGTLRGFGLKVGKTTPNRFAARIKELVEGHPTLQIIATSLLAVHAALLREFKVFEKQIRIMARDDERARLLMSTPGVGVLVALTYVSAIDDPGRFTSSKRAGAHFGLTPKKYQSGETDITGRISKIGDKGVRTALYEAAHIILTKPVKGSALKSWAARLAKRAGMKKAKVALARKLAVIMHRMLVDRTPFNPAAAAA

SEQ ID NO: 112109 - protein, 415 aa, unidentified
MEQVYERCAALDVHKAQVTVCVHVPDQAGERAEVRAEFATMTGDLLGLRDWLKGLGVTHVAMEATGVYWKPVYYLLEDDFELLLVNAQHVKNVPGRKTDVQDAQWLCQLLEHGLLKSSFVPPQPQRELRDLTRYRKSLVWERGREANRLQKMLEDANIKLASVASRPLGASGKAMLRELCEGNNDPVALADLAKGKLRAKLPLLRQALEGRFRGHHALLVSHLLAHIEYLDQTIGELSEEIEERMRPFARERELLCTIPGVAERTAEVILAELGPDMSRFATHRHAASWAAVCPGHDESAGKRRSGKTRKGDSWLRVALIEAANSAAARTKDTYLRAQYLRIRRRRGHKKAIVAVAHSILVSAYHVLQEGVSYQELGGDYFLTREDRQRMTRRLVRQLERLGQSVTLEPMAAEAG

SEQ ID NO: 112110 - protein, 414 aa, unidentified
MSNPLLVGVDVHRKTNTVCLMDGQGRELTPRFTVDNNRPGTETFIRQVAQQVVAGDFDAIEIAAEATGWYWWHFFQTLDQDPFLNQWPLALYPFNPRLTANFKKTYVDLDHSDPIDAFVAADRLRLGRDLPAPFHYEERYFPVRLLTRYRFHLVHNLAREKAYCLAILYLKASEYTRKGKKPFSSVFGAASRAVLQEFDSIEEIAAIPFDELVEFIDCKGKRRFPDPAENARKLQQVARDSYHLPEALTRPINLILGMSLKHISFLERQEKRLASAIAEGMELIPHTLDTIPGFGPVFSGGIITEIAGVERFDYNQAKVAKYAGLKWRKHRSADFQAEETRLTRTGNRYLRYYLCEAANQVRMRDPEYAAYYDRKFHEVRKHQHKRAIVLTARKLVRLVVRLLTTNQPYRPRRR

SEQ ID NO: 112111 - protein, 338 aa, unidentified
MKTYAGIDLHSSNNYIGVINAKDKRLYSKRHDNRIEDVLKVLGKFKASLHGVVIESTYNRYWLVDGLMDQGYTVHLANPNAIQTYNGLKHTDDKWDAFWLAHMLRLGILPEGYIYPKHQRPIRDLLRRRLMFVRQRTSQILSLQSMITRNRGLNFSGAQIKRFRDEFIDQLFSDRHLVFTAKKNIATIRFLDQIVSEIEVEVGSQIKLKKGFISLLTTPGIGNILGLTIMLEVGNIGRFPKAGNYSSYCRCVESKKTSNGKKKGENNKKNGNRYLAWAYVEAANHAIRCCPKAQKFFQRKMAKSERVLATKALANKLTKATYYIMRDQVAFDEDKLFG

SEQ ID NO: 112112 - protein, 425 aa, unidentified
MNYKQNEKINQVKESTLVVGIDIGSTTQYARAFDWRGIELGKVFPFSNSREGFESFKAWMQHLQDKYKKLDAIVGIEPTGHYWFDLGAYLEDEGILLVMVNPYAVKQTKELDDNSQSKNDRKDPKVIAKLVTEGRYSAPYTPDGVYADLRIMVANRKRLIREMTQIKNRFARWFAIYFPEYTDVFGDYEAQSSMLLLKKVCTPEAIVELGAEKINQIWRDARLRAVGMKRATTLCETAKRSIGLKKGSSAARYEMKLLLEDYEYKKAQLDAVMEEIEKLCRKIPESEQMLAIKGIGVITVAGFLAEVGDVRRFESPRQIQKLAGLSLRENSSGKHKGQTTISKRGRSKLRAVLFNAAIPLIAKNPEFKSLHEYYTTRANNPLKKKQSVIAISCKLIRVFYAILAKGVTYDAQKLISDIHRQPQAA

SEQ ID NO: 112113 - protein, 317 aa, unidentified
MPAPACFVGIDVAKATLDVAVHPSGEPWRTSNDEAAIGALVAQLRPLAPTLIVLEATGGFETATVAAVAAAGLPVVVANPRQVRDFARATGQLAKTDRLDAQILALFAERVRPEPRPLPDAALQALDALLTRRRQLLEMLVAEQNRLGFAAAAVRRDITQHIHWLQRRLRDVGGDLDQAIHASPLWRAKEDLLRSVPGVGPVVSRTLLGELPELGTLTHKRIAALVGVAPRACDSGTLRGKRMVWGGRAPVRAALYMGALVATRHNPAIRAFYAPLRAAGKPAKVALVACMRKLLTILNAILRTATPWRAVEAGATS

SEQ ID NO: 112114 - protein, 407 aa, unidentified
MDVVIEKACGMDVHKDNITACIITPEGKEIQTFSTKTVFLLQMVDWVKQYGCTHVAMESTSVYWKPIVNLLEAEDIEFLVVNAQHMKAVPGRKTDVKDAEWIAKLLRHGLLKASYIPDRNQRELRELVRYRRSIIEERARQHNRIQKVLEGANIKLGSVVSDVLGVSARDMLDAIANGEEDPKKLADFARRTMKKKKEELELALKGYIGPHQRLMLKTILGHIDFLTEQIEMLDQEVAKRLSSHQEYLEILDSIPGIAKRMAEQILTEIGTDVKAQFPSSGHMCSWAGLVPGQNESAGKRKSAKTKKGNKYLRSALTEAAHSVRGSKNYLGALYRRTASRKGKKRAGIVVAHAMLRISYYLLTRKEMYVDLGEDYFDKQRQQSIVKHSLRRLESLGYTVTLEEPKVS

SEQ ID NO: 112115 - protein, 326 aa, unidentified
MFFIGIDISKAKLDCCLLLDDASNKRRAKVVANSQTGIVDLLAWCTKQQVPTHELHAIMEGTGVYHEQAALALSDAGATVSIVNPAQVKDFGRSLGVRTKTDGVDSFVLARYGALLNPKPWTPPAQEARVLQALLSRREAIAQDLQRERNRLEKADATDTPPLIRQSIDESIDFLEKQLTKLQQDIDDHINKHPKLKDDRILLLSIPAVGPQVGNHLLSVIHNHDFQSAEQLAAYLGLVPIERQSGSSVHGRPRLSKAGPARIRAVLYMAAIVATRHNPHIKTLYQRLQERGKTKMSALGAAMRKLVHLCFGVLKTRKPYQADYAV

SEQ ID NO: 112116 - protein, 346 aa, unidentified
MNITTIGLDLAKNVFQVHGVDERAKAGLKKQLKRAQVLPFFANHPPCLIGMEACGSAHYWARKLKELGHTVKLMAPQFVKPYVKTNKNDAADAEAICEAVGRPSMRFVPVKTGEQQAVLSLHRAREGFVKARTAQANQIRGLLAEYGIVIPVGIANIAKHLPDILEDGENDLPGVFRQLLQRLGEHLKELDRQVDELNEQIQLWHKENELSRKLADIPGIGPITASAVVASIGDAKSFENGRQLAAWLGLVPRQHSTGGKQTLLGISKRGDCYLRTLLIHGARAVIRVSERKIDQADSWLTRIVGRRNKNVATVALANKNARIVWALLALNREYQSDYVPAVVTGA

SEQ ID NO: 112117 - protein, 392 aa, unidentified
MIYIGIDVAKNKHDCCIIDSDGVIINDSLRISNSREGFELLYSSILSVLPDKDISNVKIGLESTGHYSTNLQNYLYAKGFHLSILNPLATNLFRKAQTLRKTKTDKTDALVIAKMLFSDDTKSYSPVSYQIQELKSLTRHRYRLIGYRSRLKLSITRLIDIIFPELPKYVWSIHQVSVYALLSELPSPKEISNCHLTKLINLLVKSTKGKYSRAKAIEIKEAASNSIGTSTRSLSFELQQTIRLIQSVQAEIDALDKQIKNVVIEIDSPLMSIPGISYTLASIILAEIGDIDRFTNPAKLLAFSGLDPSTYQSGKYNATHTPMVKRGSTYLRWAILTASRTVSMRDSTFGDYLAKKQSEGKHYYIAMSHVAKKLIRVIFYLLKTNTSFVPQM

SEQ ID NO: 112118 - protein, 361 aa, unidentified
MQHSMSLVGLDVHAAQTHAAILDMATGELRGVKLRMAPSEVVEFLAGLPGPVRAVYEAGPTGFGLARAGVARGIDVRVVAAGKVPRAASDRIKTDKRDAERLARLLAAGELRFAFVPGVADEQFRDVIRAIEDCRGDLMRARHRVGKFLLRRDLRWSGPGSSWTQAHLRWLQSLRFDDVCSQAVFVDYLSAVQMLLARRAALLAALEQVIPDSRHAPTIARLRCFRGLDTLSAAGLCAEIGDWQRFRPKPLAGFLGIVPSEHTSDQKRRQGSITRAGSTHARRLLVEAAHHYRHRPAVGEGLARRQHGQDPRVIEIAWRAQRRLHQRWSVLRLGRRKPAGVVAIACARELAAFCWEAAILD

SEQ ID NO: 112119 - protein, 355 aa, unidentified
MSSEKYIGLDVHQATISVAVLDSTGKLVMESILETKAATILEFFAGLRGTLSVTFEEGTWAAWLHDLLKPHVAKLVVCNPRKNALLKDGNKSDRIDAHKLAELLYLNKLSSVYHGETGVRMLRELARSYLTIVKDLTRVMCRLKAVYRSWAIPCAGRDVYYTRHRDEWLGKINEAGVRRRAERLYQQLDMLQYLRQQARRELLAESRKHAISVKLRQIPSLGPIRSALAVALIQTPHRFRTKRQLWAYSGLALETRTSAEYCYVKGGLRRSKKQISIRGLNKDHNHDLKGLFKGAATRASVLPGPFQDFYQRSLAKGIKPTMARLTLARKIAAITLTLWKKGENFDADKLKSQAA

SEQ ID NO: 112120 - protein, 343 aa, unidentified
MEHFAGLDVSVKETSVCIVDETGGIVREVKVLSEPDALRLVLMTPGYRFKRIGLEAGPLSQWLFSALAEAGLPAICVETRHMRAALKAQINKTDRNDARGIAQMMRAGLYRPVHVKTLRSQKLRMLLTHRKLLQSKAIALENDLRATLRNFGLKVGVVGTVKFEARIKELVETVPDLVVLVEPLLIVRRALREQIGILHRRLLAIVRDDDVCRRLMTIPGVGPVVALTYRVTVDVPARFKSSKAVGAVFGLTPSKYQSGEINRTGAISKCGDDMMRANLYEAAQILLMRTTKWSWLKAWAMQIARRRGLKRAIVALARRLAVIMHRIWLDGSEFRWTRQTAAA

SEQ ID NO: 112121 - protein, 343 aa, unidentified
MAAITTIGLDIAKSVFQVHGVDANGHLVIRRQLKRRHVLAFFQKLPPCLIGIEACATSHYWSRQLQALGHTVRLMPPAYVKPYVKRQKNDAADAEAICEAVTRANMRFVETKTAEQQSCLTLHRTRHLFIRQQTSVINAIRAHLAEFGIVAPVGRNGIEELLHVVADPNDQRVPEITRACVAALGAQLHSLREQILAFDRMIMAWHRSSATSKRLDEIPGVGPALATALVASIADPKAFRSGRDFSAWIGLVPKQHSSGGKEKLGSISKQGDRYLRSLFTTGALAVIRYAKIYGTKHRPWLTALLARRPTKVAAIALANKIARMAWAMMTKGERYKEPIALAA

SEQ ID NO: 112122 - protein, 327 aa, unidentified
MQNFIFIGTDVSKLTLDHGIHPTMAHQKTANNPAGFKNWLKWALQFGGKDELWVVMEHTGYYSYQFELFLHQQEIRYTKVPALEIKRSVGLVRGKSDKVDALLISRYGWMNRDRLEPQQLSAAVITELKDLVSLRDKLVRDRSGYKARMKEQATTRKYAKRHIQNKIQERMIKELTANIKEVEAAIKELIKNDEALLNNYTLLVSIKAIGFVTAIYMLAYTENFRKFLNSRKFACYAGLAPFEHTSGTSLRGKKRVSHYANKKAKCLLNLAASVAIQHNTEMKAYYRRRINEGKSKMGTLNIIRHKLVDRMFAIVKRGTPYTVTIAA

SEQ ID NO: 112123 - protein, 384 aa, unidentified
MGNQTFIPRDYDVFAGLDVDKRSIAVTFTDHQGLVKSLRMPYNVEHLVNHVRKHFPNQKVAFAYEAGPTGYGLYDGLVAQDFRCLIASPSMIPKAPGQRVKTNRLDSVGLSENLRGGQLKGIHVPSPLYRELRHLTQLRDTFVSEMVGMKQRIKSLLLMEGMEFPPAPAGSQWSFMVKNKLRKLPCSGTVRFKLDQWLDSLEFNEKQVLKTTREIRRFCHNDPELSQCIEYTMSVSGIGWIVASQLLARIGDWRELRNIRQLGGFLGLVPTEHSTGERTDRGSITHTGDERLRSKMIQASWSAIRKDAELREFFRLICHRHPRRQGPRVAIVAVARKLSVRISVVLMKQRPYVVREKVHSAPLTQEETSSQGTTRRQAEPGDNS

SEQ ID NO: 112124 - protein, 345 aa, unidentified
MRQYAGIDVSLEYSSVCVVDADGRIVREAKVLSEPDALIGWFAEHGVAMERIGLEAGPLSQWLYAGMAKAGLAVELIETRHVRTAFKTMPVKTDKKDARGIAQLMRLGWFRPVHCKSLPAQEVRALLTARKLIQGKLHDIEMSIRGILRGFGLKVGPTTRRTYAARIRELIEGHPTLEAIAASLLKVREALAGEFAGFERKLRAMARQDDNAQRLMTTPGVGVVVALTFVSAVDAPERFRSSRAVGPHFGLTPKKYQSGETDYSGRISKVGDVGVRTALYEAAHVILTRPVKGSHLKTWALAVARRAGPRKARVALARKLAVVLHHMLRDGTNFIPHKPMPAMAA

SEQ ID NO: 112125 - protein, 316 aa, unidentified
MKQQAEATFVGIDVSKASLDIGVIPSGESWSVSNQENDIVVLVKKLRRLKPAIIVLEPTARLETAVAGAIAAAGLPIAVVNPRQVRDFARASGILAKTDRIDAQVLARFGQAVAPEVRPLKDEQTQELNALMTRRRQLGNMLITEKNRLSGAPAAVHKDIKSHITWLQERLKDLDDDLDATLRNSPLWREKDALLQSVPGVGRVLSLALLSQLPELGRLNRRQIAALVGVAPFNCDSGTFRGRRRVWGGRGQVRKVLYMATLASTRHNPVIQDFYRRLCASGKPPKVALTACMRKLLVTLNAILKTRKAWHYQSAN

SEQ ID NO: 112126 - protein, 343 aa, unidentified
MAKTPIAVLGIDLGKNSCSLAGLDAAGAVIMRRRMTREGTIKFVATLPACVVAMEACCGAHFLGRTFACQGHTVRLMSPEYVAPYVKAQKTDNRDAEAIAEAATRPTMRLVTLKSEAQLDLQVLHRARERLVAGRTRLTNQLRAMLLERGVILPKRRAPLIKRLDELIAGELPISQRARQLLLDLRDEWMDQDRRIKAYDDELMALTREDGAARRLATIPGIGVINATALLAAVGDASAFAKGRDLAAWLGLTPRQHSTGGKTKLLGISKRGNKYLRTQLIHGARAAMAHVAKKATPVGTWVRQLLTRAHPNVVVVALAAKLARIAWAVLRHGSNYDHRTATV

SEQ ID NO: 112127 - protein, 381 aa, unidentified
MYYVGHDCFIFTSEGEIVLESFTFENTREGFDKLKLILDALDHSQKIKIGLEATGIYGKNLKLFLSSIGYDFDELNPLQVKRFTNALSNRKTKTDKIDASQIARFVSTGASRTYVYSSYHTEALKQLTRARNSLIDEHSKHQTVLTGILDVEFPEFKGFFNNKFTDTALYLLNKYKTVKRISKLSHNDCVLLHNKSRVISTSRFEELRESAKNTCGHHFNYNDSLISANLQIIKCLNNEIDKIEKEINFIMSTINSPVVSIPGISAISAASIIGEFGDFSRFDNAKQLCAFCGVEPSIYQSGTSYHEGKMVKHGSSNLRRTLFNVVPYIIMHNETFKTFYDKKRSEGKAYRVAQSHVVKKLLRVIFTLEMTGSTFAPSKLY

SEQ ID NO: 112128 - protein, 359 aa, unidentified
MSKCSTKSQKVYVGFDVSEKKIEIFSVCGTKTSNGRVQISNEPDAIREFLSIFEKPKNVCIVMETGTHSLWMSELIKELGFEVIVAHARDLALIYHSDKKNDRLDAEKLARLAQADKKLLHPVEHMTMERQDDLMVIKARDLVVKQKSQIICTIRGLLRSHGCKMIEAQYTAAGLKKCYSDLPAEVGSVLAPLLQQICYLDLAIKEYDRQVKKLCKKYPETDILRQIPGVGELTALAIVLIVGNPRRFKTSARLCAYLGLVPKQDQSGNTDKQLGITKKGNKLGRRLLIQAAHYIMGPFGTESRLRSFGLRIQSRGGNSAKMKSFVAVARKLVTVMFALWMHPEIPYDPNFKKGGKAAA

SEQ ID NO: 112129 - protein, 467 aa, unidentified
MCVQQLLCREGAFSDCVVVDVPHVGNVGPGVQAGPGGDGRDPHMHWPCAWAWVLLSRSVRLLLPVPAWPPLVACSEACPPRCVGRDSSQSCPLRFLLPRPSTDRQTPRNRRSYFMLADQADHVLGIDTHRDSHSAAILAADTAVVEGQITVAANERGYRRLLRFARESAPGRRAWAVEGTGSYGAGLTVFLQREGELVLEVDRPRRPARRDRAKSDELDAIRAAREALTREHLARPRQRGEREALRVLLATRDSAVRSKRAAITLMKGLLVSAAPALREGLRSLPTNEQLKRCARLRIGPAQDSEQRATTIAIRASARRALALAEEAQELEAEIKPIVARLAPCLLAEMGVGAIVAAQILCAYSHQGRIRSEAAFASLAGVAPIPASSGQTVRHRLNRSGDRQLNRALHTIVLCRMRDDPRTRAYTARRQAEGRSTREIKRCLKRYTARHLYRLLQTSPPNHANSVT

SEQ ID NO: 112130 - protein, 381 aa, unidentified
MNPSASSQEEAPLKYICGIDVGSQSCAGCVYRLDKSLVVKPLAFANAKEGWNVLLDKLTQLDALPKQILIGMEATARYSENLYHALEQRGYRLCLLHPGQTHQFHERQGLRAKTDRLDAITIARVLLSGEARASYIPDEQVATYHELVRLHSQLSEQVARYQNQIHALVVVLFPEFTQVFADPCLPSALSVLKVYPSAQAMAQAEEAALYALLRMHKHAHYGHPTAKKLLSLASTSVSSQRAEAGRSLSLRILCGQLEQTQKYLEELQAELEQLIVNDPAAKSLQQIPEFGTQTVAVLRAELGDVDRFARTDQAIAYAGLDVQIKESGLWKGKAKLSKRGSGPARGRCSIWRLCVAFICRGLPLGLTIRDWWHAVSRKAPP

SEQ ID NO: 112131 - protein, 335 aa, unidentified
MQIYGIDLAKEKFDVSFFDLTSKKVSNHPSHKVVKNNFKSIGRFLETLPSDAVLVAEHTGVYGDTLLKCCMDSNVKIAFVGGYVIHRYRATPDRAKTDVLDCALLRDFGERYPDKLKYKTFPEEALYELRQLARHREMLVEQRKQLITADKSEDCRPIRSLAVKRSMDRIKEMLDTEIAETEKEMLKVINGHESIHHNYELVKSVDGVGLITAVELLVKTENFTKITTARQYAAYAGTAPYEKSSGKMDKGAHISKIGNRRSKTLLYICAESARLHNKEIKLYYERRTLIDKKPRHYVLNAIANKLLRIIFTLVEKGEYYDANFIRQDPRVVKYN

SEQ ID NO: 112132 - protein, 353 aa, unidentified
MDKVKVRTETLFMEGDVKYCGIDLHGNNNWVVIIDDHDRVVYSRRHANDLSRLLPVLAVHRSELSGIVVESTFNWYWLVDGLQEAGYRVLLANTAAIKQYEGLKQRGDESDARQLAHLLRLGLLAEGYIMPKAMRAIRDLARKRMQLVQQRTAQILSIESSLSRHCGWKLSSNRIKCLYQADLDEMKLEALPLRGVQANVAVLQALQTQIENLEEVLADYCRGEAGYPLLRTVSGIGEVLATVILLETGNVERFADAGHYASYCRCVGSVYLSNGKKKGEGNSKNGNRYLAWAFVEAANFAVRHCEPARRFYQRKKAKRNSIVAIKAVAHKLARACYHMLKTQQPFCVERCFT

SEQ ID NO: 112133 - protein, 354 aa, unidentified
MKILALDLSKYKTVACDYEAETARHSFVTVLTTPKALHDLIVECEPDRVVIEICSIAGWVCDLVRTLGIEIQVANTADERWRWRKIKRKSDRRDALKAAQLSAVNQLGPVHVPQLEVRQWRALIAYRQQLVQRRTRIRNHIRDLLQREGMILPRGRTAWTQVGMGNLQALVRPLTEVAVTELWRGELGVELAQLRELQQQIQTVEAKLDELGAADCRVQLLQTIPGVGPRLAEAVVTMFDDPARFRRSGEVSAYIGMVPKQFDSGEMERSGHITRQGNRLVRSLLVEVAWASLRHNPWARQTYQRLHGGQKSRKKIAIVAVGRKLLVRCWAMLRDQTPWHPELHTAVAPQLRGG

SEQ ID NO: 112134 - protein, 380 aa, unidentified
MASMHDSVRFKTTVYAAIELSKKSWVVAIARPDRDRPSIHRIAGGNLADLIGRLRKAAGEKQRIVVCYEAGYDGFWLARSLAKIGIDCRVLDPASIQVNRRARRVKTDRIDSLALLRALIAIDRGERHVCAVVRVPTVEEEDARRSHRERQRLVRERTGHINRIKGLLFAQGIRGIEPKRRRTRIDFGKLTTAEGRPLAERLRRELEREYQRLELVQSQLRIVEKERDTADAQDPAVERKRELLCALQGVGGASAAILAREVFARPFASRRQLGSYLGLTPSAYDSGSTTRCQGISKAGNSWARRVLIEVAWLWRKYQPGSPLSHWYARKTADQSPRIRRIMLIALARKLAISLWRHVETGLVPDGAIMAKTTPHMAAAT

SEQ ID NO: 112135 - protein, 336 aa, unidentified
MTIIRVGLDTSKHVFQIHAVDENEQPVLQRQIRRSEVAKFFAKLAPTRIGIEACGASHYWARVLRSLGHEVVLLPPQYIKPYVKRGKNDKIDAEAICEAMSRPSMRFVPVKTAEQQAALTMFGVRDLLVKQRTMLINAIRGHAAEFGLTVAKGPKQVTELLQRLASEEDVPALAREMVGVLASQLDGLDVKLKTIEKQLLAWHRQDPTSQCLATIPGIGPIAGVSFALKVADPQAFRSSRHFASWIGITPRENSTAGRQKLGRISRAGDEDLRRLLVIGATAVIRAAKPGRTSPWLLALLARKSKKLAAVALANKMARIIRAMMVSGETYRQPAQA

SEQ ID NO: 112136 - protein, 370 aa, unidentified
MTTSNILFIGMDVHKDSIEIAIAEGDSQEVRRYGRIGGTHDAMRKTLRKLVSQGQSLHFCYEAGPCGYELYRYLVSQDHDCWVVAPSLIPKRPGDKVKTDKRDAVQLARLLRAGELTPVYVPNREDEAIRDLSRAREDTMLVQKSARQRLKSFLLRHDIRYQGKTSWTEAHLRWLADEVRCASPAQQIVFQEYVNAVTESQQRLQRLDEQIEHFVQAWRLYPAVEALMSMRGVQMIVAITVVSELGDLSRFENPKQLMSFLGLIPSEHSSGPRQKRGGITKTGNGHVRRILIEAAWCYRYPAKVSREMQLRQAKVPLVIRDIAWRAQLRLTQRYQHMQRKGKPHNVTVVALARELAGFMWAIVNEVKYPR

SEQ ID NO: 112137 - protein, 317 aa, unidentified
MTEHCGVGLDVAKATLDVAWSTDPGARWQTTNDEAGWVALVAHLRTLHPAVIVLEATGGYETGAASALSAVGLPVAIVNPRQVRDFAKALGLLEKTDAIDAAVLADFAARIRPTPRPLPDDLQADLHALVTRRRQLVEMLTAERNRVPLARGAVRKNLLAHIAWLEKQLAKTDRDLRTRIEASPLWRVRDQLLQSVPGIGPTTSACLLACLPELGTLTHRQISKLVGVAPLPDDSGRRHGYRRIQGGRGDVRTALYMATVTAITHNPTIRASYHRWRVAGKLPKVALIAAMHKLLIHLNAMLKHQTLWHPIPPAPTA

SEQ ID NO: 112138 - protein, 421 aa, unidentified
MEPVVDEVVLVERVAGIDIGKAEVVVCVRVPDPGGRASRAQEVRAFSTLTSGLQQCADWLHDWAVTRVVMESTGDYWKAPFWLLEAAGFETWLVNARDVKHLPGRAKTDKIDAVWLCKLAERGMLRPSFVPPLQIRQLRQLTRYRANLVHDRTREKNRVEKVLDQTGVKLSVVISDLFGVSGRDMLAALIRGERDPQVLADLARGRMRAKNDALVQALHGLFFTEHDAFVLSRMLARIDAITADITAVEERIDELITPFGEAVTRLCTIPGVGPSTAIAILAETGLDMSRFPTPQHLASWAKVSPLANESAGKTRGSRSTGKGNRYLAEALGNAVLSCCRTETFLGARYRRLVKRRGKSRALVAVSRSMLIAVWYILSQPDTTYLDLGPEHYDRTRNHDRALRNAIQRLNALGYRVTLEAA

SEQ ID NO: 112139 - protein, 300 aa, unidentified
MKDMMIGVDLAKNVFQIHGALRTREVQFRKKLTRQQFTAFMARQAPCLIIFEACGGAHYWAREMKAPGHEVKLIAPQYVRPFVKRQKNDAADAEAIVIAARQAEMRFVGPKTVEQQSRAAVFRGRERLVHQRTADVNALRALLYEHGYVFPVGMRYLDRMTALVDDDTSDLPALIREECQDLLAQIAEKTARITERTAKLKALASQSDRARRLQTMPGVGPLTAIAVQAFGPDMAHFKTGRNFAAWLGLVPRQHSSGGKERLGRMTKAGQADIRRLLIIGAMSRLGWLGRHTIAQGNCPA

SEQ ID NO: 112140 - protein, 313 aa, unidentified
MSEFIGIDVSKSALDVAAHVSGARLQVENTEQGLESLCRQLAALAPELVVMEASGGYERLCAAALAHAGLPVAVVNARQVRAFALATGVLAKTDAVDARILAHFAVAVRPPVRPLPDEQRQVLDELMGRRRQLVGMLVMEKNRLAQARDARVRRDIQSLVAILEKRIKGCDGELQGLIQASPIWRAQEDVLRSFNGIGPVSARTLLADLPELGQLNRKQIASLTGLAPIARDSGSKRGRRTIFGGRGQVRAVLYMATVTAIRVNGYIRAFYQRLRAAGKLPKVALVACMRKVLTILNAMMRTQTRWHEPLLTG

SEQ ID NO: 112141 - protein, 553 aa, unidentified
MGRRASLLGELAEPPQLCCSGISSLKFPPNQINSNKKGEAPLFNWPSGFHLWHNLWAVCNEAAAETKGASPMKKRNIYQNQSQELLSLFEAAGNSAKVMCVPMDYAKKDHLVMFCNGHGDILRKPFSVKNTPEGIAYIDDQVTRSCRRRGIQKKHVFFGGEDANSFAKNFVSTLRSKGFLVANVNAHDAKKQRGNVQASTDRIDLMGIATMLLNCRANCGPAQSGIYRNLRTLVRHRRKLVQMLTEVKNRVHGIVDELFPGFLNEKNSGIIPFTQSSLYLMEDRFSPKQIRRRRRQKLIEILKRFGTSKAEKTAAKLQQYAAKVLHAPVEYVDTMQLSLAQHVKHIRCLKESVAQMDKEIALNLAQTQGAFLTSVRGIGLVLAAGVTAEIGDLNEQKPLNNLASYSGIIPRVKQTGGSDGKTYTGPVAKRCNRILKDYVVKSAYHLGLHGPQDLMTDYKRRDASGQHANFGMGRRYLRMAINLMRTSQVYLPPNLRKDDYTLEERAGYYLMSWPYLKEKWKKVGALEAAFAKDRPLGLWRQIVQELYDIKLKL

SEQ ID NO: 112142 - protein, 442 aa, unidentified
MKKDTTQTHSAEVPAEPMVCWVGLDWADKKHCLVVRTTINGEPQQYLLEHKPEALDAWFLQLRQNHPSGRIAVAIEQSRGPVLYALMKYDFLAIYPVNPRCLADYRRAFKLSGAKDDPLDANLLCELVSLHPDRVRALAVEDIPTRQLRLLVEARRGFVHDSTMFSNRLGATLKGYYPLGLELVGEDLTTPMALDFLRRWPNLARLQAAKAGVLRAFFYAHNSRSEDRIKERLEAVRRAKPLTEDLALIAPLQLQMEQLVQQLRTLQRTIAAYDERIQVTFAQHSEAWLFKELPGAGQVLAPRLAAAFGTIRSNFASANDLLCFSGVAPVRKQSGGQERIQFRYARPIFLHQSIVEFAKCSLAKCAWANLLFQEALRQGKSRWAALRKVAFKWLRILWRCWQQHQAYDELTYLRSLQRDGVQLYRSLYQALPPQETAIVKNS

SEQ ID NO: 112143 - protein, 476 aa, unidentified
MRFNQRENEARMKRKSKQETEAKRLKGHLDCVNLFAAGVDIGSTSHFVAVPEELDARAVREFSCFTRDLIRLADWLVQVGIQTIAMESTGIYWIPIYEILEERGLEVLLVNAHHVKNVPGRKSDVQDCQWLQQLHTHGLLRGCFRTPENGIALRAYVRQRETLVRKASEPIQHMQKSLRQMNLLLDNVVTDITGKTGLGIINAILEGERDPAKLAKLRDGRCKHDEETIASSLEGHYRKEHLFSLQQSVEIYNFYQQQIFACDVAIEEELASLESKENQKDTSGIKKKRKNKSSLNFDVHSELYRLTGVDLTSIDGMNENSVLKVLAETGTDMSHWPTEKHFSSWLGLSPNNKITGGKVMSSKTKPTANRAAAAFRMSAYTLHGSNSALGAFYRRQRARLGAPKAITATAHKLARTFYSMLKNGTEYVDRGKEYYEKQYEDRILKNLKKRAASLGFQLVRNVDQGEQNKDLTISTS

SEQ ID NO: 112144 - protein, 317 aa, unidentified
MVDNSIVCAGIDIGKQKLDVAVCGVKAALQADNTSAGHEKLISWLRRHKVERVGVEATGGYEQAIVRALRREGLVVVVFQPIQVRAYAKFRLKLAKNDKIDAGLIAACVASTDEIRAAPDPRFEAFAATQTLIDQLTDDIVLYKTRRETARDEHSRAFWEREIAGRKAQARSTLKTLSAEMRAHPDIAAKLELISSVEGIAEKSAIAILIRMPEIGILSREQVTALAGLAPYDDDSGRRAGSRHIQGGRTRLRSSLYAAALPAAFFWNPQLITFYKRLRANGKTHKMALVACARKLLIFINTVVARATPWQPKAVAT

SEQ ID NO: 112145 - protein, 372 aa, unidentified
MIVRIITYERSTLVNDEKYIGLDVHQATISVAVMDATGKVVMESILETKAATILEFFAGLRGTLWVTFEEGTWSVWLYDLLNARVDKLVVCNPRKNALLKDGNKSDRIDARKLAELLRGNQLKPVYHGETGVRMLRELSRSYLTIVKDLSRVMNRLKAVYRSWAIPCAGRDVYYRRHRAQWLAKIREAGVRRRAERLYEQLDMLQHLRQQARRELLAEGRKHAITAKLRQIPYLGPIRSVLAVALMQTPHRFRTKRQLWAYSGLALETRTSADYRYVEGQLRRSKKVVSIRGLNKDHNHDLKGLFKGAATMASVRPGPFQDFYQAALAKGIKPTMARLTLARKMAAITLTLWKKGENFDAEKLKSKPLERLG

SEQ ID NO: 112146 - protein, 410 aa, unidentified
MGRVVIGMDPHKRSATIEVLDEAEQPLMAGRFGTDREGYRLLLAAGRQFGQRVWAVEGCEGVGRHLAQRLVADGETVLDVPAKLSARTRVFSTGQGRKTDATDAHSVAVVALRTRSLRQVRPDDRTVALRLLADRRDELGAARTLTVNRLHRLLVELVPGGAKKALTARQARGLLAAVPAGDVVRETRRQLAAELVDELEVIDARIKTAKKQLAVLVAETGSGLMRLNGIGPSGAARLLGDIGDVSRFPTKAHFASWNGTAPLDASSGDQTRHRLSRAGNRRINRALHIMAVVQLRHPSTDGRRYYDRRVAEGKTPMEAMRALKRRLSDVVYRQLVNDQKQQPANNGDPDTEARRTGPEGHLGATTKSCAAGSNPNAGASDKSLSEPASIDATPTSDASPDRSSTHLRRR

SEQ ID NO: 112147 - protein, 407 aa, unidentified
MDVHRDFLIACIAATNAQGVTEYQSRRFSTYTGSLRELRDWLLANDCKDVCMESTGKYWFPVHNILEESCHVVVSHPKFVKAIKGKKTDKKDAQWIADLFKHDLVRGSFIPPKDIRQLRDLCRYWVKLSSYMTGEKNRAQNCLTVSNFKLDDVFSNVFGKSASAITTQLLEHPGEQFDVAPFVDGRCKTPIAQIQEAVDGIFTYEQAEKLKIIRGHMDSLERHKAELESLILEIAQNYLPQIELLLTVPGIHDAFTAIRILAEIGADMTVFDTSKHLCSWAGLTPQNAESAGKKKTTRIGKSGAYLKPLLIQVALAASRGEKHPEIYGKKQALQKRRGKKKAIVAIARRLLTAIYHILSKNEPYNPAAYIQEDKNPMARQISQEKAFEMLVRMGFIVSNPSPLSSSG

SEQ ID NO: 112148 - protein, 330 aa, unidentified
MQFVGIDVSKKHLHLSWLRDPERGLARSKALDNTPAGHAQALAWAMQHSGAAPAELCFVLEATGVYHEAVALYLHQAEAQVVVANPLHVKRFAESHGFKTKNDRHDGQILVRFGHERRPKPWQPAPEPVRQLRALLARLEALEEDRQRETNRLEKAQVQGVPAPVLDSLQAMLGTLKEQIETLSRQIDQHIDSDPGLKGQREDLKSIPGVGEKLSAHFLALFAAKRFVDAKQAAAFLGLVPVERQSGTSVRARPRLAKNGDPRWRARLFLPAMVAARFNPDVSALYQRLLKAGKAKMSALGAAMRKLVQIAFGVFKHGLAYQSQCTPAPV

SEQ ID NO: 112149 - protein, 446 aa, unidentified
MSAVVGIDVGAYKHAAAVCRSGEREAERGVFRLSADRAGFDELDRWLERQGPVERVVLESSGHYYWPLASHLHRHGYGVAVVNPLQVKYFAKSRLQRSKSDPADARTLAAMGMSEEPRVKDPLLGAEAKEAARFWGGLVKEQAQVRQKLLRLVEIGFPELKECFEDPLCETALAVLREAPTARVASRKRVSTLADTTRPGDRRRLGENKARRLHELAERTVAPPELDAQMSFEVGMLIQQFDLLDKQIEIAEQRVAEVLDSELARRLQTIPGVGPALAASFIAEIGDIWRFDDFDQLASYAGVHPKELSSGTKGQNPETSWRMAKTGNAYLRSAALTVASCGDTLTEIRYTTLKDATTRLLQPLVFFSVSPSVWEKGLPYICKSVVCSYFSVFPDSVKVTLNACVRSFVTMYWVSATPSLWVLSVIVVPGAPSATTQTPRGMQNVS

SEQ ID NO: 112150 - protein, 315 aa, unidentified
MHAPKTFMVGIDVSKAHLDVAIEGKAAVVRFDNDAAGCAALAAAVIGAELVVVEATGGYEMTIVRTLMAAGIAVAVVNPRQIRDFARASGRLAKTDQVDARVIRHFARAMRPAQIPHIDDGRIALAALVTRRRQLVDMAVAEKNRLEHAPQAVAVLIAETLAALKAQLARVDAAIALAIDAEPDMTARRDLLLTIPGIGEVGAAVLIAELPELGAIDDKKLAALVGVAPMAHDSGTWRGQRHIAGGRATVRCALYMATLSAIRCSPAIKAFYTRLRDAGKPPKVAIVAAMRKFIIMINTILKRNTPWNEPQQHGC

SEQ ID NO: 112151 - protein, 402 aa, unidentified
MSNYFAGLDWASKTHALCVIDERGGVVERFDIDHDAGGLTELRRRLRRFGSPPVAIERPSGLLVDTLVDADFTVVPIHPNAVKASRPRYRSHGGKSDASDAYVLADLLRTDGHRFKALTPQSDEIRALRALVRGRDDLVATRVHLANQLRTLLESFWPGAAAVFADIDSPIALAFIERYPTPESASRLGPKRMAAFCAQHAYCGRRSPDDLLARLQEAPSAVSAETEMEAKGELARCVARTLTRLVEQLRLLSSRIEHLVASLDDGRILMSFPRAGRICAAQILAELGSVRERFATDAQLAAEAGVAPVTYESGKSKAVTFRWACNHRLRAAITCLADNSRHVNAWAAHVYANARARGDHPHSIRILARAWLRVIWRAWTDRKTYDPMQHRAAQVLLKTAGG

SEQ ID NO: 112152 - protein, 350 aa, unidentified
MDTNTPALASIGIDIGKEVFHIVGFGTNGKIAFRRKIKRLALVDTFKGLPSCVVGMEACLSAHFVSRALRQLGHQPRIIPSIYVKPFVKGQKNDYNDAEAIAEAALRPNLRTVREKTQEQLDLQALHRVRSRLVSRRTATINQIRAFLIEQGIAVRTGARALRNSLMAILENRQDEISPRMRGLIADLYEDWVGLDERIETIAGEIETIGEKEANCQRLMSVPGIGPLISTAVVAAIGTGEAFERGRDFGAWLGLVPRQYSTGGRSILGRISKRGSKYLRTLFIQAAKVILMRPHNWERFSFGAWLLNATPRLHRNKLATALANKLARIAWSILRNEKVFDVPRREAMAI

SEQ ID NO: 112153 - protein, 337 aa, unidentified
MRFCGIDLHSDNCVLVVTDEGDRVLVSRRCRNDLGVILGLLEAHRAELAGVVVESTYNWYWLVDGLKAAGYEVKLANTVAMRRYDGLKHGDDESDAVHLAQLLRLGILPEGYVHPPAERALRDLGRKRAMLVRTRTRHVLAVENVLSRQWGHRLRSAEIKGLTVEKVDELKLPESVALAVKADVAVIVAANGQIGALEGELLKAIRKCPKYTLLRSIPGIGEVLSIVILLEAGPIERFAAVGHFASYARCVGSAHYSNGKKKGEGNTKNGNAYLAWAFVEAAHFARRYCEEARRFFDRKRARTNATVATKALAHKLARAAYHVLKDDEPFDVKRCFA

SEQ ID NO: 112154 - protein, 299 aa, unidentified
MTVVTVGIDLAKNVFAVHGVNAAGKAILVKPLVRRAKLLELIATLPACLIGMEACSGAHYWAREFQKMGHTVRIMVPQLVSPYRMGGRHGKNDAADAAAICEAVARPNMRFVPVKSIEQQGQLFVHRAHQSYVSERTTLINRIRGLLSELGIVLPQAFKAFLSGVAQVLEDLPGYCNQVIGDLLNELFHIEEKIKNSEKLIPQLARDNSAAQLLMQFRGVGPMTATAIVASIGNGHDFRNGCQFSAWLGLTPRQQSSGGKARLGRITKAGDSYCLYWEPSLYCWEPLKMTIRSVSGLCN

SEQ ID NO: 112155 - protein, 350 aa, unidentified
MIIIGCDYHPGFQQIAFVDTETGDCGEQRLAHSEGAEKFYRDLAAQGKKVRVGREASGHARWFERLLAEVNFELWIGDATEIARKRERKQKTDRQDAQHILQLLMENRFPKIWVPSGENRDLRQLLWHRHRMVQARTRIMNQLQAVALNEGLRCKKKLWREKGRQQLEAFRLAPWASRRREDLLQLLDRLNPTISDLTQVIEQEVEKCPEARRLRTHPGVGALTALAFVLIIGRTERFQCGKQIAAYLGLVPLEDSSGNRRRLGHITKQGSSILRFLLVEAAQVTARSIPEWRNKYVHLTMRRGRKIAKVAMARRLAIALYWMWRKGWDYEQLRKFGSHAGQPGNRDGVK

SEQ ID NO: 112156 - protein, 323 aa, unidentified
MKHILGIDVAKAKLDVALRRPDGKLRSKVVDNKPEGFAVLSAWLLKQGVSELHACMEATGIYWEAVAEVLAEGGYTVSVVNPAQIKAFGSARLVRTKTDKADARLIAEFCAAQQPEPWQAPSPAIRELRALVARRNALDAMRTQEKNRLPVARDAVRSGIKAHLDYLEQAIAEIEAAIREKIDRDPDLKQQRALLDSIPGLGDKTIPVLLSYYGGTLRFAKAKEAAAFAGLDPRQHESGSSVRGKPRLSKVGHSALRKALYMPAMVAITKTDWGRAFRDRLKASGKPPMVIIGAMMRKLIHVVFGVLKSGRPFDPALHGVVDA

SEQ ID NO: 112157 - protein, 443 aa, unidentified
MAMRKREDEVVFPNAAGIDVGASSHWVAVPRHASEEPVREFGAMTDDLNALADWLIACGVDTVALESTGVYWIPVYEVLERRGLVVWLVDARQMKYVPGRKSDVQDCQWLQKLMSLGLLRAAWRPGDDVCVVRAVVRQREVLLTEQGSWVQRMQKALVQMNIQLAEVLTDVMGMTGQAIIRDIVAGQRDPAALARHRNGRVKASAAEVRRALTGNWREEHVFVLTQALAMYDSLAQRVSECDAKLEALLTPLGRHDVKLTGPAKRAGKNTPGFDLRSALARWAGVDLTRINGLAVTSVLTILSEVGPDLSRFTNVKHFCSWLGLCPGTKISGGKVLSARTRRSTNRVRQALKLAAMSLSRNGSALGAFYRRMCARMDKPRANTAVAHKLARMVYFMITRGEDYVDQGQKHYEEQQRHRSIAALRRRAADLGFAITPTAAAAPA

SEQ ID NO: 112158 - protein, 366 aa, unidentified
MESYVGLDVHSKRSVFVIEAEDGRVVARGDIPTTPAGFRQLRQQHELAAETPVALETGTVAFYAARELARVGLRPVVIDAHEVRVKAHRPRQKSDRRDAFELCEGLRRGHYRAIVHVPPAPIGALRETLSRRRHFVAVRVAEVNAVKRLLRAAGLGHLSKSLGTDAAWEKLLAALATEPALRTYVAQHHALWRCAQEQIVALEETLAAQPATIAKVAARLQTVPGVGPLVSLTAVAVFSDVHRFPSAKHAASYAGLVPSTDQSGDRDTHGHITKRGSAALRIMLCEAAHHAQRPNHPLHPYFARLCAQRGYKMAVVAVAHRLCRILFALLRDGADFDVAKLAVEEGVFRRTTVQRFRLKRATASRA

SEQ ID NO: 112159 - protein, 289 aa, unidentified
MSVSRILAKTIDPDLEYEVIGIDLAKNCVSAVLLTTDGEVIGIDRLDYPELEKSAQELSPTIFAMEPCTEMNYLVQKLEGWGHRCLVISGKNVRDYIESHFSSQKTDLNDAQAVAFLAKDTQLRTIKAKDPEQQKYASLTTLREQYIKQYRQTIVSLKGICQAWGLDISKGISGKARLIDLIESYVAFPEELRAGLVDMVTHAQTTQKVLNKITNTLEELAKNDKVCQLIQTIPGLGPIYSSRLRATIGDIRRFKTPKDFPAYYGLVPRSIATGYNEKKGKLPIEETKQ

SEQ ID NO: 112160 - protein, 323 aa, unidentified
MNKDIKYFGLDISHLVFDVTDSEGNYYQFKNSISGFKKYVKLLDINSHSVMEATGYYHYQLAYYLFENGHKVSVENPLSVKRFIQMRLSKIKTGKSDSKLICDYAQHVELTLWKGSSKEVQECLQITRTLTVYTKQCTMLKNKLHGEAVLGEPSKAVVRSLKRSLKHTEKELENLEARLLHLVKETHKDLFTRIKTIPGIGRKTAIMLIVLTGGFERFSSASELCSYAGLTPVIRQSGSSVKGRPRISKMGNQKLRNLLFMCSFSACKYNKACKAIYERLVAKGKSKKLALIAVCNKLLKQAFAIAKSGLIFDKEYKSTLVKN

SEQ ID NO: 112161 - protein, 308 aa, unidentified
MSLWIGIDVAKASLAIHLHPDAQLLNLPNSADGYAQLLAHLGSRQVDNVLLEATGGYERELMRALAEAGLPVTRINPRRARAFAQAMGKTAKTDPIDAAMLARMAELVVAERRMPDPVQEQLRAFVQRREQLVQQRDDERRRLKQATHARVRETLIEHIGYLRTQIQRIGKDIVHIRRQLDQALGERLMAVPGIGEVTTASLLAYLPELGSLDRRQIAALAGLAPYNFDSGQKSGKRCIRGGRAAIRRVLYMACWSVIRKQPDFAARYQRLLQQGKCAKLAVTACMRVLLIRLNAMARDKTDWISVPG

SEQ ID NO: 112162 - protein, 351 aa, unidentified
MRTYIGVDYHRKYSYMTVMDEKGKIIEQGQVANNAEAVKVFLNRAGVNGESAAVMEATRNWTVMHDWLEEMVDEVHLAHPLKVKAIAEAKIKTDKIDAKILAHLLRSDLLPEAYVPGPAAREARNVLRQRMFFVRVRTMIKNRIWGLLDRYPDLTESRPCRELFSKQGLAWMEALPLKERDREMLDEDLKLYHALEERISRSEQLVQKMAEGDRRVELLRTIPGIGKFFAVLIANEVDDISRFATEKKFFSYIGIVPSTYSSGVRTFHGRITKQGNKYLRWALVEAIWPAVRSDPELGAYYQKVKARKGANPAKIATARRLATIIYRVLSRERSYRVNGSRLPSLRHGGPA

SEQ ID NO: 112163 - protein, 422 aa, unidentified
MLEQTQDEQEIIARVAALDIGKAELVCCVRVPDPGGGSRRVQEVTTYSTMTRSLQVMADRLMDLGVTRIVMEATSDYWKPPFYLLEAHGFDVWLVNARDVKNLPGRPKTDRLDAVWLCKVAERQMLRPSFIPPVPIRRLRDLTRYRIGLVSDQTREKNRVEKLLEDAQIKLSVVASDIFGVSGRQMLAALISGQRNPQVLAQMARTRMRTKIPQLEEAFVGHFTDHHAFLLAKMLARIDALDKDIADLDTKIEAHLAPFAGAVARLDQIPGVGATAAAVIIAEVGLDMTRFPTPAHLSSWARFAPGVKESAGRKKGTGSTGHGDRYLARVLGEAAAGASKTDTFLGERYRRIARRRGNKKAIVAVGRSILVIVWYLLSDPEVGFHDLGSGYYDSRINPEHKKRNHIRELEALGYRVTLQPAA

SEQ ID NO: 112164 - protein, 390 aa, unidentified
MIYVGIDVAKDKHDCCILGPDTEELFQVFTIRNNSDGYGELFHKIESVSMDKSQIKIGLEATGHYSYNILGSLLDHGYHTFVINPLHTNLYRKGQSLRKTKTDKVDARSIAEMLVTDKTLKPYTGTSYHSEELKSLTRYRFELVKERAKLKTSVSRLVNILFPELESLVPTLHMNSVYSLLQELPGAYFIASSNLTHLKALLADASKGHYGREKAIVIRETAKSSIGSLMPAKSMELRQTIRRIDILTSDIKEVEQSIQKIMDECGSPITTIPGIKYRMGAMILAEIGDFTRFSNADQVLAYAGLSPSTYQSGQLISSYARMEKRGSKYLRYALFNAAIYVSVWDERFRLYLSKKRAEGKHYYVAISHVVKKLVRTIFRMEITHMSYQPL

SEQ ID NO: 112165 - protein, 339 aa, unidentified
MKITTIGLDLAKSVFQLHCIDSTGAVTRKKLRRSELLAFFEALPPCLVGMEACATAHHWARQIAALGHEVRLMPAAYVKAYLRRQKNDAADAEAICEAVSRPTMRFVPIKSADSQGVLVLHRTRELLIRQRTMLINAIRGHCAEFGVVAPQGPRRVLELVGQVRDGAVASLPEIGRAAVLMLGDQLTGLRLQIHALERKLLAWHRQDRASQRLATIPGVGIITATAMSASVTDPAVFRSGREFAAFLGLVPRQNSSGGKDKLGRISKKGDGYLRKLLVVGATSVIRRSKTADLAAAPWIRSLLERRPARVVTVAMANKTARIVWAVLLRGDIYRPAMAT

SEQ ID NO: 112166 - protein, 343 aa, unidentified
MQGITTIGLDIAKSVFQVHCVDAEGNVVLRRQLKRRYLLAFFQRLPPCLVGIEACASSHYWSRELEEIGHTVRLMPPAYVKPYVKRQKNDATDAEAICEAVTRPNMRFVATKTSEQQSCLTLHRIRHLLIRQQTSVINAIRAHLAEFGIVAPVGRNGVDQLLGIVADLADKRLPGVARTCVAALGAQLRMLKAQILEFDRMIRAWHRSSEASRRLDAIPGVGPALATALVASVADPKAFRSGRDFSAWIGLVPKQNSSGGKDRLGSISKRGDRYLRSLFTAGALAVIRYAKIHGTTHRPWLTALLTRRPTKVAAIALANKLARMAWAMMAKGERYKEPAALAA

SEQ ID NO: 112167 - protein, 408 aa, unidentified
MQYTYVGIDSHKSTHTAVFLDFFFDRLGEITFENMPSKFGNFLAEADKLKMEGTILLFGLEDVSAYGRTLTVFLKNNGQAVKHVNPIFVARERRNQTITQKTDSIDAECAARVLLSKFHELPDAHPDDKYWVLRTLVVRRDFITRNNISLKNHLHSLLTHHYPNYRSFFYETDGPTALAFFMWYPSPSTLEGVTVNELAEFLRGPSNGKLGEERAQEILDSLQDTTVPFQDLRDDAVQSTIRQIQYNQRELDRLDITLADVLAGFETTLTSMTGLDVVSASQILSCIRDIKRFPTPAKLAQYSGVAPVSYSSGKKDLTFSNKRGNRELNSLLYNLACRLAMTVGPTNKVINSFLYEYYHRKMSEGKTKRQALKCVQRRLVNIIWRMLTYHEKYANPPTFDLPKKEEKD

SEQ ID NO: 112168 - protein, 444 aa, unidentified
MAMRKREDEVFPNAAGIDIGASSHWVAVPAHLAQAAGDEPVREVGAMTDDLNALARWLVKLGVDTVAVESTGVYWIPVFEVLEQHGLKVWLVDARQMKYVPGRKSDVQDCQWLQKLMSLGLLRAAWRPSAEVCVLRAVARQRETLITEQASWVQRMQKALVQMNIQLTEVITDVMGQTGQAIIRDIVAGERDARALARHRHWRVKAGEAEIVKALTGNWREEHLFVLKQALGVYDDLGRHLAECDAKLDALLDQRAAAKVDLGPTPRAGSKARAEHAIRQRLADWAGVDLTRINGLGVTIVMKLLTEIGPDLGRFATVKHFCSWLGLCPGTKISGGKVLSAGTRRSASRARQALKMAAQSLCRSESALGAFYRRLCARMDKPKANTATAHKLARMVYFMLTRGEAFVDQGQQRYEEQQRQRSVAALKRRAAALGFQLNPVGTVA

SEQ ID NO: 112169 - protein, 375 aa, unidentified
MKEKVRFLGLDVHAETIAVAVAEPDGEVRSLGTIPNRAEPIRKMIRKLGTAEKLRACYEAGPTGYVVYWQLAELGVPCEVVAPTLVPVKAGDRVKTDRRDAEKLARCYRSGDLTAVWVPDEGSEALRDLVRAREAAKQDQMRARHRLSKFLLRSGQRPPTGVRPWTRPYLIWVAQLRFTQSAQESTRQDYLHEVEHMRARVTRLEQAIMEAVKLASPALQQVINDLQALRGIADISAVTIAAELGQVSRFGSARELMGYCGAVPSEDSSGKRIRRGGITKTGNAHLRRIVGEAAWSYRRPPCIWYGLRRRQESISEEAKEIAWKAQHRLHKRYMKLGAAGKPQGKIITAVARELLGFIWAIGIRAETIAGQQAAA

SEQ ID NO: 112170 - protein, 346 aa, unidentified
MYQDTLIAIDLSKNSFQGCLLDKYHHERFNRKFSRNKLTDWLSRQQPLTVAMEACGSAHHWARLVERMGHRPLLVPTRTVSRYREGHKTDATDARATGVAARQPKVKFVAPKTVEQQGIQGIERIREHFSDHLTATSNMIRALLYEFGLTIPKGISAFKRGVVEIMEDAENDLPMPLRIQLIESWEYYLELEARLKIAKRARDQIIAQHEVCQQLMQLQGVGPVNSLGLYLTLGDRGASFGNGREASACIGVTPKQYSTGGEVTMLGISKKCANKRLRSNLIQGARSVIKALKKRDPRNGLEAWLKALIARRGEGRAAVALANKTVRLAWAMLHYGENFKLHPDMA

SEQ ID NO: 112171 - protein, 416 aa, unidentified
MIGQKEKNEMKHVIALDVSKGKSTVAIYDGHRQCEFEGVLHHTWGDFERLHERMEEMTKQDGQAPDIVFEATGIYSKPVEAFLKDYGYTYCRMNPLEANLQMATMRRNKTDISDAHELAKTHFKMERETTYIQDDYYEQMRALTRYYDEIDEEIILLKSRMHAILQLSFPELEKLITPSSALFLNIVQLYPHPALLQAHSKTIIKNRLKVNTRKKLSLMRAEAKAITLLEAAENSYPAIKPTDIRCDQARDYAARVADLLEKKDTLVKQMVELSEGRKEYLVFRSIPGIGDSTACRLIGEIGDIRRFQNAKQLNAYTGIDIMRYQSGNTQYRDRINKRGNKHLRKILYFMVCAMLMAKGKPNHFVDYYYKLKKQPLRKPHKVAIIACINKFLKVTFQLLTRGILYDYESALPAQKS

SEQ ID NO: 112172 - protein, 344 aa, unidentified
MHYKLITIDLAKTVFQVAAFRDDNTIAFNKRVKRAQLLDTLRQCEPTRVVMEACYSANYWGREIAKLGHDTRLVSARVVKAMLVGNKNDSNDAVAIGEAAQRPRVQLLRVKGLHQQDIQSLLRARELLIKERTALINQTRGFLAEYGIIVAQGLAQLQQALPALLEDAENGLTTTIRSLLKRWHERWLQQNQELETLTHELIALISHDEVFKLLQSIPGVGPIVAAAIMASVNEITDFRNGRQFAAWLGLTPTQYSSGLVNRLGSISKRGNEGLRRLLIHGVRAVLNWSEKKEDGLSKWLQQLKARKHSCKVTVALANKLARIVWAVLTTRQEFDITKACQAMK

SEQ ID NO: 112173 - protein, 352 aa, unidentified
MNFIGIDLHKQTISVCVKNQERKVLKRQSLNCAEPGKIVAFFREWGEFQAVVEATASYEWLWQLLEPLAQRLVLAHPKKLRVIAESKNKSDRLDAEVLADFLVLDMIPEAYRPTLRQRQHRALIRQRCFVQKNLTRVRNKIRRLLSNYNADRRDLFTRAGLQYLREAKKQLSDADRFVLNQLLAQWNYHRQQFQAVGRRLKTFAQKASIKEKEIRAVLGSMPAVGPTTIEVVLSEIGDIERFRSQKKVVAYAGLAPGHRESAGHKKDLGITKEGSGLLRWVLIQTAWRMVRCTLRWRSVYENLKKRRGSKRAIVAVARRLLTVMAALWRTGQRYRLDSGGPPLAQAVPAPAK

SEQ ID NO: 112174 - protein, 379 aa, unidentified
MPHKQDDFARLPQQCQKYGLPPGECHIAIETSFNLLADFLWSYGFDHVYVIPPSVVKASRSRYTSSGARNDQSDAYVLADLLRTDGHRFAPWHPDSTLTCQMRSLVSLLQQLTRRTTGLSNQLRSLLLRYYPALLELFPDLTAKTALAFLAAYPTPQAAAHLNAQALRLFLHQQRYPRPDRLVAKLPQLLSPTLQTSPATAEIYAYPAVTLAAQLKVVLDQKADVQAQLTSLFRQHPDHDIFASLPGAGEFLAPALLVHFGDQRDRFPAAADVQALAGTVPVTTQSGKAHHVHFRRSCDRQFRYFATQLAICAVTNSRSPYAVAYFQDQLARGKSVNLAYRCLANRLLAVAWKLWRSHTTYDEAFHAQQRLQHHQPLPT

SEQ ID NO: 112175 - protein, 428 aa, unidentified
MNCNTQNAKIASITEKTLIVGIDVGSETHFARAFDWRNYEYTKKPLEFSNTEAGFLTFKAWVEDIAEKQGKTAVIPGMEPTGHYWFALGKFLQDNGMKPVHVNPHHVKKSKELDDNNPNKNDRKDPKTIAALVNEGRFSYPYIPTGIYAEIRSLSNLRFQTQEELTRIKNRIARWFAIYFPEYKDVYGDLKAVSGRMVLKVAPLPEDIRKLGVEGVNQIWRSAKLRGAGIKRAKTLVSAAEHSVGSKEAPEAARMELKNLLDDMDVYVSRLDELLVNIEEKLKEIPYVDKLMEIKGIGLVTVSGFIAEVGDIGRFDNPKQLQKLAGYAIVANDSGKHNGESRISYRGRKRLRYVLYEAAISLIGKNAEFKSIHEYYRTRKENPLKKMQSVVAVACKILRVFYTILTKGVDYDPVKLLGDIKRPQLQAA

SEQ ID NO: 112176 - protein, 341 aa, unidentified
MEIDVLGIDLAKHVFQLHGADRRGRAVHRAKVSRSALFETVRTLGPRLVVMEACSTAHHWARRFQSLGIQVQLISPQYVAPFVKTNKNDRNDAEAIVEAASRPAMRFVTVKSIEQQDIQAAHRMRAILLRQRTALINQMRGLLGERGFAIARSPEAFKRAMPQLLSTSAVELTSFCQTLLTELLQHLKTLEERVRLIEASIQSFMKQSSLCKKIAAIPGIGPITATAIVAAVGDAQQFRNGRHLAAWLGLVPRQYSSGGKPRLQGISRRGDTYLRTLLIHGARAVLRYVKAKTDPQSLWLQELIARRGYNCTAVALANKNARIVQALLSSDEHYRQPNAAA

SEQ ID NO: 112177 - protein, 410 aa, unidentified
MEVVHPICCGLDIHKASIQACLLTSDAAGRAHRELRRFSTMTSDILAMADWLRAAGCLAIAMESTGSYWLPIWNLLEDEFALLLVNATHVKRVPGRKTDVKDAEWLADLLRHGLLPASLVLERGERELRELTRYRTTLVQERAAEVNRLQKTLEGANIKLGAVASEVLGKSGRAMVEGLIAGEDDPAVLAELAQGQLRHKLEPLRLALEGRVGPHQRFLLGQQLTHIDQLTTLIETLSSEIEARLAPFADLVTRLDAIPGIGVWTAQVLLAELGTDMTRFPTAKHLASWVGICPETRESGGARHSGHIGQGNNWVRTALVEAGYAAGRSKHTYLGAQYHRLKPRLGHKRATIAVGHSILVSVYHMLARGTAYHDLGADYLQGLNHEVATRRLVRRLERMGHTVIIEPVAS

SEQ ID NO: 112178 - protein, 352 aa, unidentified
MTVTIVETRAPARAITGGVDTHADVHVAAALDPIGGLLGVAEFPAGPAGYAQLLGWLRGFGAVCLVGIEGTGSYGAGLARHITAAGVRVVEVDRSDRQDRRRQGKSDPLDAVSAARAAQSGRARGAPKGRDGAVEAIRALMVAKRTARAERIQTINQARALVLTGPDDIRVRFAKHATGALVAELAALRPRPGSMVRYHTLLSLRELGRRAQFLDAQLERLNELIVPLVATRAPGLLALHGVGPYTAAMLLVAAGDHPERLRSEAAWAHLCAAAPIPASSGKVTRHRLNPGGDRQANHALWQIVITRMSSHPATRAYVVRRSKEGLSKKEIIRCLKRYAARQVYPHLRAPGG

SEQ ID NO: 112179 - protein, 316 aa, unidentified
MKYCGIDISANTFDVCIISDKDLYYNSFPQSENGYFNFLSVFQMLKIDVVGFESTGVYHKAFEKYLRDNGVEPFILSPRSVSLFIKSASKNKGKTDKTDAYFIALYLSKTDNLVSYNFPIRDKFKPFTTSLMMYDKQIRQMKNLLHSLEVGGSDSFLFESISNMISSLSDQQNDLKRYAMAELYLTIPDALKIKAEIKGVGDGVLLHILPMIYDNFDKYTLKQIVSFVGISPVPFESGTSVKKFSHISHRGDNVARRVLFMSAIASVRSNPILMEKFKRMHESGKPKKVALVAVMSQLLRAIVSRLSYHTGRPIKK

SEQ ID NO: 112180 - protein, 359 aa, unidentified
MSKQKLNQKRNKDNPKLTKQNVLQSYDHYIALDWSIKNMAIARLKPKTNEPKIIDVPSDIKELKLYLKNLQGTKIITIEETTTSHWLYVELYDYADKIIICDPYRNRLLSDGPKNDKIDAGKLCLLLKNGMLKEVFHSNDRLYELRKLVSYYDDEVKAGVRLMNQKSALYRAENKSYKKKETIKDDSINKFIVSQLDEKINLYIDKKENYEKEFYKITKGNKVIKSLMSIPGIGIISGVTILSMVIDARRFKSSNHYLSYCGLANHKKMSGGRNYGKRLPRYSRKLKSVYKSAAVRVISTNNPIREYYDYLVKEKSLTEQNANNAVARYIARVSLGIIKSGKKYKPYNWRENKKRNDAA

SEQ ID NO: 112181 - protein, 349 aa, unidentified
MRYIGVDLHKTNFIVCFLTEDEQTKTETFTLDKRGLSRFKRGLNPEDKLAVEASANTFYFLRQIKDRVGEIVVVDTYRFAVIAKSKKKTDKADAAALARFLKLGYLPSVPVPTEQVEQLRHLLQARESMVRMLTQLKNMAHAALVRSGYAKGRAAFNSKRSRGRLLKLEELTALDRQIIEVAIRQMSQIEEEVERLEAEIISRGKSLAGLKRVLQIHGLNLIAAIGLLVEIGSIELFETSKQLVAYSGLAASVRQSNERVKRGKITKQGRKRLRTICIRAVLSMVKRTKTPLMEFYEQKKREKGAGKAICATARKLLVIVFVMLKKELDYWYVEDRLYNQKLNALRAAA

SEQ ID NO: 112182 - protein, 432 aa, unidentified
MKAVKYSSVNVNSVDQKELDSQLRGDRLIMGLDVAKKKEYAALADDTGDSLGVIHWEHPWQSRKFADFIDGLKPSRVQMVIEPTGSYGDPLRHLAYNRGWEVWKMAPKRVHDSKEIADGVPSIHDSKAAHILVWLHNQGLTERWAPKAISRRRVKTLIRQLSRLQGNWQRHLGYLEAEMARYWPEIIQVWELKRATLLGILINFGGPEEIVKNEAEVRAYMRKKGGPFLKKNRIDAVIKAAHDSLGVPMLKSERISLKNLAEHADRLRRDRKMFKRKLDQIIEQKEIRRIGDEVGLPTAAVFWDKLGSFRDYEKVGQLIKAFGLNLTEHSSGTYDSPLHIAKRGPADARASLYLATCRKINTDPFFQAWHRKKVARDGGPKKADKNVSVIALMRKYVKGLWHVARGKQFDSTLLFNVSKLKSQKSMVTASMN

SEQ ID NO: 112183 - protein, 417 aa, unidentified
MNAELSQFTAVIGMDWADKKHDICVQAIDSDVREFSRISHKVEKIHEWAQSMVERHGGQMAVALELSKGPIVSALQKYNFFVIYPINPTTLAKYREAFNPSGAKDDPTDAELALDILLNHPNHFTALNPQSVEMRSLMTLVEQRRSIMDDRVRITNRLRNALKQYYPQVLDWFDHIDTPLFCDFIKQWPTLTQVKRARRTTLEKFFHEHNMRRKLLLEQRIEAIKSAQPLTTDNAVITPYRLQALTLVDQLAVVLHALESYDQEITTLAPQHPDYELFNTLPGAGPHLAPRLLVAFGEQRERFANAAEVQKYSGIAPVTERSGQKSWIHWRWQCPTFLRQTFVEWAAQTINKSYWAGLFYYQQRAKGCTYQAAVRALAFKWIRILYRCWKTNTLYDESRYLKVLRDRGSPLLATENA

SEQ ID NO: 112184 - protein, 348 aa, unidentified
MSTSRDLFEASEKSAPLWSGADVAKEWFDAAVWPANHPIDVRRMRELPTKRFERTFEGARAYLEWAEKKLGATPRVVMEATGSYSTELAIWLIAQRPACQPAIINPRTAKDYIDSLDPRNNTDQIAARALARYGMERCPAPYEPPTPERAALRELTRFRVIVIEQRVAHEARLGEVSHHSAVTKMIRADIKRLEKQEKKLDEEIRAHIRKNPALNEDIQLLRSIYGVDWTVAATVLAELGNLRRFEHARQLTAFAGVAAGRKESGKSVHGRAKVCKMGSPAVRRVLCMAARSAVRGANDWADDYSRLVEAGKTKRAAESAIARKILVTMRAILITRKPYEKHYGAACG

SEQ ID NO: 112185 - protein, 335 aa, unidentified
MHYLYYVGLDVSKETFDASLVAFEDANEMAHRKFANSRKGICSCLHWVEKRHGILLDDVIFCAEDMGSYISEMAVCASDRTLNFNFSLISPLVIKYSMGIARGKTDRVDARRIAEYAITHYRKIALYLPAEKELCQLRTWLILRAHLAKQRVAKLVLLEKLDYKEKFADVSIQRSMLQEEIAYAETHMKTIEREMKELITADSNICRNYKLLTSIKGVGPITAIVMLCSTLNFTKITDHRKFACYCGLAPFEHSSGTSVCGGCHTSSMANRDIKVQLNRRALIAIRCDPQLKAYYERKVAEGKHKFSVLNAVRAKIAARCFAVVRRGTPYVALQI

SEQ ID NO: 112186 - protein, 416 aa, unidentified
MLIVGCDIGSETHYIRAIDVRGRELSKGAFAFSNTAEGFVSAKAWMMDLAARNDKQQIVLGLEPTGHYWFAQTAWMISNGISVVQVNPYAVKQSKEIEDNSQRKDDRKDPKLIANLVKDGNYGMPYLPEDIYADMRRLSMFRDQLTEDRIRNINRLHRELKIYFPEYMDAFGKIDGAFALEVLKVSPIPADIIALGTEGLRNIWHDAKLRGRGYSRASEIVSYAKASVGLTDGTDAGKESVKWFAEQIVKLNEQLAEIENALHKKCMEIPYAENILEINGVGENILAGILAEMGDISRFDDVKEIQKLSGMGLVACSSGKHKGQTKISHRGRKRLRYWLFQAAKSAVVHADEFKQLHVYYTTRVDNPLKKMQSLIVIACKILRVIYTILKTGTAYDPIKLLKDIKHPTNVPAQAVA

SEQ ID NO: 112187 - protein, 317 aa, unidentified
MDTPPVFVGIDVAKSHLDVASRPAGATWQVPNDEAGITPLVAQLQEQAPTLIVLEATGGLEAPVAAALATAGLAVAVVNPRQVRAFAHAVGQLAKTDVLDAQLLARFAEVVRPPARPLPDSQAQALTAVLTRRSQIVAMLVAEQQRLGTTRLALRPRVEAHLAWLRTERDALDRELAQMLRASPLWRAREDLLRSVPGVGPVVALTLIAELPELGQLNRKPIAALVGVAPLNWDSGRLRGRRGIWGGRARVRAVLYMSALVASQHNPVLRPFYERLLAAGKLKKVALTACMHKLLIILNALVRQGVAWRAPTPVASA

SEQ ID NO: 112188 - protein, 358 aa, unidentified
MNAIHYIGLDVHKKTISYCIKTAAGQIVKEGTLAAERSVLRSWAGSLQQPWHGAMEATIFSAWIYDTLKPYAERLEMGHPAKMKAITAGKKKSDAIDARTIADLVRCDLLPGCYVFPPDLRDLRRLMRYRQMMVQQSVRMHNKTAGLLMESGVSFHKTKLHGKKYFSNLIKSLEEVPESVKDLLRMSRGTKDMFEGVQKQLLGRLLTDAALKQRVERLSSIDGVGEITALTWALEVGDPHRFASIADAVSYCGLTAALHSSAGKQQRGPISKQRNAWLQTALIEAAKLAPRWNPQLAQLHAQQLTRGHANRATLQVARKLVAYLLAVDKSGQPFQVRTPPPKTIPTRKKARRHLASAA

SEQ ID NO: 112189 - protein, 359 aa, unidentified
METQSNKIDFSNQNIYVGFDVHLRSWKVTILTENVAVKTFSQDPNPELLYQYLKRNFPGGNYYSAYEAGFCGYWIHNKLISLGVNSIVVNPADIPTTNKERVQKEDKRDSKKIARSLRNGDLKAIYVPGLKTLEDRSLLRARATMVKDLTRFKNRIKSFLYFHGIEYPESFSKPKSHWSNRFMTWLESIELTEESGKITLSSLIHQSKNLRASVLDLTKQMQKLSQREAYQNDVKLLRSIPGIGIVMAMTILTELETILRFGNLDQLCCFIGLVPSTNSSGETEITGDITPRGHTILRNAIIESAWVAVRQDPVLLKSHLEYCKRMDANKSVIRIAKKLLSRIKFVLKNKQPYAFSWTD

SEQ ID NO: 112190 - protein, 430 aa, unidentified
MKQFELLHSLFVGIDVSMKENVVHAMPFSPEDHPGHAHLRFSAPNTPAGSAEIVEKVGDFLKFYPDVTQVVIALEATSVYSFHLATFLSVAQFNGHIPAIVYSVNPKEIHAYKKTFTDVGKDDYVDAMVIADYARSNKIRSRPWKGPELLGLRILTRLRFHIARLIGILKNSTGNSIYLECSGFMTGENPFCNVWTATCQQLLTTFQGPDEILNLSDEELLNFITEKGHGRFSHPLDVVKKVKKAARNSYRLDKRVYEPLTSGLSVSFFIIHSLEAAIKKLDKSIETIAKSFSNDSYQILLSIDGVGPVIASGLLAEIGDIKRFETDDDLAKYMGLTWRGKQSGQSESPVKHMSKAGDVYLRYYVLLATGQIINYSAKYREAYERIRSRKTLFPYRAALNLVARKIVRLIFTLLDRHQLYSDNKVMVTLE

SEQ ID NO: 112191 - protein, 366 aa, unidentified
MSSVTSAAGPIHLGMDTSKNTIVVGILMPGDEVPVIDRIWNEEGSVRHLVSRLGDPAALRACYEAGPCGFELHRLLASMGVACDVVAPSLIPRRAGDRVKTDKRDASRLARLHRAGELTSVRVPSAAEEAVRDLVRVRAALLADRKRAQQRLTAMLLRHGRVWRSGSYWTQAHERWIAGQRFEEPALAVALAHYRAALDTRRAELDAIEAELAPWAGREPLAGTVARLGCYRGIAELHSLALAAEVVDWRRFPSARAFMGFTGLVPGEYSSGDKTRRGSITKAGSAPVRTALVEAAWAYRFKPAIGVTLRRRQRDAEPDTLARSWKAQRHLHSKYKAMTSRGKPPAVAVTAVARELAGFVWAEMTS

SEQ ID NO: 112192 - protein, 341 aa, unidentified
MRYIGLDVHKDNITACVLTSTGKPKFEKNFIKDSESWNLSELMEYGDREGFCVMMESGTYAYQPFRYFSDRGVETHVVHAQALKVITQSDKKTDRKDAQTIARMLRLWKKGDIDLQMAFMPTREQCELKDICRYREEISKKIGDETRRIKSHMSRNCEHLPEAYDNFQTQRARNYVRFNFSSDITLMSRMAELERLFKERDSIRNEVESRLPGSREVELLTTIPGVARQTAVQIMSMIVDIDRFDDSEKLCAYFGMVPRVRDSGGKEHHGRMTKNGDRMMRAIMERVTESHVRNCDSSVTKYYKRKCSEMGTKKALITASRKMLSVIFAMLKSGSDFRLAA

SEQ ID NO: 112193 - protein, 436 aa, unidentified
MDKGTDTWSRRTAFVGFDWASDHHDLVLVDQRGQIVEDFRFDDTAEGWRLLINKLSRHADPAVAIETSSGATVERLLAAGYAVYPVNPKAAKRYRERKAPCGTKTDRLDAWSLADALRLDGHTWRQLKPDDPLTVELRLLCRDEIVLIEQRTALVCQLRAALHEYYPVALEAFDDWTLPSTWAFVEAFPTPAALAAAGKRKWEKFLHTHKLYRRETYEKRLKLFAQAQTFRGSQAATNAKSMLAVALAGQLRVLQRHLDKFRDKIKKLFGQHPDQDLFGSLPGAGEKLAPRLLAELGDDRQRFDSPEALQCHAGTAPVSYQSGHFKKVRFRRACHKVLRHTVHLWANLSRVKCPWAQAYYQKKRAEGQSHACALRCLGQRWLKILWKMWQTRAPYDPELHQRNQLTHGSWVLGLLAAQNASLTTAHTSTARATKGL

SEQ ID NO: 112194 - protein, 454 aa, unidentified
MTVSKPARLRIDNLPTVFPNAAGLDIGSAEIAAALPPDRDVTVVRTFTTFTADLRQLVAWLLDHHIDTVAMESTGVYWIPIYEMLEAAGIRVYLVNARHFKIVPGRKSDYNDAQWLQRLHALGLLTGSFRPDDEMCVLRSLLRHRAQLIEHRSPHILHMQKALKLMNIQLPEVLSDVTGVTGMAILRAIVAGERRGEVLAKLRRPGCRRTEEDIIHALTGTWRDEHLFVLAQSLDLYDFYTTKITDCDHRLDQQCSSMKPRFDVEGEPPAPPTSRTKKNSNSKNHPTYNVRAHLVRILGIDLVDVIGISESLAQTIISEIGTDMSRFPTSKHFCSWLGLAPHNDISGGKVLRSRVIKVHNRAGQALRQAAQSCSRSHSLFGAFYRARSARSSSEEAVVATAHKIARVIYHMLTCHEAFKPESIRAFDQKRQQREVKHLQKRAKALGFILQPVTA

SEQ ID NO: 112195 - protein, 354 aa, unidentified
MSTKTKSLSFENQVFYIGIDVHKRDWKVTIRSNDMQLKTFSLNPSPEDLAAYMRRNYPGGEYRSVYEAGFCGYWIHRELTKLGFRNIITNAADVPTTNKEKDRKSDPVDSAKLSRELEHSSLMPIFVPTPEQEALRSLSRLHRQHTKRSVQIKNRIKGFLNSAGYELPENSEVKHWTGNFITILEEIAFSVETDRFILDEHISELKHIRKKLLLLLREMRYISKDATTIKLLQTISGIGLITAFALYTELVDIHRFRSLDHLCGFIGLVPSTHSSGTKEITCGMSNRQNKFLRRIIIEAAWVAVRKDPALTAAYNTLIRRMSKQRAIVRIAKKLTNRIRYVWLHQKEYVTAVVE

SEQ ID NO: 112196 - protein, 366 aa, unidentified
MGRSQIEIKVRPIINGLSMPKTRLLLTFKITKMEFRNFIGIDISKDTFDFALIKDNQVASCVSDAVTNDSAGLVKLEEFLKKQGLNMEETLFCMEHTGIYCRLLSHYLTERKYHVWLEMPVQILRSLGIQRGKNDHLDAKRIAEYACLKKDKAVLWQPPREIVIQINDLLTLRDRLIASRKSLKHPIQEFKEAGFKDTAKLIESRCINTLKAIDKEIQQIEKELDNLINKDSNLKRLYKLSTSVPGIGKITAFTLLYFTNEFKLYSNAKQMACYCGVAPFENTSGTSVKGKPRVSHFANKRLKKLLHMVAMSTISSNKELSNYYARKVGEGKNKMLVINAIRNKVLHRLCAVIRRGTPYQLEYQLA

SEQ ID NO: 112197 - protein, 417 aa, unidentified
MLEYAALVGIDWADAKHDVCLLDCASGKREAAVIKHTPEELDQWADSLRRRYPGQQVAVCLEQARGPLVYALLKYDFLTLYPVNPKTLAKFREAFTTSRAKDDPGDAAYLADLLALHRDKLKAWLPDDEKTRTLQYLVEHRRRLVDDRSRISNRLTSLLKGYFPHILDWFPDICTKLVADFLLRWPSPGSLRRVHDTTLRRFFREHHSTRQQVVDLRIERIRSSAPLVTDRAVIAASVVMVKALATQMKATVEAVAEFDRRIERLCRTHRDYEVFASLPGSGTVYSSRLLAAFGTDRTRFASAERVACLAGVAPVVERGGQSRWVHWRFCCPKFLRQSFVEYAGESVRHSFWARAFYMQQRAKGKSHQVAVRALAYKWVRIIYRCWQTRRPYNEVEYLESLRQKGSPLLKYASENPA

SEQ ID NO: 112198 - protein, 351 aa, unidentified
MDKDITRVVGMDVSDRHCHLCVLGMGGVVEEESKVPTTAPGIGRRFGQMDRVRVALEVGTHSAWIGRLLEGLGHEVILANPRRVRSIYQSNDKSDTVDAEMLARLARVDPALLYPVAIRSEERQRGLVLVRGRRVLVETRTKLVNHVRGVCKSLGIRLPQGAASGFHRRASAFLPEEVLSLVEPVLRQLEALEGSIGDCDRRIGEMARGMKGVDLLCSIPGVGPLTAVAFVLTIGDPSRFRKGREVGSYLGLRPRRDQSGDVDKQLRVTRAGDVYLRSLLVGCVHYILGPFGPDTALRRWGLSLMERGGRGAKKKAVVAVARKLAVIMHRMWVTGEVYRPFPQGKPQEAAA

SEQ ID NO: 112199 - protein, 394 aa, unidentified
MGKFYVGIDISKDRSSANGIDDHGRSRFEISFDMDGTGFDELLKVIETNSDGYENVVAAMESTACYHINLYSFLSAKGIKAFIINPLLIANYAKLSLRKTKTDKKDARTIAQFILAHKDSVTQLAVSQDLQDIRDMARERESLCHQISAVKVEIQRVLQTTFPELAAMTNPLTKVMLHFIRRFPSARLVSAAKPSAIEKTLKEKPCSCRLRFTPKELIEVARTSIATVSPGKELILSGKIETLLHLQKRRDELTKALTEYCELSIVEDLKIVTSIGGISNNTATTLLAEIGRIDNYASHKNLIAFAGIDPTVYQSGKYEGASRISKRGNRHLRRVIWLMTISVIHHNPVFRNYFLKRRNDGQPFKKAVFATAHKLIRVIFAMLSKRAYFKEECV

SEQ ID NO: 112200 - protein, 404 aa, unidentified
MLVNLCAALCASDDAQRGNGGGRDVRGPSRDTPEDHPLYLVLWPHAVDRSSLGTAFCESVPSEVAAWDLSKPEQLVGTLLCDPACKVGYRKMNEICVGIDVSKSRLDVAVGDGEQFSVSNDLTGHVQLIERVLAVKPRLIVMEATGGLERAVAAQLTAQELSIRVVNPRQVRDFARAAGILAKTDLLDAVVLVRFAQAMQLEPRPLPSEQVQALQALIARRNELTEMLTMERNRLRLAHTSIKRDLKKSIEWLESQIRSTDNDTGSLLRECGIWRDKVELLESVPGIARLTSLRLVTTLPELGTLNRRQISALAGVAPFNQDSGRWHGKRRIYGGRAAARTALYMAALVGSRHNPVLRAFYQRLRAAGKPAKVALTACMRKLLTIINSMLRDRRPWTPQLVTEA

SEQ ID NO: 112201 - protein, 329 aa, unidentified
MKKDWYVGIDVSKKWLDVAIFAEDSDLKGYIHTQVDNDKHGYKELLRWLKEHDVDVSSCMYGMEHTGFYSDGLQHFHDKKGYKFTMLEPAVIKHYPIQPREKNDRLDAAKIADYLFRFNDTIKLSTLPDKTMEELRNLHRERKFYVEDRVCYMNRKQVVGKEEAKRLDKMIENLDRMVDSIEEKIRNIIQENELLMESYLYLTSITGIGFVNAVNAIVITQNFTAFKTARDYASYLGVAPHTKTSGTTVRWKPKPRKHCDLTAKADISQAAKIAVVHDIELKRFYERKCNGKNDADTIRKAMNAVKFKLVLRMFAVVKQKHTYKQLDTI

SEQ ID NO: 112202 - protein, 406 aa, unidentified
MEVLHTRCAGLDLSKRDAKACVRIVPVGRSRASEEVTTWSSMTAGILALREHLLEAEVTCVVMEATGDYWKPFYYLLEDCPFEVMLVNAHDAKNLPGRKTDVSDATWLAQLCAHGLLRASFVPPQPIRELRDLTRERAREAQRMEKVLEDAGIKLSVVATDITGVSGRAILAALAAGERNPAVLADLSIKRLRAKIPALTQALAGRFTDHHGFLVELHLNLIDQHTAAINTLTQRIEEAMEPFRASRDLICTIPGIGVLTADVIIAETGGDMTVFPSAGQLASWAGVCPGHHESAGRIKSTKTRPGNRWLKGALGASALSIARHSGTFLNAKYQRLVKTRGRAKAIVAMEHSLLTLVWTMLTTGTLYDEPGPEYYSRRDPQRSKNHAIQQLEALGYDITLQPRGAA

SEQ ID NO: 112203 - protein, 355 aa, unidentified
MRQLEKVLKEVAGIDVAQKELVVSLGRLLESLSIEIFAYKVFVNSDKGIQSMIEWVSSCCENAAQMRYVMEATGVYHERLAYALESMNIDLSVILPNKISNYARSLDIKTVTDKTASQAIAQFGLERKLDNWVRPKDIYRELKQLTRERDQIVEERAMVKNQRHAEKSEAMPNQKSLVRIEDRIKFLNRQEKEIKLDIATLLKSHPELKQRVDNICTIPGVGELTAVTVLAETNGFELIRNKKQLTSYAGFDVKEKQSGTSIKGKPRISKRGNRHLRKSMHLPSLSSVKYNQSHKDLYVRLVSKSGIKMKALIAVQRKMLELIFVIDKNQNPYENDYHQKRVHHTNAEVPLQANL

SEQ ID NO: 112204 - protein, 457 aa, unidentified
MRQAKRSRSRRDLSPIHPAAAAIDIGATMHVAAVSPDRDPEPVRTFQTFTDDLHRLADWFARCGIKTVVMESTGVYWIPIFEILEQRGFEVMVVNARDAKHVPGRKTDVSDAEWLQRLHEYGLLRASFRPQAEIAGLRAYLRQRERLLDYAAAHIQHMQKALTQMNLQLHHVMSDITGVTGMTIIRAIVAGERDPNVLASHRDRRCHASVETVCQALVGNYREEHVFALTQALELYDVYQAKVAACDMQIEAILDRLKKNATPPANKLLPAKHETRSANAPAFDARAALHAILGVDLTQINGLGPYLALKLVGECGTNLTAWPTAKHFTSWLGLAPHNKISGGKVLSSKTRRTSNRAASLLRLAAVSVGRTDTALGAFYRRLSARVGKAKAITATARKLAVLFYNTLRHGVSYVDPGATYYEERYRQRVLGNLQRRAKSLGYVLYQADRDPTQAVVS

SEQ ID NO: 112205 - protein, 388 aa, unidentified
MPQSNDLSRSLAAFDQDRTLIAVIEMSQSNWLVAGLVPGLERRPLKKLSPDQDALLKLVQRWRNEAAQAGREITRTVVAYEAGRDGFWLARWLRRRGIEAYVIHPSSVAVSREHRRAKTDRLDTELLMRAFLGWLRGEKRHCSMAAIPTIEDEDAKRPSREHEKLVGHRTRLVNRMKAMLARFGIRTFKPTLRKAADRLDGLRTAEGTPLPENTRAELRRDMMRLRMVREQIKEIEQERLRKLTVAPAEKGPPMMVRFIARIIGIGIETADMLVSEILSRGLRDSKAVARYAGLTGAPDESGRRRREKGLAKAGNARVRRGMIQLAWRFLIFQKDSALAQWYRARTADAHGATRKRMIVALARKLLIALWRMATTGEIPEGISLRAAP

SEQ ID NO: 112206 - protein, 312 aa, unidentified
MTQIICGVDVAAQTLDARIAPDGPTRSFANTPKGCAALARFCQAHHVTLVALEATGGYEQQPFRLLWAAGLACAILNPRQVRRFAEAMGILEKTDRIDAAVIARFAEVRRIKPRPPASPAQERLSALVTRLRQLVEVRTAQTNQARLVREPTVRASIAEMVALITRQIGELEAEIAALLRTDPLWQRLEAGFRTIKGVADRTVARLMAELPEIGTLSGKAVAKLAGLAPIARDSGQSSGRRPVRGGRSGIRAILFVVAGCVRRFDPDFQAFDQRLRQAGKPPKVIRVALAHKLLVRLNAKARDIRAEMAQPA

SEQ ID NO: 112207 - protein, 343 aa, unidentified
MERYYYIGLDIHKRIIAYCVKAIDGHLIDQGKIGADRQSLEQWVKGLPGPWIGAMEATMFTGWVYDFLKPHAIALKVAHPAMLMAITAAKKKNDRADAEKIADLLRVNLLPECHMLSEEIRELRRILRYRNHIVRTAVKMQNKISGLLMEVGVTYSKKRLHGKKYFHELIERVDEIPPSVKELLQLSRSSYEMFRSFQKCLVETLRSDSLIRDRVHRLMTIPGVGEITALTWVLEIGDPDRFSSIRKAVSYCGLCSAQKESAGKEQRGPISKKRNKHLQTMLIEAAKLAPHWNEQLVIVHERELKKGNRNRATLAVARRLVAYMLAVDRKRADFKSPSEIRAA

SEQ ID NO: 112208 - protein, 472 aa, unidentified
MDAFDRNRLEAFRQLRQEVRQSEEYLIVGIDVAKDTHRAFFGTATGKTLLRRFTFSNDRKGFRELLEQALRLMESHGLKQEVYGMEPTANYHKPLGEFLIIHGRTVVLVSGVSAKKNRETLDGRWDKHDTKDAANVADLITQGKCLHYDYPSTQLRGLRGLLSLKKRLKKQEQGYRVRIRNQLIAQYYPEMDEAYGRRESEGLGIVRWCFPSSQMTLLEVEEFVQRVTRRPVKEKQRRRLEGIWEGAQETIGCDEVPGVEHEARVMVEGLGQIREMLKETEGKIEELCKRFPEYDSLLTIPGFGPDVSSKVLGAIGEADRFENGRQVLKLAGLDLGADRSGKESTKAVPKISKRGKADLRYGLYQAALVASTRDRNVKMYYARQLEGREREKGIKTKMRVKIAAKLLRIAWTLMKKKAVFDPSYLNIEGDRPERSEAKPMPARPAERRKKRSRATHGLIGHPLVETGACHRG

SEQ ID NO: 112209 - protein, 310 aa, unidentified
MATIFVGIDVSRATLDVRHLPADQAFQVPNTPAGHRQLVDALRALPAQPADIRVILESTGGLELPAAIALEEAGVAVAIVKPERVRYFAKAHGQLAKTDAIDAAILARFARDVDVPIVPLPPEELRHFRDLLDRRQQLLDIRTMEANRLTTTTLKAARKSLDKHIAWINRELKTVEADLDQRVAAHPLWAELGPQTARLLIGHLPELGHVDRKVIGLLVGLAPIANDSGTTQGPRHIVGGRWQVRNCLYMAALVACRHNPIGRALYHRLRERGKSAKSALIAVAHKLLTIANAMVAQKTLWRHSDVANPC

SEQ ID NO: 112210 - protein, 352 aa, unidentified
MKTYYVGMDVHQASIVIVVLNGAGKVVEAITITTGAGAVRSYLQRLKGRVYVTFEEGTQAQWLHDLVHPLVTKVIVCDPRQNRLLAVGNKSDRIDAQKLAELLRNGSLKAVDHQDHGVRVLKELVRNYECLVQDTTRVMSRLKAIYRGRSIACKGHNIYRQERSTEWLRKLKEPGAKQRAGFLYEQLAALRPLRQKAKLAMVREARRQAAYPWLMSMPRLGPVSVAQLLAIVGTPHRFRSKRQFWTYVGLAVVTRSTADQEVVNGVLRRNRRPIATRGLNLNHNHLLKRVFKTAATSACHSGPFQAAYEARVKRGMDPALARLTIARQIAAITLSLWKRGELFNVERMKLAA

SEQ ID NO: 112211 - protein, 411 aa, unidentified
MNAVGIDVSKGKSTVAILRPMGEVVQTPIDVPHDAVSLERLAYQILSLGENTRVVMEATGRYHEPVAMELHDRGIFVSVVNPLVIHGYCSGGTVRKVKNDQKDSLKIAKFALDHWVDLREYTPMDTVRQQLKIFSRQYNLYMKSRVALQSNLISLTDKVFPGVNEIFTSPERSDGHLKWVDFITTFWHCECISWVSENAFTEQYRKWCKRMGYKFSAAKASDIYIGSRGHIVTLPKNNNTKLLIQTAAKELTAMNELLTVVKAEMIRLAKELPEYETVQAMFGVGELLAAQLMAEIGDIRNYPRRSSLVGFAGVDPEVNQSGKMNSESNPSTKRGSPHLRKTLFQVMTVYLRLSPADEAVYQFLDKKRSEGKPYYVYMTAGANKFLRIYYARVKECMAKIEDSAETAEENG

SEQ ID NO: 112212 - protein, 419 aa, unidentified
MKIVYPVCCGVDVHKNIIVATIAITDKSNITQYVVEPFSTINADLYRFRTWLLSYQCFNVCMESTGKYWIPVFNVLEEANIKVLLTHPKYVSAIKGKKTDKKDSKWIADLFKFDMVRSSFIPPKDIRALRELARYRYKLVCMRSSERNRYQNCMTVSNIGLASVLSDPFGKSASDIMRYVLSSSIFDEEHCKKLIQKSAKKKTELILESIRGSRIESDQRFKMKEAAAHMDYLEQAILRTEVELYTRIQPHYHFVEHISNQLPGISTLSAALIISEIGVDMSVFESAKHLNSWAGLAPANNESAGKKKSVRISKAGQFLKPLLVQCALAAVKSNKQPYFAIKYQKLKKRRGHKRAIIAIARMMLTCIYHMLQTGEAFNPSDYDSFDKPAVRKVVLNDENAIAFLAAQGYDVSSITKIAG

SEQ ID NO: 112213 - protein, 405 aa, unidentified
MGKVFVGHDWAETHHDVYVEDGAGQRLGKARLDEGVSGVARFHELVSSFVVDPGEVTVATETDRGLFVGALVAAGYRVLAVNPMSAARYRERHSTSGAKSDPGDAFVLAELARTDGHHHRPVAADSELAEAVKVLARAHQSMIWTRQRQVNQLRSTLREFYPAALSAFDDLASSDALAVLALASTPSLGRGLSRSKIASALRRGGRQRRIDERAAEIQTILRADTLQAPGLIAEAMGASVRALVAVISEQVAQTARLEAELADHFELHPDAKIIRSLPGLGMILGARALGEFGDDPNRYTDAKSRKNYAGTSPITRASGKHHVVLARHARNRRLADVCYQWAFAALTASAGARAFYDQHRAAGDTHHKALRALANRLVGILHGCLRHRTPYDEHTAWGHRTAAAA

SEQ ID NO: 112214 - protein, 344 aa, unidentified
MKLTTVGIDLAKNVFQVHGIDEHGKVLVKKQLRRDQMATFFVNLPPCLIGMEACGSAHHWARKLQAMGHTVRLMAPQFVKPYVKTNKNDAADAEAICEAVARPNMRFVPIKNTEQQSVLALHRVRQGFVKARTAQANQIRGLLGEFGLIVPQGIGYIASRVPELIEDADNELPGAFRVLIQRLLDHLKELGRQVEELEAQIQTWHRNSDLSSRLAQVPGIGPITASALVASIGDAKNFDGGRQLAAWLGLVPRQHSSGGKSNLLGMSKRGDSYLRTLLIHGARSVIYRAGQKADPCSWVNSVVQRRNKNVAAVALANKNARIVWALLAHDRRYETGYSRAVETA

SEQ ID NO: 112215 - protein, 422 aa, unidentified
MNYKQNEKINQVKESTLVVGIDIGSTKQYARAFDWRGIELGKVFTFSNSREGFEAFKAWMRHLQDKYRKSDVIAGIEPTGHYWFDLGAYLEDEGILLVMVNPYAVKQTKELDDNSQSKNDRKDPKVIAKLVTEGRYSAPYTPDGVYADLRIMVANRKRLIREMTQIKNRFARWFAIYFPEYTDVFGDYEAQSSMLLLKKVCTPEAIVELGAEKINQIWRDAKLRAVGMKRATTLCETAKRSIGLKKGSSAARYEMKLLLEDYEYKKAQLDAVMEEIEKLCRKIPESEQMLAIKGIGVITVAGFLAEVGDVRRFESPRQIQKLAGLSLRENSSGKHKGQTTISKRGRSKLRAVLFNAAIPLIAKNPEFKSLHEYYTTRANNPLKKKQSVIAISCKLIRVFYAILANGVTYDAQKMLSDIHRQP

SEQ ID NO: 112216 - protein, 343 aa, unidentified
MELKRVGVDLAKHVFQVHGVDRREKPVWQKRLSRDRWLQVISTTVEPDCEIGMEACAGAHHWARRLQAAGFRVKLIAPQFVKPYVKSNKNDARDAEAICEAMSRPSMRFVSIKTVAQQDIQATHRVRSELISQRTSKGNQIRGLVAEYGLVAPQQLASLRAAVPDWLEDAQNGLTVRFRRLLNGLWEDLKALDRRVAELDQEIKSIAESDPDAKRLQQLRGVGPMIATALVAAVGHADQFANGRQMAASFGLTPKQHSSGDKVRLLGITKRGDAHLRTLLIHGARSVIRAAKSKDDRLSQWVTGLAERRHPNVAAVALANKTVRIAWAMLRYGTDYQPNRMAA

SEQ ID NO: 112217 - protein, 312 aa, unidentified
MMYYIGIDVSKKDLSVFDGKDLNFINQEGLKSFKKYLKKKYSLSEIVIIFEPTGVYSLYLKEFCAENGIKAYIVNPKKSHNFARALGIRPKTDKIDARTLYQFHKLIDLKDIQVPKVDQQAKTLSSYLVSYEFALKQRISLSHHLESLRDKQLITLIKKELKRAQRLEDKIFHDIKEYLGKNQNLKEDYQRLSTIPGIGEKAAIALLTLFKTYPGTNRAQITALAGLDPVRRESGTSVKYKVKISKNGKGVYRKILYLPTLCATVHNQKIRLFYQRLLANHKTKKLAVIASMRKILLIAHAMYQDKTEYIAV

SEQ ID NO: 112218 - protein, 366 aa, unidentified
MTLPTLGIDVAKATLAVVLLLANRTYRKEFANTASGHASLLAWLAHHARGQFVHAALEAPGVYGEDVALALHQAGHTVSVVNPATIAAYAHSQGARTKTDAADAALIARYCQKEQPAAWPPPAPEVRELRALVRQRQALLEMRQQEANRLSDGAPPASVRSVLTAHGEFLDEQIAGLEQQIDQHIDDHDELKRQRDLMTSIKGVGRRAASDLLGEIGDLRSFSNARELVAYAGMNPREFRSGSSVHKHTRLSKPGNARVRALRSMPALSAIQHNPLVKALRERLVASGKAKMAAVGAAMRKLLQLMYGVVKHHRPFDPHYAGRALAERNAGCAPVPAARPGHKPGRVSGAGVERAAPKALCLETAT

SEQ ID NO: 112219 - protein, 351 aa, unidentified
MRTVAEEYERVVGVDTHAATHTLTLLTAATGGVLEHRTFPTSVSGLQRTLSWITNRASDHSCLVVVEGTGSYGARLTEHLTQGGIVVAEAPTIPAAGPKDDVVDSARIARAVLGLRLDQLCWPRAGGIRTAIRVLVSARDQMGTERTKTINSLTALVRSVDLGVEARRALTGPQVTAIASWRSRGEDAATSSCRREASRLANRIRALDRDLAANKIELGQFTATEVPELLDLPGVGPVVAGTILLAWSHPGRVRSEAAFAALAGASPIPASSGNTVRYRLNRGGDRQLNRVLTTIVLVRMRRDQRTRAYVARRRAEGRTTKEIMRILKRYIARHIFRILTNAHPTPATTTA

SEQ ID NO: 112220 - protein, 345 aa, unidentified
MTHHPTTVAVDLSMTVFEVGIADRQWRIIERRRLNRRQFARFLADQPASHVVMEACGPAHYGGRVAQGHGHRVSLLPVRDVKPYLRGNKTDRTDVDALLDAVRTGHIPPVTVKTAAQQEIVALHRIREQWMATRTARINALRGFFREHGIPLPAGPRASLAAVPALAEQLPPQLARAVTSVYEDARALEVRMVDIERQLKAVAKDDAVVQRLLEIPGIGLLTATALVGSVGRITAFRRARQFASWLGLTPREHSSGPRRRLGSITKRGDVYLRCLLTHGARAVRLTAQRQAAARKPLTGLQPWAVQLVARKGHNKTTIAVANKLARIVWAVWARDVAYTAAPAAA

SEQ ID NO: 112221 - protein, 355 aa, unidentified
MRILSLDLSKYKTVACEYEAETGRHQFATVLTTPKALHDLIVDREPDRVVIEICSIAGWVCDLVRSLGIEMQVASTNDERWQWRKVKTKNDRRDGLKLAQLSARNELDLVHVPRSEMRQWRALIAYRHHLVQRRTKIKNHIRELLLREGQLLPRHRSAWTQDGLAALEAMVKPLREVSMDELWRGELEVELAQFKAVQKQLTEVVAKLDALGAANHNVRLLQTASGVGPRLAEAVVSMFDDPRRFRRSGSVSAYIGMVPKQWDSGETERLGHITRHGNRLVRSLLVEVAWCALRHNPWARETYQRISGGKKSRKKIAIVAVGRKLLVRCWAMLRDQTAWHWEGQSAVVTPQAPTA

SEQ ID NO: 112222 - protein, 371 aa, unidentified
MQRNTLSFKGQNIFIGIDVHKRSWTVTTIPEFGKQRTHVQNASGKELIDFLNRHYPDGSYTAVYESGFTGMSTYYELEQYGIDCIVVNAADVPTTQYEDLMKTDPIDSVKLAKSLKSGLLRGIYIRRKDDLDDRGLVRARKAICKDLSRVRVRIKHLLMNNGVSVPERFDKSGHWPNAFTFWLRSEAKLRSTTRRALDVLLDEADSMRKDLLKATRIVRELSRCEKYAADVELMMSIPGIGMITAMTILTEVADFSRFGNERQFASYMGLVPTSHSSGEKTVHGEKTFRGNKEIGPMIIEACWRAIHEDDTLGTTYATLAKRMTPQKAIVRIARKMSNIILAVMKGRKKYEPFSASQDDPKTGTGENTINN

SEQ ID NO: 112223 - protein, 354 aa, unidentified
MSEGSWVGLDVHARSVVAGVIDRGSGEVRSLRVPPGCEATVAWLKTLPAPVRVVYEAGPTGYRLARACAGAGISCVVASRIRAAADRVKTDRRDAERLARLLRLGEITPVRVPEPEEEAARDLVRAREDARGDLMRARHRLSKLLLRHGSVYDATAWTRAHDAWLRRQRFQSGPLAIVFDECYGRVLYAKSRRDALDEAIAELAATPPYVDVVGRLVCLRGVSTLTAFALTVELGDWSRFRPESLGPFLGLTPSENSSGERRRQGGITKTGNTHARRLLVEAAWHQRRPPRMSAVLARRRSGNPVAVQAQADRSARRLHSRWHALEARGKPRSIVVVAVARELAGHCWALATME

SEQ ID NO: 112224 - protein, 330 aa, unidentified
MQKVQHIIGADLSKKTIDLFYWSTKSHLDIKNNLEGFKTLLGSIKQQRIDRSELMIVMEHTGLYSFCFEEFLHKHQIPFCKVSALMIKRSLGLIRGKSDKIDARRIASYGFEKRDTLLPERATSKELKRLQLLYSTRERLVKQRAGLINAVKEYRSIGLSTNDPILQSQQRLIKHFEKEIGKLEAEMDMIFDSDPCLQKNQRLLESIKGVGKVVSTATIIKTKNFTRFTDPRKFACFCGTAPFEHTSGSSIRGRTRVSHLADKQMKTLMDLSAKSAIQYDKELRDYYLKRIENGKSKMSTINIVRNKILYRMFAVIKRQTPFIQNYLQTA

SEQ ID NO: 112225 - protein, 400 aa, unidentified
MLSIGIDVSKGKSTVCGMKPGGEIVYTPFEVQHTREGMLELVSLLRSSCEEVRAVLESTGSYHCPVVAALLENGIFVSVVNSLRMKRFCSQSIRKVKTDRIDAMQIALYGLAYWQELQPTKLPEDTYRELQLLARQYYQMTSMLIKAKVDFNAICDQVLPGMQELMNDHAGRHKLSDFVLRYCHTTHILEMGETRFRKDYCKWAEKKGYRNCERMAVLIFATAQNGIPVLPNAPSTQIVITEAIRVLHTVEASRDAILTQMQSLAKTLPEYSLVREMPCIGDTLAPRLIAEIGDVRRFHSKRALIAYAGIDAPPYQSGKFCANNRHISKRGNRYLRKTGYEVMQSYVMHKPANDPIFTFIEKKRGEGKSGKLAMVAGLNKFLRVYYGKVTELYRSLPAIE

SEQ ID NO: 112226 - protein, 371 aa, unidentified
MERDSTTKFVGLDVHSKTISVAIADDGRKGEVRHYGTIENTFEAIDKVIKSLTATGAELKFIYEAGPCGYALYRYLSGNGFTCIVTSPAMIPKRKSVRIKNDRRDALTLARLYRAGELTGIYVPDPEDEAIRDLTRAREDARLAERRAKQRVISFLLRHNFIYPGKKPWTKTYFVWLGKVGMKYPAQKIALQEYIEAVHECSERLARLSEQIGLAVEEWRMAPTVKAIQALRGVSLITAAVTIAELGDLTRFDNPKELMAYLGLVPSEHSSGESVRRGHITKTGNSHVRRVLVESAWTYKHHARITGHLIKRQRDLPKSICQISWKAQLRLCARYRRMMARKKPMQVVVVAIAREIAAFIWAIAQEVRAAT

SEQ ID NO: 112227 - protein, 341 aa, unidentified
MEWTVAIGVDTHKDVHVAVARDRFGAQLDGLEVETTESGYRSLLSWALELGVPAFAVEGCGSYGAGLVRFLELAGLAVWECERPHRRERRRGKSDSIDAALAARRLLTGDGLCLPRGGGQQRDDLRILLLERRSAVRARTAALNQLSALVVTAPDHVRTRLGSLSGERLARAAARQRARPGTSNGVLRRLGRRVERLSQEVAEVERELADLVAELAPDLLSEPGVGPVCGAQLLVSSGDPKRMASEASFAALAGTSPIDASSGKQQRHRLNRGGDRQLNWALHVIALARIRHHAETTSYYERLLATGKTTREARRCINRALARHFYRRLREIPTTCGVPKL

SEQ ID NO: 112228 - protein, 343 aa, unidentified
MEYGAIDLHLRRSQIRIVDEDEGVVLDRRIDTTREALTQVFGARARMRILLESSTESEWVAQHLETLGHEVVVADPNYAPMYGGRSRKIKTDKRDAAALAIACRRGIYRAAHRASRPARTLRQQLRVRRHLVQVRTGLISLLRSTLRQEGLRLPSGSAERAVARLDRLAVPATVAAVVAPLRTALADLTATLATIDTAVEAHATGDAAAQRLMTAPGVGPILSLTFTAVLDDPARFGGDAGRASAFLGLVPSEDSSAERQHKGHITKTGPGDLRALLVQASWVIWRGRSTAAHALRTWAHTLGARRGRRIAIVALARRLTRILYAMWRDQTPFAPPGRVAVAA

SEQ ID NO: 112229 - protein, 357 aa, unidentified
MESQEVKYVGVDCGKKSIEVVRINSENSLERRQFSTTESGINNLLQWLTLNDIVGLEAGSQSFRIAESILNKGVQVIVLKPGNLATIYQSLKKTDKEDSLKIARLIQRFPIEELPTVPIPNDEEEDNKRLCTDPENWTEQLTQGKKRLHSLFTQAGLTQITKKHLRTKANREISVALLPSRYQKEAERILKVLDLVEQNLKLIEKEIQEALKKNKAYVQTIMSMPGIGMITSLAIMSYMGDCKRFSSAKQAAYYAGLVPRVDISGDTVRYGRIINRGCHSIRRVIVQAAWSLVRCQHGGKVKEFYQRLYLKKGAKKSIIATSRKMIEVLYVMIRTGKLFDSMPENILNRKLTQYGLM

SEQ ID NO: 112230 - protein, 348 aa, unidentified
MEKLIRIGMDTSKSVFQLHGVDSAEQPILRRKLRRGQVLQFFGALPPVQVAIEACGASHYWARQLQALGHEVVLIPPQYVKPYVQRGKSDAADAEAICEAASRPKLRKNFVPIKSTEQQAAQMLTKLRAQFIGRRTQLANSIRGYAAEFGLTAPKGLSRLQDLLEDIRADATVPDLAVELVEALAAELTRVDDQIATLDKKLMQLHRGNEMSRRLAGIPGIGPVGATLLSIKVTDAHSFKSGRSFAAWLGLTPKNHSTAGKNRLGVITRAGDEMLRSVLVAGATAVIADLRRGGSRIWPWLQALIARKPPKLVAIALANKMARIAWKLMISGERYRPIGGLVPMATPT

SEQ ID NO: 112231 - protein, 448 aa, unidentified
MSNGNGVSRGDRNRNARLSRLRVLVPACNAIVGIDLADNKQMVVVTDHDSKVLARRTFRCRAWDLGLALDWAGQQASKAGFAGVTVACEPTGHRWRVLGQLAADRGMAFVCVQTLLTSWARRSEDLTFDKTDEKDAVLIARLTAQLRCYVPEPLDETWGRLRHLGARRERLLAETVGQVQQIRDLLECVWPASLDTAKQPFRSRTWLAGMSVVLARTDGDPARLRRLGLARFEAAVRREVVARQGKRPCLRIVRLLFAAAADPRGVIIHRPGALERAQLLLDDFRDTGRRLAETEARMVDVLDGLQLTELVCSIVGLSALGGATILAETGDLTRFASARAVVKHSGLAPREKSSGTYTGRTKLTGQGRPGLRAAAWRAVWGAQKANPVYAAKFTHLTSRTENKLNRGQAHAAIAAALLRQLFAVVSTGQKWDAAIAAGGRSEVIRPAA

SEQ ID NO: 112232 - protein, 422 aa, unidentified
MTVTIVETPTHARAITGGVDTHAGVHVAAALDPIGGLLGVAEFAASPAGYAYLLEWLGGFGTVCLVGIEGTGSYGAGLARHITAAGIRVVEVDRSDRQDRRRRGKSDPLDAVSAARAALSGRAAGTPKGRDGQVEAIRALMVAKRTARSERIQTINQARSLIVTGPDDLRARFAGHSADDLVAELASLRPRPGSMIRYHTLLSLRELGRRVAFLDGQLQRLDALIVPLVTARAPGLLALYGVGHDTAAKLLIAAGDHPERLRSEAAWAHLCATAPIPASSGKVTRHRLNPGGDRQANHALYRIVILAAAALERAHADRLFEYYELLAYHYSRSANRDRALDYLELANRKASARHALEEAIDYFRQALKTLEQLPDTPEVRRRRIALAVDQMNGFHFLHRTIEYHEMLVQLEPEALALADPWI

SEQ ID NO: 112233 - protein, 376 aa, unidentified
MGTPSAQTLDDVGVREIFQGLEEVPLMTMVGGLDVHRAQITFDYVDDDGLVHWGQIRPATRKTLRGWLAEHCPDGDAEFALEGCTGWRYVSEELAGAGVGVHLGDPAEIAVLRGPKKRAKTDRADARLLRTLLLQGRFPESWIAPAHVLEIRTLGRLYCTLMDERRAWQQRIHAQLFHQGCPPVRALLSVTGRAALAGAELSAVGGQYVDTALGRIDELSTEIEPLRAQLVNFARHQTGCQALQRHYGIGWLCAAIIWAEIGDARRFSSSDQLVRFAGLDVTVYSSDGKRSPGHLSRQGSPELRWAAFEAAKCAARRGSPDYGYYRKLAAKRDGHNGKNPTLAVERKILRRCHHTLRELGDAAVALPVAEPQEVAA

SEQ ID NO: 112234 - protein, 422 aa, unidentified
MLQETHDDEQIIERVAALDIGKAELVCCVRVPGESDPGRRRQEVNTYSTMTRSLLVMADRLAELGVSRVVMEATSDYWKPPFYLLEARGFDVWLVNAKDVKHLPGRPKTDRLDAVWLCKVAERQMLRPSFVPPPPIRRLRDLTRYRAALVSDRSGEKNRVEKLLEDAHIKLSVVASDIFGVSGRAMLNALIAGERDPKVLAQLARSRMRTKITKLEEAFTGHFADHHAFLLTRMLARIDQISVDIADLDNRIEAEIAPFAAAVQRLDEIPGVGPTAAHVIIAETGIDMSRFPTPAHLASWARFAPGVKESAGKKKGTGTTGHGNPYLARVLGEAAVAASKTDTFLGARYRRIARRRGNKKAIVAVGRSILTITWQLLANPETQFHDLGSGFHDNRISASRATRNHIAGLQALGYKVTLEAAA

SEQ ID NO: 112235 - protein, 348 aa, unidentified
MNSEKYIGLDVHQATISVAVMDCRGKVVMESILETKAATLLEFLAGLRGTLSVTFEEGTWAAWLYDLLKPHVQKLVVCNPRKTALLKHGNKSDRIDARKLADLLCLNDLEPVYHGETGVRMLRELARSYLTLVKDLTRVMNRLKAMYRSWAIPCAGRDVYYTRHRAEWLGKIREAGVRRRAEHLYQQLDMLQHLRQQARRELLAESRKHAITAKLRQIPSFGPIRAALAVALIQTPHRFRTKRQLWAYSGLALETRTSGEYCYVRGQLRRSKKQISIRGLNKDHNHDLKGLFKAAATRASVQPGPFQDFYQRSLAKGIKPTMVRLTLARKIAAITLTLWKKGENFDVE

SEQ ID NO: 112236 - protein, 367 aa, unidentified
MKKHSSKHDSLSSTDVELCTTICVDLAKQVFQLAGEDATGRVIYEDRIKSRQAFHDFLIRLPTTVAVLMECGPGAQAWARLLQTKGNPVRILPAQRVAEHRSGAKNDRNDAHAILRAGRDTSIASVPIKSTTALAIQALHRIRRGNIKRHTALGNQIRGLLLEHGVSMPQGDAAISQQVPRALEDASLPLPDLLRELLDELLTDWLSLGERIAALSGRLEVTAQQDKVAQRLITIRGVGPIIATAIVAKQTEPSRFASGRMYSAFFGIVPDQHSSGNKIRLGRMSKRGDGYIRSLMIQGAHAVLSQLRPDSDQPDDRRLLRWLSRLGRKEAAIRLANRNLRIIWALLQSNQVYQRKPNNNPEAAMSL

SEQ ID NO: 112237 - protein, 369 aa, unidentified
MEKRIKYIGLDVHKNSIAIAIADQGQDQEVRFYGTIINRMDLFDKFTRKLISDGSELRFVYEAGPCGYQLYRHLTKKGFECMVTAPSQIPKKSGSRIKNDRRDAIDLARLYRAGELTAVYVPNAEDEAMRDLSRAREDAKFATRKAKQQLGGFLLRNGHIFTGKSNWSKAHFNWIADIKLAHPCQQITLQEYVDAVQTGCERVDRITEQIQKLTKTWRMAPVVKALQAMRGVSTIVATTTVAELGDLGRFDHPQQLMAYLGLVPSEHSSGEKVKRGAITKTGNGHVRRVLVEAAQAYRLPARISRVLLKRQDGLSPQIREIAWKAQLRLCQRYRRLSGRGKPANVVITSIARELIAFMWAIAKQVAPVV

SEQ ID NO: 112238 - protein, 427 aa, unidentified
MNSNQNQKINQVKEETIVIGIDIASELHYARAFDWRGIELGKVFKFSNSEEGFCNLYEWIEDLKKGTRKSEVLVGAEPTGHYWLGLSESLKNNKVQLVFVNPLHVKRSKELDDNHPSKTDSKDPKTIAKLVIEGRFNEPNVPEGIYAELRIATFTKERIVKEINQIKNRVERWLKIYFPEYKDAFASFDGIGSLVVLENCPLPKDVLELGAEGVNKLWRDRKLKSSGMNKAVILYQAAKRSIGVTEGLEAARFELNMLIEDYRSKARQLELVMVKLQGLCDQIPEVQKVMEIKGIGLSTIANFIAEVGDIRRFDSPKQIQKLAGLAITESSSGKHKGKTSISKRGRKRLRCVLFQAAISLVSNNEEFRSVHEYYTTRKNNPLKKIQSITAISCKLIRVLYALLTKNKKYDPEKLVSDIKRPELIAVA

SEQ ID NO: 112239 - protein, 369 aa, unidentified
MDETITSYVGLDAHAESSAIGVAAAGELTAPRFLGTVGAKFSELTKALGKLGKPSALRIVYEAGPCGFAMVRQLRQAGYHCAVVAPSKTPRKPGERVKTDRRDALTLAGLARAGQLTFVTVPDERDEAMRDLSRARIDAVRARLKARQQLKALLLRHDRRYTGKSSWTAAHERYLSAVSFDHPAQEIAFVEYRRAISEAQARVGLLTQALSEQLEHWRMRPLVRALMTLRGVDEVVATSVVAELGELKRFAHPRDLMGYLGLVPSEYSSGQKRSLGAITKTGNSHARRMLIEAAWNYRFPARISLPLQKRQEGQPATIREIAWKAQLRLAHRYRRLSARGLQHNKICVAIARELTGFIWSIGQQVTIGT

SEQ ID NO: 112240 - protein, 423 aa, unidentified
MISFPKRERAQRAAACVGVDAGKFAHTLVVRPTGQPDSRPLSFPTTRAGFEQAVAFIRQQVPGARTGAVLVGIEFAGNYGFTFAHYLRELGFAVVSVLPAHTKRWKDVAHNQPLKTDAKDAGTITDLLAQGHFVGFPFLEPAYAELRYLVTARERLAVLRRGAITQLRALLQVVFPEYETIFPLVSQRTAVLLLRAFPGPQQLLAAPKAKVLRVLRAGSRGHLGAEIYERLVGAARAPLGLPGAQVRLRQEIVLTLDRLALFEHQIRALEVELVAALEAVPETPYLLSIPQVAAVTAAVFLGSIGDPRAYDAGAQILRVAGLSLVERSSGVLHGTKRISKRGRPLLRAAAYLFAVRSITKGGLFRADYEGLCARNGGQKLKAIVAVMRSGLQLLYSIARDRRRFTVEPPPRRRARPTLQVTPA

SEQ ID NO: 112241 - protein, 346 aa, unidentified
MLHVGLDLSRRRLDYLALTEDGIHVDVGAAPPDADGLRGLAARLAAHGEPIAAAIESMNGARFVHDTLERCGWEVSVADAQKVRGLAPLATKTDRVDAWVLAELSRLSLVPAIWLPDPEIRAERERARFRLYLVRQRVRLKQRVHSTLMAWGTPCPLTDLFGVRGRELLERLEVPEPWRSHVRTAVALIDDLDREITAIDQGLRRIAAEHPYVALLTTVPGIGPVLGYTIAAEIGEISRFRSPAKLTGYTGLCPRVYQSGDSDRRGPLSKHGPRYLRWALIEAALGASRHPLYLKRYERTKRRLGHQRGPRVAQVELARRLAHSIWHMLTRSQPFAPKGASVALAA

SEQ ID NO: 112242 - protein, 410 aa, unidentified
MDTLIERCGGLDVHKDTVVACVRVPARGGGREQSIQTFGTTTAQLLALRDWLVAHGVTRVGMESTGVYWKPVYYVLEDAVECWLLNARHLHNVPGRKTDVADAAWICQLVEHGLVRPSFVPPKPIRELRNLTRYRKAQIEERTREAQRLDKVLQDAGIKLSSVASDVLGVSGRAMLRALIAGTRDPETLAELARGTLRRKIPALRQALHGRFGPHHALLVGTILAKLEFLDEALGHLSAEIELVIAPFAAEAALLRTIPGVDRRTAEAVVAEIGVDMSRFRAAGRLASWAGWCPGNNESAGRHGSGKTRKGSKWLHTYLTEAAKAAARTKGTYLGAQYARLRGRRGSARATVAVGHSILVAAYHILDRHEPYRELGPDYFRRRHSREHQTRRLVRQIEALGYHIRLEEVA

SEQ ID NO: 112243 - protein, 362 aa, unidentified
MSKISKPARRREAKMDKPEMTMGIDVGDRFSHVCLVDNGGEVVERDRVRSTEAAFRRYFEGTARLRIALECGTHSPWMSRLLKQLGHQVIVANARKIPTITESESKNDHRDAEQLALMAAFNPKLLSPLEHRSLARQQDLNLIQARAILVKARTMIVNALRGLVKSAGGRLPACSTESLPERAAGAVPPALTAVAGPLIEQIARLNVQIAAMDQEIEKLAIKYPEIGILRSVPGIGPVVASAYVLTLDRPDAVPSSRSAGAFLGLRPGQSQSGDSDPQRRITRTGNTYLRCLLVQSAQYILGRFGPDSALRRWGLKLAASGGKRAKKRAIVAVARKLAVILHSMWRSGQRFERFPQPAQAQA

SEQ ID NO: 112244 - protein, 343 aa, unidentified
MQIHSVGIDLGKTTFHLVALGAAGKVLARKKFTRKQLLAYTANMQASLIGLEACSGAHFLGRALREQGHDVRLIAAQFVKPFVKSNKNDFVDAEAIAEAVERKNMRFVPIKTDDQLDLQGIHRVRDRLISRRTAVINQLRAFLLERGMVFAQRPAKLKAAMVDILENAEADLTPQMRSLIDMLWDEWMLIERQIEKLNLELERISAADAGCTRIRQIPGIGPVVATAIVAAIGNGAAFRKGRDFAAWLGIVPRQYSTGGKAKLLGISKRGNVYLRKVLIHGARAAVLRIKRDRAPIGAWLDALDARAPKNVVVVAMANKLARIAWAVLSSGEDYRPTANAIPA

SEQ ID NO: 112245 - protein, 359 aa, unidentified
MLVERTCVGLDVHARSVAAAAIDGVTGELSQARLTPSHDHIRSWIEQFDGPVAVVYEAGPTGFGLYRALNPVGVRCVVAAPSKLQRPPGDRVKTDAKDAVHLARLLRLGEITAVTVPTVDQEAARDLVRARDDCRGDLMRARHRLSKLLLRHGFVYSGGQAWTGVHDQWLRRQRFDHRATTMAFESGYEAVTAITARRGRLEKAIAELAAGSEFTPIVHRLGCLRGIATLTAFALAVEIGDWNRFTGSSIASFVGLVPSEHSSGASRVQGSITKTGNTHVRRLLVEAAWQHRPAYRPGKVMRDRWDLADPAARARGDAGNRRLHQRWVQFNLRRKRPVIANIAIARELAGWCWSLAVMG

SEQ ID NO: 112246 - protein, 439 aa, unidentified
MPQPILAVGVDPAKRLHRAVAVLFPDQVILDVALPNACDAVANLDDRLAELANQHGAELVYGLEDHRRYGRLFCQVLTERGRELRVVNPLWTSRQRAFYGQDKDDAIDGRSIAAVVLRRHQDLPLATDFGEVAQAVREAERSLQDLDKARTRLINRLHLQLSDTYTATYEGFFGKLRSPLALRFFRHFPLPQDLVGHNVEMLASLLLDLAGGKVGPHKGANRLIAMRSKAQTILESSATMRARPGSLALQLKAELIRQLCDELLANHDRVTRLNRLLRQQLLPATGQTITTITGISTTLAAAIIGETGSITRFRSPAAFAVYNGTAPARASSGGRDRHRARHDCNHRLKRAFYLAARAAVRHDPIAKTYHQCCTSRGLSYCEALKRVARRMSDLVYVLLKSGKAYDRLIVENAIEQRREQGGTRRTSPRKQSLLRSRPN

SEQ ID NO: 112247 - protein, 443 aa, unidentified
MTRKNQKRFEVVHPDCAAVDVGGSEHLAAVDPAKCADPVQRFSAFTDDLHAMADWFSSMGVKVVAMEATGVYWIPLFEILDRRGFEVYLVNSRATRQITGRKSHVLDCQWILQLMTHGLLRGAFRPSDEVCSLRSLVRQRANKVRDQAKSLNRMQKALVQMNIQLAQVISNIAGVTGMSILRAIVEGERSPDVLARLRDKRVKADEATVARSLRGNWRAEHLHALSQELAAYDFLEKQIGECDQAIADALDRLPVLQSDVTTPTKTLRSAHRSNEQQLALHQALNKVMGVDLTAIPTIGIDTALVLASELGADLSRFPTSQHFCSWLGLAPPTRISGGKPLPGKSAKVINRSAQALKQAASIARNDKSFIGASHRARLTRMDTCCAIKATAHQLARLIYAMLTKGQPYVEKGIEEFEERSRDRQLRALERKARKLGLQLVKAA

SEQ ID NO: 112248 - protein, 362 aa, unidentified
MQIIGCDLHARQQTLAMLDTLSGEVVNRTLTHEANNVREFYSTLPGPVRVGIEATGSMKWFVNLMEELGIDCQVGHPATIRAAEPRRQKHDQRDAELLLKLLVENRFPSIWQPSKELLDLRGLLLHRHQWVRLRTRIQNALQAIALANGLRRGSSLWSESGQRAIASLPLATHTAHRRSELQAMYARFEVEIEQLNQQVLEQAGQRPTAGLLMTHPGVGPITALATDVFLGDPKRFSDGKALASYIGIIPRENSSGGRQRLGGLSKQGNPLLRFLWCEAAVHAVRRDPELRRFYRRKLVQKGLGKARVAAARKLGIRLWIMLRDQIDYQEFCRRGQMQQKSGDACAGMPGARYGANSHRLID

SEQ ID NO: 112249 - protein, 315 aa, unidentified
MQTPLDIGADISKDYVRVSCATGSLPSIGLANRRASLLAWLKRLPAGTRIGMEATGTYHELLATLAHRLGLVVYVLNAKHVHHYAQATAQRGKTDRVDAELIARYVAKEHSHLHIWHPASPAQRQLQRLMRRRGKLTRARAALRSTLQGVPSLRTDVRVLLKQFDALIAKLDTQARALLKASVEREQAFQRLDAIPSVGSAVGIGLLAALERWSLPRADSFVAFIGLDPRPDDSGKRSGRRRLSKDGDPELRRLLYTAAMSASRTRVWAPVYQRALARGLSRIQALVILARHIARTAWSVYTHKTQFDPARVHSS

SEQ ID NO: 112250 - protein, 346 aa, unidentified
MTEAYDGRQVVGMDLHRRRSVLVRMSMDGRKLETVRVENSPAALRGVLARCGQGPLVVLEATYGWYWAADVLAAAGAEVRLAHPLGVKAFSYRRVKNDERDAADLADLARMGRLPEAWIAPPQVRALREVVRYRHKLVGQRTSCKDQVHAVLAKLGVPVTHSDIFGTGGGLWLDQLVLPAPYGAKVASLRALIGVLDGQITALGGEAASMLAGDKGYQALRELPGIGPVLAAVICAEIGDVTRFGKPGQLCSWAGLTPRHYESDVKVIRGHCSKQGSRILRWALTEAIQHQPDGTRPRQAKDGIIARRGNQARNIAKTAAARVLLTQVFYALRDGHVRSAGHPPAA

SEQ ID NO: 112251 - protein, 399 aa, unidentified
MDRNRTVAGLDVHKDSIYLCIMGHDEAIIFEKTYGVLTPDLRQMCDDMVNRGVTEAAMESTAVYWVPVWNELCESMELKLVNPYFIKQLPGRKSDVRDAQWIAECLLKNLIKGSFVPHPIVQDMRKLNRRIMDLNEDMTYNCNKLDAALQRCGFRLSNYVSTIKSKSYQSVLHGIINGITNPEELVKMVHGRTVNKHGRNTITAAVTGSFSKTDITIFRQTKEVIDTIERQIAECQKELTALCQENFPEQYRRIQTIPGVKERAATAIIAETGVDMKMFATAACLVGWCGLKPRNDVSNGRYKSRKVTHGNRYLRQILIEIAWAASRTRNCFFSNFSYVQATVKKKNKMKIQVAIARKILVALWNMLSKEEDFIDIYLKRLEQQRLMEEKFISFESKMA

SEQ ID NO: 112252 - protein, 406 aa, unidentified
MIFVGIDIAKRSHVASAVDEDGGTVVESFKFNNTASGFAKLLKRLRKADATPENSLVGMEATGRYWVALFDFLSSHGYEAAVINPVQTDAFRDVWTVRKVKTDALDAAMIADLVRYKRYSPSALGDEATEELRNLARYRMSLVERSTALKNRATAILDRTFPELAGLFSNAYCPTRRELLQHCATPDQVLGTDVGTLERILREASRGRCGRAKAERLKALAEASVGVGFGSKTLAFEVRLLMEELDFVQGQIKEVEGELESLLERTRGKWLVTIPGIDVPLASVIAGEIGDPDGFDDPHRLMGYAGMDPTRSESGETVKSDGRMSKRGPGALRWALMQAADCARKNDPYFGDYYDRKKGEDKKHHYVALSGVARKLMGVALAVMKEERPYEPTPPKNHRPGHLRGA

SEQ ID NO: 112253 - protein, 589 aa, unidentified
MPPVTSKTTCAIGVGVDTARYGHHATFLQEDRQMATKPLEFLESHSGYESLRDVLGKLAKKQTDVHFHIRVDAAGQYATNLLAFLHRLPWPKTISVGDPVRNKQYCQVHFPKRKADAVESHACARFAIVERPDSSSAVTPEMLALREVTSRLEFQVKQSTREVNRLHNLLGRVFPELATLQNDFKAGWVLRLLDKYPTAQRIAKVQLRSLIAIPYLGEEKARLIHQAAKESVAAEQGVVVEELVRQSVRGLSQSLAAEKQLETLLLKAFGVLGDERAKQIATIPGIGQRTAAALVAKILSIDRFPTADHLTSYFGVFPEESSSGVDKFGRPRPQGTMRMSRKGNDLVRKYLWMASFVAIRCNPQVKTLYARLRARGRRGDVALGHCMRKLLHQVFGIWTSGRPYDPDYHKADNRAPFDAAGESDVTEKSIHEQEEAAGRKAGISPPRKAVTATTSTVASVKETVKTTRNGTSGVATNGGGSIDFAYLRSQISMEQVLRQLGYFGRLRGNGNQRRGPCPVHGARRDRGRSFSVHLGKNVFQCFHPPCGAVGNVLDLWCTIHQLTSYEGAIHLANTFGLKLRLGQPEKRNP

SEQ ID NO: 112254 - protein, 366 aa, unidentified
MQAKIIKQNVGADIDAKTFKVKFRVLKSDQKQVIKGSRTFKNNAKGFKEFWTWTKKKSVDGVALHFTMEATGVYYENLAYFLEAKQANVHVVLPNQSQAFINSLNIKTRNDKIDADALSIMGLERVLPLWKPASTQMRLLKKLSRERLRLLRMKTMILNQLHAEQSSYDPCKDSIKRMRGLIEDIKKKMEAVEKQLATETAKDEKLQTRIDEICKVKGIKFLTAITVVAEMNGFILFRNRNQVVSFVGYDVVEKQSGSSIQSKPKISKKGNSYIRRALHFPALTAVKYNEQYQQMFNRIFDRTKIKMKGYVAVQRKLLLLIYTLFTKDVVYNDKHYKQLQKKHKSQVNQLQKNPLMAQVLELTKNL

SEQ ID NO: 112255 - protein, 340 aa, unidentified
MEQVYGAFDLHSTNNYLAISDHEDKRLYKKKLPNYPDVILAELEPFRERLAGIVVESTFNWYWLVDLLMNEGYTVHLANPAGIQKYKGLKYSDDNHDAFWLAHLLRLGILPEGYIYPQEDRPIRDLLRKRGHLVRLRTSLINSLQDIIQRNLGQKLSTNKLKQLTEDHVSPLFVSQEDLALSGTVSKEIIDHLTCRINRIETAVREKIKIRKPFDKLRTVPGIGIILALTIMLETGDIKRFSKVGNFTSYCRKVPTEWTSNGKKKGKGNRKNGNKYLAWAFSEAAEFARRFDEKARGYYNRKAARTQAIVARSALAHKLARAAYYIMRDEVEFDHQKLFV

SEQ ID NO: 112256 - protein, 404 aa, unidentified
MVFLGVDWAEEHHDVCLLDERGQVLGRARVANSLEGVSRIHALVADHAEEPEAVVVGIETDRGLLVQALVAAGYQIYAINPLAVDRYRDRHSVSGAKSDAADAKVLADLVRTDRSNHRPVAGDSQQVEAVKLLARAHQALVHTRQRQVNQLRSALHEFYPAALEAFKDDLGGRDAVAILEYAPTPSRGRSVSQAKLISALRKAGRERNLKARAVELQGILQQPHLEQPATLVAAYELIVRSAVRMIRELNAQTTELEDELTKSFELHPDAELYLSLPGLGFVLGARVIGEFGDDPNRYLDAKGRRAYSGLAPITKASGTRHVVLARNARNRHLADACYLWAFASLNASTGAHRYYRALRARGKSHPQALRALGSRWVSILHGCLRHRTLYSEDVAWPVQVAAAA

SEQ ID NO: 112257 - protein, 349 aa, unidentified
MKTYYVGMDVHSATIALAVLNGAGKVVMESTIETGAERVRGFLKQLRGKVYVTFEEGTQANWLHDIVRSLVTEVVVCDPRHNKLLQSGNKNDRVDARKLAELLRNKSLKAVYHGDNGVQTLKELVRTYDCLVSDTTRVMNRLKAIYRGRAIACGGHEIYRQDRRGQWLGKLHEPGAKQRAGFLYEQLAALKPLRHKAKLAMVKEVRRQTAYLWLMSVPRLGSVSVAQLIAVVGTPHRFRSKHQFWTYVGLAVVTCSSADHEVVNGVLRRSQRPVSTRGLNRNHNHLLKRVFKNAATSACHSGPFKAGYDVRVARGMAPSLARLTIARQLAATTLAIWKREEQFDPERKK

SEQ ID NO: 112258 - protein, 345 aa, unidentified
MEPMYYIGLDVHKRKISYCVKDSSGKLHSEGSIPATRFDLDGWMKALPQPWSAAMEATMFTGWIYDHLKPHAAALKVAHPLMLRAIAAAKKKNDRIDANKICDCLRCDFLPECYMASTAIRERRRTLRYRNLLVRQMVQMKNKTSMLLMEAGVSYNKQRLHKAGYFRELLATNPDIDEGLRPLLRQCRETVVRLQKTESALVRSLEHDSLLVERVERLMTIPAVGPITALTWALEVGDVQRFSSIKKAISYCGLCGAEKSSGNTVQRTPLSKQRNKHLQTTLIEAAKMAPRNSANLAMLYDKEKQKGNANRATLAVARKLVAYLMAVDRGQRNFQIAETSSSIAA

SEQ ID NO: 112259 - protein, 359 aa, unidentified
MSSIATYVGLDYHESGVQVCILDGAGKTLCNRSVANRAAAIERTVRQHGRPARVAIEACCGAADLAEELATRHQLPVQLAHPGYVARMKRSPDKTDLADAGLLADLARVNYLPEVWLAPQATRELRRLVRHRAQLVRRRTDVKLRIRAILRENRLRCGAARAWTKAWHAWLAREAALADSDRYLVQDHLAELAALDTRIRAAEQRLEAAVADDPIVAWLRTYKYVGLVTAVTLRAEVGRFERFGTGKQLARFCCVTPRNASSGARQADAGLVPAGNPELRHVLIELGQRLVRGGGRWARLAAGMLGRGKPKNVVVAAVANRWVRHLHHELRRPIQEPLAVSARARQKGAAPSAFPVASP

SEQ ID NO: 112260 - protein, 347 aa, unidentified
MRFYTKQHPFYCGIDLHARTMYVCILSQSGEVLVHRNMKTDPETFLNVVAPYRQGLVVAVECMFTWYWLADLCADAGIPFVLGHALYMKAIHGGKAKNDKIDSQKIAALLRGGMLPQAYVYPATMRATRDLLRRRMHLAHKRAELLAHVQNTNSQYNLPAIGKKLAYKANREGGAERFADPAVQKSIEVDLALITYYDELLHDVERTIVNTAKHHDANTLYLLQTVPGIGKILSLVLLYEIHDIARFPSVQDFVSYCRLVKCAKESAGKRLGTSGAKIGNAHLKWAFSEAAVLFLRDHPAAQKYLTRLEKKHDTGKALTVLAHKLARAVYHMLKRQVAFDREKFFQR

SEQ ID NO: 112261 - protein, 352 aa, unidentified
MMRTVYCGVDFHARMQTIAYCDSADGEIHLAQLDHRKEDVRDFYSKLTGQVIVGLESGGYSSWFEAMLEELGHTVWMGHAAEIRRRANWRQKNDRRDAELILEIMLKGDFPRVHRHSQESIEVLRMLRYRARLVKMRTMISNNLQAIAINSGLLERSRMLSRAGQQRLKKARMTPAIKHQSDDLITLLVPINERIGRAEKWLREQASTDDRVKLLMTHPGVGVLTALGVVHTLEPFDRFTRQRSVVAYVGLEPMERSSAERKRFLGISKAGSRLLRFFLGEAAHTAVRFDPELKQFYERVGKRRGKSIATVAVGRKLLIRCWIMLRENINYAEFRSRGVEARLARSNTRPGD

SEQ ID NO: 112262 - protein, 349 aa, unidentified
MNLKKERRPEMESNKKIYYSQYLAIDWSIVDVEIARMSAQGTKILTRRFAPDIKQIKEYLNSIKGKKILTIEETTSSHWLYVELLDCVDRIIICDPYRNSLLSEGPKNDKIDARKLCLLLRSGLLKEVYHSLDDDYKIRKLVSAYEALVKAGVRVKNQKSAIYRAEGLRYKKDKIKKQDEILSFIEQQQNASIIHYEQEKEKYKNKFRGIKKKNKLIKMLCGISGIGTIAAVKIYAKVIDAGRFENKYKYWGMCGLVYYKRESGGRNYGRKKPRYSRTLKSVYKIAAMAAIGGKNDIRDYYEVLLKQGYSISEARNQIARYIAKVSYGVMKNKIPYRAYQWRELKKAAA

SEQ ID NO: 112263 - protein, 394 aa, unidentified
MKLVGIDVGKNSHHFCVMDKETGEFNVAPSSFSNNKEGFDFLINSLKPYSKKSILIGMEDTGHYHVALLKFLLSNGYPVALINPKTTDLTRKMEGGITKNDKLDTITICDVLDTPERKKQYRITKVDRFDLYEQRQLTRHHHNLKEELNVYCNRLQKSIDLVFPEFNTLFSSKYSIVYMNLLKTFGSAEAIASTDIRTIRKCFEIKGRGNRISLTPEKLKECAKNSIGISSEVETIQIKHLVSQITLIKEQIAEIDKKIEEFSITNNSPILSIPGISHFSGTSILAELGDIGNYSKPSQIIKFAGVAPYHYESSQYNAQHTGITKKGSKYLRKTLYQIILTVINNNPVFKKYYRLKISQGKGHRCAQGHCIRKLLRIIYHLLETGQSFDPALLR

SEQ ID NO: 112264 - protein, 343 aa, unidentified
MKITTIGLDLAKNVFQVHGVDERGHALVRKQLRREQVIGFFAALPPCLVGMEACGGAHHWARRLQEFGHTVRLMAPQFVKPYVKSNKNDAADAEAICEAVDRPNMRFVAIKTVEQQSVLSVHRVRQGFVKARTAQANQIRGLLAEFGLIVPKGISHIAQRVPGLIDHSGPLPAPMQQLINGLLENMKALSQQIKDLEVQIKTWHKNSALSRKLEAIPGIGPLAASALVASIADARTFKNGRQLAAWLGLVPRQDSSGGKTRLLGISKRGDAYLRTLLIHGARSAIVAAQRWHKPNPWMAGLLARLHPNVAAVAVANKNARTAWALLAHEREFRLDYGPRPVVV

SEQ ID NO: 112265 - protein, 387 aa, unidentified
MIYIGIDIAKKTHFASAVNSDGEVLLKPFSFENSKNGFDLFISKIKNFQKNDCLIGLESTGHYGDNLICFLFQLNYQIGLINPIQTDSLRNSNIRKTKNDKIDTFLIAKCIQLGNYSLVKEKDINIIKLRTLCRFRMEVIEHQTILKTQLTCCLDLVFPELDDFFKGNLHLKTSYALLEKYSSAKIIACTRIDVLTNILAHSSKGHYSYDEAVKLKQLAKDSIGIENQAIEFQIKCIIQQLKLLKEQIYDIDKNIKEIMDLLNSKILTIPGIGYTLGSMIISEIADIHRFSNPTKLLAYAGLDPSVRQSGNFNAKTTRISKRGSSHLRYAIHRAAFLIVYNNNTFYKYYTTKRSQGKSHNNALGHVCTKLVRIIFKILTEDIEFNLS

SEQ ID NO: 112266 - protein, 361 aa, unidentified
MSIVAKRQGKEKRGHVNFDGKACWVGVDVHKASYAVAILDEEGQRQEFSTPAEPRKLLLQLLGMGMTIKALAYESGPTGYGLAWACQKLGIPVLVAALSRIPRPVSKTGKTDRLDSMKLAEFLARDMIKSIAIPTEVETHLRSLERCRQQLVERRRTVRQHIKSMLLFHGLAEPAGLSSWSVASVQSLQAMVLPDVLRITLDSYLKEHAFLLEELSHLRKLLSAALQAEGKIQTVKHLCTIPGVGETIAATFMTEIFRPERFKRAEELCAYVGLAPVTSHSGSGKATARLGQVGQNYLRSILVQGAWRFISAEPQYHDMFIKIRTKTGLFAKGLVALARKLLVLLWRVAVENRPYRSASVQ

SEQ ID NO: 112267 - protein, 391 aa, unidentified
MTKPKTKTVNDFSRCLDPLDMDATVIAVIEMSQSSWLVAGIVPGVERQPLKKLAISEHGLLNLLNRWRAEAEKQGHRITRIAVAFEAGHDGFWLARWLAAQGVEAHVIHASSVAVTREHRRAKTDRLDTELLKRGFLGWLRGERGHCKMVAVPTLAEEDAKRPSRERETLVGEASRIITRVKAAFVRLGIRGFNPKLKAAAMRLETLRTPEDEPIPPNTLAALKRDLERHQIVKKQIREIEQTRLDVLKQAPEKGPHAMVRLLARVIGVGVETADMLVQEVLSRTMRDRRAVGRYAGLTGSPDESGAKRRDKGLARSGNARVRHGMIQLAWRFLLFQKDSALAQWYRQRTADAPSMRKTLIVALARKLLIALWRLARDGVVPEGVRMRPAA

SEQ ID NO: 112268 - protein, 416 aa, unidentified
MSEAPNSSPFERYLALDAHKHYVVVGGVNAQLEIVLRARRMDMEQYPHWAKENLTSRDCLVIEASTNTWDLYDITAAVAGKVLVAHPMAVKLIANARVKTDTKDVFRLAHLLVGSLIPEVWVPPVPVRELRGLIAHRRRLIKMRTMTRNRLHSLAHRHNLILPEGGAFVDKNQAWWKDLSLSEVEKLRLEQDLAMLEFLGPKLQAVDTELARLSSSKPWKEAVPYLIQLPGFGLIVSMTIISAIGDIQRFPSSKQLVGYSGLNASLHQSGQANYSGRITKQGRKELRFALVEAAWTAVKTNPYWREQYQKLAHRMTDNKAIVAIARRLLVTAWHVLTERATDRRANPDMIASKLMAWSWKLTDAQRGGLTSRQFVRYGLMRLKIGQEITRIKRRNNRPIASEEEVLELLSDLNLSI

SEQ ID NO: 112269 - protein, 386 aa, unidentified
MNAKRYAGVDLGQRFHQVAVVDGQGHTVERSFRIGRGLSGVERLVEGSGADAEALAVSIEATGNYWNELVGILRRRGCEVYLISPKKGHDLRRFYAAHTKTDVTDAEALARMPLIDHSLKPVWVAPPQTAMLLRLCRLRWKYRCEIANLKRRLSTYSDLVVPGIGAVMPLRYSKSARVFLRRYLSPPRAKRLGRRRLSTVLSRAAWGKFSDQRAEQLWQCVENAPDFGWSCEDVLLEADVQVEMLEALECQVERLDQRIAELYSEVDPEQRLMRLPGLGEYLAAALTAHIGDARRFESTKRLVSYAGLDPRVKRTAGQTKPGQVLSKSGSPFLRAWAYLGASNSRRHDPQLQRYYEGMRARGKHYNVALCATAARLLERCHELMLA

SEQ ID NO: 112270 - protein, 351 aa, unidentified
MRKIAYLAMDLHASNSVLGDMESDGYFRGTQSFPTSEQTIIKALKAVKAKEKYLTIEEGTLTYWAAQVAAPYVTEVIPCDPIENALIFKSPHKRDKVDTKKLCRLLRLGELNRVYHPQNDHRALFKATAKHYIDLRDQLIALKQKIKAMYRHWGIIDVSGLAVYSPKGREDFLRQVKHVYIHNQLHRLYRLMDETESMKEQALKDMTKQGGKYPEIKEFKKIPGIGDVGAHIFDAHIQTPHRFPHKHKLWRYCRMGVTDRTSDGKQLGFKRLDRSGISELKALAYRAWMAAMKGDNEVKRFYSESLGRTYSRVHARLNTQRKILAVMYGLWKRGEPYNPQRFLDSSQSGVV

SEQ ID NO: 112271 - protein, 408 aa, unidentified
MAGGLLMRFVGIDVGAERHTIAIVDESGVVILKATAFTEDSAGYGRLLELLGTATDCLVAMEATGHYWRNLYAALVTAGFAVALINPLRTSRFAEEELQRTKTDAIDALGIARFAAQKRPTITQLPEAALQELRELVRLKGQVLQQLGDRVRQLHRAVDLVFPEFTRHVRTLDSELATAILERYPTAAALRTVSARKLARLCYDGSHHVGEARARALIVAARQSVGAHHGEPYQLQVRYACEDIDLLRRRLRALEKDIEQRLEQIEVGKLLTTIDGIGPQTAACIIAEVGDPARFHSSRALASYVGVVPRLHHSGKRRFSTSAKVPLGNARLRRALWMPALTAVQHNPWLRAYYYRLREAGKRPKVALIAVIRKLLSAVYSIAKHRRPFVLAPIFSPVAGGAVVPTAR

SEQ ID NO: 112272 - protein, 344 aa, unidentified
MDHYAGLDVSLRSVAICVIDAQGKVVFERSVAFEIADIVTCLKACGQPLKQIGFEVGAMSQHLYRGLKAAGFDVVCMEARQVNAALSAMRNKTDRTDARGIAQVLRSGWFSPVHIKSREAHAIRALLTCRKAIQRKCIDLANEIRGLFRVFGLRLPPRLEQAAFDDRVRPIIVADPDLARALLPLLDARAVLYQTYRELDRRVKQEASRDEVCLRFMGIPGVGPVAALTFRAAVDDPARFSRSRTVAAHFGLTPRRYQSGETDNPGRISKAGDPDVRTALYSAANAMLMRVVSGSGIKSWGLRLVRRKGRRRAVVAVARKLAVVMHRMWTDGTEFRRDPAEGVA

SEQ ID NO: 112273 - protein, 339 aa, unidentified
MQIHSVGIDLGKTTFHLVALGAAGKVLVKKKFTQRQLLAYTANMQTSLIGLEACSGAHFLGRALRKQGHDVRLIAAQFVKPFVKSNKNDFVDAEAIAEAVERKNMRFVPIKTDDQLDLQAIHRVRDRLVSRRTAVINQLRAFLLERGMVFAQKPAKLKAAMADILENAEADLTPLMRNLIDTLWGEWKLVEQQIEELNDELERISDSDAGCTRIRKIPGIGPVVATAIVAAIGNGAAFRKGREFAAWLGIVPRQYSTGGKAKLLGISKRGNVYLRKILIHGARAAVLRIKRDRAPIGPWLDRLDARAPKNVVVVAMANKLARIAWAVLSSGNDYRPVIA

SEQ ID NO: 112274 - protein, 419 aa, unidentified
MDHPKSRYTYVGIDSHKDTHTAVFIDCFFEKLGEATFGNRPSEYPGFLAGAEKLKAPGTRLMFGLEDTGMYGRGLAVFLAESGQQAKHVNALLVAGERKTQNIVQKTDAVDAGCAARVLLSKFGELPDADVDGRYWALRTLVMRRGFIVKNNASLKSHLHGILTLHYPGYRGFFPEIDSKASLAFFMRYPSPGTLEGTAVEGLAAFLQEASDGRVGLGKAGMARAQGILDMLEDTAVPFQGIRDDAVRGTVRQIQANQKEIGQVEKAMAVFLEKFDCTLTSMAGIDMVCAAQMLSCIGDIKRFPTPAKLARYAGIAPVTYASGRKDLQFANQRGNRELNSIFYLLALRLIAATPAGNMRNPFFYEYYRRKVSEGKTKRQALKCVQRRLVNIVWAMLANGEEYVNPPLFAPPGKTEETQE

SEQ ID NO: 112275 - protein, 423 aa, unidentified
MYASTLCVGADVHLKQITLRAVDKLTSDQVVAPFNVANNLPGAQAATSRLADVAARLGYTRIEIGYEATGMLWIPFHRFLTTCERLEPFDLQQVCFNPKLVADFKDALVLRGPKDDVRDAFDVAARVQVGHWPLSYVPHDFWQGLRRLTRYRFQLSRYLSQEKVRFQAYAFLKCSDWKRVEAFSDVFGATSAALLTEFTAAELRLMSHDQLADLIAHRGRGRFYDPHATARTVQHALSTSYPVDNQTDLMVTATLATAWEHIRAIKRLMKRLDQHIARCIQPVPNPLITIPGLGPVITAGLLAEIVDVSRFPEHKHLAQYFGISWTRRSSGGFVSQNTCMTKVGNPYGRYYFVQGADKMRQHNLEYKAFYWRKFNEVSTHQHKRALVLTARKLVRLVHALLTKNVPYVRPQMTARSEEADLLQ

SEQ ID NO: 112276 - protein, 339 aa, unidentified
MKISMIGLDLAKSVFQVHGIDSEGQAVLQRRLRRGEVESFFRKLRPAVVGMESCGGAHHWARLLRSMGHEVRLMPPAYVKPYVRRNKTDGRDAEAICEAMQRPNMRFVGIKSTEQQAVLALHRTRSLLVRQRTMAANAFRAVLAEFGVVARQGRQALQSLMAESPATVPQAAHAALASLARHWRALDADIAELEERIVRTVKSDPVAQRLIAIPGVGPIIAGAVVATVPDARVFRSGRGFAAWLGLTPRQNNSAGRRRTGGISKQGDRMLRTLLIVGASSHLRHLRRPRSATKDQWLTGLLARKPVKVACVARAAKTARIIWAMLARNEAYTPRIQRAA

SEQ ID NO: 112277 - protein, 380 aa, unidentified
MTTATHNVHDTTTERVLFVAFELSEKTWKLGFTTGHGQKPRERSIAACNQARLLQEGAQAKKRFGLPDTAPVVSCYEAGREGFWLHRFLQAHGITNYIVDSSSIEVNRRRRRAKSDGLDVRKLVSMLIRYAHGERAVWRVVHVPSVAAEDQRHLHRDLETLKQERASTTTRIKGLLSSQGVRLTSLSKLPEQLEALRLWDGSPLPSGLCRRVLRVYAHHQFLSQQIAELEAERRALLQTSQEAALEKVRQLMHLRGIGINGAWLLVMEFFGWRAFKNRREVGGLAGVTPTPYHSGESAREQGITKSGNRHVGWMTMELAWSWVRYQPESALSCWFRQRFGGGGKRLRRIGIVAVARKLLIALWRFLETGVLPEGAVLKEA

SEQ ID NO: 112278 - protein, 354 aa, unidentified
MKGYYYVGLDVHKKVIAYCVKRSDGRIVDEGTVRATRGALGAWAAGMGGRWVVGMEATMFTGWVYDFLKSQAADVKVGHPYMLRAIVAGKKKSDRLDARTLADLLRCDLFPACYMASEKIRELRRVLRYRNLLMQEATRMKNKTAGLLMEVGAEYSKKRLHGKQYFHSLVEGLEDITPSVRRLLGLSRTTMEIFEKNQRWLLKELANDGELSERVARLMSIAGVGDVTALTWALEVGDPHRFRSVKQAVSYCGLCSGQHESAGVSKRGPLSKQRNKHLQRVLVEAAKLAPRWNPQLAVVYARERERGANHNRASLAVARKLVAYLMYVDKTNREFEPQEVSDTDAVHCPPVLAD

SEQ ID NO: 112279 - protein, 424 aa, unidentified
MGKVAVTPGARGHPKTCSQHNPRKEVNPLSRTLFVGIDLGSEDNVVCVMDPAGDDLARFTVSNDLPGTERLVEKTLDLVRATGSDTASIGMEATNLYWWHLHQALYDDPGLKAIEATVTVINPKVIDGFKRLYPDMAKTDKIDARVIADCLRFGRVKPSPPPDLRFAPLQRLTRYRYHLVHTLTNEKNRALSLIFLKFSTYAKGCPFSNVFGKASQAVLENLTPDEIVQRPLPELVYLIAQNGNNRLKDVDHMAQILKNISQRAYRLHPKMRDAVDTALAMSLETVRFLEAQECKLNIVIARDLQAIPQTLDTVPGIGPVYTAGTIAEVGDVHRFPDDDALAKFAGLTWRNHQSSKFAAQDLPLTRSGNFYLRYYLVQAANSVRVQEPEFAAFYQRKYNEASHHHHKRALVLQRENWSAWSLPC

SEQ ID NO: 112280 - protein, 369 aa, unidentified
MEQHTEVFVGLDVAKARHAVAVAEDGRQGEVRYIGEIGADANSVHRLVTKLEKRHGRLHFCYEAGPTGYGLYRQLTKLGHPCTVVAPSLIPRKPGDRVKTNRRDALQLARLLRAGELTAVWVPDEAHEAMRDLIRCRQMAVDDLRRKRQTISSMMLRQGRVYPGKKTWGARHTQWLQAQRFDHLGQHLVLQELLLAARHAGEQLDRIEAAIVELLPKWSLAPVVEALQGLRGVNLVTAATVMAEVGDLRRFENPRQLMAYLGLVPGERSTGDTVHRLGITKAGNGRVRQALVESAWSYRHPPRTSQNKHYILEHLPPAVRDIAAKAQSRLCARYRALSQRGKKLTVAVTAVARELAGFIWAIGREVQAM

SEQ ID NO: 112281 - protein, 386 aa, unidentified
MRKPNDLSRSLSVLNRNSTLIAVIEMSQSSWLIAGIVPGVERQPLKKLAVDESALLKILHRWREEAEKAGHKIERIAVAFEAGRDGFWLARWLRARGIEAHVIHASSVAVSREHRRAKTDRLDTELLKRAFLGWLRGERDHCKMVAIPTITDEDAKRPNRERESLVGEQSRIVNRMKAALARLGIRGFNPKLKKAVERLEGLRTPEGEPMPPNTLAELKRDMERRRLVRNQIREIEKTRLERIEQAPSDGPHVMVRLLARVIGVGVETADMLVQEVLIRNLRDRRAVARYGGLTGSPDESGKKRREKGLARSGNARVRRGMIQLAWRFLMFQKDSALAQWFYARTKNAPQTRKTMIVALARKLLIALWRLVREGTIPEGIVLRPAS

SEQ ID NO: 112282 - protein, 430 aa, unidentified
MKSNTQNAKIEAITEKTLVLGIDVGSETHYARAFDYRGIEYSKKPFKFSNTEAGFVTFKEWILDLKDRHEKDKVVPGMEPTGHYWFNLGKFLQDNEMKPVLVNPHHVKKSKELDDNNPTKNDRKDPKVIAGLVREGRYMIPYLPDGVYADLRTASNIRFQLQAELTRIQNRISRWFNIYFPEYKTVYGKPDAKSGILILKAAPLPEDILTLGIDGVNQIWRDAKLRAVGKARAKTLIEAAGHSVGSKEGAVSARMEIRMLLEDYESRNMRLQEVMVLIEELVKGIPMAEKLLEIKGVGIRTVSGFLAEVGDISRFNNPKELQKLAGLALVENSSGKHKGGTTISRRGRKRLRYLLFEAAMSLVAKNPEFRELHNYYTTRRRNPLKKMQSLMAVATKLIRVFYAMLTKGVDYDPKKMVSDIRRPEAYLQAA

SEQ ID NO: 112283 - protein, 357 aa, unidentified
MSHTTYSSTTIPALTIGLDLGDRLSQAYAVDAAGTCVEERAVATTAAALTAFLAERPPCRVVLEVGTHSPWISRLVALFGHEVFVANPSAMYGARRRRKRNDRLDAEFLARQGRADVRLLHPIQHRSAPAQQHLEVLRARDQLVRTRTAWINHVRGAVKALGTRLPAASAEAFPTRADAHVPDALRPAVLPLLTLITTLTTAIRSYDAQLEALARTTYPETARLRQIAGVGPLTALAFVLLIEEPTRFAHSRDVGAYFGLVPRLDESSTLTPQLRITKAGDPLGRRLLVSAAHYILGPFGPPCALRRHGEALMQRGGTNAKKRAVIAVARKLAVLLHHLWRHQLTYDPQHGGASRAA

SEQ ID NO: 112284 - protein, 307 aa, unidentified
MDHFAGLDVSVKETSICVVDDAGKIVREVKVASEPEALLAVLKNLAYHFKRIGLEAGPLSQWLFSALAEAGLPVICVETRHMQAVLKAQINKTDRNDARGIAQMMRAGLYRPVHVKTLRSQKLRMLLTHRKLLQSKAIAIENDLRGTLRNFGLKVGMVGKAKFEARIRELVENLPDLAVLVEPMLIVRRTLREQIVILHRRLLAIVRDDEVCRRLMTTPGVGPVVALTYRATVDVPARFRKSKAVGAVFGLTCAKYQSGEIDRNGRISRCGDEMMRSCSTKQLRACCGRRNGPGSKPGRCRSPGAAG

SEQ ID NO: 112285 - protein, 346 aa, unidentified
MTVKLMAGIDLHSNNLFCGIVDLEGKRVFEKKLPCDVDSVVRALKPFKKRLEKIAVESTYNWYWLVDGLQDHGYPVVLANPAAMQQYDGLKHADDKSDAFFLAEMLRLNILPTGHICDREIRPVRDLLRRRMGLVHQRTSLILSLKSLHTRMTGRDLSTGRIKALEASEAETLFEHPADQLITRLDVQLVEQLSRSIAKIEAAILAVVKFLPNYQVLQTMPGVGRILGLTITLETVDPRRFASPGDYASYCRGVDSRRMSNGKKKGENNGKCGNKYLAWAFVEAAQFARRHDESCRKFHDRKTAQVNGIVGTKALACKLAKAAWHMMSQNTPSDSGRIFPGIKSQI

SEQ ID NO: 112286 - protein, 318 aa, unidentified
MENVTSSVFVGIDVAKSWLDVCIRSLSGSESAKSKFANDAAGISEICAFLAGFKPKLIVFEATGGYEALLAAGLATDGLPFVIANPRQIRDFARAIGRLAKTDAIDAGVIALFAERIRPELRPFPEEKARALTELVSRRRQVLGMMVMEGNRRFAAQDKRVSATINATLEFLKCQVAQLDKEINQLVQSSTSWRETEDLLTSVSGIGPITARTLIAELPELGRVDRRKVAALVGVAPVNQDSGLQRGYRAIAGGRTSVRNALYMATLVAVRHNQVLKAHYLALVARGRPKKVALIACIRRLLGILGAIVRTRKGWQPA

SEQ ID NO: 112287 - protein, 410 aa, unidentified
MEVMFDRVAGLDVGKDSVTVCVRTPSPRGGRRSETRTFKTMFGSLRVMRDWLVEAGVTIAAMESTSTYWKPAYYCLEEVMVVWLLNAAHMKAVPGRKSDVRDAEWIAQLLEHGLLAPSFVPPPEIRRLRMLTRYRMQLLGDRTRELVRLELMLEDASIKLSSVASSLRTVSARAMLTAMIDGETNPLALAEMARGRMRRKIPDLAQALTGTFDAHHAQLAKSMLRRLELVEQALAELDAVIVEACRPWRHQIELLQTIPGVGETVAQVIVAETGADMSRFPSAAHLAAWAGLAPAMHESAGRQSPAGKRHGNKWLTAMLVEAAGSVGRMHGKNYLAAQHARLTRRRGMGRAQVAVAHSILVSAYWMLTRDEPYHDLGADWHSRRSNEAHTRRLIAQLEHLGHTVIIDPAA

SEQ ID NO: 112288 - protein, 341 aa, unidentified
MKIYAGIDVSLEASRICIVSADGKIVWEGRAMSDPEALGRALAEHGGGLERVGIEAGPLSEWLHDGLTAQGFAVVLLETRCLKGALSMLPVKSDRSDARGIAQAVRTGWYRAVHVKSLGARRVRALMRARRLIVDKRADVAGCLRGLLRAEGIKLARVSPARLAARVRALIAGQPLAAVIEPLIIAYEALRAQELAYDRMVYAAAGADPVCRLLATAPGVGGVVALTFRAVIDDPHRLSRSRQAGALLGLTPRRDQSGEVDRMGAISKAGDGELRKALYEAATILLGRVGRRCRLARWAESLAARRGIKRARVALARKLACVLVAMWKTMTPYRPELAIAA

SEQ ID NO: 112289 - protein, 393 aa, unidentified
MVYVGIDVAKDKHDCFIKKTNGEYIEVFTISNNLEGFRKLYTTILKFNIQNEDIQVGLEATGHYGYNLISFLLKQNMVVYVINPLHTNLYRKSMSLRLTKTDKVDACTIVSMLMSNVNLKSYTDLNFINDDLKLLTRYRYEKVKERAKLKTSVSRLICILFPELEKIVPTIHSASIYAMLLQYPDVSSIANAHITKLTNILSTNSRGHYEKETALKIRETARKSIGLNMPVKSLELQHTIKLIEELEMHIKETEEKIKIIMDKLNSPILTIPGINYRLGAMILAEIGDFSRFSSSDKILAYAGLSPSTYQSGQIEQSSYAHMEKRGSKYLRYAIFNSTKFVCQWDPVFSEYLAKKRAEGKHYNVAISHAAKKLVRIIYHLERNNEEYMRRIKK

SEQ ID NO: 112290 - protein, 354 aa, unidentified
MCKEDRKHRRPRRRRDRHRKDTFHLVGFDRSGQLVIRKQIKRLALNATFEQLPRCIVGMEACLSAHFVSRTLRGMGFEPRIIPAIYVKPFNKGQKNDYNDAEAIAEAALRPNLRTVSEKDQDQLDLQALHRVRARLVSRRTATINQIRAFLIEQGITVRSGLRALKNSFETILEQRRDEISPRMRGILIGLYGDWLWLDKRIEDVSGEIEEISRTEENCANIMTIPGIGPMISTAMVAAVGKGEAFDRGRDFAAWVGLVPRQFSTGGRTLLGRITKRGSRYLRMLFVQAAKVIMMRPHRWSDFSFGPWLTEAVARMPRSKAAIALASKLARTAWSLLRHGTRFDAPKDATMEAI

SEQ ID NO: 112291 - protein, 374 aa, unidentified
MSDHSEAFVAFDTSKLRNSVAIAEAGRAGEVRFLGEIENSAAATAKLVRKLAGKYQRLTFCYEAGPTGYGLYRQIKSLGYECLVVAPSLIPRKPGDRVKTNRRDALGAVKLLRAGELTAVWVPDPRHEAMRDLTRARGAAVEDLRRKRQQVSAFLLRQGRHYSDGKPWTKAHMNWLASQKLEHPEQRIAFEEMLLAVRQAQERIERLEQAIRAAVPDWSLAAMVTALMAMRGIDLVSATALLGEIGDLSRFQTAPELMAYLGLVPSEASTGDTVKHGPITKAGNRRARRILVECAWSYQHPPRVGKEKQEKVAAAPRAVREIAWKAQCRLNRRYRALIRRGKLKTVAVTAVARELAGFIWAIGREVTTADAAAR

SEQ ID NO: 112292 - protein, 462 aa, unidentified
MKNSIAKKRKQVPAGYLVVGVDPHKKKHAAIFMTQDFMTHSKLKFDNSREGFETVLERARTEMLKTECRGVIFAIETGAHHWRNLAYFLDEKGIPLRLINQFTLKRRREGKDLNHRKNDYRDSEVAAQLLCTGEFNAARLSQGVYAELRAAYGSYRRLVKEKTRIVNLVKSLLDGLFPEFTQVFKNPCGQTAASILCTCAVPQAIADMTESEFAGAIKAACQGRRIMKGKLRVLHHVAMTSIGIGAGAQSVSSEIAFLIEKLRLIEQQLRQINEALTRLVHETVEGKYLLSIIGLSYVSVAGIIAELGSFSSYQNAKQLIKMAGSNPTESESGGKRHSHTPISKQGRPVLRHCAWTAVIPMLRFNPDFRDWAKKLRERPAGANPLSGREVMVAAANKLLRLAFALVKNQTLYQIPESQPVEITIQEVSNTSGGQGNTAGSFGSSYEPTRQKTWCPALLAKPV

SEQ ID NO: 112293 - protein, 457 aa, unidentified
MDQPTRFIGMDVHKDTIVVAVTAAGDSGKATPYGTLPNSATALEKLVKRLRQANSGSLKFCYEAGPCGYGVHRTLTRLGEACMVVAPSMIPRKSGERRKNDTRDADGLAVLHRGGLLTAVWVPDAAHEAMRDLIRIRLAAVRAVRTARQQLSAFLLRHERIYPNGGKAWTKAHRGWMADQSFAQPAQQIVLEESIEAVRLGEQRRDRVDGFLRAQIPSWSLFPLVQNLGALRGLDTIASAGLAAAIGDPSRFASAPDFMAYLGLVPSEHSSGPKRRMGAITKSGDVHARTLLIEAAHSYRFPARIARRKLTAVDAVPEAVREIAWKAQTRLCQRYRRLMAKGKPRQVVVTAIARELAGFVWSIACITSDPPAKTSAATTPSDEVSPAKSTGRSRALRRQPLKATGRRAARPEQTGAPIELRYVTVDRPCPEADNPKVSTPASSTRRSAAASVEGSAG

SEQ ID NO: 112294 - protein, 342 aa, unidentified
MQWTVAIGVDTHKHTHVAVALDRLGGQLDVFEAPATSAGYLALYRWAQELGEPAFALEGVGSYGAGLARFLQAAGCPVYECERPKRSERRRGKNDLIDALLAARRLLAGERLGCPRGLSGPREDLRLLLLERRSAIRARTATLNQLQAVLVTAPARLRSRLEGRSSEQLARTVARLRTIEGEQAVVRGVLRRLGRRVLSLDSELAELERELEAIASAIVPELLAECGVGPVCAAQLVVSSGDPSRMASEASFAALAGTSPVDASSGQQQRHRLNRGGDRQLNRALHVIALTRVRYHGETAAYYQRLLAAGKTTREARRCVKRMLARYFHRKLRSLPALTLTT

SEQ ID NO: 112295 - protein, 345 aa, unidentified
MKIVGCDLHTRYQQSAMLDRETGELVERRLEHENGEARAFYAALSGSVRVGIEATGHTRWFERMLAELGHELWIGDAAQIRASMVRKQKTDARDAAHLLDLLLSERFPRIWRPTLEERDLRQLVWHRQKLVWMRNAVGNQLHALAMGEGVCRKKTLFTKKGRVELESLKLGPWASHRRQELLTMTDQLDTSLQKLDQAVAEQAERNPTAVLLMTHPGVGPVTSLAFVLTIGPVGRFERSKQVVSYLGLNPREHSSGGRQRLGAISKQGNPMMRSLLVEAGHTAARLDRELRQDYQRLKLRRGSGGAKVAMARKLAVRMYWMLRSPANYAQLVRMQGSPRGTLVGQ

SEQ ID NO: 112296 - protein, 341 aa, unidentified
MSDYSYFCGIGLAKNHFSLHAVDQNGKVILHKSVTRSKLLTTIANMPLMRIGVEACGGAHYWARTLNKLGHDARIMAVKYVIPYRTKGKNDLNDAVAICEAVQRPSTRFVPVKSPEQQAILSVHRMREHWVRERTALMNRMRALLSEFGLIIPVGRSSLMKHVPLMLEDAENELPHLARTAIADAYHHLGELNQRIADTEQVFDSFAKVSANVQRVMKVRGIGPQTATAILASIGNGSQFDKSRDFSAWLGLVPKQYSTGGKPRLGRITKHGDKYLRTLLVHGARTVIANLGDKQDKLSQWCRGVLERRGMNRAIVALAAKNARIIWSLLHNQTEYENYAA

SEQ ID NO: 112297 - protein, 346 aa, unidentified
MDYYAAIDVSLEFSSVCIVDATGKIAKEVRVESEPEALVKLFKTLGFALTRIGLEAGPLSQWLHAGLTRAGFETVLLETRHVKAALSAMTVKTDRKDARGMAQLLRMGWFRPVHAKSAGSQEVRALLVARKQLQHKLTDVEMSIRGILRGFGLKVGSVTSNKFEQRIRKLVTGQPMLEQIADALLAARAELSAQFDKLHKAVLKIVRGDDVCRRLMTTPSVGALVAITYKSAMDDPHRIKNSKAAGPLFGLTPRRYQSGETDVTGGISRVGDEMVRTVLYEAANVLLSRVTRFSALKRWGLEIAKRRGLKRAKVAVARKLAVILHRMWIDGTTFQWNRAKPTTASA

SEQ ID NO: 112298 - protein, 308 aa, unidentified
MTTLHTGLDIAKLNLQLHLAGRVHDLPNTAAGHRRLLKLLATQPGAHVVCEATGGYERDVVAALHTASVPVSVLNPARVRHFARATGQRAKTDHLDAAVLSAYGQALQPKPTAPRTEQEQHLAELIRRRVQVLEILVAQRQQAQRLTVPALRRQAQSLVRRLERDVKQIEAQLKELRTQATALDERVQKLEAITGVGAITALGVLAELPELGTLNRRQAAALAGLAPHPRESGQWHGRRRIGGGRAPVRRALYMAALVAARSHRQLKAFYQRLRAAGKPAKVALTAVMRKLIVLMNHLLKNPNFALSN

SEQ ID NO: 112299 - protein, 426 aa, unidentified
MQNCLFIGVDVALKGNQFCVMNFDQHIYFNLKFPNNPEGNNMVINKIKDIENKFFFEKIIIVMESTGMYSFHPACYLSSNEYLNNFHTEVYQINACDFDKYKKSFHDLEKEDGIDAYILADYARVGRTKSLYPFKGSQYIALQRLTRQRYHICKELIREKTYVLTNLYLSFSGLISLDKNELPFSNLFGATSSAFLEEFDSPDQIAESSVEELINFISEKSKNHSSNLDNKVTALNKAMRASYRLDQTAYEPINIAIACSLNTIKFYQQQLKNIDKAILNTALGLDSNIYHTLLSIRGIGKVYAAGIMAEIGNIDRFSHNSKLAKYSGLYWKRNQSGEFDSQDKKSSKKSNKYLRYYLVEAAASCVRQNFPFLKEYYNIKYKEVTKHQHKRALVLSARKLERLIFGLLRKNQYYKPIDSVQNSKIS

SEQ ID NO: 112300 - protein, 424 aa, unidentified
MTTKTLCVGIDVHLDDLVFRAIDKAEGHEVLARFRVTNNLPGSQAAIMTLADTATQLGYTRLEVGWEATGLLWLPFHQQLTQSARLQAFTLQPICFNLKLVANFKDGLVLRHPKNDERDAWDIASRVRIGELPVSYVPTDFWQGLRRLTRYRYHLARDLVREELRFQANAFLKCSEWQRVKPFSNLYGATSLALLAEFTVAELKAMSLLELAELIAHRGRGRFDDPTATARVVQDVLRTSYPVDPALDALLTATLALSAEHLRMIQHLIKRLDQQIARAITPFPNPLITVKGLGPVITAGILAEIVDITRFPDDPQLAQYIGLTWERRATGRFISQNTRLTKVGNVYLRYYTILGADRLRQFNLEYQAYYWRKYHEVPNHQHKRALVLTARKLVRLMYALLTKNVPYTVRPQTPQPATGGAAHA

SEQ ID NO: 112301 - protein, 355 aa, unidentified
MGRLARIGVDTAKSVFQLHGVDEKEQVVLRKQVRRREFLAFLAKLDPIPIALEACGASHHWARELGKLGHQVMLIPPQHVKPYVGHNKNDKTDAAAICEAMSRPKVVARLVPIKSIEQSAAQTLLGIRENLIKRRTQLSNSIRSHAAEFGLVAAKGLDKIEPLLERIEGDDRLPLLVKEVFVALGQEFRDIKARSAAIDKKMLAFQRTNELARRLVEVPTVGPVAACLAVTKIVNPQGFRSGRQCAAWIGLTPKDRSSGGKQRHGGITRAGDESLRAALVCGATAYLRHARSGRTTPSPWLAGLLKRKPPKLVAVALANKTARIIWKLMTTGERYDPARAWAQSDIAADAIGIAA

SEQ ID NO: 112302 - protein, 364 aa, unidentified
MKKTSTVQALKNEIFKRRKLTIGLDLGDRWSFYCVLDEAGQILLEQTLPTTPEAMKQTFGKIPRCLLALETGTHSPWVSRLLSELGQEVIVAHAQKVQWITSRKDDRHDARTLARLARVDPELLGPVRHRSAPAQLHLTVIRARAELVRARTALVNAARGLVKSYGQRLPKCGTYQVSEKLAEGLSAELREVLVPLFQEIESLNGHIKEYDERMEKIAKQVYPEVSLLQQVKGVGTQIALTYVLTIEDPHRFAKSREVGCFLGLRPGRRNSGQSEPQKGISKEGDRYLRTMLVQGAHYILGPFGEDSDLRRWGLKLAERGGKNAKKRAVVAVARKLAVLLHRLWVGGEVYEPLRNSQKAMREVA

SEQ ID NO: 112303 - protein, 410 aa, unidentified
MRYDVGVDWADQTHAVWVVNESGTKTAARTVPHTAEGLSEWGRELDEWRAQGIELWAAIERREGRVVDFLLDHGVVVFPVNPKALDRARDRFRQSGAKSDPFDARVLADFLRTDHAHLQVLQPSSAAAQELKLLTEDYQQQIRQQTRLVNQLTATLKAYYPRALEIAALPTPLAREFLQAYPTPEAAAALTERQWQRWARAHRLSETRTQALWDVLQQPQLPVPVHVLRAKARLMRSLVAQLTLVVAVVEEYREAIEDFFARMPAAQWARTLPIGKHGITAPTLWARLGDAPGRWESFRHLQAHAGAVPVTKRSGKQQRVIQFRFACDKALRYVIDHVAFLSLHSSVWARAYYDQQRARGHAHRQALRALAAKWLKIIFVMWQHQVPYDEQYHLATMTRQQLRHGQKHIA

SEQ ID NO: 112304 - protein, 420 aa, unidentified
MQGEAPQFAAFIGIDWADRKHDVCLHVPGMPLPETSVLEHRPTVIDTWARRLRERFGGRPIAVCLELAQGPIVSALLEYDFFVIFPVNPSTLAKYRRAFVPSGAKDDPTDAALALDLLRRHPEKIAPLRRESEDMRALRRLVEARRDLVQDRVRVTNRLTFALKEYFPQVVDWFRDKETDVFAAFLERWPSLQSAQRARRETLVAFFHAHSVRRASTIGRRIDAIASERPLTSDRAVIEPALTVVTTLLPQLRALSAGISRLDAEIVQRCQRLPDFRLFDSLPGAGQVFASRLLAAFGENRGRFADAAAVQKWVGVAPVTERSGNKHWVHWRWACPTFTRQTFVEWSASSIAHSFWARAFYDSHRAKGSSHNAVRALAFKWIRILFRCWVDRTPYDESRYLSALRKRQSPLLKFAAAQPS

SEQ ID NO: 112305 - protein, 341 aa, unidentified
MSIVGGFDVHRAQITYDYVDTATGQVFRGRIAPADREHLRWWLDRFAGVAEVHFAVEGCTGWLFVVEECQRAGLSMHVADPGEAAAARGKKRHAKTDRLDARHLRQLLEDHRLPESWIPPTHVSEIRAKVRLYKALQDERGDWMQRVRAVCFHQGLAHRRVLFGADGRAVLATTTGLSAAGTQQVAVSLRQIDRLAEEVETLRDELVGYARHQPGCRALRNQLYGVGWLTAVIIWAELGDTRRFSASRQAVRHTGLDITVYSSDGKRARGHLARQGPALLRWALFEAAKSAAKHTSPDHGYYITVADRAGANRATLSVARKITRRAHHILRDLGEEAFLAA

SEQ ID NO: 112306 - protein, 405 aa, unidentified
MVEKSQWSAFAGIDWGGEHHQLCVVDGAGNRLVERRVTHDVAGLVELETLLQRFATRMPIAVERSEGLLVEQLQANGHVVFAVSPRIAARARERYKVAAVKDDRFDAFVLADSLRHEHTHWRSMTTPSPLLAEIKALTRDRDRLLETQQAVEHQLRMILEAYHPAPVRLFSSVDRQITLSFILDYPTPAIASRVKTTRMAGFLARHHYTGRVSAQVLADRMRANLLTASAGTVAGKSFSAQSYTRLLQLLNSQLADYDDAIAAAVAEHPDAPIFASFPGVGPVTTGVLLSEIGEDRDRYPHAQALLAEAGLAPVTRASGRSRSVRFRYAANTRLRESAMWWAFNSMKESPWAAAAFREARTQRGQRYHRALRGLSARWMRVLWRCWTDGTPYDPAKHTTAVPATA

SEQ ID NO: 112307 - protein, 436 aa, unidentified
MAKIVNLNAAGIDISSKDFYVAIPEERAKEDVRVFGAFTEDLHSLAKHLKENKIDTVAMESTGVYWYNLYTILLDYNIEVYLVNARYVKNVPGRKSDVSDARWLQRLHSYGMLNASFQPDNITRTLRSHVRIRKQITNDMSKEIQRMQKSLELMNIKLNNVIRDITGKTGIKIIEAILSGERSPKKLAQHRDKRMKASIETIEKSLNGNWREDQLFNLSLAYEHYMFLHSQMIKCDKEIEKVLELLSDNDIEEKEIKQATIRKNTPSFNVAKYLYKSLGVDVTKIYGIKGLSALTIFSETGANLKEKFPTEKQFVRWLNLVPDNKITGGKVISSKVKKKKNKAGQAFRTAANTLWKADNPIGDDLRRRKAKNGAGKAIVAIARKLASIYYKIVTEKVEFNPDLLIQNSKNYYTNKVKYLEKALAKAKNKELIFNTL

SEQ ID NO: 112308 - protein, 363 aa, unidentified
MNSVYHTELSSHEGTRCQFNGGRCAIKLGIDVHQDFYVVVMQEEGTNPKPPQRFSKEALLQWAARLRSQGREVHAVYEACGFGFSLQRRLSALGMECYVVCPQKLDEQNRRVKTDGLDARALCLKLDRFLQGNRHALALVRVPSQEEEQARALHRQREQLVKVRKVLEAQGRSLMVNHGIEPVQQWWKRRAFATLAVPQWIKELLGNSQPVVLALQQKIDQLTLQLQSAAQCQPPRGLGKMTSVIIDREIGDWRRFNNRRQIASYTGLCAGEYSSGQKRLQSCVTKHGNPRLRAALVELAWRMVRFQPHYHAVHKWKHRFKKGQLTTGAARKKAIVALARQLAVDLWRVRTGRLTQEQLGLEI

SEQ ID NO: 112309 - protein, 444 aa, unidentified
MALSGMILIREVADAPVIMGISKSAGLKFPCGEVKIVNPLFVGIDVSSKSNVAYLMNPDGSKHSIFSVQNNLGGAKLLSERIVSALSSMRLNDVVIGLEATSIYGNNLVYALREDGSLGRFQRKIHVLNPKQVKKFKESYPDLPKNDFVDAFVIADHLRFGRIAKEVYMDDYRYQALRTLTRARFDVIQNLTREKQRFANYLFLKCSGMAQDKNIPNTSATTIALMEHFETVDDLANADLDELTAFIAKTGRGRFADPDVVAKAIQTAAKGSYRLPKTVNDTVNQAMSVSIASMRALKEQVKVLDKAIEQQFEIIPNTLTSIPGIGKVYSAGIIAEIGDIHRFNSQASVAKFAGLVWHKNQSGGFEAEHSQMIKSGNRYLRYYLLEAANSVRRCDSEFRRYYDLKFKEVNKFQHKRALVLTARKLVRLVFRLLKDNRLYIPPEG

SEQ ID NO: 112310 - protein, 392 aa, unidentified
MEAVTSQPHTPAAIRTDLAAIFVSLELSRSTWLITSLSPGNGEKMSKHSVAGGDVAALLHRFAQLQEKVRSRTGNHVPIVSIQEAGLDGFWIDRVLKANGIESYVVDPASIATSRRRRRAKTDKLDGEALVRALLAFKRGEPRVCAMVNAPSPEEEDRRRLCRERKVLIAERVKHVNRIKGLLFGQGISGYEPLRKNRRKQLDELHTGDGRPLPTHLKTQISRELDRLELLLEQITAVENERDTLLAAQKDSVAATLIPAGAMLCDIKGIGLEFAAVLWTEGLFRHFDNRRQVAAYAGLAPTPWQSGTIDHEQGVSKAGNPRLRATMIQLSWLWLRHQPQSALSQWFTARVQSSGGRMKKSTIVALARKLLVALWKYVTAGVVIEGAALKTA

SEQ ID NO: 112311 - protein, 406 aa, unidentified
MRGPVITVDVSKGSCHYQPFLENGKPMRKARVLHDTIEGFSNLKETIEKVKEKGAVETVPVVFEATGVYHRCLQKYLDDNSIPYFIISPLLSSAYRKTNLHGNKTDPLDCAHIAKAYYCEENLLPFYKQEDRFIKLQKLNRYYETELIHLKKRKVSFRSFLDIIYPRLDKCFGANGSLYDPIPMEVLKKYPHPELLLKHKESTVVKVIEKKVNHDQKFVEKIIHKMYECAEHCYSGAEVTDVEVLKLPEMIDELSEQMNMCDSILKKLVEEARNIPYFECIKSIVGIGDNLAARIIAELGDMSRFTSRRAISAFAGLNPKIHQSGDVDGIHLKISKKGNRHLRCLLYLGASCNYRLKKHDPLYEFNQKKRQQAQSPLKAKAANTATAHKLLIVIYALSQSGQMYRF

SEQ ID NO: 112312 - protein, 349 aa, unidentified
MVKNKHTFSIIDKNSGEILLSPSDFSNNLKGFLFLIQKLSSYTKSELLIGMEDTGHYHFALLKYLLDRRYTVALINPTTTDLTRKLQGGITKNDPLDSLTICDVISSNHRNKPYRVTTLNRFDLYEQKQLTRHHHNLKEELNTYKNRLQKCIDIVFPEFNSLFHSKYGIVYMNILKAFSSAKAIANADIRSIRKCFEFKGQGKRISLSAEQLKLTAKSSIGIPSVAEEIQIRHLVSQIELLEKQLSEIDKRIEEFSLKNNSPILTIPGISHFSGTSIISELGDICNYTKASQIIKFAGVAPYHYESSQFTAQHTAITKKGSKYLRKTLYQIILPVISNNEVFYAYYTKS

SEQ ID NO: 112313 - protein, 377 aa, unidentified
MKRIKFVGLDVHAETISVAVAEQGGEIRSLGVIPNREESIRKLVKKLGPVEELRFCYEAGPTGYALYWQLTRMGAQCEVVAPTLVPVKAGDRVKTDRRDALKLARNYRAGELTAVWVPDAAHEALRDLVRAREAAKKDELRARHRLSKFLLRHGRRPPMGVKAWTLEYLAWVKRGVQFEQMAQEATLLDYLHEVEHGAARIARLDGAIEEAVKLAPPEMRAVIEALQAPRGIAQVSAVTVVAELGEFSRFAGAKQLMGYGGIVPSEDSSGERRRRGNITKTGNAHLRRVVVEAAWAYRHRPSVGTKLRKRQAHVSEEVKEISWKAQQRLHQRYKKLLAKGKNKGVVMTAVGRELLGFIWAIGIQVETAQKEPLQRAT

SEQ ID NO: 112314 - protein, 404 aa, unidentified
MWYVGLDWADTHHDVEVLDEAGKRVGVRRFAHSHDGLNELKQFVLNIATDPEQLACIVETNHGLLITFLLEAGIPVYPVNPKTANHLRKVAGAKTDQIDAHLLAKMGRLDLGELRRLAPDSAIVQELKTLTRDQDTLIQTQTRLVNQLTACLKEYYPAALKLFSKLQQRSTLLFLQAYPTPQAVQAASLDEITTTLRTGKHTNPSQVAPSIFAEVHRPQLVASEVIVRAKSRLMLSLVKQLLVVIQEIASYDKAIRPLFLTHKDHELWSSLPRAGLHLAPRRLPEWGDDRTRYANATSVQALAGTAPVPFQSGNYAKAHKRFACVKPLRNALYQFAWQSTRKEAWALAYYQRKRAEGKTHSMAVRALANVWVRIIYRMWVNKTSYQTATFEAARLAHAPRPHAA

SEQ ID NO: 112315 - protein, 365 aa, unidentified
MKKIAYVGIDYHLNSLSLAVVVKGKNEPVDMVRLKNDDKLIRKYMSKLSDRFEIKTCYEASSNGYSFQRKMAAWGYPCEVIAPSLIPRKPGDHRKNDFRDARDLAQNYAHGTLSIVHPPSEEEEAVRSLVRCRFAFKEAAKRVKQQINSFLLAQDQHWNRSKWTSQHRKWLWEMRMPNACLQQVLDEHLAHLDYLEIRLAHLDGQIEQVATSPVYAPSVKKLAAMKGIKTLTAMLLIAEITDFRRFPNPRALMAFLGLIPSEDSSGDKRKDGAITRAGNKRCRSALIESVQHYARSPHMSAQMKSDLSQLDAHSAGVAVKCLKRLHKRFWALTLKGKLRPVAITAIARELVGFIWAMMQPQPAIA

SEQ ID NO: 112316 - protein, 376 aa, unidentified
MGTPSAQTLDDVGVRKMFQELEEVPMTMVGGLDVHRQQITFDYVDDDGLVHWGQIRPATRKTLRGWLAEHCPDGNGEFALEGCTGWRYVSEELAAAGLGVHLGDPAEIAVLRGPKKRAKTDRADAKLLRTLLLEGRFPESWIPPAHVAEIRSLGRLYYTLMDERRAWQQRIHAQLFHQGCPPIKALLSASGRDALARAPLSAAGRQYVDTALRRIDELSAEIEPLRTQLANFARRQQGCQALQRHYGIGWLCAAIIWAEIGDTRRFTSSDQLVRFAGLDITVYSSDSKRSPGHLSRQGSPELRWAAFEAAKCAARRGSPDYAYYHRQAAKHEGHNGKNPTLAVERKILRRCYHTLRDLGDAALALPDTRPQQEVAA

SEQ ID NO: 112317 - protein, 427 aa, unidentified
MDEVNRNRLEEFRQLRQEVRHSEEYLIVGIDIAKDQHHAFFGTATGKTLLRHLVFSNDHEGFRKLLDHAEALRVRHGLKKVVYGMEPTANYHKPLGEYLIILGRTVVLVSGVTVKRNRESLDGRWDKHDAKDSANVADLISQGKCLYYEHPSAELRGLRGLLSLKRRLKKQEHGYRVRIRNHLIAQYFPEMDRDYERLGAAGLSIVRWCLPASQITELDVEPFIQRVTSRRIRMETRRRLEGVWEKAGASIGCEGVPGVDHEAKVMVEGLGQIREMIKETEDKIEELCEQFPEYHSVLTIPGFGPDVSAKVLGAIGDPDRFQNGKQVLKLAGLDLSADRSGKDSDKAIPEISKRGKADLRYALYQAALIASTKNQDFMRYYTRKLEGREREKGIQTKMWVKLSAKMLMIAWTLMKKKEKFDPAYLNA

SEQ ID NO: 112318 - protein, 307 aa, unidentified
MSEKIYFGVDVCKESLAFCGPGVAGQMANNAPGARRLLARLPKGAHLIIEASGGYERELVRVAQQSAVPLSVVNPRQVRDFSRGVGRLAKTDPIDAEMLARFGAEVNPPPDAVPTAAEVALQELVSARQQLVEERTVLLHQQAQHLNSIVRRLDCARLKLLQRQIAQLELAIGSILEEQSALKQKVERLQQVKGVGLITAVTCVALCPELGSLSRGQTAALVGVAPYDDDSGARKGWRHIAGGRSRLRRALYMASISAVRSNPILRRFYQQLRQRNKPPKVALVAVIRKLAILLNQLLRNPSFLPAS

SEQ ID NO: 112319 - protein, 339 aa, unidentified
MWYSGIDQHKQYCVITTYGPDGPRVKQARVASTPLALQGYFAEFPGPHRAVVESTGAWYWLADTLAALGVELVLAHATRLKAIAAAKVKTDQVDSDTLALLLRADLIPVAHKIAPAQRGPRDLMRTRLRLVEKCVSAQNSIDRLLEKFNVAAVAELGECYQLQARCHTAQIELLTQQITTLERALYPHLIPNADVQRLLWIPGLGKVNAFTIYAEIDGITRFPSARQFFSYSRLVPGADNSGGRTRHRSGSKAGNRYLKLAFSHAGIRAVQYYPEIRAFFKAKARRKPIRIARTLVAIELARIVYEVLTKQEDFNGQFKHRPLSRRKHAQWPRRASPPA

SEQ ID NO: 112320 - protein, 345 aa, unidentified
MTRFVGLDVSQKLTAICIVDETGRRLWRGQCATDPGQIERLVRGHTGEDASIGVETGPMTPWLVHELRARELNVICLDARHASAALKMQMNKTDQNDAEGLAQIMRTGWYRPVHVKSLDAHRARALLGARAQLVGMTTRLSNHIRGVLKTFGMLPGAMRGLPFDRRVEELLVDRDDLTPIVGPMLAAWRQLREQIAAFDKAVRALAKADPTCRLLMSVPGIGVLSVLAYVSTIEDPARFARSRSVGAHMGLTPRQYQSGEVDRSGRISKCGDTLARTLLYEAAVVILTRVKRASSLKDWAQVIAKRSGPGKARVALARKLSVILHSIWRSGEPFRRSEQPQPAGA

SEQ ID NO: 112321 - protein, 351 aa, unidentified
MNFYTQRHQYTCGIDLHARTMYLCILDRDGQIVFDHNLPSEPAALLKAIEPFREDLVISAECMFAWYWLADVCLEQDITFVMGHALYMKAIHGGKKKNDKLDAYKIARLTYGLNLPTAYVYPPAMRATRDLMRRRCYFVRQRASLLAHIQITCQQYNLPPFNKRLSYKVNRAGVLDHFDTLDLSVQDMVQADLNIIDHLEEQIKHLESRITHRAKQHNAGNYYRLHSVIGVGRVLALTMLYEIHQIDRFNRVQDFLSYARLIRPSKTSAGKKTSGSSGRKIGNAHLKWAFCEATVLMLRRSEAAKRFVERKTRKYGKAKALGILAAKLGRAVYHMLSQQTRFDEKRFFAQM

SEQ ID NO: 112322 - protein, 343 aa, unidentified
MKYVGIDLHKQTIKTCVVTQQGGQRKVVGRRQFACQDVAHIRAYFKSLGRFEAVVEATSSYEWLFELLDSFAARLVLAHPRKLRVIAESTRKTDKIDSQVLAEFLALDMIPQAHRPSPRVRQHRALVRQRDFVQRRSTALKCKIRHVISRYNADIPSLFTEAGRTYLSERPFLPADRFVVEQMLAGLDHSAEQLSLINRQLREFARSAPLAEREAREVLAQAPCLGAVTIDIVLAELGDVRRFKNQKQVAAYAGLAPRVRASAGRVKQGRITKEGSGLLRWALVQTAWRLVGKTTRWGLAYQKLKRRAGSKRAIVAIARRVLCMLFGLLRRGEKYSLAMEAFA

SEQ ID NO: 112323 - protein, 372 aa, unidentified
MIVIGADTHKQSHTVAAVDATTGRLIDDNTVRARRRSFDDLLVWARGVDAERVWALEDCRHVSGALERFLLRRGEQVVRVAPKLAAGARTTARERGKSDVIDAVSIARAALREGLAALPIAQLAGPELEVRLLVDHRERLVAQRTQLINDLRGHLHDLWPEREIPARGLTTSRWQDRLAGRLARAEQSARVRIARDELRRIRELTRSIDTLQRELTELVGALAPQLLAERGCGVLTAAKLIGEIAGIGRFSSDAKLARLSGSAPIPASSGHTIRHRLDRGGNRQLNCALHRLAITKGRLDPDTAAYLARKQAEGKSRREALRCLKRHLARRIWRLLQPPANPDDPAPSPPPRRPPRTITVHCNTPYNRFALT

SEQ ID NO: 112324 - protein, 391 aa, unidentified
MIFVGIDVAKDKHDCFILNSEGTVLADVFTIANNRIGFETLLSRIQSCSQGESKIKVGLEATGHYSYNLLGFLLDSGLATYVINPLHTNLYRKSLSLRRTKTDRIDARTIAMMLMSDVDLKSYSNTAYHNEELKSLTRYRFDKVKERAKLKSSVARLVNILFPELEKLVSSLHIAVVYALLSNYPGASYIANANTEELAETLCTASKGRYTKSKTAEIQVAVGVSIGSKMPAKSMELKHTIALIRELDKEISEVESAIDKITSQMDSPIFTIPGIGRHMGAMILAEVGDFSNFASADKLLAYAGLSPSTYQSGQLQNCYAHMEKRGSRYLRYALFNAAKYVCLWCPTFSAYLEKKRSEGKHYNVAISHAAKKLVRLIFAMQRSGKAFLADY

SEQ ID NO: 112325 - protein, 360 aa, unidentified
MERNRTFVGLDVHAWSVTGHAMDAVTGQVWQRKLTPDPADILGWISGMSGPVKVTYEAGPTGFGLYRHLVDHGVGCVVAAPSKLHRPSGDRVKTDARDAELLARLLKLDEIVEVTVPSVPQEAARDLVRAREDVRGDLMRARHRVSKLLLRQGIVWTGGQAWTGRHDVWLQSQRFDQPGRQLAFDTAYETMIMTLQRRNRLDQAITEMAADSEYTDLVHRLGCLRGISTLTGFGLAVEIGDWHRFSGASIGAFLGLVPTEHSSGQSRSQGSITKTGNSHARRLLVEAAWHHRKTYRNPGLVMRRRWELAPVAARTRGHQGNHRLHQRWETFTARHKRPVIANVAVARELAGWAWSLAVME

SEQ ID NO: 112326 - protein, 424 aa, unidentified
MEVMHKRVAGLDVHKDTVVACVRVMRGRKVTRECRSFATTTAGLLALLGWLTESGCTHVAMEATGVYWTPVWKILSEGEFELIVANAAHIKNVPGRKTDMNDAMWIADLLACGLIRASFVPEEEIQELRSLMRTRKQLVREQTRHVQRIQKTLEEANIKLDSVISDIMGVSGRRMIEAMIAGVRNPQRLAQLADRGIKASPKELYDALHGRLTEHHRFLLMLHLAQWDGLDASIQQIDQEVDARIERMDDQAEAKGQVPFRSLILLLSSIPGVSILSATTILAEIGRDMSRFPTAGHLVAWAGLCPEQNQSAGKQKSSRLRKGAPWLKTMIVQCAWAAKRKKDSYYLAQFHRLKSRSGPQKAICAVAASILTAIYHMLKNGTPHHDLGADYFDRRSPEAKASRLVSQLSRLGFEVTLQPHAEAA

SEQ ID NO: 112327 - protein, 449 aa, unidentified
MAKKKRKYRKLERSLPVMRPNAGGIDIGATEIFVAVPADRDTESVRSFPTFTQDLHALADWLQQCRVDTVAMESTGVYWIPLFQILEARGIEVHLVNAQHVHHVPGRKSDVLDCQWLQYLHSVGLLRASFRPEHAVCEIRSLMRHRENLVQMACVHVQHMQKSLDQMNLQIHHVISDITGVTGLAIVDAIVAGNTNPKELAKLRDHRIKASIDTVTKSLVGDYRREHIFTLKQSLTAYRHYQKLIADCDQEVQQRVEAFQSNDDGPTAAADSSSATSPTAPSFDLHSHLERIFGVDLTAIPGFDVLRIQTIFSELGADMSPFPTDDTFCSWLNVCPKDGTSAGRRIRAPKVKTKNRVTQAFRMAALSLHNNKSYLGDYYRSQRARHGALKATKNAAHKLARIFYHLVKTRRPYDETVFAKLEARNQKHRLHKLQTLARQMGYSLVQANA

SEQ ID NO: 112328 - protein, 430 aa, unidentified
MTKRISTPADAVLVAIDMSKHRQEVLIERPEGGRRRRMTVMATKADYDRLAAGLEVIGRPIIVGFEATGNYHRTLAHRLLAAGFELRLISSVALARTREALHNGWDKNDSKDAQVILHMLRIGATQRYVDPLAAGINDLQEMSKTHEAISKAKTQTWHRILTHYLPLYFPEVERFAGNSRSDWFLALLERFPTPVSMTALGQEAFTREAWSLVGRKVSKARLINDIYETACASVALPVDEDSVAIAMFRMVIAQARSLIRQRDEIERTAHALLADNRDYQLLRMIPGIGPINALTILAEAGDLRRFAHHRQFLKFCGLDLATCQSGTFRGRPKLSKYGNARLRRTFWMATQVAIRQRDNSFRDKLGRYVAGHGNDPDRRRKAMTALTAKMARVAHAVIKTGAEYRPFVERADTRWKDPSLLCREGAAATL

SEQ ID NO: 112329 - protein, 413 aa, unidentified
MTEETFAWFVGVDWGSEKHQVCILDQQGTIVGERHFPHGGAGLAELGDWLLSVAGTVTAVAVGIEVPHGPVVDSLIDRGFVVHAINPKQLDRLRDRFSVAGAKDDRRDSYVLGDSVRTDRRLFRRLHVADPRLIELRAWSRLAEELTEERVRLGNRVHHELWRYYPQMTKLADDIAASWFLELWTIAPTPAKARQLRKATVGRLLKQHRIRRIDAETVIRTLREPAIKVADGVAEAASVHMRSLIARLHVVNRELREAERQLDKICAEIGATEAASGDGLQRQDVMILRSMPGIGRINLAALLAEGSGPLSRRDYPALRTLCGAAPVTRRSGKSQVVIMRYAAHVRLRNTVYHWARVASQHDPTSKSRYAALRQRGHSHGRALRGVADRLLGLACVLLQRQTPFDPQYGHPAT

SEQ ID NO: 112330 - protein, 339 aa, unidentified
MQVTTIGLDLAKNVFQVHGISDNGEVAFNRALRRAQVLSFFEKLEPCLVGIEACGTSHHWAREISKLGHTIKLIPPVYVKPYVKRGKSDAADAEAICEAVTRPTMRFVEVKTPEQQAILAVHRTRDLIVRQRTQTINMLRAQLAEFGIVRPQGIYHALQFAKDCLNGEQSDLPEVAGDVVFELCDQLLFLHSKILRCSRQMNQIAKLEKRVALLRTIPGVGPITASAIVATVGSGKQFNNGREFAAWLGLTPLNKSSGGKERLGHISKMGDQYIRRLLVLGMTSRIRSIRTKPEKFDPWFADILSRKPGRLAAVAMANKTARIIWAVLTRNEPYKVRTV

SEQ ID NO: 112331 - protein, 465 aa, unidentified
MPENRKKTDQGDSQMEAEGLPVVRANVAGIDLGSKQHWVCAPKPGGPGREVKSFGATTPELERMVAWLKERNVASVAMESTGVYWIAPHEVLERHGLEVVLVDTRQLARVPGRKKSDPVDCQWIQRLHSCGLLMGAFRPVEQVCMLRTLVRDKAVLVAETGDWLRRMQKSLDQMNVRVHRAVSDIDGVTGMAIVRAIVGGERDARQLAKFRDPHCHQSEESMAEQLSGHWRADHLFTLEQTLKMYDAIQERIAAYEQEIMRKLAEMEREECRGKEAPKLNNPNKAKAIKKRGEEPLRQALYRSGGVDLTGIDAIGVETVLLVQSEYGTDLSMFPTEKQFVSHLKLAPHKPTSGGKPVKKQKKKRGSATSRVAAGLRMAALSLRNSKTALGAHYRHIAARKDGDVAVFALARKLATLIYRLLRWGQPYLDEGAAAYEKRYQEGRLKRLTATAKDLGYQLTPKAVTA

SEQ ID NO: 112332 - protein, 415 aa, unidentified
MEGLSPLHRRVAGIDVHRMLHVVTVLIEQPDGSIAKHSREFGGFKRDCRALATWLSELQVELVVMESTGIYWKSVYAHLENAGILAWVVNAHFIKHVPGRKTDMLDSEWLAVLARFGLVRGSFIPPRDLRELRLVSRYRRKLSAMCASQVNRLHKMLDDAGIKLGAVVSDIQGVSARAMVRGLIEGQTEAVLLSHARGALKRKTEELAASLDGDLSARHLFVLRQLSESVEQMQRQLADIDAYLLRAVQPYGWAHQLLQTIPGIDEIAAALILIEIGDDMGRFGSPERLACWAALSPGNNESAGKRKSGRTRHGNNTIRYILCECANAARMTKSTLASKYRSLTVRKSHKKAIVAVAHKMIRLIYVLMSRRQPYLDQAIDYAAMSAKKNAPRWIKQLKAIGKWPASSAPAANAAH

SEQ ID NO: 112333 - protein, 326 aa, unidentified
MNLYLGIDVSKATLDVCLLREGDNEFAQMSNNRQGFNQLHHWLQKRQASSAHVCLEATGIYGLEVAQFLHEKGYHVSVVNPARIKGFAQSQMRRSKTDKLDAAVIAAFCQALQPALWTPPQPAWYELRALVRHLDDLQQTRQQQINRLESATVPAVRDQLQQHIAFIDDQIAQVKNQIKDHLDRFPHLKREVDLLKSIPGIGDLSAWRLLAEIGLLSRFADIRQVVAYVGLDPTRHESGRSVRGGRHISRQGRASLRAALFMPALTAKRHNPLLQAFAQRLEANGKLPKQIIVALMRKLLHLAYGILKSGQPFDPAYSQQFHPVPA

SEQ ID NO: 112334 - protein, 342 aa, unidentified
MYYIGLDVHKKTISYCVKDVSGQVHGEGQIGATRRELDGWMKTLPQPWTVAMEATIFTGWIYDHHLPHAQQVKVAHPLMLRAIAAAKKKNDRIDAGKIADCLRCDFLPECHMASTPIRDRRRTLRYRHLLVRQMVQMKNRISGLLMETGVSYNKQRLHKVRYFRELLSTNEEVNESIRPLLRLSRDSIVRLQKMEYALVSSLQRDPLLGERIRHLRTVPGVGPITALTWALEMGDVSRFPSIREAISYCGLCGDEKSSADKMTRTPLSKQRNKHIQRVLVEAAKLAPRQDHDLALVYETAKLKGNSNRATLAVARKMVAYLLAVDRGQRDFVPAEAHRSAAA

SEQ ID NO: 112335 - protein, 320 aa, unidentified
MYHMAEVSFPSQVLRGCGIDVHLKVVVATIKGEGIRKETRSFDTFTSSLTELKEWLLQNGITHVAMESTGVYWKPVYHVLEDAIPNVWIVNARHIKNVPGHKTDKMDSEWICKLLLAGLLKPSYIPPKEQRQLRDLTRYRNKLIQHLSSEKNRIMRILEDCNIKLSSVVSNTSGSTATKLIDWLCEGKFITLQDIESIYHGKLSATPEELLKACTGFVESHHVYMLQMIRRDIDQTTVLIDELGVKIREVLSKYDNAIELLKEIPGFSDKVVEDLVAEIGFDMSKFPSEKHLASWAGICPGNNESAGKKKAEESPTETSK

SEQ ID NO: 112336 - protein, 351 aa, unidentified
MIIIGVDYHPSDQYIAFVDTETGEYGERQLNHSDRAAEKFYRELAARGVSVRVGMEATGYSRWFERLLAELGIEVWIGDAAEIKTKRVRKQKTDREDARLLLKLLRENNFPRIWVPSAENRDLRQLLWHRHRMVQMRTRIMNQLQALAMNEGQRRKKKLWSEAGRAQLEKLPLAAWASRRRKDLLELLDRMNPSIGELTAAIEREARKWPEVLRLMTHPGVGPITALAFVLIIGDPERFQCGKQIGSYVGLIPCEDSSANKQRLGHITKQGSSLLRFLLGEAALAAARWDADWRRRYAHLALRRQRNIAKVAMARRLAVRMYWMWRNSWEYREWVKFGSHAGQLGIRHGVN

SEQ ID NO: 112337 - protein, 359 aa, unidentified
MVKDSTGFVGLDLGDKNSHVVILDLAGEMIEESRLPTTHTSFERKFSSLPRSRVAMEVGAHSRWVSQLLKELGHEVLVANARKLRAIYSNPRKGDRADAETLARLARLDPALLSPIHHRSPQAQADLAVLRSRDAIVRSRSLLINHARSIVKSCGARLPSCSADSFAHKVASEIPEGLRPALEPILETIACLTQQIRGYDRRIEWLCRERYPETKQLRGISGVGPLTGLAFVLTLEDPGRFRKSREVGPALGLVPRTDQSGERDPQLKITKTGDAFLRRLLVGSAQYMLGPFGPDCDLRRWGLGLAERGGKNAKKRAVVGLARKLAILLHHLWKSGEIYDPLHQSETNVRGHLGAGKAA

SEQ ID NO: 112338 - protein, 355 aa, unidentified
MSKLKYIGLDVHQASISIAVREESGKLVMQSVIATRAGAILEFLDGLRGTLHLTFEEGTYSAWLYDLLVRRVDKVIVCNPRKNALLKAGNKSDRIDAKKLAELLRGGMLSAVYHGENSTRTLQELARSYRTVTVDTTRVMSRLKAIYRSQAIPYGGKKLYTRRHRGGWLKQLKQPGLLRRAERLYEELDLLQQLRRQAKQDLMLESQKHPVCERLRTIPYLGPIRAAVLAARVQTPHRFRSKRQFWAYCGLGLETRSSADYQQIEGELKRSRKKVLIRGLNVDHNHDLKNIFKGAAMSASIFAGPLQEFYQQRLAAGIKPEMAQLTLARKIAAVALTIWKKGESFDPSKLKAQAA

SEQ ID NO: 112339 - protein, 321 aa, unidentified
MTRQREVSPVWVGIDVAKRMIDVARGAAGKLERVERAVGPLQQWARTLPPHARVVLEATGGLERLVTTVLRAQGIVVCVVNPRQVRDFAKATGQLAKTDRLDARVLAHFGAALAPRETVARAIDVDALRALLDRRRQLVEARTAEKNRRHTAPEAVIGSIDEHITWLDEQIEQLDHAIEGAVTTCAAVAEPLRRLQAIPGVGRVVALTLVTHLPELGTLDRKRIAALAGLAPFARESGLQRGRRAIWGGRGDARAMLFLAAQSAARWNAPLRLFYERLVGRGNPKKAALAAVARKLLVAINAMIRDRRPWEPAVVLEPSCC

SEQ ID NO: 112340 - protein, 317 aa, unidentified
MKETPTYYAGIDVAKDRLDVMLRPSGEYVEATNDERGIRSVVRRLRKEDVALAVLEATGGLEQPAAAALALAGVPVAIVNPRQVRDFAKATGKLAKTDRIDAAVLAHFAEAVRPEPRPLADEHARELSAVVLRRRQILAMTTAEANRARTAPKAVRKRIEAHLRWLKKELARVDSELERVVKESLVWKERAALLMSVPGVGPTLSATLLAELPELEHLDRRRLGALVGVAPLNRDSGTLRGIRTVWGGRSGVRTTLYMATLCAVRHNPAIREFYGRLVASGKPKKVALTACMRKLLTILAAILRNWTPWQPRLLPAS

SEQ ID NO: 112341 - protein, 415 aa, unidentified
MERILTCCCGLDIHKRTVVACLLRPGEDGASVRETRTFGTMTDALLALRDWLSAAGCTHVVMESTGVYWKPAYHVIDGLCAVWVVNAAHVKNVPGRKTDAQDAEWLADLLQHGLLRPSVVPDRAQRALRDLTRTRTSLIEQRTAVVNRIQGVLEDANIKLAGVASDIMGVSGRDILAALLEGSADAAAMAELARGKLRRKRAELERALRGRLSDHHRLLVALHLEHADFLDEAIARLNGDIADRLRPYEEEIARLETIPGVGRRTAEILAAEIGLDVSRFPSAGHLASWAGMCPGNNESAGKSRGGKRRPGNMALRRALIEAAKAAARTKKHERTYLRAQYRRLVVRLGKKKAAVAVGHTILRIVYHVLSTKEPYREHILTDLDDRRRARVQHRALDQLQALGFEVTITPKAPAA

SEQ ID NO: 112342 - protein, 343 aa, unidentified
MTLKKSLKWVNPQDISALGLDVAKAKIDICFLSKNQTISYQIANNSQAISCFSKELKIIGLTTNVPFVLESTGNYHLLLAKLLNEDNWNVKEINPIITHQYIKHTVRWTKTDTTDAKLLAKIWLIEGENLKSFDRNLSIINMRMLISYLAHLEKTIQKTKTSFSTVKKWLETLWLSMGYELAKMQDVIKMLEERAEWIKQEILAIPLAEEEQEKIDRLDSIIWITPFTARVSYALFAHNDFKTKWAMLAYVGLDPKLKQSWTKKWVLRVSKRWNPYIRKKLFQAAFCGKQHFPYFQSIYNKNIMDWKHHFEAVLAVSKKIVYIMRALLKNKTQFDHNYHKLTS

SEQ ID NO: 112343 - protein, 343 aa, unidentified
MDYFAGLDVSVKETSVCIVDDAGKIVREARVASEPEALLQVLANNTYRFKCVGLEAGPLSQWLYSVLTEVGLPVICVETRHMRAVLKAQINKTDRNDARGIAQMMRVGLYRPVHVKTLRSQKLRVLLTHRKLLQSKAIAIENDLRATLRNFGLKVGMIGTVKFEARIKELVENVPDLAVLVQPLLIVRQVIREQLGILHRRLLAIVRGDDVCRRLMTIPGVGPVVALTFCVTVDIPARFRNSKAVGAVFGLTPAKYQSGENNRTGAISRCGDEMMRMMLYEAAQSMLVRSAKWSWLKAWAIKIARHRGMKKAIVALARRLAVIMHRMWVDGTEFRWTREVAVA

SEQ ID NO: 112344 - protein, 480 aa, unidentified
MNVKATRTKKQVNVENQAIKLLSKEELGIKIEVIKKELRAYTWRDLETNGKFAKNDKLSFITDDMLIAGCDIGSETHYIRAIDVRGRELSSGAFEFSNTSEGFANAKAWVLALAAKNDKKQIVLGLEPTGHYWFALAAWMVSNGISVVQVNPYAVKQSKEIEDNSQLKDDRKDPKLIANLVKDGNYGMPYLPEKVYADMRRLSMFRDQLTEDRIRNINRLHRELKIYFPEYMDAFGKIDGAFTLEVLKVSAIPTDITALGAEGIKNIWHNEKLRGRGYSRANEIVSYAEKSVGLTDGTDAGREAVKWYAEQILKLDEQLAVIESALHEKCREIPYAENILEIRGVGENILAGILAEMGDISRFDDVKEIQKLSGMGLVACSSGKHKGQTKISHRGRKRLRYWLFQAAKSAVSHADEFKQLHEYYTTRTNNPLKKMQSLVVIACKILRVSYTILKTGTTYDPQKLLKDIKRPTASQAPMAA

SEQ ID NO: 112345 - protein, 426 aa, unidentified
MAAAAVKFPESLKLTAAPFAGVVGIDWADRKHDMCVVLGDGSVGELSVVPHTPKALQQWADELHRRVGGQPVAVCVEQSRCPLINALEQFEFLTMYPVNPHAMSSFRDAFSVSGAKDDRGDAALLARMFLCGQDRLKPLTRETDQTRMLQAMAEGRRKLVDKRTALVNELTALLKSYYPLALEICGANLHSALALDLLEKYPTLEKLRAARPSVLERFFYAHHVRRRESIDQRLTAVRDAKPLTLNAAIIQPAQMHLAALRGQLREITKSIASYDHALAQNLENHPDAFIFKSLPGAGPINAVRLLVAFGTCRVRWPHAQALQNYSGVAPVQRCSGNSKSVQKRRSVPDFVHQTFYEFAGSSIRYCTWARDYYHRQRKQGRSHASTLRKLAFKWIRIIWRMWHNGEAYDEQRYLDARLARIASPAA

SEQ ID NO: 112346 - protein, 424 aa, unidentified
MRFFGLDVHLDFCEVAVAEGGRVSRVGRIASTPEAIREFAAGLNGSDQVVLEASCGAMMIARLLEEGDVGGVVVCNAAETRAISHARVKSDRFDAAMLAKLLSAGMLKAVWVPDEATSALRRRVARRAGLVRARTRVKNEVHAVLARCLLGRPPVSDLFSKKGRAWLAEQQLPEEEAETIASCLRHIDFLGGEITDLDRRIAQQALAFPGFQRLLTIPGVDVGTAAAVIAAVGDITRFPTAGQLVAYLGLDPKVRQSGSEPARYGHISKRGDPQARSMLVEAAWISIRSPGPLKAFGERVRARRGAQIAAVAVARKLVVLCWHLLTKDQDYAFARPSLTRQKTRRLELLAGAPPLVRRHGGPPVSPTSSQRAAERELQQQAELAYRRLIDDWRTTAPKGGAGATPGRASNKPSKGKAARQATSP

SEQ ID NO: 112347 - protein, 340 aa, unidentified
MRALYAGSDLHSNNNFLGIMDEKGKRIFKKRLSNDPREVLDNLTPFQEEMIGIVVESTYNWYWLVDALKGEGYKVHLANPAAIVQYSGLKHAGDQHDAFWLADMLRLGILPEGYIYPKEDRPIRDLLRKRGHLVRLRTSLILSLQNIISRNCGINLNGNQIKRVKENKVAPLLAGQEDLALSGKVSKECIDFLSRQIKQVEKVVQNKVQLKDQYRYLETLCGVGKILSLTIMLETGPVERFIKVGHYTSYCRKVPSKWTSNNKTKGKGNKKNGNKYLAWAFSEAAELARRYDTTARAYYNKKSAKTNFMVAHTALAHKLARAAYFVMRDQVPFDPARVFG

SEQ ID NO: 112348 - protein, 345 aa, unidentified
MEQISRIGMDTSKHFFQVHGVNAAEKVVLRKKLRRKEMVAFFKALAPTVIGIEACGAAHYLARLLGSFGHEVKLIAPQLVKPYVKRGKNDGADAEALCEAMSRPSMRFVPLKTAEQQAALMMVGLRDRLIRNCTQLSNAIRGYAAEFGFSAAKGKAHLVPLLERIQADKSVPVLARELFTAQAEEYARLQAQIDAVDAKLLAWHKADESSRRLVKIPGVGPIGAVLLLLKTPAPELFRSGRQFAAWIGLTPKDHSTAGKVRLGGITRAGDEALRSVLVVGATSVIQHVRRGGRGSPWIVNLLKRKPPKLAAVALANKMARVAWKLMVTGERYAARSVSAALANAT

SEQ ID NO: 112349 - protein, 430 aa, unidentified
MKSNTQNAKIEAITEKTLVLGIDVGSETHYARAFDYRGIEYSKKPFKFSNTEVGFATFKEWILDLKERHEKDKVVPGMEPTGHYWFNLGKFLQDNEMKPVLVNPHHVKKSKELDDNNPTKNDRKDPKVIAGLVREGRYMIPYLPDGVYADLRTASNIRFQLQAELTRIQNRISRWFNIYFPEYKTVYGKPDAKSGMLILKAAPLPEDILTLGIDGVNQIWRDAKLRAVGKARAKILIEAAEHSVGSKEGAVSARMEIRMLLEDYESRNIRLQEVMALIEGLVKQIPMAEKLLEIKGVGIKTVSGFLAEVGDISRFNNPKELQKLAGLALVENSSGKHKGETTISRRGRKRLRYLLFEVAMSLVAKNPEFRELHNYYTTRRLNPLKKMQSLMAIAAKLIRVFYAMLTKGVDYDPKKMVSDIKRPAVYLQAA

SEQ ID NO: 112350 - protein, 344 aa, unidentified
MTHYAALDVSLRSVAICIIDNEGAIRLETSVPSEVEDITAVLDSFDGTIVSVGFEAGVLTQYLTYGLQSTGYEVICMEARQVKAALSAMRNKTDKNDARGIAQVLRSGWYSRVHVKSMRSHEIRALLSSRRAVLSKCTDLEQEVRGLFKVFGIKLPPRLGHGAFDKTVRPIIEANQALTHALVPLLEARMALYKNFRELDNRVRRMALADTVCQRLMTAPGVGFVTSLTFKAAVDDPTRFKRSRTVPAHFGLTPRRFQSGDMDIPGRISRAGDPDVRATLYTAAHALMTRSSKYSSLKVWGMQLAKKRGHRRAVVAVARKLAVILHRMWIDDTSFHWSSEGSTA

SEQ ID NO: 112351 - protein, 398 aa, unidentified
MTNHEAFVGFDVHKETIAVAIAKGGAGGDVCGFGTIKNSKQAVALLARKLARTHGKLSFCYEAGPCGYAIYRQLADLGHDCQVVAPSLIPTKPGDHIKTDHRDAVTLARLLRAGELTAVWVPDQAHEAMRDLVRGRIAVMQSVRKARQQLQGFLLRQDLRYPGKSPWTKLHRDWLRSLTFAYPAHHVLVHELLHVIEEGQRRQQRIEQQIQALLPTWSMAPIVRAIQAMRGVSVIAALTLAAEIGDFRRFDNPRQLMAYLGLVPSEYASGKRVTRGSITKAGSAHARRVLIEGAWAYQQRAGISKLHMQRLTNLPTQIREIAWDAQLRLCARYRRLAAKGKCKNVVTTAIAREMAAFVWANRTRGRTGADRYVKNCCCTAFAANDGGGRLHMSNPCGS

SEQ ID NO: 112352 - protein, 322 aa, unidentified
MAMLSFGGIDVSKDRLDVMVLPEEQCSSVNNDVAGWAELVEQLRGSSIAAIGIEASGGYERGVMRALLAADLPVRQVNPFKLRQFARASGVLAKNDPLDARLIASFVAIMPTRPAQRQAPAAERLTEMLAVRRQLSAEKVAAENASRLLEDAMLRRLSRRRIARLAADIDLLDRHLVAIVGTDAALAHRYRLLTSMPGVGVVLACTLIALLPELGSMNRKQVAALVGVAPYAFESGTLKGRRCIWGGRANVRQVLYMAAMSASNWNPAFKAFHDRLKAAGKLPKVAIVAVMRKMITTLNAMVRDDVIWADRLTGRHSVPTAR

SEQ ID NO: 112353 - protein, 408 aa, unidentified
MRLFVGDDWAQDHHDIEVMDEAGKVLARKRLPEGAGGMAQLHALAGGFLGEDADASEVLVGIETDHGPWVMALAAAGYRVFPVNPQQSARFRARHSVSGAKSDAGDAHGLADMVRTDSHQLREAAGDSPQVAGIKVLARTHKTMIWERTRETQRLRHQLLEYFPAALQAFGDLDAADALELLAKAPDPAQARKLTRAQISAAMKRARRRDIHAKATVVLAALRSEQLAQPPVLAGAYAATARSLIAVIVTLNEQVTVLQREVEEHFGRHPDAEIITSQPGMGMILGARVLAEFGDDPARYRDGKARRNYPATSPITRASGKRKIVAARFVHNDRLAGALNAQAFSALSASPGARACYDQLRARGIGHNDALRRLANRLVGILHGCLKTRTLYDEETAWGHRQQNHPAA

SEQ ID NO: 112354 - protein, 411 aa, unidentified
METTYKIVGIDVHKSMLAVVVADVAAEGEFQFERRKFGTTESELRQLAQWLAERNVREAVMESTALYWRPVWQQLEGQCDLYLAQAQSNRAPRGRKRDFVDAERLLRRHVAGELILSFVPGPEQRMWRTMTRAKHQLTRDRVQIHHQLESLLEDGRIKLSGCVSDLLGLSSRRMLKALAEGERDASRLASLADPTLRATSEQLQDALYAAPTLSALHRQILGLFLTRLELIEHQIEVLDTSVGQALRAHQDAVLRLAEVPGYGVDSAQQVIAEVGPAAATFPSPEQLSSWVGTCPGREESAEVSKNNRSPKGNRMMRRVLNQVAHAAVKTKGSVFQALYRRFVIRLGHNKAIWAIAHRLCRLTWKILHQGVRYIEFGARSNSKAAQTRINRLIRELRSLGYQVQLPQMTTP

SEQ ID NO: 112355 - protein, 349 aa, unidentified
MCVPPEDWPPAAVSAAGREITRSHARQMVAIREAKRVALKAGKPSVQLICEASGGYEQPLLESLAEQEVAVTLVQAVRVRQYARAAGILAKTDRIDARVLAAFGAALRPKATPPLSRQQKRLRELESQRRHLSQVLRAEENRLAQLQCTELRSLGRSLINKIQKQIDAIEECISSLIAQDQTLCTKAQKLTAITGVGARTAALVLAQMPELGQLNRRQAAALAGLAPFNHDSGSLRGRRAIFGGRRALRSGLYMAALAAARYNPILSRFYQRLRAKGKPHQLALTAVMRKLTARPQSHPQAFRAPLENNTVTYDVCAEHCTGGCCQPLLRLGSARALACWRAPLAIAVQ

SEQ ID NO: 112356 - protein, 375 aa, unidentified
MQNKVRFLGLDVHAETIAVAVAEPDGSVRSLGTTANRADSIRKLVKKLGPVEQLKACYEAGPTGYVLFWQLAELGVQCEVIAPTLMPVKAGDRVKTDRRDAERLARSFRSGDLTAVWVPDAGSEALRDLVRAREAAKQDQLRARHRLSKFLLRSGQRPAAGLKAWTQLYMAWVRKLRFEQAAQESTRLDYLHEVEHMAERVVRLEKAIAEAVKLASPEIQEVVKDLQALRGIAQISAVTIAAELGNITRFESARQLMGYSGAVPREDSSGKRTQRGSITKTGNAHLRRIVVESAWSYRLRPGVGPALRKRQEGVPEELKEIAWKAQNRLHKRYSKLTAAGKDQRKIITAVGRELQGFIWAIGSKAEAAARERKAA

SEQ ID NO: 112357 - protein, 370 aa, unidentified
MEIIIYVGMDVHKETYSVCCYDSRTNTYMFEQKIKASTASVLKYLKNVKEQLVEEVVFICGYEAGPTGFGLCRDLLRTDIPCIVMAPTSLKRNSSKKRKNDRVDAQQLAKALYTKDYSQVHLSTKKEEAIKEYCRMRQSLVTELKKAKQVLQAFLLRQGKVFEKDAWTKAHREWLRKLTFEQPYMQDALNEYLTSVNTLEARLKEVEKRLNEIAKDDEVKEKVEKLICFSGIDIVTAVSIVSEVGDFTRFGRAWDFSNFVGLTVGEDSSGQREKKLGITKSGNRYLRRLFTESAKSIKRTNPRGEKSKRLIKRQEGQNPKVIAYADKCRMRLRNKMFRLEMRGKLPNVASTAAARELACFVWGMMTDNIV

SEQ ID NO: 112358 - protein, 388 aa, unidentified
MIYVGIDVAKDKHDCFITNSVGEVLFKSFTIPNNREGFETLFQKIQSVSDDLTKVKVGLEATGHYSYNLLGFLLDKGLPTYVINPLHTNLYRKSLSLRKTKTDKVDAHTIASMIMSDVNLKSYSDTSYHNEELKSLTRYRFDKVKERAKLKTSVSRLVCILFPELEKLVPTLHMASVYALLSEFPSAKHVATAHLTRLTNLLSESSKGRYGKDTAITFRDSARASIGSNMPAKSLELKHTIKLIQELDSEIDEIENEIKIIMDEINSPILSIPGINYRMGAMIIAEIGDFNRFDSPDKILAYAGFSPSTYQSGQLDGAYARTEKRGSRYLRYALYNAAKYVDPTFAAYLAKKQAEGKHYNVALSHAVKKLVRVIYHLEKSKQQYIKAA

SEQ ID NO: 112359 - protein, 317 aa, unidentified
MIYLGIDIAKHKFDAALLTQGKFKTKVFANDPAGISACLKWLATRAASPVHACLEATGAYGEALACALFDAGHTVSVINPARAKAYAQSLGLRQKTDAVDAKVLAQFVQAQQPAAWTPAAPEVRALQALLRRLDALIEMHTQEHNRRGVAEPTVAASIAQHLDYLALQIDSLKAQIESHIDQHPGLKQQQALLESIPGIGAATSAWLLGELNLKRFDSARQAAAFAGLTPRMRDSGSSVRGKPRLSKQGNSLLRKLLYFPAISAMTHNPLVRALCVRLKAKGKHTMAIIAAAMRKLIHIAFGVLKSGKPFDPSFANS

SEQ ID NO: 112360 - protein, 329 aa, unidentified
MYVCVLNQEGAVLVHRNLPTTREAFEKIIDPYRRQVVVCVEWIFSWYWIADVCSELGIAFVLGHALYMKAIHGGKTKNDKIDSQKIAMLLRGGNLPMAHAYPQEHRSTRDLLRRRMYLMRQRAELLAHIQNTNTQYNLPGLEVRIASRSNRTTLAEHFEEPMVRSSIEADIAVLDRLHEVLLNVERTVLAQARGADPVALQLLRSIPGVGKIISLVILYEIEDISRFAKVGNFISYARLVKCSRESAGKSSGARNSKIGNAHLKWAFSEAAVLFLKDHQAAKDWHDKLVSRYGKGKALSIIAQRLGRTVYFMLKRREPFDPRKFFGPDA

SEQ ID NO: 112361 - protein, 346 aa, unidentified
MEHYAGIDVSLECSSVCVVDGNGKIVREGKAASEPAALIGWFSSLGLGLTRIGLEAGPLSQWLHGALKQAGLAVELLETRHVHDAFKAMPVKSDRNDARGIAQLMRLGWFRPVHCKSINAQEVRAVLTARKLVQSKLLDVENSLRGILRGFGLKVGKTTGTDFAGRINELVKGHPNLEVIAEALLRVRSALLSEFKAFEKRACKMSRMDAKARLLMSTPAVGPIISLTYASAIDDPARFTSSKKAGSHFGLTPKKHQSGETDRSGRISKIGDASVREALYQAAHLMLTKPIKGCSQLKSWAMRIAKRAGINKAKVALARKLAVIMHRMLKDGAPFNPLAKTNAATT

SEQ ID NO: 112362 - protein, 398 aa, unidentified
MTKIYLLGLDIAKAGSMAQLDDPDGTRCWRRALSTDQAGWKELTETLRRQGVRFSQLRVLVEATGVYHFAWVERLHAEGAEVYVVNPLLASRLESTANALRSHKTDRVDVDRLCEIGRLYLDSLARFRYRPDPVRQGLKQLSSARATLRAQLTNLKKALGSQLELVFPALLAAAIDPCSERGAAILQRAATAGSWRAVPAKRRRELAGDAADALDRACKQTLADERLALACVPALRALLAAVRALVEQLASCDQQIAPQLPADRIQLLTSIPGVGERTAAVLAVYLPEDCANWGAAKAVTARLQALFGCDPRLRQSGKWNGKVKISKRGIGAARTALFQCAFCSIVHDPENAAYYDQLRQRGKSHKQAIVDLMRKQLRRIVAVLRSNRPFVAQYHAAA

SEQ ID NO: 112363 - protein, 410 aa, unidentified
MEAMIERCAGLDVHQETVVACVLFGPLEKKPKTSIETFSTTTTGLLALSDWLATLQVSDVVMESTGVYWKPIWNILEGSFHLVLANARHVKNVPGRKTDVKDAEWLAKLLRCGLIESNFVPPEDIRDLRDLTRYRKKLIHHRTSEQNRIHKILQDANIKLTSVLSDIFGVSGRRILEAILNGEKIETDGLRKMVDWRTKASITDIANAINGRIRRHHRDMLRYHWEHMGYLEETIEELEKQIDQLLSPYRKEVELLDGIPGVNKAAAATFIAEMGVDMSVFKSAKHLASWAGVSPGNYESAGKKKTSKTTQGNKALKTMAVECVLATSRQNNRIASHRKRITKRQGKMKGRIASAHLLVTIAYNILKTGEPYHELGSNYLEEKQNNKELKMIEYLKKKGYSIAPSKQQTA

SEQ ID NO: 112364 - protein, 387 aa, unidentified
MSKKIVAPAYVAAMARAEADPAAARFWVGLDIGFKSTAVCVVDVDGAVVHQVSMKSHATEIGRYLRRNFKSHVTLIGMETGGLSPHLAGKLREQGFQVAVLDALQVHRVLSVKRNKTDTNDARGIAEITRSGRDYLTEVYVKSNLCFEVRASLIMRDRLVKQRRETEAMIRGLVRVYGGRIEPGSDSPATFRERAIDQLCLIADTEGVDLRPRIIPLLDLCERFYIEAGRIERELDLLAASSPVCKRFMEIPGIGTITALSFYSAIEDPTRFRHVDDVAAYLGLTPRVYQSGESLTHGGISKMGNQLTRTHLVGAATVMLANTKSFSTLKDWGMKLSKRVGFNKAKVALARKLAIVMFSLWRDGTHFMAKAADVGPHRDLMQARATA

SEQ ID NO: 112365 - protein, 338 aa, unidentified
MAIVFVGIDLAKNVFAVHGVDEHGKPVLVRPSVARAKLHELIASLPPCAIGMEACSGAHHWARLFAAHGHTVKLMAPKLVAPYRMSGKRGKNDAADAAAICEAVQRPAMRFVPVKSEEQQSQLMVHRARQGFVVERTATINRIRGLLSEFGIVLPQKAEVVRREAARHLEDLPGYANTVIGDLLTEVHLLDERIKQYDAHIRCIARDSAAAKRLMQLRGIGETTATAIVAMVGNGVEFTNGRQFAAWLGLVPGQYSSGGKARLGRITKAGDPYVRSLLVLGARAVLNAAATQADSVSRWAVKLVERRGYWRAIVAIAAKNARMAWAVLTKGESFRLPA

SEQ ID NO: 112366 - protein, 459 aa, unidentified
MSKLSQLNPSLSQARPFASMSRVNPHAAGVDLGAHEIMVCVPGDQSTQLVRSFGNYTADLQAIAAWLKAHHIETVAMESTGIYWIPLFETLEAEGFRCHLISARSLRRIPGRKSDVLDCQWIQTLHSYGLLESSFRPEADLVALRTLLRHRAQLLEHRAPHVLHMQKALLQMNVQLSQVLSDVTGQTGQTIIRAIVAGERDPHKLAALRNYRCHKDEDEIAKALTGTWREEHLFVLKQSLEMFDFYTRQIEACDAEIERVYHTIRPKGDGSDDDDPPHIPEHKRKSHSKNAPKGGAIRQHLKRICGVDVTAIHGLGEVLAQEIVMETGTDMSKFPNEKHFCSWLGLAPKNEISGGKVLRSATLKTRNRAGQAFRKAAAAVMRSDCVFGVFYRRMKARIGPARAALATAHLIARVYYRMLKDKVEYQPLSVEEYETRYRQQQVRYLQKKAARLGFQLTPA

SEQ ID NO: 112367 - protein, 347 aa, unidentified
MQFYTKQHKSYCGIDLHARSMDVCVLNQDGDIVMHRNMKARPDTFLRTVAPYRDDLVVAVECVFTWYWLADLCAQEGIPFVLGHALYMKAIHGGKAKNDKIDAHKIAVLLRGGMLPQAYVYPAEMRATRDLLRRRMYLSRKRAELLAHIQNTNSQYNLPEIGKKLAYKANRDGVAERFPDPAVQKSMEVDLALIGYYDHLLSDVELHIVKAAKQHDVQTLYLLQTVPGIGKILSLVLLYEIHDIQRCPRVQDFVSYCRLVKCAKESAGKRYGTSGSKIGNAYLKWAFSEAAVLFLRDNPAGQQYLARLEKKYGTGKALTVLAQKLGRAVYYMLRRNTGFDMDNFLHG

SEQ ID NO: 112368 - protein, 390 aa, unidentified
MDVLYQSCAGIDVHQATVVVCILHGPLTSTRPKREMAQFDTTTKGLKACHDFLSQFHVEAVGMESTGVYWRPVWHELCDDFELILAQPAHMKAIPGQKTDKKDAHWIAQLTRIGLLPRSFVPDETIQELRELTRQRKHYVESRNRETNRIHKILQSGGIKLTTYIEDIMGASGRNLLQLLIDETPVTPRMIHQSVYTSLKRKVPQLLEALDGYFSAHHRFMLGQSLEIYDFYQKQIDCLEERMNGYLNLYERPVEILDSIPGIDLITASVIIAEIGVDMSQFPTAGHLASWAGLCPGNNESAGKKRSTKFRHGNSYLKRCLCQAVFAAKRQKGSPLAERYYQIQSRRGPQKATIALAHQLLKIAYILLKENLTYQEFVLQKKATRDEPVA

SEQ ID NO: 112369 - protein, 411 aa, unidentified
MRRVVGIDVHRTFGEVVFWADGRLRHAGRIDMTRTALEGFGKTLLANDEVVVEATANSMAVSRVLAPFVARVIIANPLQVKAIAQAHVKTDKIDAGTLASLQAAGYLPQIWTPDAETERKRRLVARRYQVVRHRTRLKNEVHSILHAHLIPKCPHADLFNARGRAWLAAQQLPDDERAAIDRHVRELDRLAEDLALLDREIAQDAIDDSAVNRLMTITGVNLAVAAGIVAAIGDVSRFSSPQKLVSYFGLNPRVRQSGLVAAHHGRISKIGRSHARAMLVEAAWAAAKAPGPLHAFFVRIRARRGHQIAAVAVARKLTVLCWHLLTKGEDYLWARPALVANKTRAMQLQAGHPQQKGNRRGPAYAYNIKALRDREMVIAAQAERNYEQFVSQWKPRRPKTGARAPQLGRTK

SEQ ID NO: 112370 - protein, 379 aa, unidentified
MAETTRQPECNAGRTLYVAFELSGKTWRLAVTTDRGERPRHSSVASGDLGAVQERLARARTFWGLPAATTVVSCYEAGREGFWLHRALTAHGIRNVVVDATSIERDRRAKAVKTDRVDAERLLELLVAWTEGRKRLRTVRVPSEADEDARHADRELATLKGVRTALVNRITGLLGAQGIPLRLTPARRVDVAALRDWAGAPVGPGLAGRLTRELEELGAIRARIAGLEQARQAAIATAATPAAAQMARLVQLRGIGANGASRVVVEFFAWRGFRNGREVGALAGLTPTPYQSGAVAREQGISKAGNARVRTMVIELAWCWLRFQPTSALAQWYQARFGQGGRRQRRIGIVALARKLLIALWRYLDAGVIPDGAIVTAAV

SEQ ID NO: 112371 - protein, 346 aa, unidentified
MNSVGIDLHRNRSQIAVIDRNGELSLSRRIVNDRATFLELLADLEGESRIAVEATYGWEWLAELLEDAGYEIHLAHPLRTRAIAAARVKTDAVDAKTLAHLLRADLLPEAYVAPRELRDLRELLRHRIALTGMRSALKNRVHAILAKHGITRQHSDLFGPGGRRFLADLQLREAPRRRLDSLLALIDDFDREIDATTAEIEQRAKADDRVDVLTQIRGVGRYTAMLIIAEVGEIGRFPDARHLCAWAGLTPTVRSSDGKARLGRISRQGSPALRWALVEAAQKSTTGGGPLRESFERIAKRRGRKIAKVAVARQILTLSYYGLRDGEIRCLARRSRASAKEKLAAA

SEQ ID NO: 112372 - protein, 343 aa, unidentified
MTLVGCDLHARQQQVAALDTATGEIQEHQLTHHGEAVERYYAALPPPVTVAVESTGYALWFHTLIRQLGHTLVVGDATKIRAMVVRKTKTDRRDAPHLLELLRHDRLPTIWVPDPATRDRRALLGHRMRLVRVRTTMKNALHAIALSHRLVDGSKRLTQSRLAPLQDLPLGPYAARRRDESLELLKWLDERIRQLDNQVAEAAAVDPAGRLLLTHPGVGGVTALTTVVVLGPVGRFPGTKEVASYVGLAPALHTSADKHHLGQITKQGNPMLRLVLVQAAGVAIRYDEALHRLYTTLLRRRGHAKAKVAVARKLLIRLFIMLRDGIDYDEFCRRGRARQPAPV

SEQ ID NO: 112373 - protein, 418 aa, unidentified
MKVVYPICCGVDVHKTFFVATIITTKVITPHYSKKRFSTFNNSILQFKQWLIGNNCFDMCMESTGKYYVPVLNLLEDVIRVTIANPKWVRAVKGNKDDVKDSKWIGDLFRLGLVPGSYIPDKPIRILREYTRYRSKLVSCKSSEKNRFQNAFTVCNVALDAVVSDMFGKSATSITDYLISCDTFDPNYCSSLLQKSLKKKTDIVIESIEGYQMTKEQKERMVMVRSHLEFIHQSIATLDEKLDKMVAPYENAITLLCTIPGVDRTSAITIISEIGTDMTQFASSKRLCCWAGLTPGNNESAGKKKSVRITRAGVYLKPALVQVAHAAVQSNKSSYYKTKYECISKRRGKKRAIIAIARMILTAIYHMFVTGEVFNPSDLYKIDMPQEMQEKQKEKAVKQAIKLLTSLGIMQVPDISVA

SEQ ID NO: 112374 - protein, 352 aa, unidentified
MWYAGIDWATDHPDAVVIDEKGHQVGSLRIDHSPQGMSRLHTVLEQIIGSQSKEQMACIIETTHGLLIAHLLEAGWPVYPVNPRTVDRRRSASGAKTDTTLAYLLAKTGRADLADLHRLRPDSQKVSELKELTRDQDGLIRMQTRLVNQLTACLKAYYPVVLELFTKLPQKSTLVFLQTYPTPHEAMAASVEQLQEGLRRAKHPHARLVAAQIFERLHQPHLQADAVTTRTKARLMLVLVSQLLPLIEQIAQYDKEIDALFLTHEDHEIFESLPRAGRHLAPRLLAEIGDDRSRYQNASSLQALGGTSPVLFQSGMYSKAHRRLGCIKPLRNALHQFAWQTTQSEPWARQYL

SEQ ID NO: 112375 - protein, 411 aa, unidentified
MSYKIAGIDVHKKVLMVVVIDATTPEEKPERRRFATLPSDLQRFLIWLREQGVEEAVMESTAQYWRSVWLELEPHMRLHLAQAFSNRAPRGRKHDFKDAERLVRRLIANELILSFVPGGEQRTWRNMTRMKLQLTRDRVRLQNQMECLLEEMRIKLSIVVSNLLGASGIRMLRALAKGETDPKQLAQLGDERLQCTEEQLVDALTGRAQPLHREMLALQLERLQLIDTQIAKLNGMIAQAMKPHQEAVMRLAEVPGLGVDSAQQIIAEVGEQASTFPSAAELTSWVGTCPGKDESAEQNHSSRSAKGNKYLRRVLNQAAHAAVKRKGSYFQVVFRRLLPRLGYQSAIWAVAHRLCRVVWKILHEGVRFIEHGIEPDPKAKMRHARRLAQALRKLGYQVTITPTNLASGMQM

SEQ ID NO: 112376 - protein, 295 aa, unidentified
MAVLGEGCVWQVDNSSEGIASLVQQLQEFHPELIVVEATGGYQRGVAEGLFAAGLAVAVVNPARVRQFARACGLLAKTDKLDAQVLAVFGQKVQPRQYEGKSEVGKQLSALLVRRRQLEEMLKAEQNRLRTISQSVRGSVERIIACLKDEKKLLDAQIQQFVAEQESWQEPTNILGSAPGVGMVTTATLLAELPELGKMDRKKIAALVGVAPMNFDSGKKRGYRKTKGGRTNVRSVLYMSTLVATRYNPLIRAQYQQLLKRGKLKKVALTACMRKFLTILNAMLRDKQPFRSATA

SEQ ID NO: 112377 - protein, 468 aa, unidentified
MKEAKANRRVPGRKKKGLCQQDRPLIEPNAAGVDVGAREMYVAISPDRDAEPVRVFLTFTADLEALVQWLLERGITTVAMESTGVYWIPLYQMLEDRGIRVCLVNARHMKNVPGRRTDWHECQWLQYLHATGLLRAAFRPEQDVCAVRTLLRHRNDLIKIAAQHVQHMQKALTQMNLQIHHIISDITGLTGLAIIDAILAGERDPGKLADLRHPSIHADEGTIRKSLQGDWREEHLFTLKQSRQMYTQYRSSIAACDEKIVELVGAFEPKVDIEVKPLPPHVGPSRKRRTKRTGDFRFDPRTEAYKLFGVDITRIPGLNELAIPIFSEVGRNLAARFPSADHFASWLGLCPDNDKSGGQVLWTGVRRVNNRTAQMFRIGASSLHHNRSHLGDFLRRMKAKLGPAAGITATAHKLAIIFYTVVTKQVEYDDSIWSARDAQRQKRFEQKLKRQARQLGYELVLVQAARVP

SEQ ID NO: 112378 - protein, 323 aa, unidentified
MEEGRIQSTVAALEKHFGGEPRMRIALEAGTHSPWMSRWLNSYGHEVIVANPRKIPTLTGSESKNDRNDAEQLARMAAFDPKLLHPIEHRSLERQQDLNLIHTRSVLVRARTMLVNSARGLVKSAGGRLPSCSSEVFPEKVSVAVPGELKAACEPLLKQIAQMNRTLAAMDKQIEGLAKKYPEIALLRTAPGVGPVVAACYVLTLGNPETMETNRQAGAYLGLRPGQQQSGDCDPQCGITKTGNSYLRSLLVQSAQYILGRFGPDSALRCWGLKLAACGGKRGKKRAIVAVARKLAVLLLSMWRNGKKFEPFPQSATQLAKAV

SEQ ID NO: 112379 - protein, 350 aa, unidentified
MEIFTGKPEGVMKLTPVGIDIAKNVFQVHHIDEETGEIVNKPIKRAKFLEYFVNRAPCLIGMEACGGAHHWARQLTRMGHQVKLMPGEYVKAFNIRNKKDPADARAIWLAVQQPSKPVAIKTEMQQAMLALHRTREQLVKFRTMQINALRGLLTEYGEVMAKGRAPLDRAMPDVLARVADRLPAALIDTLREQWNGLTGLDEQIATIERRMREWKKEDQEVKAISEIPGVGLLTATAAVATIGDAKAFRSGREFAACIGLVPKQTGSGGKVKLHGISKRGDTYLRTLLIHGARSVITNAKQPDPWIEQMKKRRPLNVVVVALANKMARTIWAVLAHDRSYQRGYVSTKPA

SEQ ID NO: 112380 - protein, 403 aa, unidentified
MNSVGIDISKGRSTIAVMRPFGEVVISPFEVRHTDSELSELARQLKSLNGETRVVMEATGNYHTPVAKLLHDAGLYVSVVNAKLVHDYGNNELRRVKTDRKDAVKLANYGLDRWLTLPRYIPEEDTRLLLKNCYRQYRQYSKVQTVLKNNLISLLDTVFPNANRLFSSPIRGDGSEKWVDFVAEFWHCRCVSEKSERAFTSKYLRWCRKHGYNFSEAKAHTIYAEASGHIGVMPKSETTKLLVEQAVAQLRATSTALAALKHEMQTLASQLPEYPVVMDLFGVGPTLGPQLIAEIGDVRRFYSKKALVAYAGLDAPPNDSGDVTGRHKSMSKIGASSLRRTLFLVMSVYLQNAPLDEPVYQFMDKKRAEGKPYRVYMMASANKFLRIYYATVKAYLESLEHTA

SEQ ID NO: 112381 - protein, 435 aa, unidentified
MSNSIKYDLFISVGIDVGADFSFMSIALPNQTFVGKPFKIIHSDFNSLSMAVSKIKEAEEMYSLESRIFLESTGIYHYPLFCYLSDKGFLVSIINPIISKNSTNINIRKVHNDKFDSKKLALIGLKPDLKVSIMPSVLALDLRNLSREYYDLVDNRSAYINKLQGELRIAFPQYLKIFSKVTVNTSLTLLEKFTSPDGFLEASKDQIIASIRSTSRFSIAYAEKKYKAIIQAAKAAKTFSYSVNSNFKRILLYIRFIRQYNDEIEAILSDMRELVESNEDTDFVKQIRLIESIKGAGFLSAVTLMCEIGDFSAFKSPKQLFAYFGLDPAVKQSGNFKGTDVNISKRGSRIARRVIHTIALVSIALNRNGTANNPVLREYYLKKCQSKPKMVALGAIMHKVCNIVFAILRDEKEFKIITPEEHQANYLKAKYGIAA

SEQ ID NO: 112382 - protein, 358 aa, unidentified
MKAIKQTIGVDVAQDELVCSFGNLFEDLSWQIKARKTFGNHSSGFKACLKWAESMRDSGSEVLFVMEATGVYHEKFAHWLVDQGQKLSIVLPAKISNYMRTLSTKTVTDSTCADAITQFGLERKLDHWAPPKPIFRTLRQLTRERDQIVAERVVIDNQIHAEKTEAFPNTNSLKRLNARRKLLCTQEQEIKNEIHQLVKPDQELDQDIKRITSIPGVGELTAVIVLAETNGFELVRNKRQLTSYAGLDVREKQSGTSVKGKPKISKKGNRSLRKAMHLPALAAIRHCDIYKGTFARLVGRHGVKMKAAVAVQRKLLELIYILFKNKTTFDPAYEEKREDGKNHGSLYSLADADLRNEN

SEQ ID NO: 112383 - protein, 397 aa, unidentified
MAAAVHVVGGVDPHADTIHVAVLTAVGKSVGDAEFTTTTGGYARAVAFLTSWGIVDVVGVEGAAGYGAGITRALAGSGMTVVEVDRPTRSARRRAGKSDRLDAYHAARAVIAERTSPVKDPAIDGLRALHLARNSAVKARTAAINQAKAILVMAPEAVRVRFRGLTTTKLMAALLRVRGCCADPGVADTLAALRILAQRHRDLSGQIAALTARIDPLATTANPALRAAFGVGADTAAQILITAGHNPDRLTSEPSFAALCGVAPVPASSGKTRRYRLSRGGDRGANHALHRIALVRMSHHQPTIDYVRRQIDRGRSKKEILRMLKRAISREIYRHLTNPAPVPTWTDLRPTRHAHNLTLTAAAQHFGVWPSVISRIERGLQRNDELAEQYRTWLAAA

SEQ ID NO: 112384 - protein, 345 aa, unidentified
MEITTVGLDIAKRVFQLHGIDAAGKAVLRRKLQRSEVLAFFKALPPCLVGIEACGTAHYWAREIRELGHEVRLMPPSYVAPYVKRGKTDAADAAAICEAVTRPTMRFVPIKTAEQQAVLMLHRTRDLLVRQRTMLVNALRGHMAELGVIAPQGIARVADLIAVLLGEDTAKVPALAREALRGLAAELEALDRRVKEIEVAIVRWHKDNEASRRLATIPGVGPITASAIVATITDPFQFHSARHLAAWIGLVPRQHSSGGKQRQGGISKQGDRYLRRLLVLGATAVIRHSRSKSTAEAGWLKSLLERRPARLVSVAQANKTARIVWALLVHGEAYRMPAAVPSGVA

SEQ ID NO: 112385 - protein, 328 aa, unidentified
MQGKVSSERTAMATVYVGIDVCKEWLDIHLHPLGRSFRVTNDTAGLRRLKRELDALDQMPRSALHIVMEATGKWHRAVQRSLHADGFYVSVVDPLRARLFAKACGFLAKTDRLDARLLAIMGEALKPAQTPPQDQALEALQELVNARSAANGERTALSNRMKTAVTAFLRKELTRRLAALDTHIARLDAEIERSIGAEPEMRRRLDILISIPGIGAVTAASLIAGLCELGACSGKQAAMLAGLAPLACESGERAGHRAIRGGRPAPRNAIYMAALSASRHNPDLAHFAERLKKAGSPNKVVLVAVMRKLIVLANTLITKNRIWTPNPP

SEQ ID NO: 112386 - protein, 445 aa, unidentified
MNTTTITNNPSEQPSPEALQPVAWIGLDWGDKEHAFLLRDGSGHEERDKLQHSAENLHAWLRRIGERYGGRPVALAIETSRGAVIHALLQYHWLIIYPINPVTSARYRTAFRPSGAKDDLPDADVLFDLVRVHAHKLRVLEPQDPETVQLTGLVEARRRIVDQRTAVLNELTALLKNYYPQALQLFSDLNSDLAVGFLRRWPDLISLKAAKAGTIKRFYYQHQVRSSQLIQERLALIAHAVALTTDEARVGVARLQLEHLLDQVEVFRKHVAIFDHQIKQTFALHSNVALFRDLPGAGPQLGPRLCAAFGTITSLYPDPASLQKYAGLAPVLEKSGNQIWTHWRWYAPRFLRQTFVEWAGQTVRYSQWAKVYYGRMLKKGKKHTVILRSLAFKWIRVLWKCWQDRKPYNEAQYLKQLIHRKSPNALTADLKTAAVLTRSPKQNAL

SEQ ID NO: 112387 - protein, 350 aa, unidentified
MLIVGCDYHPGFQQIAFVDMETGELQERRLAHPEEAEKFYRELAASGVKVRVGMEASGHARWFERLLAELQFELWMGDAATIRAKRVRKQRTDRHDAQHMLNLLLEGRFPRIWVASWENRDLRQLLWHRHRMVTMRTRIMNQLQAVAINEGLRCKKRLWRERGRKQLEAFPLARWASRRRRDLLELLDRLNPTITELTQAIEQEVEKYPEAQRLMTHPGVGALTALAFVLIIGEVERFRCGKQVASYVGLVPTEESSGDRRRLGHISKQGSSLLRFFMVEAAQATVRSDPEWRSKFFHLAMRRGRKIAKVAMARRLAVRLYWMWRQQWDYEQWKAFGPHAGQPETGIGVQ

SEQ ID NO: 112388 - protein, 343 aa, unidentified
MEHFAGIDVSLEMSSVCVVDASGRIVREAKVASEPEALVAWFRGLGIDVTRVGLEAGPLSQWLFAAMREAGLAAELLETRHVRNAFKAMPVKTDRKDARGIAQLMRLGWFRPVHCKSAPAQETRALLTARKLLQTKHIDVEMSLRGVLRGFGLKVGPTTARSFAARIRELVAGHPALTAVAEALLAAREVLGTQLRGLEKCLRDRAREDERARLLMTTPGVGVIVALTYVAAMDDPSRFRSSKAVGAHFGLTPKKYQSGETDVTGRISKVGDAGVRTALYEAANVILTRPVKGSALKSWAARIANRAGLRKAKVALARKLAVVLHRMLVDGTPFVAERAAAAA

SEQ ID NO: 112389 - protein, 405 aa, unidentified
MNAVGIDASKGKSMVTILRPFGEIVSSPHEVKHTSDQIDNLIREIRSLEGESRIVMEYTGRYHEPMARWLSDAGLFVSLVNPKLIKDFDNDSLRKVKTDKADSVKIARYTLDKWHKLKQYGAMDELRNQLKTMNRQFGYCTKLKTAMKNNLISLLDQTFPGANTFFDSPARSDGSQKWVDFVDTYWHVDRIRSMSLVAFTEHYQKWCKRKGYNFQPDKPAEIYESVRNIIPVLPKDEVTKFIVRQAVNQVNTTSAAVEELRTRMNDIASQLPEYPVVLAMKGVGTSLGPQLMAEIGDVTRFTHKGALTAFAGVDPGKNDSGSYSQKSVRTSKRGSAPLRKTLFQVMDSLIKAMPQDDPVYEFMNKKRSQGKPYYVYMTAGANKFLRVYYGRVKEYLSEHTETAVK

SEQ ID NO: 112390 - protein, 427 aa, unidentified
MNDSRYKPTLCVGADVHLDEIVLRAVDKALGHEVLHQFRVTNNLPGAQLAASTIAQTATDLGYARIEIGWESTGMLWIPFHRYLSTEPLLQPFELDLVCFNPKLVAKFKDGLVLRSPKNDDRDAFDIAARLRFGELPVSYVPSDFWQGLRRLTRYRYRLSKALSQEKNRFQSYAFLKCSDWNRVQAFSDFLGATSVALLTEFTVAEVQDMTHDQLVDLISRRGRGRFDDPTATARAVRQALRTSYPIDPQMDEMVTAALAASWDHIHYLNRSMKRLDHLIARYIDLVPNPLITIKGLGAVITAGILAEIIDVLRFPEEKHLAQFMGLTWQKSSSGGFVSQNTRLTKVGNVYLRYYFIMGANLLRQHNLEYKAYYWRKYQEVSKYQHKRALVLTARKLVRLVHALLTKNEPYVRPRMTDPGQEDVGLQ

SEQ ID NO: 112391 - protein, 329 aa, unidentified
MVFVGIDVGKQELVVALCDAKGDSLGKAFPVPNSTAGFAKLQRALKSRGNEEIHLCMESTGIYGEQAAAALYGSAGVTVSIVNPARINAYARAQLKRTKTDRVDALLIAQYAASQHPAAWVPEATAVHELRELVRHRDALVNDLTRINNRLEKCQHSAAPAAAVVKSLKQMARQTEKQIAVMDAACRTVVKQDAAMKGDQERLASVPGIGEVSALKLMAELGSIAGRSVKQVVAHSGLSPRERTSGISVRGKSRISKIGNHRLRTALYFPAMVACRFNPVIKAFYEKLVAAGKPKKVALIAVMRKLLHIAYGILKNKTVYNPKLHMKMA

SEQ ID NO: 112392 - protein, 357 aa, unidentified
MKIVGCDFHPAWQQVAVFDPETGELTERKLMHGDGEAERFYRELESPALVGIEACGNSQWFIELAEGLGHVVWLGDAAQIRASYVRRQKTDRRDAGHILKLLMENRFPRLWTPTAEQRDMRQLLIHRHKLVEIRTRVKNGLQHLALNKGLQKKNALWGVRGRAELEQLPLAGWTARRREDLFGLLKELNRTLDELDEAVERAAQDHAQARLPMTQPGVGPITSLAFVLTIGDVSRFKHSKQISSYLGLIPREHSSGGKQRLGSISKQGNSFMRQLLVEAAQTANRLDEGFRRQYTARCHHKPKGVAKVATARKLAVRLYWMLRQNVGYPEIARIESSPRVALVSESYTEMLNGRSRT

SEQ ID NO: 112393 - protein, 418 aa, unidentified
MWRKCPLGQFGDRWNEEADYSRDSVSFPVTHSIRCRKETGPVKKNSITARQVTAVAVERKGKASELRLTVGLDLGDRRSRYCVLDQNGVVRKEDSVPTTKEGLKRIPGAAAASRIIIEVGGQSPWISRYLQERGFEVIVANARKVAMISKSTRKNDKMDAQTLARLGRIDPQLLSPIRHRGEQAQRDLALIRIRAEMVEQRTAMINCARGTAKAMGERLRACASDNFGVDMLAGGKISEALQQILKPLLTMIDHLSRQIAAYDQQIEAMAKQYPQVELLTQLYGVGNLIGLTYLLTIEDPGRFRVSRDIGPYLGLVPKQRDSGNSQPQMHITKEGDRYVRKLLVQAAQCMVKKGAPETDLQRWAVGHFRPGDKKGKKKAVVGLARRIAVLLHKLWANGEVYDPNYQREQQRQARGKAA

SEQ ID NO: 112394 - protein, 478 aa, unidentified
MKKHKKTKPKSEASKPLHEPEPDAAGIDLGATEIWVAVAPDRCEMPIRRFGAFTEDLMAIVQWLLACGIRTVAMEATSVYWIPLYQLLADAGIAICLVNARHVKNVPGRKSDVRDCQWLQYLHSVGLLRASFRPEQDICQVRSIYRFRQNLLTQGTQHLKHMQDALDQMNIKIHHVIDDLSGVTGMAIIEAILNGERDPLRLAQYRDRRIKATEETIVKSLEGDWRSEHLFVLKLAWENGRQVQEQIKKCDYQLMEYTRQLEASTIVAKPIVPVKIVSLNVKPGVTELQLAPAAAVRPAKPRKKTSKNEPDGPWHQELHRFFGVDLTLIPSISVLTGITLMTELGNDLSAFKTAQHFSSWLCLCPDNETSAGKVLHRRTRRSQNRVRQALRMAASSLHHDKSYLGDKYRRLRTKLGAPKAITAMAHQLARIIWYLITHQVAFDMSIFATLEQAHQKRRLNGLNSAARQLGYQLTPIAA

SEQ ID NO: 112395 - protein, 359 aa, unidentified
MNKYIGFDIDDKKTVACVLERGKNEVYETIGSDIESMRRFLKKQKQAGCRVELAFEISGQAGFIYDSLIDCVDQIKVVNPTKMTWIYRTSKKNDRLDARKMAVLLSIGELPAVHMPSREIRQWRQMILHRRKIVNGRTKVKNRIRALLKSEGFRRPLYAGSWWKKINRLWMQRLCQERVRQANLWTVQLGNLLDELEMLEGQLVRVTKYLDKYLERQPGGRLLMSIKGVGPRTSEAVLAYTDDVSRFAGSKAFCSYFGMTPRLDETGSCRRLGHISKEGPSVVRWVLIESSWKVIRYSRQLRCFYERVRAGQDNRKKIAIVAVGRKLLSIMRAMMVNGELFNEGLVCRQCRTDRLKRSA

SEQ ID NO: 112396 - protein, 412 aa, unidentified
MTVTNQFAAHVGLDWADKKHDVCVQFKNGERVFYVIEHTAEALDVWLTDLHQKVKGRIAIALELKKGPVVYALQKYPFITVFPVHALSLARYRQAFSPSGAKDDPQDAELALELMLRYPQKIKAIEPDNAEIRLLQQLVEQRRQLVEDKRRFVNRMINTLKQYYPQPLEWFSHRGSLLLCELIIRWPSLQQLKRARRDTIRNFMNAKGGRAMALTEQRVVSIDNAIPLTTDPSVIEANALMATALATQIKVVSEIIKTYDERIGTLFDTLPDAGLFKSLPGMGPCMGPRMLAALGDNRDRFNSAEEIQNYAGIAPVTERSGQKSWVHWRWQCARFVRQTFVEWAAKTVNSSYWARLYYQGQREKGKSHQSAIRALAFKWIRIIYRCWKTKTRYEEAKYLLALESRHSPLLNP

SEQ ID NO: 112397 - protein, 377 aa, unidentified
MSNVRFIGLDVHAETIAAAVAEPSGEVRALGVIPNRPESVRRLLKKLGAGTSLRVCYEAGPTGYVLYWQLTALGVPCEVVAPTLVPVKAGDRVKTDRRDAMKLARSYRAGDLTAVWVPDASHEALRDLVRAREAAKKDQLRARHRLSKFLLRHGRRPPIAMTAWTQAYLAWVTSAVHFDQRAQEATLLDYLHEVDHVGARIARLERAIDEAIQTAPARMRAVIEALQALRGIALVTAVTIVAEVGALSRFVKPRQLMGYSGAVASEDSSGERTRRGAITKTGNAHLRRVVIEAAWAYRHRPAVGPALRKRQAPVSANVKAMAWKAQHRLYGRYRALTARGKCKQHVVTAIGRELLGFIWAIGVHVESETARVTPIAA

SEQ ID NO: 112398 - protein, 343 aa, unidentified
MSTRQLYGAIDLHSTNNVTVVIDEEDKIVYQKRLPNDLALILKELSIYQSELQGIVVESTYNWYWLVDGLMEQGYKVHLANTAAIQQYEGLKYTDDHSDARWLAHLLRLGVLPEGHIYPRAERPVRDLLRKRSQMVRQRTTNLLSIQNLLTRNTGSSMKASRVKGLDVQQVDELLPNEDLALAVKANLAVLSSADEQVELLEQTVTQRVKLRPQFSFLKTVPGIGEILALTIMLETGDIRRFLSVGNYASYCRCVGSQKISNGKKKGQGNTKNGNKYLAWAFVEAAHFAIQYNSRIKSFDQRKKAKSKAVVAIKAVAHKLCRACYYIMRDQVPFNITKAFGQK

SEQ ID NO: 112399 - protein, 342 aa, unidentified
MNQYAGIDVSLECSSVCVVDASGKILREAKVASEPEALIAWFHSLGFSLERIGLEAGPLSQWLFAAMKAGGFAVELLETRHVRKAFEAMPVKSDRNDARGIAPLMRLGWFRPVHCKSLSAQDTRAILTARKLVQSKLHDVENSLRGILRGFGLKVGKTTGREFAGRIEELVAGHSHLQLIAKALLAVREVLRKEFAAFEKQVHKLARSDARTRLLMSTPAVGPIVALTYASAIDDPTRFKSSKQAGAHYGLTPKKHQSGETDYTGRISKIGDGSVRTALYEAAHVMLTKPLKGCSKLKSWAMRIAKRAGMSKAKVALARRLAVIMHRMLADGTPFNAAAAAA

SEQ ID NO: 112400 - protein, 398 aa, unidentified
MIYVGVDIGKDRHAAAAVSEAGESAMPPFYFTQDAGGFAALFGALEKLGGPGAVAVGMEATGHYWKVLRHALAKRGYRADVINPLITSRDASADVRGRKSDKLDAIAIANVMRKGGYSPAPAAGAADALKTLARYRRALVARRSDAKNRLAAALDVAFPEAAKTLGGLSGAAAMAAVRAFPSARLAAKADIRTVTSVFKKASGGRLGREDAKKFREAARHSLSLGMDTEGEEFVIPQTVDEIRALDSQIDRVERRMQEEPRPELAARLMSIKGAGKIQPLAIAAEIGDPARFAGADMAGKVLAYAGCDPRVRESGKWKGRTKMSKRGSPTLRNALYLMATTVRMHTPYFNEIYKKHTAKGKHHNVALSHVIRKIVDIMCGMYKTNTDFVSPETEVKPC

SEQ ID NO: 112401 - protein, 319 aa, unidentified
MMTHTTQTTAHYVGIDVSQNTLTIAIYPTDEVWIIDNTSEHHTALVQHLAHLPVQRVLLESSGGYEKAVVSALQQAGLPVVVVPAQRARYFAKSMRGDLKTDRADARMLAYFACCYPVQPVAPCAPVQAELKELWARREQLVQELEREKKRLQTVQSEAVRASLARMLAVLKEEIAQIEARVEELIASDADLSQKAALLQTAVGVGRVVAYGLVAELSELGQVSHRAIAALAGLAPVRCESGDWVGRARVRGGRPRVRRLLYQAAVVAATHDGRWRAVYEGLLGRGKAKKVALCAVARQLLVVLNAMVRDGRAYERVSE

SEQ ID NO: 112402 - protein, 451 aa, unidentified
MSRKRKSNPKTGASLLSCLNLNAAGIDIGATEIYIAVPGDRDPQPVRCFPTFTEDLHAAAAWLKACHIETVAMESTGVYWIPLFQILEARGFKVFLVNAHHVKNVPGRKSDVSDCQWLQYLHSVGLLRGSFRPEQAVCSVRSILRHRDSLVQMASSHVQHMQKALDQMNLQLHHVISDITGMTGIAILEAILAGERNPHTLAALRDRRIKASADTIARSLVGDYRREHLFTLRQSLAAFRHYQELIAACDREIAQSLEQFESKLDPPPASPSPSNDGSKPKASEPSFDLQTHLHRIFGVDLTQVPGINVLTAQTLLAEIGPDFSRFPSGPEFASWLGLCSDNRVSGGKVLSVKTRKVKNRAATALRMAALSVHRSQSFLGHFYRRMRAKLGAPKAITATAHKLARILYHMVTTGHAYDETICAQNEVQNRQRMEARLRKQARYLGLQVVAL

SEQ ID NO: 112403 - protein, 411 aa, unidentified
MRIFVGDDWAEDHHDVHLMNDDGARLAARRLPEGLEGIRTFHELVAVHAGDPGEVIVGIETDRGLWVTTLVAAGYQVYAINPLAASRYRDRHNVGGAKSDKGDAKMLADLVRTDRHNHRRVAGDSPQADAVRILARGHQNLIWVRTRHTNMLRSALRDYYPGALETFADLADRDTLQVLAKAPTPAQGAHLSISQIEAALKRGGRQRKLRSRAIEIHSGLRGGQLAAPDAVADAFAATTIAAVGIISELNRQIAHLETTLAASFEQHPDSDIYHSLPGFGVVLGARALGEFGDDPNRYANTKSRRNYAGTSPLTIASGKNKTVLARYVRNRRLYDAIDQAAFCSLTQSPGCRAFYDKHRAAGDHHHQALRALGNHLVSILHGCLDHRCLYDEHTAWDHRQPHEPEHVRQAA

SEQ ID NO: 112404 - protein, 336 aa, unidentified
MEEAQSVVGIDVSKLKVDIALLINGKMKSKVLDNSPAGHVSLLEWLGKSKADLASTHICMEATGVYYEALALKLHEAGLKVSVVNPSCIKGFGRSENIRNKNDAIDAGLIARYCAAMKPAPWVPPPLEQRQLRAWSLRVQSLKDIRQQEENRREAHLVSGMDDVAAHVAEHVKWIDDEIRKLEKEIEDHIDRHPGLKRDAALITSIPGIGPTTVARILGHLGDIRRFKNAKALAAFLGVTPRHHTSGTSVKGRSVVCRTGSTSLRAALFMPSMVACRFNPILNQFAKRLQATGLPMKAVICAVMHKLTHLIYGVIRTGKPFDANYLPKRLAIQDGI

SEQ ID NO: 112405 - protein, 342 aa, unidentified
MNIPVRIGMDTSKSVFQLHGVDENEVVVVRRQFRRAEMIRYFERLPPVLVAIESRGSSHHWGRLLQSFGHEVKLIPPQYVKAYVKRGKNDAADAEALCEAVTRPSMRFVPVKSKERQAACMLMTVRERLVSVKSQLSNAFRSYAAEFGIVGPAGRQNVAALIKRVLEDDSLPEMARDLFRLQADEYAAVQARLAKIEAKLMKWHREDDISRRIATIPGVGPIGSSMLSMKAPPPETFRSGRDFAAWLGLTPKDHSTGGRQRLGGITKAGDSILRSTLIVGATALLRHVRKGRHKPTPWLASLLERKPPKLVAVALANKFARIAWRLMISGGVYNQPVATMPT

SEQ ID NO: 112406 - protein, 344 aa, unidentified
MTSYAALDVSQETTAICVVDENGRIVAEKIVATCPDTIATWLLKHTNKLARVGLETGPLAVWLWNELREHDLPVICLDARHAHAALKMRSNKTDRNDAAGLAQIVRTCWFKQVQIKSRDSYEIRSLLSGREVLVRIRVKIENEIRGLLRTFGVLFGKTAGGFARRAREIVAGDLDASPTMQLVIETLMQARAAILDRIKILERRVVAAARTNSTARLFMTAPGVGAITALSVISAFDKVSRFEKSSSAGAYLGLTPRRYESGEVSRNGHISKHGNGMTRKHLYEAATTLLTRTKSFSALKAWGLRLAKISGFKKARVAVARKLAVTLHAMWKTNTEFRWSKQVA

SEQ ID NO: 112407 - protein, 329 aa, unidentified
MNYCGIDISNKMIDVVVRKKGKSFACRTFDNDYAGHMAVIAYLRKHHVTYVGLEATGYYHLDLALELDDAKGIEVMIINPRASKNFAKAMMQRNKTDASDANILAQFTERMDFVKWTSPVGEVLDIRACGRRLISLSKEKTKAKNQLHAYGRTKRTPGFVIEDIQLSIRQIEDQTDRLISHALRLIKQCEFLKERYRRLTSMKGIADKTAIKLLGELGVLAMDMSAKQWVAHAGLYPRSFESGTSVKKRTYIGKVGNRYIREALYMAALSASSHDPHVRGFYLHMVEDNGLTKLQAICAVMRKMLLAMHGMLKENKPFEGARFYNLEHP

SEQ ID NO: 112408 - protein, 343 aa, unidentified
MTKDTMIGVDLAKAVFQLHAASMTGHPKFRKKLSRQSFVGFMAAQPPAVVVMEACGSAHYWAREMIRLGHEVKLIAPHYVKPFVKRQKNDAADAEAIVIAAQRPEMRFVDPKSEEQQSRAILFRGRERLVHQRTELINALRACLYEYGHVVPQGVHQIKQFEDILDAPNSDLPDLMREECHDLLRQIGEKTVRIDARTVKIKAMAAAADTARRLQTIPGVGPLTALAVEAFAPPMENFRCGRDFAAWLGLVPRQFSSGGKERLGRISKAGQSDIRRLLIIGAMSRLNWMGRKSIPEGSWLARMAARKPRMLVAIALANKMARTIWAMLMKNEDYRDPALAVTA

SEQ ID NO: 112409 - protein, 347 aa, unidentified
MRFYTKQHQFYCGIDLHARTMYLCVLNQEGEILVHRNMPAGPDPFLKAIAPYREDLVVCVECIFTWYWLADLCADHGLPFVLGHALSMKAIHGGKAKNDKIDSQKIAALLRGGMLPQASVSPAEMRATRDLLRRRMPLARTRGELLAHVQHTNSQYTLPAIGKKMASKANRAGVAERFADPAVQKSLEGDLALITSYDALRRDVELTIVTTATHHDAQTLYLLQTVPGIGKILSLVLLYEIHDIARFPRVQDFASYCRLVKCAKESAGKRFGTSGSKIGNAHLKWAFSEAAVLFLRDNPAAQKLLARLEKKHSKGKALTILAHKLARAVYYMLKRQTAFALETFLHA

SEQ ID NO: 112410 - protein, 343 aa, unidentified
MQAVTTIGLDIAKSVFQVHGVDAEGKVLIRRKLKRRYVLAFFQKLPPCLVGIEACATSHHWSRELKALGHTVRLMPPAYVKPYVKRQKNDAADAEAICEAVTRANMRFVETKTPEQQSCLMLHRTRHLFIRQQTSVINAIRAHMAEFGIVAPVGRQGVEALLEVAADGGDNRVPEVARSCLAALGAQLRALKAQILEFDRRITAWHRSNETSRRLDAIPGVGPALATALVASVADAKAFRSGRNFSAWIGLVPKQHSSGGKDRLGSISKQGDRFLRSLFTAGALAVIRYAKIHGTKHRPWLTALLARRPTKVAAIALANKIARMAWAMMARGERYKEPVALAA

SEQ ID NO: 112411 - protein, 403 aa, unidentified
MALSALLNDTNGAPHVASFDASRSLTALEQHNTVVAVIEMSQSKWLVAAVVPGIKRQPLKKLDADQESLLKLLLRWRKEAEQAGHPIKRVVVAYEAGRDGFWLARWLRSRGVEAYVIHPTSIAVSREHRRAKTDRLDTELLLRALLGWLRGEKRHCSMVAIPTIEEEDARRPNRERASLVTEQTRIVNQIKAILIRFGIRSFRPKLRKAEEQLKQVRTAEGSPLPDNTRAELCRRLACLRVVRDQIQAIEKARLQKLTADHGRRKGPNAMVRLIARVLGVGVETADMLVTEVFSRQFRDRKAVARYAGLTGSPHESGKRRREKGLARAGNARVRTGMIQFAWRFLRFQKDSALAQWFQSRAGDGRGGTRKTMIVALARKLLISLWRLVTTGELSDGIVLRSAS

SEQ ID NO: 112412 - protein, 412 aa, unidentified
MEVLHAHCAGLDVHKDSVVACARHTVDGKVDREVRTFKTTTKELMALSEWLSSQGCTHIVMEATGVYWKPVWHILSDGEFELVLANAAHVKNVPGRKTDVNDATWLADLMAHGLVRGSFVPDEQTQEMRNFLRTRKQFVRERTSHIQRIQKTLEDANIKVDSVITDIMGLSGRRMIDAIIAGETNPNALAALAHRRIKASPAELEAALRGRVTDHHRFMLRLLLQHIDAIDAAIGQIDQEVDANVEPFRTAIKILSTIPGLSQLSAGVVVAEIGIDMSRFPTEGHLISWAGLCPRNDESAGKRRSTRMRKGAPWLKTTLIQCAWAAARTKGSYLQAQFHRLRARRGAKKAIGAVAASILTAAYHMLKNGTLYEDLGADHFDNRAKGKQVLRLVSRLQNLGFTVSLTPTEAAA

SEQ ID NO: 112413 - protein, 416 aa, unidentified
MKIYPNTRAIQRYIALDIHKEYVLAGGMNTGQEWVLSPHKIEMGKFREWAKKNLCDTDAVVIETTTNVWDIYDIVQPLVGRAVVAHAGAVRQIAEARVKTDREDVKRLIRLLLADIVPEVWVPPQPVRELRGLVSYRQRLVKTGAMIRNRLHSLLHRHNLLLPEEGLADGEWWTQQEKIPALEKLQIRQELSMLQQIETHKAEVDHELGRQSLGETWGKAAVRLMQLPGIGVVIAMTVLSAIGDIHRFESADKLVGYSGLGAGVHDSGKEHIEKRITKSGRKELRWAMVEAAWRAVRMSPYWKEQYEKFLRRMRRPNQAIVVVARKLLVAVWHVLSKDETDERATEEDLAYKMLLWSWSLSEDARQGLTHKQFAKYALMRLGVQTDLTRFVRGKVPRRIASREEVLVRMAELGLSG

SEQ ID NO: 112414 - protein, 371 aa, unidentified
MAQSSKTLYVGLDVHKESIAVAYAPEDRGAEVVSLGPIGTRQCDIDKLIRRLESKGATQVFVYEAGPCGYGLYRYLTGKGFACHVVAPSLIPRKAGDRVKTDRRDAMTLARLMRSGDLRAIYVPGIEDEALRDLSRGRDDAMQDLKRSKRRLKSFLLRQDIRYEGRATWNPAHLRWLSEVVCPTPPQQIVFQEYLRAVSEQHERRQRMEHELHEAVQGWRLYPMVQAIQALRGVELTGAVILMTELGDITRFENPRQLMSYLGLTPSEYSSGERRRQGGITKAGNSHARRALVEGAWAYRYPAKVSRHLQLRLEKLPTEVQAISWKAQVRLCKRYRQLTARGKHVNQVVVAIAREMAAFAWAIARIVPLAA

SEQ ID NO: 112415 - protein, 348 aa, unidentified
MKIVKQVLGIDVAQKELVVCLGRMQDDWRPELYAHKTFVNTAKGFEIMLLWVKKQTEESIPVRYVMEATGVYHESLAYFLEGKGYEVSIVLPNKISNYFRTLDVKTITDKTASEAIAQFGLERTLDSWRRPKEIFRNLKQLTRERGQIVEHRTMAKNQLHAEETEAYPNKKSVARIKAQIRFFNKQVLEIKIEITSLVKQEKEVSKSIEIICSIPGVGLLTAVTVLAETNGFELIRNKRQLTSYAGLDVREKQSGTSVKGKPKISKRGNRHVRKAMHLPALTAIRHGERFKAIFIRLVSQHGIKMKAVVAIQRKLLELIYTLYKTNKMYTEEHLTLNEIGYDRQTSVA

SEQ ID NO: 112416 - protein, 353 aa, unidentified
MTKSSANKLEKTYAGLDVSLKETAICVVDDSGKIVCERTIPTDPHVIATYLSKHAPGLERFGLESGSTSAWLWREFRQLGLPVICLDSRHAHRVLSMKRNKNDRNDARGLADLVRMGWYREARVRSLDAQFARSMLLSRQQLLQSRRSIENQIRGALKTLGVMTGPSKGRRFMSRVIELRTDNEWLGPVLDPLLAAHASIATQLKAVSASVVDTAREDADVRRMMTVPGIGAMTALAFKSAIDDPKRFTSSAKVGPYLGLTPRQHQSGESEWIGGIGKTNDPLLRSYLYEAAGVLMTRVRRSCPLKAWALQLAKRIGWKRAAIAVARKLAVILHAIWRDGTVFEWQAAEATAA

SEQ ID NO: 112417 - protein, 379 aa, unidentified
MIEGTGMGGAKLASDLSVQTVGDIVPIPSPETPIRNLAAHQPNGFKLASVSSRFHGLTTAETIMAKLVTQITLGVDVSKDLLVIHHWQNAQTFTLDNQSSTLRQWLKQLSGPVRFAVEATSSYHLRLVELAVEHGHDVYVINGRQLSHYREAVHVRNKTDADDAWLLARYLEHEAAQLRPYRPHSRKAQRLWGLVMRRATVVQSRQRLQQSMREAGLSIRALITQFNQLQIRLDRIIQQLIRELGWWNDYQRCLSIPGIGPANAAALVAAYHRGAFSGSDAFVAYLGLDIRVRESGRFKGKSKLSKHGAPELRRLLYCASKPAQTHSRFAKYHQRMIEKGLPKIAARVALARKLARIAFTLINKEETFNNRAGAACAAP

SEQ ID NO: 112418 - protein, 441 aa, unidentified
MGHDVEEVDAEGDEQVLERAGAIDVAKASAKVCVRLPGAKRRITKVWDVGATTKAIVALADELAELEIERVVLEATSDYWRPFFYLLEARGLCVWLVNARDVKNVPGRPKTDKLDAIWLAKLNERGMLRPSFVPPREIRELRDYTRLRAELVEDRTRHKQRLEKLLEDSMIKLSTVASDIFGKSGRAMLEALIAGERDPEVLADLALGQMRKKTAALKEALTGRFDHHHAELARMLLDEIDALTEKIERLTTRVEELVSKIPEANAPVDPETGEIGSKGLPVLERLDEVPGIGLRAAQVIVAELGLDMERFPTASHLVSWAKVSPRTIQSGPRSRSGKVGKGNPYLKRVLGEAATAAAKTDTFLGERYRRLVRRRGKQRALVAIERSLLVVVWHLLADPNARFIDLGSDFYERRVNKERRTRDLVRQLMALGHQVTLNPAA

SEQ ID NO: 112419 - protein, 372 aa, unidentified
MKTKNKTKLTPSVVSTSTAPAPAGGFTLGLDLGDRSHYVCVLDAQGQIIHEGALLNERIALALLLTRYPAATVAMEAGTHSPWISRYLTGLGATVIVANPRKLHAITRHERKCDRRDAVMLARLARADAALLHPLQHGSAQAQHDLLGLKLRDSLVRTRVNLINTVRFTLKSLGHVVSNPSSESFHKNIVTAVPADCLPVVQPVLAVLALITDQIKTLERDLEARSKRDYPVTQRLQQIAGVGPLTALCFVLKIGEPTRFGRSRDVGPYLGLCPGRDQSGGTDKQLRISKCGDGLLRRLLVSAAHYILGPFGPACALRAYGQHLIGTSVREKKRAVVAVARKLAVLLLSLWKHGTDYEPRVPATPALVMIPA

SEQ ID NO: 112420 - protein, 346 aa, unidentified
MMIIGCDFHPSWQQVSWLDTETGETGEQKLVQASGDAERFYRQVAAPALIGMEATGNCHWLVDLLAELGHELWVGDAAQIRASYVRQQKTDKRDAAHILKLLVEGRFPRIWMPSSEVRDLRQLLLHRYKLVIMRARVKNELQHLCLNKGVQRKRKLWSQAGQQILRELPLKPWAGRRRDDLLKLMAMLDQQIEPLDQAVKAEAQRDKMALLLQTQPGVGAITALAYVLTLGDVSRFPRGKQVASYLGLIPREHSSGGRQKLGAITKQGNRMLRMLLVEAAQAAVRYDPQFRKEYLHRCHQKPKAVAKVAAARKLAVRLYWMLRTQRPYPEIVRIESSPRVPLVGAS

SEQ ID NO: 112421 - protein, 313 aa, unidentified
MSTSSEIFAGIDVSKAHLDLALRDSQKSWRFSNNPEGIHKLTDLLLNHQPTLIVLEATGGYEQAAFRCLSARQLSVAIVNPRRVRDFARANGRLAKTDRIDAHNLAHFAQVVRPHPHPPSTEAQQHLAGLMARRRQLHRMITAEKNRLRNAHPVVQLQLQEHIDWLRQALKELDAQVEDLLQSDPELKAKADLLCSAPSVGMVTAASLLADCPELGTLDRKKIAALVGVAPMNKDSGRKSGKRRIMGGRAPLRAALYMAALSASRFNPAIRPFYARLLESGKVKKVALTACMRKLLTMLNAMMRDNKHWNPVI

SEQ ID NO: 112422 - protein, 438 aa, unidentified
MLNAIEERCAGIDVGKREIAVTIMTGAAQEEPCVETRLFGTTNHCLEQVKQWLGEHEVRVVTMESTGSYWKPIYYVLEGECEVLLANPMHVKNLRGHKTDVADSVWLAHLLRHGMIRASFIPPEDIRQLRDLTRRRKRLIGAGASEKNRISKTLEDANVKLGSVLNSLFGVSGQAMLERMLEGDFEPRQLAELAKARARLKREEIEEALEGHRFSDHHRFLIHQCLEHVYFLEGQIQKLDAEILRLLEPYRDLYEMLQSIPGVKAEVAAVILAELGPDMSVFPTAGHAASWAGLCPGNNRSAGKQRSGRTTGGNRWLKAVLTESSWSATRAKGSPFAGKYLRWQKRLGKKKAAVAVSHALLRVIYTVIRERVPFVRTDTAIDPHQQRERQIRHHCRKLRELGVAPEVIEQALAEHGVQKAEVKTPGPRKRGKLGLKAY

SEQ ID NO: 112423 - protein, 344 aa, unidentified
MNYYAALDVSLRSVNVCVIDDAGDLHSEAKLDSEVEAIVAYLRGLDCEIASVGLGAGTLTQYLTYGLQAAGYEAVCMEARQVKAALSAMRNKTDKHDARGIAQILRSGWYSRVHVKSLESHQIRALLSSRKAVLNKCIDLENEVRGLFKVFGIKLPPRLGHGAFDKAVRATIEADDALSHALLPLLDARLVLYRTFRELDNRTRKLAQQDHICQRLMTAPGVGFITALTFKAAVDDPTRFKRSRTVAAHFGLTPRRFQSGEMDNPGRISRAGDADVRCTLYTAANAMMTRSSKWSSLKVWGMQLAKTRGHRRAVVAVARKLAVILHRMWLDDTQFRWGTEGATS

SEQ ID NO: 112424 - protein, 317 aa, unidentified
MTKTSTAVAGIDTAKDKLDIALHGQASHWCVENNLKGWKRLRSELAEAGVERVGIEATGGYERGVVWHLREAGFTVLVLQPIQVRAFAKARLRRAKNDALDAALIAAFTASVETPRIEPDQRLSRLAERLTFLEQIEEDIARFKTRLEHLDDPEPRRDVLGDIARLKARRLTQIRFIARLLRAHHDLAVRLDLVLSIPGIGERTALTLVIRMPELGRISREEAAALAGLAPFDDDSGKHRGQRHIAGGRKRLRRSLFAAALPAAFRWNKALISLYARLKAKGKAHNAALVACARKLLVYANTVVARGTPWTESQAVS

SEQ ID NO: 112425 - protein, 314 aa, unidentified
MSAPMFVGIDVSKAQLDVAVRPDGRFAVSNDDAGIAQVIARLRAGPPTRVVVEATGGLEMPLAGALAAASFPVVVVNPRQVRDFAKATGRLAKTDALDAQTLAHFAEVMRPALRPLPDEQTQALAALLARRRQLVEMLTAEKNRLGSARKPVRKSLRTHITWLERELSHTDSDLAHAIRESPVWREKDDLLRSTPGVGPVLTTTLLADLPELGTLTGKQIAALVGVAPLNRDSGTLRGKRTVWGGRAPIRAALYMAALVASRFNPVIRAFYHRLCAAGKAKKVALTACMRKLLIILNAMLKHRTPWRTELVQYA

SEQ ID NO: 112426 - protein, 337 aa, unidentified
MTIIRIGLDIAKHVFQVHGVDENEVTVLRRQLRRSEMKKFFNKLAPTRIGLEACGASHYWARLLRGLGHEVVLLPPQYIKPYVKRGKNDANDAEAICEAMSRPGMRFVPIKSAESQAELMPLGGRDLLIKQRTAVINTIRGYAAEFGVIATKGPVKVAELLQQAHAEEASVPALALDMLRLLAAQLDALDAKLKLIETWLMALHRENPVSQCLASQPGIGPIGAVSFALRVTDPKSFRSGRHFAAWLGLTPKDNSSGGKRRQGRISRQGNEALRKLVVLGATAVIRFAKPGHASPWLLNLLARKPKRLAAIALANKMARTLWAMMVSGEVYRRPLPA

SEQ ID NO: 112427 - protein, 392 aa, unidentified
MEKHSTEFIGLDVHKESTAIGRASAGRAVGRFVGTVGPTLAELLKSLKSLGRPEELSIVYEAGPCGYGLVRDLRSRGYACEVIAPSKIPRRSGDRIKTDRRDAVRLAELARAGELVSVVVPDERDEAIRDLSRARVDAVRARLAARHQLKALLLRHGHRYGRSSWTQAHERYLAKITFAHAAQDATFAEYRQAVSEANERVQRLVETLRDQCTTWRMQPVLEALMTLRGIDFVAAATLVAELGDFKRFAHPRELMSFLGLVPSEHTSGDARHLGKITKAGNGHVRRILIEAAWNYRFAARMSVVLQKRQEGQPKVVRDIAWRAQLRLAQRYRRLSARHLHHNKVCVAIARELAGFIWDIGRHVPIHDMPMKAPKTGGDNPKGYRAIVAPATL

SEQ ID NO: 112428 - protein, 343 aa, unidentified
MNTVCRIGLDTAKNVFQAHTLDASGRKVATRRLRRTQVLAWFARLDRCDECLVGLEATGGSHYWARELQRLGYRVRMLNPQAVKPYRQGQKNDARDASAIAEAVAREVVSEAPIKSEGQQALLTRQGYRRRLVARRTALGNQLRGFLAEFGIVVPQGWSKLKECLAAAAEDGDNALPADVRAVLADGGEELRDLNRRSDAQDRALARQARADERSRRLMEIDGIGPQTALRLVAICGDGAAWRNARGFAVSVGVTPAQRSSGEHVRLGAITKQGDVELRTLLVHGARSTLSRADHGARLDPWTERLRRRRPHNVAAVALAHKRARIAWAMLAHGTRYQAPMAA

SEQ ID NO: 112429 - protein, 369 aa, unidentified
MKRPMERDRSIRLWSEETVAEPGRHVPHHPSPNSCQGHRARIITRSGYTKEAAMQTPCMYVGIDVSKARLDVAVRPSGEPVSVTSDASGITTLIAQLSQVRPALIVMEATGGLERPLLRALVDAALPVIVVNPRQVRDFAKATGQLAKTDALDAQVLARFAEVIRPTLRVCPDPQTQELAALLARRRQVLAMQGAEQNRLDRAPDRVRKRIEAHLRWLRDELARLDEDLDDLIQQSSVWRAREELLQSVPGIGPVMSRTVLAELPELGLLNRKQIAALVGVAPFNRESGRLRGHRTIWGGRAPVRRVLYMAALVATRWNPVIRLFYQRLRAAGKAPKVALVAAMHKLLTILNAMVHHGTPWQPVVAQEA

SEQ ID NO: 112430 - protein, 357 aa, unidentified
MVTPSRAAGVRCREFPRGITAMQNVTLIGMDLGKHAFHLHGQDKAGKAVFRRKVSRKQLFEFFAAFQQCTVVMEACVGAHYMARKLMAFGHEIKLISPQFVRPFVKSNKNGFVDAEAICEAASRPSMRFVTPKTESPQTLLALHRVRDALVRDKVRTTNQMHGFLLEFGVTLPVGNAVVRRLPALLAEHSLPPRIVAILERLHAHFKYLVEQIGEIGKALNRQLAEDSIGQRLLTIPGVGPITASLLSSELGDGKQYRCGRYFAAAVGLVPRQYSTGGRSNLLGISKREDTNIRRLLVQCAHAFMLHLHSYSGPVADWVRSMLARRHSNMVTCALANKLARIAWAIASRDAIFELGT

SEQ ID NO: 112431 - protein, 413 aa, unidentified
MLLFIGDDWAEDHHDLELEDDTGRRLTKARLPEGLQGITRLHALVAQHAPAEWADLPSEEVAARVVVGIETDRGPWVTALRAAGYQVFAINPLSSARYRERYSTSGAKSDAGDAHVLAEIVRLDRHHHRQIAGDTDLVDAVKLVARAHQTAIWERTRQVLRLRSTLLEYFPAAVEAFEDLSAPDALILLGRAPSPVRVAKLTRSQVVSALRASRRHHVEAKTDSLLAVLRAPGLRQPLTTEAAYAAVVAGQVGIITALNVQIAQLDEVVDEHFGRHPAADIYLSQPGLGVVLAARVLGEFGDDAKRFQDVRARKNYSGQSPITRASGKKAIVMARYATNRRLGDALHQQAFSALSASPGARAYYDSMKARKIGHHAALRQLANRLVGVLHGCLKSGTKYDENVAWQHQTVAAA

SEQ ID NO: 112432 - protein, 456 aa, unidentified
MTLEDRPLLEPNAAGIDIGAREIFVAVPADRDENPVRVFPTFTEDLEEMARWLVSCGVTTVAMESTGVYWIPLYDILEQHGVRPCLVNARNMKNVPGRRTDWHECQWLQFLHSVGLLRAAFRPDGEVSAVRSLMRHRTDLVQTAAQHIQHMQKSLTQMNLQIHHVISEITGVTGLAIVDAILAGERDPAVLAKLRDHRIHASGEIVQKSLVGNWKHEHLFTLKQSRQIYQQYQDSITACDEEIEKLVVAFEPRVDTEEHPLPPDRKGKQRKRKKRGVIPGTNPKTGFDMRTEAYKLFGVDVTQIPGLMMTPLRLFSEVGRDMSKWPTADHFASWLGLCPDNDISGGRVLWKGMRGTRNQAGQLFRMAAFGLHHELSPMGDHLRRMKSKIGPAAAQTATAHKIAIIFYTMVKKQVEYDASIWAQKDAEREKRFEAKLKRQAQARGYKLVKIEETIAA

SEQ ID NO: 112433 - protein, 418 aa, unidentified
MDVVHRRCAGLDISKKDAKVAVRVAGGGRAGTKTTVTTWSSMTGQVLALREHLVAQQVTCVVMEATSDYWKPFYYVLEDGPWELMLVNARHARNMPGRKTDVSDAAWLAQLGAHGLVRGSFVPPAPIRALRDLTRTRTALTRERAREVQRLEKLLEDAGIKLSAVATDIVGVSGRAMLEALIAGQRDPEVLADLAKRKLRWKLGELSEALDGRFADHHAFLARTHLDLIDHLTGTIDQVTTRIEEAMAPFRGVRDLIVTVPGISTGVADVIIAETGADMTRFASPGHLASWAGTCPGANESAGRVKSTHTRPANPYLKGALGVAAMAAARTKGTYLAAKHRRIATRRGPLKAVVAVEHAMLVAIWHMLTEQAPYRDPGPDYYARRNPDKTRDRAIDQLRVIGYDVTLTPRAVTDPLHQ

SEQ ID NO: 112434 - protein, 442 aa, unidentified
MARFVGGDLQARFMARVRDVDPRRCLVVPVDVGKWSAMALVADHHGEVLRAPWEFRLDEPGVRGLLSVVAGAVRDVDAVVCRVGVESTGHYHRTLVARLRSSGVEVVELNPAAVKEARSQQLLRRLKSDERDLGAMAELMIRGAGRVPQVGDEAMAAQSAWVAHRRRKVVAHVALSNQVQGHLDLVFPGLGACFDGILRTKAGWVIVRDLADPERMRRLGPEGLRRFVARRGVVLRRAKAAQLIDAANVALRLPAGERAPIAALLRADVALLEAIGDEIRRSEHELARVLDATPAGVLVSLPGVGVVRASAYGAAIGDPGRFPNAAAAYRASGLVPTEYSSAGRRRGGQHISREGSVELRSAIIELGRGLAGHDDDFGAYRRRLRSSGKRPAVAAVAVGHRAHRLAFAMLRSQEPYDPNRWAAAVADGPVMAKTGGRPTTAT

SEQ ID NO: 112435 - protein, 412 aa, unidentified
MPLALPEALFFTGIDWAAVTHAVCVMDSAGEIAAEFTIEHSADGIAALIRRLAGYGDPADMPVGIERPNGQLVDLLLEAGHPVVPVSPNAIKTWREGEVLSGAKSDAGDAAVIAEYLRLRQHRLRVATPYSGETKALRTVVRTRDDLVDMRVAATSQLSALLEAHWPGAKAIFADVESAISLAFLTRYPTPAAARHLGEKRIAAFCASQGYSGKRPAAVLLARLRAAPAGTTGEALTVALRDAVLALVAVLTALNAAIKGLGRSVAARLGEHPDGAVFTSLPRSGQTNAAQMLAEWGDCRQAYESPDSVAALAGCTPVTKESGKHRAVHFRWACNKRFRTAMTTFAGNSRHASPWAAKIYNDARASGKDHPHAVRILARAWIRVIWPCWLNGTPYDPARHGAASALTKPIAA

SEQ ID NO: 112436 - protein, 378 aa, unidentified
MKAALQTKDNASGDVLYMALELSNKKWKLGFSNGEKTRIKTIDAGHWVSLIAEIEHAREKLGCSPGCRVVSCYEAGRDGFWIHRALLEAGIENYVLDSASIEVSRRRKKVKTDRVDVVALLRLLMRYVNGEKEALHAIRVPTVEEEDQRRLNRERDRLIKERGAHSARIKSLLKLHGISLGKIGDLPALLPSARALVVGYELPADLRRELEREYERYELVDQQIKGLEKLQIQRAEDLDKPAMQQITQLMGLKGVGWQSSWILNMEFFLWRDFRNSKQLGSCAGLTPTPYDSGDSTREQGISKAGNKRIRRLMVELSWLWLRYQPDSALSQWFERRFGQGGKRMRRIGIVALARKLLIALWRYLEHGVLPEGAVLKAA

SEQ ID NO: 112437 - protein, 451 aa, unidentified
MSNGSGVSRGDRNRNARLSRLREAVPVVNAIVGIDLADRKQMVVVCDHDSRVLARRTFRCKAWDLAAALDWASDRAARAGFAGLTVACEPTGHRWRVLGQLASDRGLPFVCVQPAASAYARRTEDLTSDKTDDKDAVLIARLTAQLRCYLPEPVDPTWGRLRHLGARREQLLESHTRCVQQIRDLLECVWPAALEAAAQPFKSTTWVAALTVIVARDDGNLARTRRLGLDRFTRLVRAEVTRRGKAKPCLRIVRKVFAAVTATAGVVEHRQAALERIGWILTDWERARTDQMVVENRMVAVLGQLGLTDLACSIDGLSPVGAASILAETGDLRRFTSARAVVKLAGLAPRERMSGTFAGKTRLSGAGRPRLRVAAWRAVWGCLQNNRVYAARYRHLTSREVNRLKPTQAQTVVAAAILRQLYAVVATGQAWDPDIAAHGTRRLPVAGVVAA

SEQ ID NO: 112438 - protein, 424 aa, unidentified
MKTYWTEQPYFAALDWAKDHHDVVVVDRIGTIVAEFQFAHTAAGWTQFEQQMQAFDRCPIALETSSGPAVDQLLQRQYPVYPVNPKAAERYRERKAPSGNKTDRHDAWSLAEALRTDGQGWRPLVPQDEATATLRLLCRDEQALIEQRTALVNHLQAALGEYYPLALESFADWTQPFAWAFVRAFPTPKALQQAGKRAWEKFLHLHKLWRPDTAPQRLAAWAQGQQLNASAAIVNAKSLLALSLASVLQSLQKQIDEYRTRIRAAFQAHPDHDIFGHLPGAKDKLAPRLLAELGSQREVFPDAQSLLCYAGVSPVSFQSGQICKARIRWACDHFLRHTVHLWVDQSRRRCAWAQAYYRVKRDKGHSHASALRCLGKRWLKLLWRLWQDRQTYNESIHLQSLRTHGSFVAKLLASQSPQPAASCE

SEQ ID NO: 112439 - protein, 463 aa, unidentified
MMKKRKLASKAEKPRREKVDWKTLEIVHPDAAGIDIGGREHWVAISPDRDEDPVRRFDCFTADLEQMAKWLVEKGVCSVAMQSTGVYWMPVYEVLEQSGLEVYLVNARHTKNLPGRKSDVQECQWLLKLHTFGLLNNSFQPTDEIRVARTMWRHRSSLVAQAGGAIQRMQKTLTEMNVQIHNVLSDLSGVSGMAILKAILKGERDPWQLAAFANPAVKASPADIAKSLHGNWREELLLVLRQEVELYQTYQDKIAECDHQLRKHLQSLASRVDLQAQPLGARPKGKKAPRGNTPKFDLRSELYRITGIDWSQVNGIDVQIAQTVITEVGVDLSSFPSERHFASWLGLCPMNEQSGGKILNRRTPKVVNRATVAFRLAAQGLLRSQSYLGAQYRRLRTRLGAPKAITAMARKLACLFYRLLRHGQPYVDKGAQYYESRYREQQIRSLTKRAHKLALELVEPKPA

SEQ ID NO: 112440 - protein, 344 aa, unidentified
MLYVGIDVSCKEFVVYAVNERKQKVFDNKIEPTREGLRKLVKDLGEGPKLMVFEAGNQMKWIAMTLKKMKDVYIHVVHPNEVKWISQSNGKTDKVDAKKLAELARSDMLPRAVHIVDGEIRELRELVSARGRLQSKRVALTNTIRAMMLQEGVRLPVKFFQGMEWREKIEKLKIGEVQRLIVESYMKSVDQLLISEEEITARMLEMKDRRIELLESVPCIGKISSRVLVSAIDNVERFDNKKCVANYGGLTPTIRQSGEVKVMGRINRDGRREVRKVLLQCSHALSRTKSIGAKPLKIFYERIERRRGKKKAIVALARKLLTTAYGVLKNNEYYDPQKLMANAV

SEQ ID NO: 112441 - protein, 446 aa, unidentified
MGTQSTAALTETWGVPAPTGLLYLGIDIGRRKHLAAAIPETRMWDGSWERTPARTIATSALGFRGLTAWLGELGFAPDQTRIGMEPTGGWYGRTVAAWLERHGYRVDWLQNFALHDRRHLMIGKQTKTDALDARLIARLLFERERLGLKGGFLQRPPQSSDAMRMLVRNRARLIEQRVRCRNQLTALEDVLFPELKDFFKSSVTTSSVRLLLESFPTPNHVAAADPADLHRVVVCQGHATAKAASLMDLQMAAASSAGLSTDTDAIVHAQDWLLYQLRMVDGQIQEVEAAIGAVLDEWPARERAVLCSFPIMTTVRQAILLASIGDIACFRDDRQLRKLLGWYPEARESGSSLSKHRLGRSGNRMARRELWLWAWELITPSHADTPFRHYYRRLRDRGMPGNVAMGHLAGKLISVLFHCLRSGNLYDPQRHARDLGGVDVRGSVEA

SEQ ID NO: 112442 - protein, 411 aa, unidentified
MDQARRRVFESCMFKNMPISGSMSSARGGGAKRSGAPTPRAGDARSIESRHPDAVTKQDRRRLRGTSPNSRLSDDRPLAAAAAVSSHLQDRDVSMNDSPSYVGIDVAKDKLDVFIDSTNECFTVENTSAGIASIRQRLCGLNVKLIVIEHSGRYERRCALDLMDADLPVALVNPRQVRDFARSRNWLAKNDRIDARLNAEFGKANNPRISEKIPQNRAELDELVGRRRQLVAMRASEKPRLQQVSSKSVRQSIEKVVRQLDVQIQDLERAIAKLIENDDDWRGKAQLLQSVPGVGPVVASTLVAELPELGKVNREQIAALAGLAPYDHQSGKFKGKRRCFGGRGQVRCTLYMAALAARRFNPIVRALSQRLLARGKSFKVMMVACMRKLLTILNTIAASGVTWRKDLVPNS

SEQ ID NO: 112443 - protein, 419 aa, unidentified
MSFKILKNNCCGLDVHKTWIYACIGITDSFKRTEYKQARFSSFTKGLQELCLWLAKYNCIDVCMESTGKYWIPVFNVLEKNNIFVTLSHPKYTKPQKGNKTDRKDAKWICDLYMCGMVKPSFIPPADIRQLRDLVRYRFKLTCMITGEKNRAHNCLTVSNLKLDDVFSDIFGKSSRSITEQILQHPGEVFDVAPFVDSRCKTPIEEIQAAVDGAISHEQAVKLRQCLKHIDELEMHKAEIEREIFRLSQKYESVLDLIRTIPGFDKNPLTAIQVLSEIGADMSVFPTAKNLVSWAGCCPRNDQSSRKIKSTRISRAGSYFKPVLVQIANALIKSKKHPEFTTRYRRIKASRGHKKAIIAICRMILTAIWHILTDLKPYTPEGFLESRPVNKEKVLTISQALNLIKQRGYIIKDDVGPVT

SEQ ID NO: 112444 - protein, 343 aa, unidentified
MLRTNVIGIDLAKNVLQVCHISRQGELLSNKAVSRQKLKELLAKSKPSLVALEGCASCHYWGRYAESFGHEVRIINPKKVKAYVDGHKTDANDTLAIANAALQIGIKYSKPKSMEQQTLMSLEANRQFLSKTIVSLGLHIRGIINEYGIVKAKGTKGLAELVTSTLYESDVLPASLVTTLSMPWQQYLNLKDELSKLQKSMNSTTRQIEPCKRLMALEGVGETTASMLYATLGNGTQFTNGRQASAFVGLTPKQYSSGGKVTMLGIDKFGGVKDLRSMLYLGAMAYIYRLPESPKNQKQAWLIKLVDRVGFKRACIALANKTVRTAWAMLHYETAYQPKPLSI

SEQ ID NO: 112445 - protein, 349 aa, unidentified
MLYIGIDFHKNYSFITEMDETGAIQRQLKVSNDCSTLKGYVTKLPAQTKIAIEATCNWYYFYELVEDHDLDISLAHPLKTKAIASARLLNDKVSSETLAHLLRADLLPTAYIPNQTTRDSREVLRMHAFLIAQRTRLKNRVHAILMKNGLSCPYADIFGKSSLHWLSDLALRSCYQEAIVSYTRLADTLNEEIKLLKQTIEALAYDHPYARILDTHPGISYYSGLLIAVEIGEIERFPNHGKLCSYAGLVPTMHASGGKVRMGSITKQGSKWLRWILVECASHAVKKSLHYQNLYTRVAHKHGNGTARVAVARSMLRAIYAMLKFNRPYKKRQLRPAPWGHNLIKGSEI

SEQ ID NO: 112446 - protein, 450 aa, unidentified
MAKPKRRKHRKLDRSLPEMRPNAGGIDLGATEIFVGVPADRDSDSVRSFPTFTEDLHQLADWLQRCRVDTVAMESTGVYWIPLFQILQARGIEVHLVNAQHVHHVPGRKSDVLDCQWLQYLHSVGLLRASFRPEQAVCEIRSLMRHRENLVEMSCVHVLHMHKSLDQMNLQIHHVISDITGVTGLAIVDAIVAGKTNPKELAKLRDHRIKASIETVTKSLVGDYRPEHIFTLKQSLTAYRYYQQLIADCDHEIQQRIEAFDSKDQGPTAPADATSTETSKESGFNLHSHLERIFGVDLTLMPGFECLRIQTILSELGADLSKFPTDDRFCSWLNLCPKDGSSAGRRIRAPRIKTKNRVAQTFRLAAQSLHNNQSYLGDYYRSQRARYGAPKAIKNTAHKLARIFYRLVTTRQPYDETVFAKLEMHNQKRRLHKLQSLAKQMGYSLVEAHA

SEQ ID NO: 112447 - protein, 387 aa, unidentified
MARKRILSTLDTSIAYEAVGLDLAKTDVALAAFDSDHKEPYFIDRIPYDKLYELLANMAPTLVAMEPCSGAHQIAEQIQALGHEVMMISGRHVQAWVKDHCNGQKTDLNDAFAILNLAYDRWLTPIRGKTREECRLLALQASYRQLKGQRTKTMVHVKATLHAWGFPIRTCSFNQKALRELIDANREAFGGEMAETLHLMIDRVRDLDHDIATVLKLLTEATKRDPRASLLRSIPGFGVLTTSRWCAVMGDIARFDSPKQTMAFIGLVPNNRITGHHTETSSGREARGQGRMSKRGDKMLRSLCILGAASLCMLVRKDRLPDCPFVASIKARLASPRPWFKVLVYVAAKLVRIATALLKYGETFSFEKAGISKAVLKQWELEQAKAA

SEQ ID NO: 112448 - protein, 346 aa, unidentified
MLVIGCDFHPGWQQVCWVDTMTGETEEKKLVHGSGEAERFYRQLSGPALIGMESTGNHQWFLEMVTAAGHELWVGDAAKIRASDVRRQKHDRRDAALLLKLLLDGRFPRIWVPSSEQKDLRQLLIHRHKLVRMRAQVKNELQHLALNQGVQRKQRLWSAAGQKVLNELALRRWGSRRREDLLKLLAMLDQQIAPLDLAVEQAAQENSQAKLLQSQPGVGPVTSLAFVLTMGDVSRFRRGKQVASYLGLIPREYSSGGHQRLGSISKQGNRFMRMLLVEAAQIAVRYDPGMRNEYLHRCHSKAKGVAKVAAARKLAIRLYWMLRTQKPYPQIVRIESSSRVALVGES

SEQ ID NO: 112449 - protein, 349 aa, unidentified
MAIIGGLDVHRAQITYDYLDTATGGVRRGRIQPALREDVRTWLQRFDDEEDVAFALEGTTGWLYVVEELHRAGIRAHLAEPADTAALRGPKRRAKTDAADAKLLRELLAAGRLPESWIPPAHVEQIRTLVRLRKALLDERGAWHQRLQAKLFHHGLPRLGPLSLEDRRAWFGTIELPPASRHVVQVALSSIERISAEMAPIDAQLKWIARHQPGCRALERGIYGVGWLTAVAIWAELGDVRRFGSSRRAVRHTGLDVTVHSSDSKRSPGHLSRQGPEVLRWALYEAAMSATRPGSPDHSYYVDVKAREGSGRALLSQARRVVRRAHHILLGLGEEALAPAPVSPLAEAA

SEQ ID NO: 112450 - protein, 440 aa, unidentified
MKKVTVFETVHEHAAGIDIGAQKIYVSYDGTEVVTFDTYTADYYRCAVYLQEKGIEDVAMEATGVYWIALYAILETCGLKVCLVNPKETKQVKGRKTDVQDCRWIQKLFTAGILRKSFIPSEKYMELRQLVRERLDIIDMGSVYVNKMQKCLELMNIKLKEVISQVHGASGIKMIKAILSGSRDKTYLLSLCDKRIVNKKGEQVLKALEGNYNECYLFLLEQNLQMWEKHQEQIIVIDKRIEKHLEHLCILQPQVEVKSKAKPVRHHAPKIEGLHGKLVQLYGVNVSSISGINDYTLLRLIGETGVDMSRFPTVKHFVSWCGLSPKHHKSGLMHKKVKGTKCNKAGQVFKECAQGLLNSKYLAIGSFMRKLKARKDAGIAIKAGARKLAVAFFNALTKGTDYVEQGTKKYEEQIKQREKAALYRLAKKHNMQLIEKQEAA

SEQ ID NO: 112451 - protein, 324 aa, unidentified
MHNGYIKYFGIDISHLVFDVTDSDGNYYQFKNTEFGFKKFTKLLDCSSHCVMEATGYYHYLLAYHLLESGIKVSVENPLSVKRFIQMGLSKVKTDKIDSKLICAYAKQVDLKLWKGNSKDEMECLQITRALAIYTKQSTMLKNKLHGESVLGEPSKGVVRSLKRSLKQLEKEVKILEAKLIDLVNKSHRDLLTRLKTIPGIGPKTAMMLVVLTGGFDRFTSAAELCSYACLTPVIRQSGTSVNGRARISKIGNQKLRNLLFMCSFNACKVNKACRELYERIVAKGKSKKLALIAVFNKLLKQAFAIAKSGLIYDAEYKSTLVKN

SEQ ID NO: 112452 - protein, 370 aa, unidentified
MDPALALGWDVELSRAEREASMQIVRIGLDLAKYVFHLHGVDERGKVVLRKTLRRPSLAPFFANLPPCIVGMEASNGAHYWAKTLSELGHDVRLISPQFVTPYVKSNKNDRNDAEAICEAVGRPNMRFVAVKSSEQLAIQAVHRIRSRLVGNRVRLVNQIRGLLGEHGVVIAQAIGNLRRALPRVVDDESNGLTSIVRALIGELREELSDLDGRIAIYDRKIMELYRTSEACQRLGEVEGIGPITATALVAAAGDGRCFRNGRQFAAWIGLVPRQRSSGGRSRLLGISKRGDRYLRTLLIHGARAVMGRIRGKQDPRSLWLLKVRERHHANVVAVALANKNARIAWSLLARGLNYDQRQTVSSASAPRAV

SEQ ID NO: 112453 - protein, 346 aa, unidentified
MLHVGLDLSRTRVDVHVMDETGAPVLVTTAAPDSGGLASLASRVGEFGQPVTAAIESMTGARFVHDQLELRGWQVEIADAVKVKGLAPLAAKTDKIDAWVLAELSRRDLVPAIWLPDPAVRGERERARWRLHLVRHRTALKNRIHATLLAFGHPCPVADLFGAAGRRLLAGLELPEPWAGDVAAALRLIDSLDAEIDGCEAALRTAGADHPYVPLLTTVPGIGPVLGYTIAAEIGDIARFPTAKKLVGYTGLCPIVRQSGRKDHRDSLAKNGPKYLRWALIEAATHAARHPAYAERYQQTKTRLGRQRGARIARVDLARRLAEAIWYMLTTSQPFAPAGAAKPLAA

SEQ ID NO: 112454 - protein, 422 aa, unidentified
MRVVYDTCCGIDVHKKVLVATIVTTDNKGFSTYLQESFSTFNYDLQRLHDWLIEHDCHHVCMESTGKYWIPVFNYLESDIHVCLTHPKYVRAIKGRKTDKKDSKWIADLYKFDLVRSSFIPPEDFRQLREIARYRVKLNYMKTAEKNRIQNSMTVSNIGIDKVFSDPFGRSAKDIMTHVLEHSSGPIDRTAIAGMIRKNTKASVDEIVAAIEGSRIRSDQRLKLSLARDHLEYLERLITRTEVELFVRMQPYQEYVDLVQTIPGMTALSSTIVLAEVGVDMSVFEDSRHLTSWAGLAPGCNESANKKKSVRIMKAGAYLKPLMVQCALAAIKCKKQPYFSIKYSKIRKRRGHKKAIIAVARMMMVCLYHIVRDKKAFSPNDYDELVNPEEQPKKVVLNEAIVFEFLAQHGYDTTVLVKCNES

SEQ ID NO: 112455 - protein, 342 aa, unidentified
MKDSIYDQYIAIDWSNLNMAIARMTKKSNKIIIIDVPSDVVELQTYLKNLRGTKILAIEETTTSQWLYTELEGCVDKVLICDPYRNKLLGEGAKTDKIDAAKLVHLLKAGLMKEVYHSAEKFIYIRRVVSGYEDMVKAGVRLKNQRYALLRTCGKNGKEKDINVGAQGEQFVLECLDRQIKAYEEEKKGFEKEFVRLARKYPEIKHQKSLPGIGTINAVKIVSRVVSPYRFADKGHYLSYAGLIKLEKISGGRSYGKKNPRYCRQLKSVYKSGVLAAIGGNNPINDYYEYLIREKNYPDHYARNRACRRLAILSLGVFRSGKKYQPYRRDCVKGNKEIPSDL

SEQ ID NO: 112456 - protein, 466 aa, unidentified
MGKRSGGNEMTRGDRRRNARRERLRGLLPRGGAVIGIDLAEDKQALAVIDHDVRVLARKTVKVKAFRLGEALDWAVAAARVAGFRHVAVACEPTGPRWMQVQRLCAERGLPLVCVQPLVSHIAREQQDYTPHKTDESDCVLIGRLAAELHCYIPEELDETWAHLRHLGRRRAQLITAATASVQRIRDFLSVAWPTVTEACAGPFESVTWLAALQVVTARCGGDPARMAALGLEEFTALVRGAVPGWGGTRGVGRIWRRVFAALTDTEGVVAWSRRGLLRRCADELGDLARTRAQLRAVAADMVMVLGELGLSRLGDIPGLTAVGAAAILAETGDPRRYDSSSSLVKHAGLSPSENASGAFEGQAHISRRGRPALRLTAWRAVWPMLQFNPVMAAKYTAMTQAAGAAAADGGPQQARSAAAAARARRAKARVACAASLLRWIYSMVIHGTSWDAAAASGAACQPEAA

SEQ ID NO: 112457 - protein, 336 aa, unidentified
MSLYCGIDLHSNNHVVVIIDEEDKKRVDKRIVNDLEATLRLLSPYKKQIKSIAVESTFNWYWLVDGLMENGYHVELVNTAAVKQYDGLKYSGDHQDAFHLAHLMRLGILPTGHIYPKERRAIRDLLRRRRQLVRQSSSHLVSIQNQIWRSLGVRVSCNTIRKRDFNLPFEQTSYLYDSAQSNLIVLRTLAAQIDKIEARVVQAVSLENEYKLLTRITGIGPILGLTIMLETGSIARFKRAGNYASYCRLVKSLRESNGKKKGSGNRKAGNKYLSWAFSEVAHYMIRFEPKAKRFYERKKQKRNGIVAVRAVAHKIARAVFHVLTNKQEFNIERVFS

SEQ ID NO: 112458 - protein, 347 aa, unidentified
MIYIGIDVAKDKHDCFITNSEGEVLFNAFTIPNNADGFHDLFQKISSLTNDFSNVKVGLEATGHYNYNLLGFLIDKGLPTFVINPLHTNLFRKSLSLRQTKTDKVDAHTIALMMMSGVNLQSYSNTSYHNEELKSLTRYRFDKVQERAKLKTSISRLVANASKGHYNKEKAIEIRNAAKHSIGSNMPAKSLELKHTIRLIQELTSEIDEIECSIKSIMDEIRSPILSIPGINYRMGAMIIAEIGDFNRFSSPDKILAYAGLSPSTYQSGQLDGCYSHMEKRGSRYLRYALFNATKFVCIWDNQFSAYLAKKRSEGKHYNVAISHAAKKLVRVIYQLEKSGQLYHRAA

SEQ ID NO: 112459 - protein, 351 aa, unidentified
MEEYIAFDSHKRYTWVEHQEANTGKTRAYRLEHGAGAIGQALAGCAPGTAVAIEATANWYWIIDEIEQAGCVARLVHPRKAKLMMGLINKTDKLDAHGFNTLQRNGTLPTVWIPPGGLRELRELTRTRLVLVAQRTRWKNRITATLAKWGLPPSAYSDPYGKKARVELEQQLERLPEQTCWATRQMLAQLDSLSEQAQQFEKRLEELVEVTPMMQWLMTLPGVGVILGATIALEIGEIERFANAERLASYSGTTPRVHSSGDRTRHGRTRPDVNRYLKWAFAEAANSVAVNHRRNPERHVSRLYARLRAGKGHARAVGAVARHLAEAAFHVLQRKEVYRDPRLNPRPEMGV

SEQ ID NO: 112460 - protein, 421 aa, unidentified
MEETGEPAELVERVAALDIGKAALTACIRVPHEDKPGRRCQEVREYATTTRALLDLADHLRCQGVTLVVMEATSAYWKPPFYLLEAEGFECWLLNARHVKNASGRPKTDKLDAVWLAKVAERGMCAPSLVHPKPIRQLRDLTRYRRTLIRERAREKQRLEKILEDAQIKLSAVVSDLFGVSGRAMIEALIAGQRSPRALARLARGTLRNKTRILEEALTGHFGDHHGFLCQMMLDRIDGLSNQIGQLDARVEQAIAPYSHQVTQLDEIAGVGTTSAQELIAETGVDMSRFPTAGHLVSWAKFAPIENSSAGKKKGGSTGKGNPWIGGTLGEIVLGASRSHTFLAERYRRIARRRGKKRAIVATGNTVLTIAYHLLCDPAARYTDLGPGFYDSKAGRERHARNLIRQLEHLTGKKVTLNEAA

SEQ ID NO: 112461 - protein, 327 aa, unidentified
MAKRTTICAGIDTGKRKLDVALDGSSEQLQIDNTPEGYKVLLDWLRRHRVKRIGIEASGGYEQAVVAELRRKGIVVVVFQPAQVRAYAKFHLQRAKNDKIDAALIAACTAAVKKIHPPPDARLLPFAEHLTMIDQIGEDIALLKNRLETCRNARIQQVWKDDLARLAKRERVEFKALVAAIREHHDLAERLDLIYSVSGAGLPTAVAILVRMPEIGQLTREQAAALAGLAPYDDDSGKHVGVRHIDGGRERLRRALYTAALPASFRWNPQLITLYKRLTAAGKGHKRALIACARKLLIFVNAVVARGIRWDHERPPTIAATALPQTG

SEQ ID NO: 112462 - protein, 415 aa, unidentified
MGGRQQWYAGVDWGSQSHHVVLTDGDGRKIGERSFKHGGEGLAEMAAWLMAASCAAEPGQILAAIEVPHGPVVETLIERGFKVHAINPKQMDRFRDRFTMAGAKDDSRDAEVMASALRTDPRCFRSLAAADPIIVELREWSRIAEDLGVERNRLINRLREQLWRYFPALLELEDDLGAEWLLELWEAAPTPNTASRLREATIAKLLKRHRIRRFDAASVVNTLRRPPVRVAAGTVEAASAHVALLVPRIRLLNRQIKDAHSRIDGLTARLMPAEAAEPGQKKQHDAEILASLPGVGRTVLATLLAEASDALQRRDYAALRSLAGVAPVTKRSGKSCVVVRRLACHDRLANAVYHWARVAVQHDPRSRAKYAELRSRGHSHGRALRSVADRLLNVACAMLKSGAAFNPSSAAQKPA

SEQ ID NO: 112463 - protein, 391 aa, unidentified
MIFVGIDVAKDKHDCFILNSEGTVLADVFTIANNRIGFETLLSRIQSCSQGESKIKVGLEATGHYSYNLLGFLLDSGLATYVINPLHTNLYRKSLSLRRTKTDRIDARTIAMMLMSDVDLKSYSNTAYHNEELKSLTRYRFDKVKERAKLKSSVARLVNILFPELEKLVSSLHIAVVYALLSNYPGASYIANANTEELAETLCTASKGRYTKSKTAEIQVAAGVSIGSKMPAKSMELKHTIALIRELDKEISEVESAIDKITSQMDSPIFTIPGIGRHMGAMILAEVGHFSNFASADKLLAYAGLSPSTYQSGQLQNCYAHMEKRGSRYLRYALFNAAKYVCLWCPTFSAYLEKKRSEGKHYNVAISHAAKKLVRLIFAMQRSGKAFLADY

SEQ ID NO: 112464 - protein, 346 aa, unidentified
MMIIGCDFHPSWQQVNWVDSETGETGEQKLVHAEGQAKTFYQQLTPAALIGMEATGNSQWFIELVQELGHVILIGDAAQIRASYVRKQKTDKRDAAHMLKLLLENRFPKLWTPDRKQRDLRQLVLHRHKLVEIRSRVKNELQHLSLNKGMQRKAKLWSQAGQQRLRELVLKPWAGCRREDLLGLLAMLNQQIGKLDAAVQKAAEEHPQAKLLMTQPGVGPNTALGFVLTIGDVSRFARGKQIASYLGLIPREESSGGRQKLGAISKQGNRMLRSLLVEAAQIAVRFDPGYRKQYLHRCHQKPKGVAKVAAARKLAVRLYWMLRTQVSYPEIVRIESSSRVPLVSAS

SEQ ID NO: 112465 - protein, 349 aa, unidentified
MVILGIDAHKRTHTVVAIDEAGRQLGAKTTLATTTEVHLELVRWSDRFGSERRWAVEDCRHLSRRLEADLLAAGEQIVRVPPKLMAHARDSARTYGKSDPIDALAVARAALREPGLPIAQLDGHSRELRLLVDHREDLVRDRTAHINRLRWHLHELDPSWDPTPRSLVRYKSLDALTARLEGLEGTLPRIARDLVARIRELTIQANALEVEIVQRVSALAPSLLELSGVGGLSAAKIVAETAGVRRFKSKDAFARHDGTAPLPVWSGNRVRHRLSRTGNRQLNAAIHRIAVTQIRCHDGAKAYLERRMANGNTKTEALRALKRKLSDVVYKALIADAAPTVAACFGEAA

SEQ ID NO: 112466 - protein, 342 aa, unidentified
MKFYCGIDLSARDCHVCVIDEQLKIVVQQKLRNELPKICQLLAPYKANLKIVVESTFNWYWLIDGLQAEGFEVVLAHTLGLYLITGAKVKTDRRDAYALAKLLLVGAVPAAYIYPVETRPVRDLLRRRLHLVQVRAGEYGSLRRLLLRQGVLSSKQQEIKTATEAELELWFQHPLVRLHASQELRRIELYSEQIAELEKTILELAQTEHSYELLLKLPGVGQTLALTILYEVGELTRFANVKVFSSYCRVVPGIAQSGNVTRRGRASKQGNHYLKAAFSQAAVHAVRCYPKVRRYYERQLKRHQGRGRQMICYNIIAHKLAQAAFHVLKEQTEYREELLFGR

SEQ ID NO: 112467 - protein, 393 aa, unidentified
MPLAQMQLLHLLTAGNGMARPCSAIYLLSRVGRRKAKLKEHAMRTSQNTAESINTIGIDVGKNTFHLVGLDKRGAIVLQQKVTRHQLGRRLSNISRCLIGMETCSGTHFIARQLAALGHDVRLIPAQYVKPFLKGHKNDYRDAEAIAEAVQRPTMHFVSIKTPEQMDLLALHRVRSRLVRQRTGVANQIRGFLLERGITVRQGFMPLRKALPEILSSKSDALSPRMINLIGELIQDWRRLDDRIASVSTEIEAIAKRDESCQRLMSVPGVGPIVSSAVVAAIGNGTGFKQGRDFAAWLGLIPKQESTGDRTILGKISKRGNKYVRTLFVQAAHVVLERRPRTARQGLWPWIEQASKRLHRNMLAIALANKLARIAWAVLARGHAYQPRIIANA

SEQ ID NO: 112468 - protein, 354 aa, unidentified
MKRTTRYVAFDVHQATTVASVREESGRVIARSVLPTDSGALTEFVRGMRGARHVTFEEGTQAQWLYELLAPLVDRVIVCDRRGAPRQGNKGDQVDADHLSELLRRGALRAVYHGSADRATLKELTRTYRNLVEDATRVMLRLKALFRARGIATAGTAVYHPRHRARWLAQLLEDGARFRADALYAELDVLRTLRPKAKAVMVTEARRDPAWRVLRTIPFLGPVRVALLLATMQTPWRFRTKRHLWAYAGLAVVSRSSADYTLVAGAPVRRRRAPMTRGLNRNHNRVLKDVFKGAATAATARPGPLQDFYLGVLARGTREELARVTLTRKLAALTLRLWKTGERYDPTQLTTPAR

SEQ ID NO: 112469 - protein, 344 aa, unidentified
MDHFAGLDVSVKETSICIVDDAGKIVREVKVASEPEALLAVLKNPAYHFKRIGLEAGPLSQWLFSALAEAGLPVICVETRHMQAVLKAQINKTDRNDARGIAQMMRVGLYRPVHVKTLRSQKLRMLLTHRKLLQSKAIAIENDLRGTLRNFGLKVGLVGKVKFEARIRELVENLPDLAVLVEPMLIVQRTLREQIVILHRRLLAIVRDDEVCRRLMTTPGVGPVVALTYRATVDVPARFRKSKAVGAVFGLTCAKYQSGEVDRNGRISRCGDEMMRVMLYEAAQSMLRSKKWSWLKAWAMQIARRRGMKKAIVALARRLAVIMHRIWVDGTEFRWTREQAAAAA

SEQ ID NO: 112470 - protein, 342 aa, unidentified
MFYAALDVSLRSVAVCIIDDEGKVRFERSVPSDVPDLVRCLNAFGEPIHQVGLEAGTLTQHLTYGLREAGFEVVCMEARQVAAALSAMRNKTDKHDARGIAQILRSGWYSRVHVKSVESHHLRALLTSRKVIQRKCIDLENEIRGLLKVFGVKLPMRLSRGAFDVAVRDTIESDPGLSRALLPMLHARQMLFATFMELDRRVRKAAHEDEVCTRFMGIPGVAEITALSFKAAVDDPARFKSSRTVGAHFGLTPRRFQSGEKDNPGRISHAGDSDVRAALYAAANAMLMRSIKWSSLKAWGMRLMKTKGRRRAIVAVARKLAVVLHRMWADGSEFRHGSEVAA

SEQ ID NO: 112471 - protein, 315 aa, unidentified
MQTPPGIGADISKDYVRVSCATGSLPSIGLANRRASLLAWLKRLPAGTRIGMEATGTYHELLATLAHRLGLVVYVLNAKHVHHYAQATAQRGKTDRVDAELIARYVAKEHSHLHIWHPASPAQRQLQRLMRRRGKLTRARAALRSTLQGVPSLRTDVRVLLKHFDALIAKLDTQARALLKASVEREQAFQRLDAIPSVGSAVGIGLLAALERWSLPRADSFVAFIGLDPRPDDSGKRSGRGRLSKDGDPELRRLLYTAAMSASRTRVWAPVYQRALARGLSRIQALVILARHIARTAWSVYTHKTQFDPARVHSS

SEQ ID NO: 112472 - protein, 309 aa, unidentified
MEIIVGIDVSKDRLDVHVLPSGEAFWVSNDHAGVEDLIERLVGLSPSIVGLEATGGFERLAVATLAGAGLAVVVVNPAQVRAYANALGKRAKTDPIDAAVIAAFVAATKPQLRPLRDTETEALAELVARRRQIVQMMVAEENRARTTTAKQAQKSIQRLLVALRRELASLDADMDDHIRKSPVWRVNEKLLSSVPGVGPIVARSLIAEMPELGSLDRRQIAALAGLAPWTRQSGKWRGKSFIGGGRSRVRAVLFMAALVAIRHNPVLKAFRDRLVAAGKPKIVAVVATMRKLLTILNAIVRDQKPWQTA

SEQ ID NO: 112473 - protein, 310 aa, unidentified
MEAIYVGVDVSKDRLDVAVRPSGEAFVVTRDGKGLNELVERLQGMAPTLIAVEATGGFETIVAAAIAGANLPLAVVNPAQVRHFAQAVGQRAKSDPIDAAIIARFAEAVKPEPRPVPDADARLLMELVSRRTQIIEMLVAERQREKRADAVRVRKSLARHIATLEKELPVIDRDIDTLVRGSPVWREKEDLLTTMPGIGNTLARTCLAQIPELGSLDRRKIASLVGVAPFTRQSGRWRGKSMIGGGRAAPRAAVFMAALTASRCNPVLRAFYRGLLARGKPKMVALIAVARKVLTILNAMLSDKKQWQPA

SEQ ID NO: 112474 - protein, 314 aa, unidentified
MKKAVEVYVGIDVSKAWLDEAVHEQKEVTRFSNDDAGIANLVKVLKKRKPKLIVLEPTGGFEMLVVAELSQAGLPVAVVNGKRIRDFAKATGQIAKTDKLDARVLAHFAAAIRPEVRPLRTEEEEQLTALLTRRRQILDMLTIEKNRRVSVRAKMRADLEAHIHWLSDNLKELDQEIEEFVKGSPAWKEKDTLLQSVPGVGPVTSATMLGMLPELGLLNRQEIAALVGVAPMNKDTGNKQGKRRIYGGRADVRSVLYMAALSAKKHNPFIRKFYQRLIQHGKEKKVALTACMRKLLVILNAMVRTNQPWRSQTA

SEQ ID NO: 112475 - protein, 346 aa, unidentified
MVLIGCDYHPSWQQVCWFDQATGETGDEKLVHASGDAEKFYRRFSSPVRVGIEATGNCQWFLELLNRLGHEVWVGDAAKIRASDSRQQKHDKRDARLLLQLLMEDRFPRIWTPTREQKDLRQLLIHRYKLVGLRARVKNELQHLAMNQGVTKKGKLWSKAGEKVLRELPLAPWASQRRKDLFRVREMLNEQIDLLDQAVVEAAEKNQKARLLMTQPGVGPITSMAFVLTMGEVSRFQRGKQVASYLGLIPREYSSGGKQRLGSISKQGNRFLRMLLVEAAQAAVRYDPGFRNEYLHRCHKKAKGVAKVAAARKLAIRLYWMLRTNTGYPEVVRVESSSRVAVVGAS

SEQ ID NO: 112476 - protein, 344 aa, unidentified
MRYFAGFDVSLEETAIGIVDETGRLVREGKVATEPAALDAYMRAGGLPIERVGLEAGPLSTWLHGELTAGGWTMVCIETRRLRAVTRAMPVKSDRKDAEAIAQAMRTSWYRAVHVKSAESQRIRVLLRNRKILQAKRLDIDNEIRGTLKAFGLKLGKVGRAGFAGRVRELVAGEAVLEAIMPPMLEARSALIAAFDKLHRQVLAIVRQDPVCRLLMTAPGIGAVTALGYKTAVDDPHRFRHSADVGPHFGLTPRRYQSGETDYSGRISKCGDAMVRALLFEAAMAVLYRVKAASRLKTWGRALMRRIGARKAATALARQLAVVLHRMWLDGKPFNPKPLHAAAN

SEQ ID NO: 112477 - protein, 368 aa, unidentified
MKKGSKKQPAMETTKDKPGMTLGLDLGDRYSRYCLLNEECEVVEEGRIQSTESAFRRHFEGEPRLRIALECGTHSPWISRLLKTLGHQVIVANARKIPAITASESKNDRNDAELLARFAAHDPRLLSPVQHRSLQRQQDLNLIQVRSTLVRARTMMANALRGLVKSAGGRLPACSTESLAARAQAAIPPALRAAAVPLLEQIALLSRQIDAMDGQIERLANKYPEIRVLRTVPGVGPVVASAYVLTLDRPDLAANRSAGAFLGLRPRQSQSGESDPQRRISKTGDSYLRSLLVQSAQYILGRFGPDSALRRWGLKLAASGGKRGKKRAIVAVARKLAVLLHSLWRSGQSFQPFPQTEAPVGVASNLNR

SEQ ID NO: 112478 - protein, 467 aa, unidentified
MTPHKDYVLDPCPPAPTPTLPPSPVLSEALQSCHPHAAGIDIGEAEHWVAVPPGCDPQPVRRFGTFTADLDALADWLIDCGITTVAMESTGVYWIPLFELLEARGVQVLLIDPRQAKRAPGRPKTDRLDCKWLQRLHTYGLLAGAFRPEPQVCVLRGSLRHRQMLLTSAAHHIQHMHKALQQMNLKLTQVVSDITGATGMAIIKAIIAGERDPVTLATLRNPHCHHAEDDIAKALQGTWHAEHLFALQHAVALSAFYHQQLALCDQQIKAHLETCADKSAGQPLPPKARRHKQTNEPRFDARTPLSRMAGVDLTTIEGIEANTALLILSEIGTDMHRWPSVKHCCRWLGLCPQHKISGGKILSRRVRPGAHRVTVALRLAARSLHHSQSAFGAFFRRMKARLGTPKAITATAHKLARLVYRLLKHGTAYVQQGMEAYETHYRERTVKAMARHAKTLGYALVPLAEQG

SEQ ID NO: 112479 - protein, 321 aa, unidentified
MHTYHLGIDVAKAKLDCALLRPDGKYRNKVVENNLKGFNVLTAWLKKQAATQPHVCMEATGIYWEAVAGHLAVQGMTVSVINPAQLKAFGKSRLVRTKTDKLDARLIAAFCQERSPAPWQAPSASEQALRAMVLRLDALKTMRTQESNRLEVARDAVKAGIAHHIDWLDIEINTLSKMIHTHIDNDSTLKNKERLLESIPGIGERTIAALLAYYANPACFGNARQAVAYAGLDPRQHQSGSSVNGKPRLSKIGHAFIRKSLYMPAMVTLYKTDWGKRFRNRLSATGKAPKLIIGAMMRKLIHVVFGVLKSGKMFSPELHMG

SEQ ID NO: 112480 - protein, 391 aa, unidentified
MVCVGIDVAKDKHDCCILDSDGMVRADCFTIPNNMDGFKQLLQTIRNCTKKSDKIKVGLEATGHYSYNILGFLLDNGLPTYVINPLHTNLYRKSLSLRKTKTDRVDARTIATMLLSDVDLKSYTDIAYHNEELKSLTRYRFDKVQECAKLKQSVSRLATILFPELEGLVSSIHGTSIYALLSEYPGTKQISEVHLTKLTNLLTTASKGRYRKEKAIQIREAARASIGSVMPAKSLELKHTIKLIQELASEIDEIEDSIQKIIDELNPPILSIPGMGVNSAAVILAEIGDFSNFSSPDKILAYAGCSPSTYQSGKLTNCYAHMEKRGSRYLRHALYNATKYVCYWNPVFAEYLAKKRAEGKHYNVALSHAMKKLVRLIYALQKSGKTYLTAA

SEQ ID NO: 112481 - protein, 400 aa, unidentified
MRVVFGIDVSKVSSEVAILVNGEKVHNYTMSNDAIGFSRLLGDLKTVHKPEIIFEATGVYSRRLQAFLEDNGYAYTRLNPLEAKKQLDSLRVRKTDQIDAEKLAQSQFVLNRKPTYVQKEIYQNLRDLSRFYQNLTEDIVRAKNRLHKVVQVTFPELETILSTPSGQQYWNLVIAFPCKECVLELSKNELSKSIRQSTSKRISDKRVTYLAEKLTALANQSYCAVKKNSPILEEVRYYAKELLRLSEQRQTVLDQMVELAQPLPEYDILLSIPGIAETTATSIIGELGDIRRFQSANQINAFIGIDLRHYESGNFLAKEHITKRGNPYARKILFKCIHNIASASHTNPCHIADFYEKRKRQSQTTSTKPHTIASIHRLIRTMYYLIMHNKLYDYASTQNR

SEQ ID NO: 112482 - protein, 414 aa, unidentified
MGLPRWVGRAIGLDVHRDFCVVAICEDGRVRSAGRVPATPEGIGALAQSLVPSDRVALEVTGGCWEVARILEPQVNRVVVVSPDDTGITSARAKTDKLDARALASLLWKGELEAVWMPDERCRILRRRLARREQLVRSRTRAKNEIHAVLQRRLQGKPPCSDLFGVKGREWLATLELPLEERESVDACIRHIDFLDAEIAQVEKLIAQQALSWPEIRRLMTVPGVNLICAASFVAAVGDPNRFLSSRKLVAYLGLDPRVKQSGEGPARSGRISKRGSPSARWALVEAAWTAVLQPGPLHAFYVRTKNRRGHGKAIVATARKLAVLFWCMLTRGQDYAHQQPSLTRKKLRRLEITAGAPKYTRRAAGVWSTNDLMRDAELELAHQAETSYQRLVQDQQAGAPARKAGASVTLERA

SEQ ID NO: 112483 - protein, 328 aa, unidentified
MRPGPADPASLGIDVAKATFEAALLIHGRLLQRSFAMTAQGFDSLHTWIGKQGVEQAHACLEATGEYGAALALSLYAAGHVVSIVNPARIAAYAKSRLARTKTDKADAGLIAHFCSTQHPVPWTPPPAEVRELQARVRRVEMLQEMAQQEVNRLQSGLHSPAVRASMEATLAFLRQEIDAMQRLVQEQLEQSADLQHKQRLLCSIPGIGRWTAARVLAESDQVRTSVSARQLAAYAGLTPRERTSGTSVRGQTRLAKTGNSRLRRALYLPAIVAIRHNPAVRAFAERLRARGKPPMVIVAAAMRKLLHLIYGVLKSGKAFDPALALAA

SEQ ID NO: 112484 - protein, 429 aa, unidentified
MQESPLSAPAEGVAAYVGMDWADQKHDVILRAASEPAKVEYRRLAQQPEALMEWVAELQQRFAGKGKILVALEQSRGALIYHLMGYEFLELYPINPSQLASFRATFSPGGAKDDRPDAELICELLYCHRDRLKAWKPDDELTRKLTFLNEGRRTAVDQRTQLANEMKSQLKLYFPLALQVLDNDCSTALAADLLLQWPTLDSLQKPSAHKLRKFFYAHNCRQEQKLLERLELIKAAKPLTPDLAVIEPTALRVQLLAQQLKSLLPYIARYEKLIAELFDAHPDSFLFRDLPGAGSALAPRLLTAFGTDRERFEHSMEISSLSGIGPVRRASGKKSGKHATVHFRSACPKFLRQSFHEFAACSIRYCSWAEACYQTQRNRGKGHHAAVRAVAFKWIRILFACWKQRVPYDPQRYQQALQTRGSEYAEITA

SEQ ID NO: 112485 - protein, 321 aa, unidentified
MKTVLGIDQAKKKFDAALLINGKYKSKVFENNPTGFSALLAWLVKNDVETVHACMEATGTYGEALARFLHEAGHSVSVTNPTRIKAFGQSELLRTKNDKTDAKLIARFCEKMNPTLWQPSPAEVEYLRGLGRRRDALVSMRTQEINRQETSNETVNSSVQTVLECLNKEIEQISKLIKDHISKHPDLKHKHDLLNSIPGVGPATIEAILSEINAFEGFETIEQVVAYMGLSPKEHTSGTSVKSKSAICKIGNARLRKALYMPALSATIHNPIVKALYDRMKAKSKNGMVIACACMKKLVHLIYGVIKTNKPFDPAYALKTT

SEQ ID NO: 112486 - protein, 342 aa, unidentified
MKQYVGLDVSQRETSVCVVDDAGRSVFQGKVKSDPGALTELLRKRAPHAERIGFETGAMSSWLWHELKRVGMPVVCIDARHAKAALSVRMNKSDENDARGLAELVRVGWYREVKVKSTESQATRSLLVARSRLIAIRRDLENQVRSMLKEYGLQFSRSIGAQFRRKVVALVVDGHQLRSVIEPLLTVHEQACREQEKLDRQVRRLAREDDTTRRLMTVPGVGVVTALTYRHTIDDPSRFSSASDVGAYLGLTPRRKQSGETDVNGRVSRWGDRLLRTYLYEAASVLMHRTKKWSTLKAWGVRLSKRIGMKKAKVAVARKIAVLLHCLWVDATSFEWGGEKMA

SEQ ID NO: 112487 - protein, 317 aa, unidentified
MEVPHIFVGIDVCKAQLDIAIRPTAQILSVPNDKAGIKTLVKHLEKLRPTLVVLESTAGLERQVMLGLVGAEISVVMANPRQVRDFAKSTGQLAKTDRIDAAVLAHYAEAIRPQPRPLPDELTLKLRALTVRRRQLIDMIVAEKNHLATASKAIKKRITAHISYLEQELDDADQDLDRFIEKNPLWKQNQEILCSTPSIGPVSSRTMLAELPELGTLGRKQISALVGVAPFSRDSGTLKGRRTIWGGRASVRNALFMAALVAIRFNPVIRDFYKRLKAKGKPSKVALVACMHKLLTILNAMIKNKTRWSDNFSLKTA

SEQ ID NO: 112488 - protein, 423 aa, unidentified
MTSMTLDPPLTNPLPPGSELVAGVDTHKKTHHVAILDLVGRPVADREFRADGRGYAQIVAFLHAHGDVVRIGVEGTGSYGAGLARALTTAGLTVIEVARQDRQARRRRGKSDPLDAHQAAVAVLAGTDTAIPKSGDGAVESMRILLAERRSAAKARAQVMNQIHALLITAPELVRQAFRALSGQRLVNTLAKTRPGTITSPDPAVVARQTLRRFAVRHLTMQAEIDLIEQQLEMLVRQVNPTLLSLSGVGPVTAATLLVAAGDNPERLGTRASFAALAGVAPIPASSGQRTRHRLSRGGNRHANAALHRIVLLRMRHREPRTMAYFERRRSEQLTDRDIMRCLKRHVANEIYAALLNPATDNPVGRELRARRQAKGIPISVLAATLGVPYQRLRRLEIGTRADPELEARATAILEQISPPLAA

SEQ ID NO: 112489 - protein, 346 aa, unidentified
MMIIGCDYHPSWQQVCWLDTATGETEERKLEHASGEAEKFYRGLPGHALIGMESTGNCQWFVEMATTAGHDVWIGDAAQIRASEVRQQKHDRRDAVLILKLLMEGRFPRIWTPSGQEKDLRQLLIHRYKLVRIRAQVKTELQHLAMNQGVTKKRKLWSKAGERVLRELPLKPWASRRREDLLKVREMLNGQIALLDQAVVEAAEKNEKARLLMTQPGVGPITSMAFVLTMGDVNRFQRGKQVASYLGLIPREYSSGGKQRLGSISKQGNRFMRMLLVEAAQGAVRCDPGFRNEYLHRCHKKAKGVAKVAVARKLAVRLYWMLRTNTAYPEIVRVEGSSRVALVGAS

SEQ ID NO: 112490 - protein, 326 aa, unidentified
MADVLGVDISKTEFDVALLQAGRTQMGRFANDVQGFAKLRRWLKKQGVDTVHACLEATGTYGEALAEFLYAAGHQVSVVNPAQIKAYGQSQLTRNKTDQADARLIAAFCASQHPALWTPPPPEWKELQALVRHLDSLKTMRQQERNRLSAGLSSATVEKALHEHLAFLDHQIATLEQQIHDHLDQHPDLKRQHKLLKSIPGIGDVTAFTLLAEVRSIPAFDSARQLAAFAGLSPRQHRSGASVRGKTRLAKTGSARLRKALYLPAIVAKRHNPLIAAFCQRLADRGKPPMVIIGAAMRKLLHLVYGVLKSGQPFDPDYGLKSAPLP

SEQ ID NO: 112491 - protein, 341 aa, unidentified
MRTIGIDTHKASLAACLVDELGQALEERTFGNDPAGHAALLAWAGAVAPEALVGIEGSATFGAAAGRYLEAGGRSVREVPPQLSCRERRRTRRAGKSDAGDALAIARVTAREPHLPPLRPADRTRQIALLVEARDDLVVEATRVRNRLHADLVVLVPGYEGTVANLVAERNRRAVGRLLRGWRGIQAELARDRLRRLGHLVAEARALEDRLERLVGDHPLRSLPGCGTLVAAKLIGETGDPSRFRSADAFAMLAGVAPIPASSGQTRRMRLNRGGNRQLNRALHSIALAQAWHHAPAREYIARRRAEGKTWREAMRALKRHLARVVFRLLCLGAQEATLAA

SEQ ID NO: 112492 - protein, 318 aa, unidentified
MPSAAPAFVGIDVAKAELVIAIRPSGERWTMANDAVGIQTLVQRVRVHAPTLIVLEATGGYERAAVAALAAAQLPLVVANPRQVRDFARATGQLAKTDRIDAGILALFAERVRPAPRALPDDAAQALDALLTRRRQVLEMLIAERNRLEHAAPAVRRSITQHIRWLERQLHDVDRDLDNTIQTSPVWRAKEDLLRSTPGVGPILSRTLIGELPELGTLPRKQIAALVGVAPLARDSGTLKHKRLVWGGRAPVRAALFMAALVGTRCNPVLRAFYRRLLAAGKPKKVALTACMRKLLTILNAMVRTNTTWRHIDPSPFS

SEQ ID NO: 112493 - protein, 305 aa, unidentified
MVEKRLPNELEKILALLSPWRAELVGVVVESTFNWYWLVDGLQAAGFAVHLAHTTAIKKYDGLKHSGDQADARHLAHLLRLGILPKGTILPPEQRAVRDLARKRMQLVRSRTTHILAVENIMARQRGARITSNQVKRLTADLIDQLGLAEDVALAIKANVAIIASLNSQIDLLEKRLQERVGERLEYALLTTTPGIGQVLATTILLETGPIERFGATGNFVSYARCVDSVHTSNGKKKGEGNARNGNKYLAWAFVEAANFALRYCRGEALLRTEEGQDKQRGSGQGAGAQAGPGVLPHTEGAPAF

SEQ ID NO: 112494 - protein, 341 aa, unidentified
MDKITTIAIDLAKHVFQVAAENARGEEVWQKRLRSRAALHAFIEGLSPPLKVGLEAGLGAQAWARVLAARGLEVHVLPAQRVAEHRSGAKNDCNDARAILRALHDRSIHPVPVKSTVRLMMQALLRVRAGWQRRHTAVANQMRGLLLEHGVAIAQGDAALTRALERVLPDAQVPIPGRVRALLAELAGEWEGLSQRVQAMDPELAELARADPVARRLCTIPGIGPVTATALVCKGLDPVRFRNARQFAAYLGLIPDQHSSGTKLRLGRMSRRGDRYLRGLLVSGAHAVLRHTRRDALDAGHRRILHWQQRHGSKAIAVRLANHNLRVVYALLRDHADYHAA

SEQ ID NO: 112495 - protein, 417 aa, unidentified
MRAQKHPNGLRSTLEKRKRLIPFYLLEFEQNVRGTIFQYTLDIQSGEKTKGDFSLLVFQLFHMKRLLKQVVGIDVAQKELVVSIGRIHDDLLPEIYGHHVFSNTSKGFEALITWVNKRSEPLTVMQYVLEATGVYHEKLTYFLHDRGYGVSIILPNRISSYQRTLDIKTETDKTASEAITMFGLERKLQNWEKPKPVFKKLQQLTRERDQLIHTRTLIKNQLHAEQSEAEPNPGSVKRLKQQIALLDKQEKEIQAEIQSQVESDQAVKKAIKNLCSLPGVGVLTAVVVLAETNGFELIRNKRQLASYAGFDVKEKQSGTSVKSKPRISKRGNRHLRKAMHFPALAAIRKDERFKAIFARLVAKHGIKMKAIVAVQRRLLEMIFVLYKTGTTYDQNYLQRIGKVESQNIENEPIALKN

SEQ ID NO: 112496 - protein, 410 aa, unidentified
MKVLHRRCAGLDVHKAEVVACARVFAGRKVVHEVRRFGTTTRELMALAAWLKSLEVTHVAMEATGVYWKPVWHILEADFTLILANAQHVRNVPGRKSDVNDATWIADLLAHGLIASSFVPPQPIRELRDLTRTRRQAVSEAVRHQHRIEKILQDANIKLSSVLSDPMGVSGRRMLAAMAAGETDAGKIAELGSPRLECGRGALIEALSGRVSEHHRYLIGWHLRLLDEIEAKIAELDQRIEAQIAPFRAAIERLTGIPGIKQVAASAIIAEIGADMSIFPTAGHLLSWARIVPRLDESAGKKRSRRVKKGGAWLKPVLVQCARAAARKRDSYYGAQYRRLKARIGDQKAIIAVAASILTAIYHMLRDGTEHADLGAAYLSRREGDSKAIAHQLARRIRALGYQVDLREAA

SEQ ID NO: 112497 - protein, 337 aa, unidentified
MNVTTIGIDLAKSVFQLHGVDEAGEVVFRKKLRRGAVLDFLRDLPACLIGLEACATAHFWAREIGTLGHEVRLIPPAYVKPYVKRQKNDAADAEAICEAVTRPSMRFVPIKSAKRQGVMMLHRTRDLLMRQRTMMLNAIRAHLAEFGIITAQGPHKLAALLDTLDEGRLPAIARSALTSLTAQLDSLAAEIRTLEHQLMAWHRTDETSQRLETIPGVGLITATALSASIPDPSVFKTGRQFAAFLGLVPRQNSSGGKERLGRISKMGDGYLRRLLVVGATSVIRRVGTNTSATGEWVRRLLERKPARVATVAMANKTARIAWAVLARGETYRAPTMV

SEQ ID NO: 112498 - protein, 342 aa, unidentified
MENVILVVGIDISKDDFHVCAKEKTADGNAKVKGSRSFKNNDKGFAELALWVLKREKSGGSVRYIMEATGSYYEDLAYYLYEAGNRVSVVLANKIKHFAKSLNVKTKTDKVDSAVIAEIGVEREMPEWRPMSSKYKELRDLCREMLSLKKEKSRAMCQLHAMNYSHDKTPSVVKIKKLQIDFYEETILEIEAEIERLVNADLELKRRIDKIQKVKGLKMNTIIVVLCETNGFQMFESIRQVVSYAGLDVVMKESGNFKGKTKISKKGNNRIRQCLFMPAMSAIQHNAKIKDLYSRIIERNPDIKRKGVVAGMRKLLILIFVLWKKNEEYDPNYVWQKNDIGK

SEQ ID NO: 112499 - protein, 346 aa, unidentified
MKHLNTIGVDLAKNVIQVSVVSARGKELINRSLTRTKFAEFVGKQETSLVAFEACATSHYWARVAKRHGHAVKIIPARAVFPFRQGHKTDPNDALAVAEAAVRPKVMEAPLKTVEQQGLQAVQRSRELLVKERTALSNHVRGLLMEFGIVIPQGFAALHRQVPEVLEDGENELPDMYRPTLQRLYVRLCDLREDLGFLDKQIDELVKQHSSCQRLMAMEGVGPISSILLFATLGTGEAFRNGRQFSAYLGLTPKQYSSGGKTNIVGISKKVANKRLRSVLIQGARSYVHKLKEPRSPKDQWLWSLIQRAGHGKAAVALANKNVRTAWALLTEGTEYDRQRGRIQTA

SEQ ID NO: 112500 - protein, 367 aa, unidentified
MKKVSTAATKQSKNFSEQKLTIGLDLGDQSSWYCVLDATGSVLLEQRLSTTPKAMKEVFGAMPHSRIALETGMHSPWVSRALGELGHEVIVAHARNVRLIGESRKKDDRRDAQTLARLARIDPQLLCPVKHRSAKAQADLTVIRARAGLVRARTALINTARGLTKSYGERLRGCNPRNMNPEKVRGLSPELQRALEPLLAAVESLSERIRESNQQIEKMAAESYPQVAQLKQVKGVGTLIALTFLLTLEDAHRFRKSRDVGCYLGLQPGRRNSGQSEPQMHISKEGDPYLRTLLVQGAHHILGPFGADSDLRRWGLKLAERGGKSGKKRAIIAVARKLAVLLHHLWVSGEVYQPLRPSKPAAMPAAA

SEQ ID NO: 112501 - protein, 331 aa, unidentified
MEVKEVVGIDVGKEENEGRIHSSQEVLTFENNKKGFKQLLSWVSKNTALDSQQILYAFEHTGLYSFPLALFLTENNYHFVLLPGLELKRSMGITRGKSDKIDAKRIARYTYEKRESITPYQMPIEEVVQLKRLLSLRERLIKQCSGYKASLGEYKHFLTKKDNSALFEVQESMIKALKKQIDKIDKELDNIIKGNGKLKKMYDLILSIKGVGPQTALFMIAYTNGFSRFEKWRKFASYCGIAPFPYTSGTSIRGRTKVNNLANKKIKSLLDLCAKSSIQYNMEMKKYYEKRIEEGKNKMSTINIIRNKILSRIFAVVQRETPYVNTLAYAG

SEQ ID NO: 112502 - protein, 435 aa, unidentified
MKVKAVSVFRERGLRAGVSRRAEPQCLVGNANIERKTDTMKSYILLKPEPVQSQISIAPAVAKPFVLFIGLDVHNDSIAVSIAPGDSAEVRRYGILGGEHDDVLKLVKKLQAAHPGATLKFCYEAGPRGFALCRCLRSHGLDCILVCPSQVPRKPGERVKTDRRDADQLARLFRAGELTGIYVPEPVDEAMRDLIRARFQVGKAQHRARQQLKMYLLRHNRRYAGKSSWSPAHLRYLAQIKMPFPVQQIVFQEMLEVISEATGRLERYDQEIERAVPGWRWEPVVRALMSLRGMALLHAATLVAELGDFNRFEHPGQLMGYLGLVPSEHTTGNDRQQGGITKMGNAPARRALVEAAWQYRAPARLSPHLKKRQEGLPKTITDIAWEAQRRLHHRYTHLTRVGKKKSQVAVTAVARELAGFVWAIARQVKPHAAKP

SEQ ID NO: 112503 - protein, 376 aa, unidentified
MLYVGIDVAKNKHDVTALNVQGKTVLKPLTFSNNKAGFELLDLSFRQLNQDCLIALEDTGHYAFNLLNFLHEQGYKVYTYNPLLIKEFAKSLSLRKTKTDKKDAHGIALKLLSDPNREQFQHDNRQVELKILARHIHRLKKKQSDWKVQYTRCLDIIFPELDKIVGKHSEYTYQLLTRYPNPQKRLEARFDKLIEIKRLTASKIQDILSIAPRSIGTTSPAREFEIIEIIKHYKRLIDKAETCVNDLMAEFNSVITTVTGIGGRLGAVILAEIRNIHAFDNPAQLQAFAGLDSSIYQSGQIDLAGRMIKRGSPHLRWALIQAAKACARFSPAFKAYLKTKLEQGKHYNVAIIHLAKKLIRTLFYILKKSCHLTNKK

SEQ ID NO: 112504 - protein, 324 aa, unidentified
MNLPPLGLDVAKLKFNACLMRAVGKLRHKVFPNNPDGFTQLCDWLKKQGVTRVQACMEATGTYGDSLAAYLHEQDHLVSIVNPAAIKAYAQSHLSRTKTDRVDAALIAGFCVERKPPAWHPPAREVQELQALVRRLESLVEMRTAEENRLSSGISVGAVRESVEELIVHLSEQIKRTGALIREHIDNHPDLKRQRELLDSIPGIGETTAAALLAEVPDFSQYKSARQVAAYAGLVPRERQSGSSVRGRTRLSKIGNARLRRALYFPAITALRCSPFFQAWAEGLRQRGKCKMSVIAAAMRKLIHLAYGVLKTGKPFDPEWGKIA

SEQ ID NO: 112505 - protein, 356 aa, unidentified
MSHDVKYIGMDVHKEAIVIAVLNGRGELVMETIVETKASSILQFLHGLQGELHVTWEEGTWAAWLYDLLQPQVEEVVVCNPRRNALLKEGSKSDKVDARKLSDLLRTGMLRPVYHGENGLRTLRELGRSYQTISKDLTRVMNRLKALYRGWGIPCAGTQVYAPRYREEWLSKIVQAGVRRRAELLYQQLDGLQGLRRNLRPEFVAESRKHKAAKLLRQIPCIGPIRAARLIALMQTPHRFRSKRQLWTYSGLGIETHDSAQFRFVRGQLQRSKKPQQLRGLNRNHNHEMKEIFKSAATRASCGMGPLHDFYAALLAKGMNPEMARLTLARKIAAITLTLWKKEERFDAEQLKTQAA

SEQ ID NO: 112506 - protein, 375 aa, unidentified
MREKLRFLGLDVHAETITIAIAEPDGSVRSLGTIANREDSIRKFIKKLGSPEQLRACYEAGPTGFVLYWQLTQIGVDCTVVAPSLVPRKPGDRVKTDRRDALKLARCHRNGDLTAVWVPDEASEALRDLVRQREAAKQDQLRARHRLTKLLLRTGQRPLGVKAWTERYWRWIEQVRYTQPAQQATLRDCLNEVQHMSARVKRLEEAILEVVKLAPQAMQELIGGLQALRGIAHISAVTIAAELGNISSRFQSARKLMGYSGAYPEEDSSGDRIRRGGITKAGNAHLRRIIVESAWCYRHWPRVGAKLRKRQQGLPPEIIEIAWKAQNRLYKRYLKLSMAGKDQRKVMTAIARELLGFIWAIAVKAERVSTQPIAA

SEQ ID NO: 112507 - protein, 411 aa, unidentified
MPKIVYPICCGIDVHKSFVVARIATTDKNLVTTYSKSMRFSTFTNDLRRLAQWLADNNCKDVCMESTGKYWIPVYNVLESTCNVVLAHPKYLKAIKGKKTDKRDAKWIADVFKFDMIHGSFIPPPDIRQLRDLVRYRFKLTSYTTGEKNRAQNCLTVSNIKLDDVFSDVFGKAASAITERLLESNEPFDVTPYLTKGIKASPEEIQDAVDGIMCAQQAEKLRIIRSHMDNLELCKANLESEILAVAEKYLPQIELVLTVPAVQIYSAVAIVGEIGVDMSVFETSRHLCSWAGLAPQNDSSAGKKKTTRISRAGAYIKPLLVQCANNAIRCKDNPEIANRYNAIKKRRGHKKAIIAIARMLLTAIYNILKKNEPYNAELYRKANLPPVQREVTVEQAIYILQRQGYLVTASA

SEQ ID NO: 112508 - protein, 341 aa, unidentified
MRKTLFCGVDLHSNNAMYVITDGRDKPLFQRRLPNQLPLVLELLEPFRERLKVVAVESTYNWYWLVDGLMDHQYPVVLANPSEMEQYNGIKEADDLTDAAYLARLARLDILPTGYIYPRQDRPVRDLLRRRMLLVQQRTGIMLSLQNLVMRQTGRSIGWRDIRKLSGPERVALLGDHDCLTFVADQQVDLIEQFSKKIKRFEKKVLEHAQTQAAYERLQTMPGVGPILALTILLETGAIGRFKTVGDYTSYCRCVRATHSSNGKKKANNNSKNGNAYLAWAFVEAVHHAIRTCPKAKSFYDRKLAKRNGALATKALAAKWSKAAYYIMKRQEAFDLTRVFG

SEQ ID NO: 112509 - protein, 401 aa, unidentified
MTVVGIDVSKGKSTICILRPYGEVVESPYDVLHTEKNLASLVSTIQTIDGEVRIVMEATGAYHLPLLSVFKEAGFFVSVINPLAMKKYASATLRKGKTDKMDSIRIANYGIDHWFKLVDYALPEDIYEELRLLGRQYSYYVKLRVESKLAISNLLDRTMPGIKSLLSSNRSEAPTKDKLCDFVAEYWHFDNITKKSETQFVRSFCSWAKKKGYHASESKAKEIYALACSGIPTLPSNAPSTKMLVLEAVRVQKEINRTLETILSQMYDLAIALPEYDVVRSMNGVGDILAMRLIAEIGDVRRFHSSSALIAYAGIDSPPFQSGSFTGTKRNISKRGSSLLRKTGYEVMKCLKTVKPTEDAAVYEYMLKKEAEGKPKKVAKIAALNKFLRIYYARVNEVYAA

SEQ ID NO: 112510 - protein, 423 aa, unidentified
MVMRKAGTGKVKHVKDDTLIVAVDIGMEMNRGYCTTADGRDIKPFKFENTREGMDKLWGMVMASNNRFKCNEVIVGYESTGPYGEPFLHDLLKKDVKIVQVNPMHTKRVKEINDNSPLKTDDKDPRVIADIIKLGRALSVVIPEGDAAYLRRLNNSRERHVRERTALLNQLQQLVFLLFPEFKKVFKNIKCMTPLYLLKTYPTPESISALNKHDLGEEMRKQSMGKFNECHADMLINLARNTIGLKEGVSGLSLDIRHILVQLEMLKDLIDEIESEMETTLERIPYSSKLLSIKGLGIVSVAGIIGEIGDFKKFQTRGEIMKLAGLDLYEISSGKMKGQRRISKRGRSLLRKILYYVAIQTIRKNGIMHDYYTKLTDGGMKRMKALVAVSRKLLGIIYAIVRDDSEYLVNFEPVKRQVIKKAA

SEQ ID NO: 112511 - protein, 402 aa, unidentified
MNAVGIDVSKGKSMVAIMRPFGEIVSAPFEIKHTASDIHSLVELINSVEGESRIVMEHTGRYYEVLAHQLSEANLFVSAINPKLIKDFDNDSLRKVKSDKADSVKIARYALDKWQNLKQYNVMDELRNQLKTMNRQFGFYMKHKTAMKNNLIGILDQTYPGVNTYFDSPARSDGSQKWVDFASTYWHVDCVRKMSLNAFIDHYQNWCKRKKYNFSQSKAEEIYGKAKELVPVLPKDAITKLIIKQAVDQLNSASATVESLRTLMNETASKLPEYPIVMAMKGVGASLGPQLMAEIGDVSRFTHKGAITAFAGVDPGVNESGSYEQKSVPTSKRGSSDLRKTLFQVMDVLIKTHPQDDPVYQFIDRKRAQGKPYYVYMTAGANKFLRIYYGRVKEYLSSLPES

SEQ ID NO: 112512 - protein, 425 aa, unidentified
MKSTQNEKISQITFETLVVGIDIGKETHYARALDYRGIELARLLKFSNTDQGFRLFDQWMRDICKQQEKTEIIVGFEPTGHYWFTLGDHLKRQGHKLAIVNPFHVKRTKELDDNSPTKNDLKDPKTIAMLVKDGRYREVYIPDDIYQELREAVSERERLQEQLTSIYNRVVRWLDIRFPEFTTVFKDWRRNAALITLRNFPTPEKVMEMGVDKIVETWRKQMKRASLKRAEALVKAASRSVGRTSGKVASETSLQNLLAEYDLYYQQYDKQEQLMQDLLMQVPNADKLLDIKGVGLITAATFVGEVGDISRFQDPRQIQKLAGLNLVENSSGKHKGKTTISRRGRKRLRHSLFFSMIAMLGKNQEFRLLHQRNLTRENNPLNKMQSIIALCGKLIRVFFAILTKGVDYSPEKMLGDMEQSTRVAA

SEQ ID NO: 112513 - protein, 331 aa, unidentified
MNQAGIDVASESFDMQKRCGETIAHRTFANTNSGHQQAIKWLQHGSEQARVCLEATGIYHLQLALALCRSAGIELMVLNPRAARRFAEAQMVRGKTDKVDALVLLHYLECMPFVPWHAPSELRLELQSLAHRLSQLSKEQVRERSRLHAAVRAGQHTHAAQHDIRVHIRFLKRRYAQLEAKAIALMKQHEDLAEDLKLVDTAPGFAATSALQVIAEVGLLPAHLQPQQWVAQAGLDPKPNESGTSVHAPRHISKQGNAKLRAALFFPAMSACRCDPNVRAFYEKLLAKGKTKRLAQTAVMRKLLHSIWAMLKYRQPWDGDKFYRLPESINT

SEQ ID NO: 112514 - protein, 417 aa, unidentified
MTHPKMLHTYVGVDSHKNDHTAVFIDCFFEKLGEITFRNFPSSFENFLKRAQTYRPEGVTLMFGLEDCSAFGRTLTVYLKSKNQTVKHVNALLVARERANRNITEKSDSIDAECAARVLLSKFGELPEADPDDTHWVLRSLVTRRLLLVRQRAAAINYLHSLLTHQYPNYRDYFASIDGKTSLAFLMRYPSPCTLKGTTAEELAAFLEVPSNFNFGMTKAKEILGTLADTAVQHQTIRDTVVQSAVRQIEFYSDEVEQLEDNMAAFLTKLDCPLTSMAGIDTVTAAQILSCIGDIRKFPTPSKLARYAGVAPVQYASGKKDLKFANQRGNRELCAVFFWLAVRLAIPMTGSRVITNTFFHDYYQRKISEGKTKRQALKCVQRRLVNIIWRMLWDNEEYVNPPKIDIETPIGAQKGKA

SEQ ID NO: 112515 - protein, 439 aa, unidentified
MHRKKSKANRSRSVNFQALPLINADAAGIDVGAKEHLVAVPCDRDPQPVRTFQAFTPELHELAGWLKRCGIKSVALESTGIYWLSLYEVLEQCGFEVRVVNARHVKHVPGRTKTDVQDCQWIQKLHSFGLLNGSFRPDHQIRKLRTYMRLHDNLVVSHTEAVHHMQKALFEMNVQLTNVISDITGETGLRIVRAIIAGERDPKQLAALCSSRIKAPRETVAKSLHGNWDEALLHCLKSALESYEFIERQIQECDLCVQRQLTQMDSRAPLPQPAVTLKAQLHRVCGVDLTKIPGIKEQAAQVIISEVGLDMTKWNTEKQFSSFLGLCPDNSISGGKVHRRATRKVYNRAADILRLSAQSLTHSKTALGAKYRRLRARLGAPKAIVAMAHHLARLVYRMLRHGQNYVEKGIHQYELKFHLQRIKWLRKEAKSLNLQLVPA

SEQ ID NO: 112516 - protein, 346 aa, unidentified
MKVLIGVDPHKASLAVAVVDEATGELLERASFPQDRTGLRTLERWAKRFPERRWAVENAGGLGRHLAVRLAATGESVVDVPPKLSARVRVLSSGNARKNDRLDALATALAASRNDRLAVVDPEAASEVLRLLSERREDLVAERTRALNRLHGLLRDLVPGGVARTLSAHRAARILRGIRPQGASARLRRRLASEVLRDVRTLDRKIADLNERIEAEVKASGTSLTGIFGVGPILAARIIGTVGSVERFPTKAHFASYSGTAPLETSSGEVVRHRLSLAGNRKLNHALHMVATCQARSDDQGGAYYRKKIAEGKSRKEALRCLKRRISDAVFRSLMTDSRAPSRSAA

SEQ ID NO: 112517 - protein, 354 aa, unidentified
MSEKLNSEIAVIGIDIGKNSFHLVGQDRRGRIVLRQKWSRGQVEARLANLPPCLIGMEACVGAHHLSRKLKAFGHDARLMPAKYVRPYSKGEKNDYRDADAIAEAVQRPTMKFVATKSADQLDLQALHRVRERLVGQRTGIINQIRAFLLERGIAVRQGLHFLRAELPGILAKRTDVLSPRMLRVIEDLAGDWRRLDERIDALSDEIMTLARQDKGCERLMTVPGIGPIISSAMVAAIGSGDAFSKGRDFGAWLGLVPKQMSTGDRTILGSISKRGNRYLRTLFVQAAWVVLVKIKPEGWERYGLKSWIEAAQQRLHRNVLAIALANKLARIAWAVLHEGRAFECVKTNASQPV

SEQ ID NO: 112518 - protein, 436 aa, unidentified
MYDGSVNVLLLNMKGGYAMKVEYPICCGVDVHKTFLVATIITTQGFTPHYSKRRFSTFNNSILQFKQWLTDNNCFDMCMESTGKYYIPVLNLLEDVIRVTVANPKWVRAVKGNKDDVKDSKWIGDLFRLGLVPGSFIPDKPIRILREYTRYRSKLVSCKSSEKNRFQNAFTVCNVALDAVVSDMFGTSASSITDYLISSDSFDPIHCTSLLKGKLKKKAATVVESIEGYQMSKEQKERMVMVRSHLDFLHQSVEIIDEKLDKMVAPYENAITLYCTIPGVARASAITIISEVGTSMSQFANSKRLCCWAGLTPSNNESAGKKKSVRITRAGVYLKPALVQVAHAAVKSNISPYYKIKYERISKRRGKKRAIIAIARMILTAIYNIFVTGEEWNPSDLYKIDMPQEMLEKQKEKAIKQAIKFLTAEGIIKHSDIPVG

SEQ ID NO: 112519 - protein, 373 aa, unidentified
MDEDRAVCVGLDTHKAKIAVAVAEPGRSGDVRFQGEIANQPEAVRRLIERLADKHGKLRVCYEAGPCGYGLHRQITALGHDCTVVAPSLIPRKPGERVKTNRRDAVTLARLHRAGELTAVWVPDPTHEAMRDLVRARTAAMEAVRRARQQLQGFLLRHDRVFTGRTTWSPAHRRWLAGLRFGHPAQQVVLQEQLDAVAEAERRRDRLDAQIRELAPTWPLAPVVAALQAMRGIAFLSAVVLAAEVGDFRRFATPRQLMAWLGLVPSEHSSGPRVERGGITKAGNGRARRVLVEGAWSYRFPARVTGPIQARLEGVPDAVRTIAWKAQLRLCARYRRLVAAGKNANLVTAAIAREMAAFAWAIARQVQPAGAAA

SEQ ID NO: 112520 - protein, 396 aa, unidentified
MAQVWAGADAGKAHHHCVVIDADGRRLLSRRVANDEPELLALIADVIALADKVTWAVDVPDGGAALLIGLLIARDQELLYISGLAVNRAADGYRGEGKTDARDAAVIADQARIRRDLTPLRPGDEITTELKILTARRADLVADRTRAVNRLRGLLTEIFPALERALPDLTQAGPLILLTGYQTPAAIRAAGPAGLQAHLAGRKVRNPGKLAALAAGAAARQHTALPAEQLTASLIATLAGEVMALNEQIKQAGKLIEDRFHRHQLAAVIESLPGIGVLLGAEFLAATGGDMAFFATPSRLAGFAGLAPAPRDSGRIHGNLHRPRYYHRGLNRVFYYSAMISLAHCPESRRFYHRKRAEGKRHTQAVLALARRRVDVLWAMLRDNRPYQATPPPAAA

SEQ ID NO: 112521 - protein, 335 aa, unidentified
MTRYIGLDIHKRYTFYTELGDDGTVVARGRLHNSLEAFQALVAERPGPVKATMESTFNWYYLYDLVAPLVDELTLAHPGRISAFRTEPNKTDRRSADLLAQLTQLGLVPVAYVPPREVRDLRELLRYRAVLVKLDGMLKRRVRSVLDRLGHPLPHRHIFGKQAQQVLLALNVREPYPLLLRGFLALHAALAAQLNEVTDRIQAAAEVLPTVRRLMTLPRVSYYTALLLWVEIGDINRFPTPKHLASYAGLVPSVHQSGQSQRHGPITRAGSPWLRWILVEAAHRAVWVSPRFRSFFYRVVRRKGKKTAIVAVAHKLLHVIYHMLKAGRGYQEVQG

SEQ ID NO: 112522 - protein, 405 aa, unidentified
MAVMIGVDPHKASHTAAAIGPAEEPLGQVRIQACASQVQQLVAWAAAWPERTWAVEGATGLGGLLARQLVAAGERVLDVQPKLAARVRLLEAGNTNKNDANDARSVAVAALRSAARREVVADGHAAVLKVWSKRYRDLGRARTQAACRLHALLADLVPGGFAGEITAGQAAGLLARITPADPAARARCELAAEFLADLRYLDTQIRGTRDRITAAVRASSTTLTEIFGVGPVIAAAIVGAVGEVSRFADRNRFAAYNGTAPVEVSSGGRKIHRLSLRGNRRLNHAIHMAAITQIRYQHSPGRAYFDRKIAEGKTGKEALRALKRQLSDAIYARLVADAARRGATTQAEGPGGQSGNGSVSSAAGSHPGRRLFGQATPGPQPSLRPTAPGRPRTPATASANSLRTT

SEQ ID NO: 112523 - protein, 377 aa, unidentified
MKRIKFVGLDVHAETIAVAVAEQDGEVRSLGVIPNREESIRKLVKKLGAEEELRFCYEAGPTGYVVYWQLTALGARCEVVAPTLVPVKSGDRVKTDRRDALKLARNYRAGELTPVWVPDAAHEALRDLVRAREAAKKDQLRAKHRLSKFLLRHGRRPPMGVKAWTLKYLAWIEREVHFLQPAQEATLLDYFQEVEHMAARMARLDLAIEEAVKLTPPKMRAVIEALQALRGIAQVSAVTIVAELGEVSRFTRARQLMGYGGIVASEHSSGEKTRRGAITKTGNAHLRRVVVEAAWAYRHRPGVGGVLRKRQEVVSADVREIAWKAQHRLHTRYQKLTARGKNKGKVVTAVGRELLGFIWAIGVKVETAHKEPLRQAA

SEQ ID NO: 112524 - protein, 354 aa, unidentified
MSQKLNSEIAVIGIDIGKNSFHLVGQDRRGSIVLRQKWSRGQVEARLVNLQPCLIGMEACVGAHHLSRKLQALGHDARLMPAKYVRPYSKGEKNDYRDAEAIAEAVQRPTMKFVATKTADQLDLQALHRVRERLVSQRTGIINQIRAFLLERGIAVRQGLHFLRAELPGILAKRTDVLSPRILRIIEDLAGDWRRLDERIESLSAEITRVVEQDPACQRLTTVPGIGPIISSAMVAAIGTGDAFAKGRDFGAWLGLVPKQMSTGDRTILGSISRRGNRYLRRLFVQAAWVVLVKVGPEQWERYGLKSWIEAAKKRLHHNVLAIALANKLARIAWAVLHKGRAFECVKTNASRPV

SEQ ID NO: 112525 - protein, 425 aa, unidentified
MKQKTRNIAMKKKVRNLNKYLNDKTLLVTADVGKYFNYCYARTPKGEELEPFKFHNTGLGYIMVYEIIELFRKKHNLYRIVFGVESTGNYGEPLIHYMVNRGIQMVQVNPFHTKKVKEMRGNSPNKNDKKDPKVIADIIALHNGLTVVIPRGAAAELDRLVHLREILLEDRKRAYNQLESAIVPIFPEFLHIFKDLQIKTVEYLLKYYPLPESIIKLGLEDLIKILHTVSRGRIGRKKAEKFYEAALSSAGIKEGIEGTFLMIKSLYDKISLLDRQLLQVEESIGIKLSEIPYSRFIMSIKGIGPIIAAAIIGEVGDLRKYNCAQQLQKLAGINLYEISSGIQRGQRHITKRGRHLLRKMLYYAALNVTKKGRILHDTYNKHLKKGMTKTQALTAISRKIIGIIYALVRDSSNYVERVDGNKLAA

SEQ ID NO: 112526 - protein, 400 aa, unidentified
MSKRKAQVWAGVDAGKGHHWAAVVDETGATLWSKRIDNDESAILTAMGEILDLADQIRWAVDISGTSSALLLALLAAHGQKAVYVPGRTVNRMSGAYRGEAKTDARDAYVIAETARHRNDFAVIDVPAQLAADLALPTAHRSDLVADRVRMINRLRDVLTGVFPALERAFDYSSQKGALVLLTGYQTPAAIRRRGRARLTAWLANRSVRGADAVAATALEAARAQQTALPGEDVAAQIVADLAAQILALDDRLKRIDKQIRETFRSHPQAEIIESLPGMGPILGAEFVVAAGDLSAYADAGHLASAAGLVPVPRDSGRRTGNLHRPKRYSRRLRRVFYMSAQTSIIREGPNRDFYLKKRGEGCKHVQAVIALARRRAGVLWALLRDGRVFTSAPPVTQAA

SEQ ID NO: 112527 - protein, 474 aa, unidentified
MANRNKAHPDLAAFPMLPHESVYIGVDIGKFKHVAGFVSKTLLERHQHFEHCPAFMFEQSREGFRAFVERIQAYCPLEHCFILMEQTGHYHRPLQQYLLELDLPIYVMHVQSREIGMLKTDKRDALGLANHLYNQLELGVQVTNKLQVVRHAVPPSAAAAQLKGLMRHRYELVNESTQRKNKLTAICDELFPELTHVFKDPNLLTALDLRERFPTPHAVATASLTALREVRKKSFPSEAQFVLLQQLAAQSIGTKDVARQRGLLLEQGLLIKELRLIQDHLARLEGEICQIVEQCREGKILLSIPPMSPLAAAAMLAGIGHIANFEDAAHLKSYCGWAPKRAQTGVTFDRTSLTQGGSREMKRVMYLVAWNAIKTETEWASLYKRLVPRLCSYDERTQAYKGRGKAVGHVIGRLITLIYALLKQDDETLRHLAPGTQPPEPVLYDPVLHRHHRTGHYQPLRKKLPENRIIHVQS

SEQ ID NO: 112528 - protein, 406 aa, unidentified
MAVIIGVDPHKASHTAVAIDDMETALGELRVRSSADQVQRLLSWAAQWPQRTWAVEGAGGLGYLLAQQLVSAGETVLDVQPKLGSRVRLLATGNVNKNDPNDARSVAIAALRSKDLRPVVAEDHAAVLKLWSKRRRDLGSLRTQVACRLHSVLSDLVPGGHPKREITAVQAARTLAGLEPTGAVQVARYELAVDFLADLRRIDAQMAEAKKRLQVAVKASGTTLTEVFGVGPYVAATVIGYVVDVSRFADRDHFASYNGTAPIEVSSGGHKVFRLSRRGNRKLNHAVHMAAVTQVSHRASEGRAYYDRKLKEGKTTKEALRCLKRRISDAIFAHLVADAKRKAEAAKAGPGGQRGNGSVSSVAGSHPERQLFGQATPGPVPTLRRGASSRGRDAQEPARKKSRRAS

SEQ ID NO: 112529 - protein, 419 aa, unidentified
MDQQLIEGQNDFAALVGIDWAERKHVFALQNAGSHKMEWGEIEHTPEAVDAWAMELSQRFGGRPVAVALEQVRGALVFMLSTYEHLVLFPVHPNTLANYRKSFRPSGAKGDPHDAGLLLDLLIRHRERLRCLQPDTPETRTLQFLVEERRKLVEEKLRFTQRLTSHLKLYFPQMLGWFGEISSHIAGRFLERWPTLEQAQKAKPATLQRFFVEHHSRQAEKITQRIEEIRRAVPATHDTAVITASSSAALALVRILQQMREAIAAYDGQIETLAQQHPDFALFDSFPGAGAALIPRLIAALGTDRTRYRTAHELQCYSGIAPVIESSGKQHWIHFRRCCPKFLRQTFHEWALHSMAGSRWAKSYYEQQRAKGQSHHTTVRALAFKWIRILFRCWRDQQLYNEALYEQARQRRATVLQAN

SEQ ID NO: 112530 - protein, 358 aa, unidentified
MNSQKYVALDVDSANIVAGVFDSKGKSMMECFVKTNSTAVRQFFKLLDGTVHVALEEGTQAAWLYEVIRPLVAEVIVCNPRRNKLLQSGNKSDRIDVKKLAKLLRLGDLHSVYHGEQSIESLKQLVHGYQTLVEDTTRSMNRLRAVFRSRGIKCNSTAYNQDKRQEWIEKLDIKTAQMRVGYLYKELDCLMKLRDEAETAMCRQARTDSAYKLIISVPGLGPVRTAQIIAVVGSPHRFRTKRQLWPYCGLAVVTRSSADYEWVGDRARRRNKPSQTRGLNNNFNRTLKAVFTGAALTAIGSNKEFKQCYQRLIAKGIRPEMARLTVARKLVAITLTLWKKGEKYDPERLNQAAGTGDQ

SEQ ID NO: 112531 - protein, 456 aa, unidentified
MNQNTFVGVDPASGDFECAFIRDGEREATHRTFTIKVTELDQMIEWIRNEKVDVIAIEGSGGYTRPLERALRTAEIPFYSIDPYRITRYRQAVLGQHKNNQKDAVAVAHFAREQAAQGNLEVYRRTWFPDENLRPLVRLYEQKQKEATREINRLWQHIQNVSGDMFLTLRGLSEGTHTSRCLSQQWLLKLFAWYPDITTWQSFTRDGIAETIDEHRTRIIDKIMKLKDVAVDIPPYSTVTQVELQVTASTALALKQAVRLLYHHIEAEAAKNAFTRRLMEYGGIGPITAAQIVSEIADISRFPNDDHLASYAGLGRKEHKTGIGTTERKMFMFNHRLKNTFFTAARNYTLYNPDSHLTGYYRSLKIRGMKQTERYKRVARALVRRFYRDLKAVAEQELETRHEGNPEPEPAGNDSLKQPHTSPYEKKYTPGRSRKSKRTSTAAHLRKKEVITTDFP

SEQ ID NO: 112532 - protein, 388 aa, unidentified
MQVAADRTDASTAIQTDLPAIFASLELSRSTWLITSLSPGAGEKMSKHSIRASDVAGLLVRLAQLKEKARGRTGRDFPIIAIQEAGLDGFWIHRVLQSEGIESHVVDAASILTSRRRRRAKTDGIDGETLVRTLLAYKRGEPRVCAMVKAPTPEEEDRRRICRERKTLVGERVEHVNRIKGLLFAQGVSDYEPLKRNRRARLEELKTGDGRPLPAHLKAQISRELDRLELVLPQLKGVEAERDALLKPVSEGCPAPAAMLAQLKGMGPEFTAILWSEGLFRSFSNRRQLAAYAGLAPTPWQSGSVAHEQGVSKAGNRRLRTTMIQLAWLWLRHQPTSALSVWFQERVQSNGGKMRKTTIVALARKLLVALWKYSTSGVVIEGAVMKAI

SEQ ID NO: 112533 - protein, 436 aa, unidentified
MPPSIRQPTPRHDAGKGNSNMITVGIDIGKEKHAAAILDADGRLLAKPAFFDNTHDGAKKLWAQIARHGGGDAVRVGMESTGNCWKPFHDFLAAKGATVDVINPIVTSASMAGDVRGRKTDKQDAVVIAGIVARDEHAARRPEGEGERGLKCLTRQRRYLVCDRSGMKNRLQDQLLESFPEFPALFKDLFAPFPLALLERWPGAVELARARRDSVAKVAKANTRNKDASMEAARIIAAAKDSICFAHPPPKSAARCIRSTLRALRDLDANIEEIDAEIQECERPEMAKLMDGIKGAGKTLPMVIASEFGGFERFEVSPRSGARAGMAKRMLAFAGCEPRIRESGKWKGKTKVSKRGSGQLRLALYLVANIIRMHDNCFKTVYDEKIKTKHHSVALFYVIRKLLEVLCSLHRSGRTYVPTTPMRSCQHPIDSLRERI

SEQ ID NO: 112534 - protein, 335 aa, unidentified
MQRFIGIDVSKAHLDLALVDATGALLDAMRIANERQAIRKLLKQWSKEHAANKECTLACLEPTGHYGYLILEELVRSGMPTWLAHPLDIKHSIGVTRGKNDQVDARRIADYARRYQEKARLSNTRTLSMLTLKQLLTCRRQLVEDKRRHQVRVKDHNRHVDKSLRSTFDRFSRDRIAQIDEQLGILQDRILNHIRADAHLGEQYDLLLTVDGVGPVLAAYLLATTEGFTRFPSARKLACQAGVAPYEHTSGSSIHGRTRVSPQADRVLKTLLHMSALGVIARRGELQDYYHRKLAQGKAPMSVINAVRCKILHRLFAVVTRGTPYVRTPLAHVIE

SEQ ID NO: 112535 - protein, 409 aa, unidentified
MEVTHRRCAGLDVHKDTVVACARLVGDDGQVALELGEFGTTTTELFRLGEWLSEHGCTHAAMEATGVYWKPVWHVLEGSIELMLVNARHFRNVPGRKTDVNDATWLAELLAHGLLRASFVPPAPQQEIRDLTRTRKTLVREQSRHIQRLQKTLEDANIKLASVVSNIVGKTGRAMLEAIAAGHDDPEALLRFKQRGIKASDSELIEALRGHVTDQHRFDLRLHLDLIDALDRALAAVDARLEASLGPFREATALLVGIPGVGRTVAESLVGEIGTDMTRFPTAAHLRSWVRVCPRSDVSAGKHRSTRVQKGGVWLKPLLVGAAWSAVRKKDGYFRALFHRIKSRRGAKKAIVAVAAAILTTAYNLLRTGATYADLGGDHFDRTEKHRAVQRHVRRLNQLGYSVDLAPAV

SEQ ID NO: 112536 - protein, 407 aa, unidentified
MLLTARLMSKYSVGLDVSAKEIHCCISFIDAVQSVTVKATRKVSNTAKGFRELDTWMSRHHKQKDSPLVVCMEATGIYFENCALFLHKAGYTVSVILPNKAKKYLQASGMKSKNDRADARGLAQMGAEKRLDTWAPMGELFYQLRQLTRHHEDLQAMKSMASNRLHAATKGMYTNKKVVSQLKRQIALIDKQIADSVTAMEELINSDGTVKNRVANVCRMKGVGLLTVATVLAETNGFALFGNARQLASFAGYDIVENQSGTRVGKTRISKKGNSHIRRALHMPALVTVMYRVKPFADIYERTLAKHNIKMKSYVAVQKKLLTIIYAIWKKDEPFDESYIPKKHAEEQEIKSPIASAATAVTTGKNECEKVVPTTGPALHKVSITEGKPPYASSGMTNIKQMDGSVK

SEQ ID NO: 112537 - protein, 318 aa, unidentified
MNTKTKQNVSVGVDTGKFQLDIYIRPLDVYFTVNNDEKGIKEAVKTIKKYSPDRIVIEATGRLEIPFIMACASANLPFVIANPIHVKRFAGALGQRAKTDKLDAQLIAHYGEAIQPNLSQLKPETMQAMSDLVARRNQLLVMQTMEKNRLQILPKELAMTIKPILTAFKNQIEKVESKIVKLIESCPDYQAKNDILQSMKGIGKIASASIISNLPELGYMTNKQASALVGVAPMNRESGRYKGLRKIQGGRHQVRTVLYMAMMSAIQSNPVFKETYQRLIAAGKPKKVAIIACIRKMVVILNSMLREGVMWEAPKAIN

SEQ ID NO: 112538 - protein, 374 aa, unidentified
MVDDIALYVGLDVSKEKIAIGLAEAGRKGEVRYYGEIANRADAVRKFVDKLAGRHGRLCLCYEAGPTGYGLYRQLCDLGHECLVVAPSLVPTRPGPQIKTDRRDAVALAALLRAGELSSIWVPDETHEAMRDLCRAREAAVSDLRRARQHLLSFLLRHGRVFEGRSHWSKAHRNWLATQRFDHRAQQIAMEEYIRAIEQIEERRYRLTRQMLELLQDWSLNPIVEAIQALRGVAQISAVTLVSEIGDFRRFSNPRQFMAWLGLVPKEHSTGASVSRGSITKAGNTRARRMLVEGAWTYRLPARVGQEILKRSEGLPEDIRAIAWKAQVRLCQRYRRMQAGGRPTNIVIVAIARELSAFVWAIATTVPITPTKAA

SEQ ID NO: 112539 - protein, 310 aa, unidentified
MNDTIGVDISKASLEVWRLSDRRHMRFSNDTDGLKALCKWLGADPVRVIYEATGRFHRDLEAALSKAGHGPVKVNPSRARRYAQATGNIAKTDRVDAKMLAHMGSTLALEPTPVRSKSMHEIKELHVARVALIKDRTACRNRLDTARNRMVVAQLKARERQIDRQIDQIDAELVRLIKADPELARRYEILMSIRGIGPVAATAMIVDMPELGTMTPKEAASLAGLAPVTRQSGSWKGKARIFGGRHGLRTLLFMPAVIATRYNAPLRKIYLALYKGGKPWKVAITAVMRKLIVLANALIRDDRKWAEIAP

SEQ ID NO: 112540 - protein, 402 aa, unidentified
MNAVGIDVSKGKSMVAIMRPFGEIVSAPFEIKHTASDIHSLVELINSVEGESRIVMEHTGRYYEVLAHQLSEANLFVSAINPKLIKDFDNDSLRKVKSDKADAVKIARYALDKWQNLKQYNVMDELRNQLKTMNRQFGFYMKHKTAMKNNLIGILDQTYPGVNTYFDSPARSDGSQKWVDFASTYWHVDCVRKMSLNAFIDHYQNWCKRKKYNFSQSKAEEIYGKAKELVPVLPKDAITKLIIKQAVDQLNSASTTVESLRTLMNETASKLPEYPVVMAMKGVGTSLGPQLMAEIGDVSRFTHKSAITAFAGVDPGVNESGTYEQKSVPTSKRGSSDLRKTLFQVMDVLIKTHPQDDPVYQFLDKKRAQGKPYYVYMTAGANKFLRIYYGRVKEYLSSLPES

SEQ ID NO: 112541 - protein, 323 aa, unidentified
MTVYLGIDIASKKFDVAELCGGNYRCKAFENSSAGFLALYKWLGQSTMPDIHACLEATGDYGTSLATFLYENKIKVSVVNPARIKGFSASELSRTKTDKADSKLIARFCKAAVPDGWKPTPAPVRKLQALVRRISALNGMLRMECNRRENADANIQASLDRIISLLKTEIEVVRQEIKDHVRSDDELKKQDALIQSVPGIGEVSSNLILSFMSGKGFRKAKEVTAYLGLNPRHHQSGSSVRGKTRMSKMGDTRLRSALYMPALVALRYNPDIKAFGQRLLLAGKPRMLVVGAVMRKLIHIVFGVLKSGTAFSSRIAVHSVVTS

SEQ ID NO: 112542 - protein, 354 aa, unidentified
MTTVAISTLPASRSYTRTGAWAFARMQSGVWTKSQTMEEFAVPDKLFVGIDVAKDWIDIAIYDSGPTRRIANTRQAIEAWVNGLDHERIGLIAFEPTGGYERVLRLSLRQAGLPFARVHPNQLTAFRTRRGIKAKTDRLDAGLLAAFAAVELATRGLAPIVETDDVLREMVARRRQLVDTLQAERCRAAMAQVPAVKQTLARVIKALEASLDGLEAGIAGHIAANAELAAAARRMQTVIGVGPVTVHTALGELPELGRLSGKEIAALVGLAPRNRESGRSHARATTGHGRPGVRRVLFNAARAAIRWNPVMRAFYHRLTTVNRRPGKVALTAVMRKILVTLNAIVRDRQDWKHA

SEQ ID NO: 112543 - protein, 323 aa, unidentified
MNKSRFFFGIDISKDVFDVTDQNEVHSQFDNSYKGFKKFLKLLDKNSHCVMEATGYYHYKLAYFLQENEIIVSVENPLSVKRFIQMGLSKVKTDKSDSKMICKYAQSVSLRLWEGQTKDQQECLQMVRVLSVYTKQSTALKNKIHGEDVLGVPSKMVLSSLKRSLKSIAKEVKIIEDKLVELVKKENQELLTLLETIPGIGRKTSVMLLILTDGFKRFSTAAELCSYSGLTPIIRVSGTSVHGKSRISKIGNQKLRNLLFLCSFNACKYNHACKALYDRIVAKGKSKKLALIAVCNKLLKQAFAIAKARIPYDQNYRSTLLVN

SEQ ID NO: 112544 - protein, 392 aa, unidentified
MIYAGVDVAKANHVIGAVGDDGQPLCKSMEFKNSDAGFERCSAWLEGLAEEPSDVFVGMEATGHYWMALFARLAAEGYSVCVINPMEVKAVRKLKGKSKVKNDRVDALLIAETLRIGEYVETKLASDEVQSLRTLTRYRQAIKEEAAQVKIRLTCVMDSYFPEYAGVFSDMFGSASLAVLEKSPMPSELLRRKAPSLASDISKAARRQIGQAKASELKAAAKSSVGITLGLGAASFEVRSMVSQVRFLEERASEAEERIEELLMGIEPLVLTIPGVSLATGAQIVAEVGDVSRFRSAAALVSYAGLNSSVSQSGQFDSGGGPITKQGDPYLRRAVWLAANRARQHDPALKAFYDKKRAEGKRHRVAVTAVARKLCHIVYAAMRDQVPYDPNR

SEQ ID NO: 112545 - protein, 417 aa, unidentified
MSLKIIYPVCCGIDVHKSFVVACIASTNHSGVTIYKRRRFSTFTHDLQLLAQWLADNNCRDVCMESTGKYWIPVYNILEHTCHVVLAHPKYVKAIRGKKTDKRDAQWISDIFKHDLVSGSFIPPFQIRQLRDLMRYRVKLTGFSVGEKNRAQNCLTVSNIKLDDVFSDVFGKSATAITEQLLKHPDGGFDITPFLDGRCKASPEKVQQAVSGMLCPEQARKLQIIHAHMKGLDYCKSILENTIFALAEQYRQEIELVMTVPGIQQFSAITIISEIGVDMSVFPTVKHLCSWAGLVPQNNESAGKKKTTRITRAGAYIKPLLVQCALTVCKSDKHPEIKSRYLALKKRRGHKKAIIAICRMLLTAIYAILKKQEPYNPALYRKEEFIPANRSLSVEQVIALARRNGYIVVDDDGVLIS

SEQ ID NO: 112546 - protein, 458 aa, unidentified
MSEVMIGIDPHKSSHTAVAIGAGEEPLGELRVQACPSQAEQLRAWAAGWPARAWAIEGAAGLGCLLAQQLVAAGERVLDVPPKLAARVRLLQAGDTNKNDPNDAFSVAVAALRSPAPRPVLAEDHAVVLKIWAKRHRDLARLRNQAACRLHAVLCDLVPGGHPKEISAAQAARILERATPTDAVAQARCELAAEFLTDIRRLDAQLREASKKLAAAVKASGTSLTGLFGVGPVIAGTVIGDVRQVFRFPSRDHFAAYNGTAPVEVSSGGRKAWRLSLRGNRRLNHAIHMAAVTQIRHTHSDGRAYYEKKIAEGKTGKEALRCLKRRISDAIYAALVADARQAAAATCPQGPGGQPGNHFVSRAAGSHPERRLFGQATPGPATTLRPAHNPGARARHSPVAAIQPPAKPQVQVERPQRSEDERPGGAARRRPHSAARKAPRDPELAPEATTAKKTQATA

SEQ ID NO: 112547 - protein, 461 aa, unidentified
MSRATASGRAPIETGWSTSTSTVPCLVFSLAKTSRSLGSLLGSRLSKTFFRQMLKWCEQWPERRFAVEGAGGLGRTLAQQLAAAGEDVVDVPSTLSARARLLAAGGDRKTDPADALHVAQVALFRTDLRKVTAEDQSTILRLLTEWHDDLTSERVRIVNRLHALLRDPLPGGAPNRLSPDKAAALMKGIRPVTATDNRRRDIARDLLADLRRIDRQIRDNETQMRDALAASRTTLTALPGLGIVLAAMVLGHIGDISRFPTEHHFASYTGSAPLDASSGNNSRHRLNTGGNRALNSVLDIIAVCQIRGGGRGQDYYRRKVAEGKTPAEARRALKRRLSNVVYRTMKRDQRDSTGRGRRRSDHASQRGLHGIDQRIAFGPRVPGQAEFDVRQAGQGVRVVARHGRFEIPGQHRRNAEPGPHRGEHTDETVALERHPPAAVGTFQPFQHRRTPCARAREQHHG

SEQ ID NO: 112548 - protein, 361 aa, unidentified
MHPDAAGIDIGNESHYVAVPPSRDSQPVRRFGCTTAELKAMADWLKQCGIRTVAMQSTGVYWIAVYDILEQAGLEVYLVNARETKNLPGRKSDVQESQWLMKLHTYGLLRNSFRPSQEIRRMRTYWRQRNDLVRAAGRHIQRMQKALTQMNLQLANVLSDVSGVTGQAIIKAILAGERHAHKLAAFRDCRVKASEEEIARSLEGNWQEDLLFVLKQEQAGYEFCQKQMTECDRQIEQYLQQREDRSRGASLPEEKRKERLKKKKGNAPQFDLRAELFRISGTDLTRIDGIDVMTAMTILSEEGWDRSKWKTEHHFVSWLRLCPDNKVSGDKVIGKGRLPTNNRVTIALKMAASTYGRATPI

SEQ ID NO: 112549 - protein, 359 aa, unidentified
MRVYTHQHRFYCGIDRHARSMHLCILDPAGQVVLDKDMAARPEAFLKAIAPFRPDLVVGAECMYAWYWLADLCTQEKVPFALGHALYMKRIYGAKAKNDKIDAGKIARLLKGGNFPLAYVYPKGRRETRDLLRRRTYLVRQRSGLFTHLQILNGQYNLPPFPKKLSFAANRAELNIAERFADASVQQSAAVDLAIIDALDEQVSALELYLTRTAKVDDVQTYHRLQTIPGVGKVLALVLLYEIHDIRRFGSEGQFLSYARLVRCAHESAGKHLGSGGKKIGNAQLRWAFAEAACWFLRCSERAKKWKEKQLKKRSEGRVLAILAARLARAVYHLWRKGQAFDEARFWEGQAAHVPVATV

SEQ ID NO: 112550 - protein, 307 aa, unidentified
MIAMKYYTSTTQFNCGIDLHARQMYVCLMDRDGKKLVHTNIRNNDFAYFLKLVAPYRHDLTVCAECMFGWYWLADACQAAGLTFVLAHALYLKAIHGGKNKNDRIDSEKIAHLLRTNLIPPAYVYSADKRPLRALLRQRLFYVWSRNELLARIQSHQLAHNRPPIRQTRPNRDPWEERLLAQEDNPIRQLALQNDLALIRHYDTQITALEEQLQRLTKATAWRDYTLLQTVPGIGEHLGLTILYEVGDINRFPTVKDFVSYCRLVKGTVASAGKIKGLRGAKLGNPYLRWAPQGGAKRPSLPNAIMR

SEQ ID NO: 112551 - protein, 320 aa, unidentified
MSASSVVVGIDVAKAHVDVSVLGAQLEAQRLDNEAEAHSALAAALKPLGVALVVMEATGGYEAALACALQAAGLPVAVVNPRQARDFAKSMGRLAKTDRIDARMLAEFAAVLVRRDDLASLIRPLADTQQQALAAMVTRRRQLVTMMLSERQRLQLAIAVVRPSIEAMIEAIRKQLDDVEAQMVSHVQAHYAELDKLLRSASGIGPVASATLIAELPELGRLNRREIAALVGVAPMANDSGNTKGRRRVQGGRFEIRRVLYMATLTAARHNPAIKTFYGRLLAAGKLPKVALVACMRKLLTTLNAMVKTNKPWDKSLHGA

SEQ ID NO: 112552 - protein, 333 aa, unidentified
MNMHPQGGVANRDQRPNAGVDVCKQHLDVCVGTIEQRVANDANGWGGLIARFKEANVDLVVLEATGGYERDLVCALHNAGISVARVNPRQARDFAKSMGVLAKTDQVDARTLRDFADVLGRHKDRAKYITSMPHEHRQQLAELMTRRRQLVDMRVAEGNHLEHAQAKQSVRSIKSVLKILDKQLEAIDHEVDDHMDRYFKDQRTLLDSVKGVGPVTILTLTAALPELGSLGRRQISKLVGVAPLADDSGPRKGKRRIWGGRAHVRAVVYMAALVAIQHNPAIKVFYSRLIAAGKPKKVAIVACMRKLLTILNAMLRDQASWNAAKHLAASASA

SEQ ID NO: 112553 - protein, 334 aa, unidentified
MPCHFSYIGVDALNAYLDFDGLPGQSRRRLANTPETHTALAALLSGRRGEDRDVLVVLEASGGCERGLHRALVEAGVPAAIVNPKRVRDFANSQGLRAKTDRVDARAIRRFGEVRQPRPTPVPEPARAELIELLGYRDQIVAEITARTLQRAHLRSAFLIKRADAALERLRRESEMLERLIEATVAGDPELSRRAAVLTSFPGVGPLVAAELVAGMPELGTLTERQAASLAGVAPFARDSGQRRGAREIAGGRPKVRRALFHAARVGLRHNPALRALYERLTARGKPGKVALVACMRKAVVILNAMLKSGRHWDPDYETNKKAAEKAAGDALAP

SEQ ID NO: 112554 - protein, 419 aa, unidentified
MSFKILKNNCCGLDVHKTWIFACIGITDSHSRTEYKQARFSSFSKGLQELCDWLAKYNCTDVCMESTGKYWIPVFNVLEKNNIWVTLSHPKYTKPQKGNKTDRKDARWICDLYMCGMVKPSFIPPADIRGLRDLVRYRFKLTCMITGEKNRVHNCLTVSNLKLDDVFSDILGKSSRSITEQILQHPGETFDVAPFVDRRCKTPIEQIQAAVDGAISAEQAVKLRQCLDHIDELEMHKAEIEREIFRLSDKYKEALTLIRTVPGFDKNPMTAIQVLSEIGGDMSVFPTAKNLVSWAGCCPRNDQSNQKIKSTRISRAGSYFKPVLVQIANALIKSKKHPEITTRYRRIKARRGHKKAIIAICRMLLTAIWHILTDLRPYTPEGFLESRPVNKSKVLTTSQALHLLKQRGYIIKDDVVPVS

SEQ ID NO: 112555 - protein, 319 aa, unidentified
MQIILNVGVDVAKDEVVVSCAAQSFPVHKVVNQRASLRAWLKSLPAGSRIGMESTGCYHELLADMAHAEGHIVFLLNPLDTKHYVRAMGSRAKTDRVDAELIARFISQEHSHLRPYTPPTANQRKLDRLIRRRAKIVRIKSSLKLTMNNLSGFTTDLKAVLQKLDALIAKIDSAMAKLASHSPQHEEAQRRLQTIVGVGPVVGMALTNTLERVPFPNADAFVAFTGFDPRANDSGHKTGRRRLSKRGPGELRRLLFNAAMSAAKTKVWMPIYEHYRSKGWSTTAALVIIARKIARAAWSIHHYNSTFDPDRIKNACLKP

SEQ ID NO: 112556 - protein, 341 aa, unidentified
MWIIGCDFHPRFQQIAFVNTEGGECGQRRLEHRGEAEQFYRSLAGQAVRVGMETGGSSRWFERLLGELGQELWIGDAAKIRAAETRKQKTDARDAEHLRQLLCSGQFEKMRIWIPPAENRDLRQLLWHRHRLVQMRTRVKNQLRSLATSEGMERKPGLWSQAGQKQFQALELAPWAQRRRQDNLELLSELLHRTDPLDQEAAQQAAQHPEAVRLMTHPGVGPITALAFVLVIGDPARFPNSKKLASYLGLIPREDSSGGKQRLGHISKQGNAPLRGLLVEAAHVAVRHEAHWKRDYRRLAMRKNRSIAAVAVARKLAVRLWWMWRRGVDYAQLSASGSHAG

SEQ ID NO: 112557 - protein, 348 aa, unidentified
MMVVLGTDAHKRTHTMVAADAAGAEIGSITVAATLSGHLKAVQWAAQFEERCWAIEDCRHLSRRLEAELLAAGEVVVRVPPKMMAGQRRSARTRGKSDPIDGLAVARAALREPDLPQARLDGPAREVKLLVDYRESLIRERTGLQNRLRWRLHELDPGFDPPAGSLDRYKTLEAVMTMLADHQGLVADLAKRETTRIEQITREANQLERDITARVAEIVPSLLEVPGCGALTAAKLVAEAADITRFKNRNAYAMWAGVAPIPVWSGNPNRFRLNRGGNRQTNAALHRIAVTQIRMHPDAKQLMTRRLTAGDTKREALRVLKRRLADVAYRTMIKDTQTTSQAAPARAA

SEQ ID NO: 112558 - protein, 394 aa, unidentified
MRFAGIDIASEMHVLAIVNADGALEVKATPFTEDAAGYEKALALLGSPDQLLIAMEATGHYWKNLFATLSAAGHSIALINPLRTHRFAGEDLARTKTDALDALGIARFAAQKRPSALHLPDAVADELRELVRLRARLLQDFGDRVRQLHRLVDLGFPEFTRYVRTLESELACAILRDYPTAAAFRGVSVRRLAALRYDGHHRVGLELARTLIEAARRSVGQHHSAPYRIQVRYACDDLDVLRRRLRELDRDIEGKLREHEVGRLLTTIDGIGPNTAARIIAAVGDPAAFRSAAALAAYVGTIPRLRQSGKRQPARAPLTAIGNATLRAALWMPTLTAVRNNPWLRAHYERLRARGKLPKVALVACMHKLLFAVYSVAKHRRAFVPQLAASGTAQ

SEQ ID NO: 112559 - protein, 466 aa, unidentified
MISENDRRSARADRRLVGVDLGIASDHTVRVLRGDGSEVCRRRACPTVESLTRLETAALVGAPVGTRLEVVIEPTGPAWLPVAVFFTTRGHRVFRVASAKAADLRRFLSRHAKSNGIDADTLARLPLLAPGSLQPLELPGVEAAALDRRVRACDRLSQQGALHQRRIKDLVRQLMPVTPLTGELTKTDLVVLEHWADPRALLAAGRSRLLARITKTSHGQQGAARTDAWRAAAQAAVDLYGEHPAVAYSDLAAEVGTEVRLLQAVRAELTGHAEARADAYRWTDPAHLAASLPGLAEVGAPTVTAIVGRAARFRTGKAFRSFTGLAPRASETGETDRKGQPMSKAGNRLLRTTLVRAADNARRVDPQLAQIYYTQMVERGAEHLKACCVVAAHLAERLHAVLVRGMPYVVCDTDGTPVDPATAKGDHRRVLDGAARGAGPPTQPQARHQRRGPDDGEGPSASPRGT

SEQ ID NO: 112560 - protein, 404 aa, unidentified
MSVHAAPVTSSTIVVAIDVGKTSALLSATDGARRRVLGPVEFAMTRSGLGAIVDRLSAVVPAFAQVKVGVEAAGHYHRPVLDYGWPPEWEVLELNPAHVAEQRRVAGRRRVKTDVIDLEAVTELVLAGRGRVITEREVCIGELAAWAIHRSQRIATRSATKNQLLGQLDRAFPGLTRALPDVLGTKIGRLVAAEFADPARLSALGVNRLIRFAAARDIQLRRPVAERLVTAARDALPTRDGSVARRVLATDLGLLAHLDTQIADAEGELAALLPASPYSTLSSVPGWGVVRISNYAASLGDPDRWPGPRQIYRASGLSPMQYESAGKRRDGRISREGSVALRRALIDLGLGLWLTEPSAKAYAAELKSRGKPGGIIGCALAHRATRIAYALVRDHTIYNPSRWV

SEQ ID NO: 112561 - protein, 355 aa, unidentified
MNESKFIGLDVHKTSVSAAVIDADGKLVMQSIFATGAVAILGFVHGLRGTLRVTFEEGTHSAWLFDLLRPHVSEVVVCNPRKNALLKSGNKSDQIDARKLAELLRAGLLSAVYHGETSTLTVKELGRTYLALTEDTTRVMSRLKALYRSQAIATEGKKLYSKRRREQWLTQLAQVGRRYRAERMFEQLEALQCLRRKAHRDLILECGKHSATAWLTSIPFMGPIRAALLIARVQTPFRFRGKRQFWAYAGLALETRSSADYRFVEGELRRAKKPVFIRGLNLNHNHDLKNIFKGAATSASAMPGPFRDFYENLLGKGMEPEMARLTLARKIAAVSLTVWKKGERFDPEQLKSQAA

SEQ ID NO: 112562 - protein, 328 aa, unidentified
MFVFGCDVSKATLDIAWFGEESGRWFILSNIPNTRAGYRKLLQWMRKTCAAQVQDMSLVIEATCVYHQPLAEYAYTAGVTVFVTNPGRAAEHARSQNRLNKTDKLDAQGLQHYGRHLQKCHEYVPHSAPVQGLQALLSRLRQLNDDLQRERNRLEKVPFVPGSQPLSASLKRHIKCLEKEKGRIQAQIDALINEHEPLRHVQKRLLSIKGVGPLTSQALIPLLYRDQFTDARQLAAYLGLTPVHKHSGTSLHKRGRLSGRGNRYLRAKLYMPAVCAIRYDPAMRARYLELIARGKAPKQALTAIMRKLIHVCYGVVKNDQDYQCPIAA

SEQ ID NO: 112563 - protein, 350 aa, unidentified
MKIIGIDLGKFKSVACLSPAAGAEPTYCTLPTDPQAFHDFLVKEAPDRLAIEVGTPSGWVYDLATDLGIDCEVANTRDDRFKLVKNTVKTDRADALKLVRLARLDEMPRVTMPSHDERQHRQLIRYRKTLVKRRTEITNHVRSLFDQKGLKLPAGRTLWSKAGRAMLAEHAREVTTGLPKHAFWRGILHRELAEREQIQEDIKAVEACLEQANTQCPKVRRLQTIPGVGPRLAESVVLTIGDPRRFESAKQVASYVGLTPKLHQSGTVLRNGRISKAGDRRLRSLLVEIAWGCQRFNPTFKAMFEHLAGNKKGRRKQAAVALARRILVVCWSMLKHETDWDPSKVGPALA

SEQ ID NO: 112564 - protein, 343 aa, unidentified
MYYIGLDVHKKTISFCVKDAAGCVLQQGKIGSSRLELDAWIRTLPQPRMIAMEATIFTGWIYDHLLPHAEKVKVAHPLMLRAIAAAKRKNDRIDAAKIADCLRCDFLPECHMAATPIRDRRRVLRYCNLVQRQSVQMKNRISGLLMETGVSYDKQRLRRKKYFNRLLATDHEIPDSIRPLLRICREHIDRSIRLDAALLRSLEKDPMLIDRLRRLRTIPGVGPITALTWALEVGDTSRFRTIKQAISYCGLCGAEKSSADKVMRTPISKQRNKHIQSMLVEAARLAPRYSPELAVLYERERQRGNANRATLAVARKMVAHMLAVDRRKTDFMPAPALKQTAAA

SEQ ID NO: 112565 - protein, 385 aa, unidentified
MQRNDMSRSLVAFDQNSTVVAVVELSLSTWLVAGVVPGLKRQPLKKLSADADKLVALLERWRAEAIKAGQVINRMVVAFEAGRDGFWLARLLRDRGIEAYVIHASSIAVSREHRRAKSDRIDTQRLMRSLLGWLRGEAEHCRMAAIPTLAQEDAKRPNREHECLVADRTRLVNRMKAALIRLGIRNFNIKLRKAAEGLCALRTPEGEPLPPNTLAELGRDLERLALIRAQIRAIEQARLQRLKAAPQQATHPMILMLAKVMGVGVETADMLVHEVLARPLRDHRAVGRYAGLTGSPDESGSSRREQGLAKAGNARVRRGMLQLAWRWLMHQKDSALTQWYRSRTADGRKDTRKTMIVALARKLLIALWRYVTTGEVPQGVVLKAA

SEQ ID NO: 112566 - protein, 422 aa, unidentified
MLEETQDEQEIIARVAALDIGKAELVCCVRVPDPKGGSRRVQEVTTYSTMTRSLQVMADRLLDLGVTRIVMEATSDYWKPPFYLLEAHGFEVWLVNARDVKNLPGRPKTDRLDAVWLCKVAERQMLRPSFVPPVPIRRLRDLTRYRIGLVSDQTREKNRVEKLLEDSQIKLSVVASDIFGVSGREMMAALIAGERNPQVLAQMARTRMRTKISQLEEAFVGHFTDHHRFLLTKMLARIDALDVDIADLDTQIEAHLAPFADAVARLDEIPGVGATAAAVIIAEVGLDMTRFPTPAHLSSWARFAPGVKESAGRKKGTGATGHGDRYLARVLGEAAVGASKTNTFLGERYRRIARRRGKKKAIVAVGRSILVITWYLLSDPEVRYHDLGSGYYDSRINPERKKRNHIRELEALGYKVTLEPAA

SEQ ID NO: 112567 - protein, 423 aa, unidentified
MNPNWNQQPYFAALDWAKDHHDVIVVDRVGTIVADFQFAHTAPGWEEFNCHMQPFGKCPVTIETSVGMAVDQLLQRDYTLYPINPLAAKEYRRRKAPSGSKTDRHDAWCLADALRIDGQAWRPLRPQDEATATLRLLCRDEIGLIETRTALVNQLQATLGDYYPLALDSFDDWANPGAWAFVRSFPTPADLTKAGKRKWQTFLHLHKLWRPETAPQRLELWAQGQQLNASAAIVNAKSLLALSLVKVLEALQRQIQEYRSRITQAFEQHPDHDIFGSLPGAKQTLGPRLLSLIGARRDIFPDADSLMCQAGVSPVAYQSGRLCKARLRFACDHFLRHTVHLWVDQSRKKCNWAQTYYQAKRDNGHDHASALRCLGKSWLKLLWRMWQDHTPYDEAKHLGALQQHGSFVWQALQNAATPQPACE

SEQ ID NO: 112568 - protein, 336 aa, unidentified
MFQLGIDVSKKTLDLCLLREGVKGSVKTRKLQNDINAVNAVIAWLSKQHCKPEDVHIIMEATGVYHESLAYGLHKAGGRISLANPHRAREFARGMGMLTKNDRVDAYMLACYGALKAPEPWLPPPEEVRHLSALLRRRDALVADSTREKNRLEKNLATDTPSVIAESVEAMIGQLNAEIKRLDRLIRSHLNQHPELKKDFDLLTSIKSVGYQLGLNMLVILRSHDFATAEQAAAFLGVVPVEKYSGTSVRGCPKLSKIGPPEIRAKLYLASLCGLRFNPLMKAMYERLCLRGKGKMCAIGALMRKLVHWCYGVLKTQKPFDVGYLSSYARSACKAA

SEQ ID NO: 112569 - protein, 353 aa, unidentified
MAKVKKLSFLGETIYCGLDVHKTNWKVNIRNKEMELASFSQDPSPDLLNNYFKKNYPDAALEVVYEAGFCGFEIQRSLTKLGIKCIVVNAADVPATDKDRKRKDDKRDARKLAKELSDGDLKGIYIPDKLMEHARSLVRQRHRLVQDQTRCKNRIKHMLMFSGIKIPEVEERWNKKYITQIQTFAYESMYLKSAVELSVEEYLQIRRLLSQATRTLRKLSLEPLFSSIQKFLRSMPAIGLINGMVIQTELQDISRFKTLDSLCDYAGFVPDIRSTNDKKTVTGITKRCNEFLREALVESSWMLIRKDPAMLMKYNEYKKRMNPNKAIIKIGKHLLSRIRYVWSNQKEYEIGLL

SEQ ID NO: 112570 - protein, 344 aa, unidentified
MGEVSTIGLDIAKAVFQVHGVDGAGTVVIRKRVSRVKILEFFADLPPCLVGIEACPSAHHWGRELTGLGHTVKLMPPSYVKAYLKRSKNDANDAAAICEAVTRPSMRFVPIKMKEQQTALMLHRTRQLLVRQRTMLSNALRGHLAELGVVSAKGRNGTAELLKIIADAEDHRIPPAARGILDTLARQYSAMGAEIGSIDKSILAWHRSCEASRRLAEIPGIGPIVATALVAEIGDWKAFASGRNLAAWIGLVPKQHTTGGKDRLGSITKQGNRYLRWLLVVGATAVIRYAQKHGTKNRPWLARLMERRPAKVAAVALANKIARMAWAIMVRGNRYKEPTLLMAA

SEQ ID NO: 112571 - protein, 406 aa, unidentified
MHSPTTTIFAGIDWATEGHAVCVIDDTGSVLERYEVEHSGAGLRTLARKLAASRVSGVAIERPDGPVIDALLGVGLRVVVIASRHIKALRSRYGSAGNKDDRADAYILADVLRTDGHRLRPLLPHSGATMALRTSVRARKDLVRAKVRLVAQLRAHLELVFPGAVGLFSKLESPTATAFLTRFPSARQAAWLSPGRFDAWLAKVGYGGRCSGLELHARLIAAPAGVSGPEAEPLTAVTLGYVRAIATLREQITFLEGCIAEQLAGHPDGAIFSSLPRSGSVRAATLLAEIGDRRERFPTPEALACLAGAAPSTRQSGKHHAVTFRFACDKKLRDALIDFAGGSRFDNPWAADTYGRAIRRGKRHPHAVRILARAWVYVIWRCWQDGVPYDPGRHQSLQQISLASAA

SEQ ID NO: 112572 - protein, 429 aa, unidentified
MNDAITAPYISVGIDVAADDSFVCIMLPSFEVFGKPFKVVHTDLASLDKAVSVIKKAEMKFQMKSQIFLESTGIFHFPLFCFLKNEGFEVFVLNPLITHSTKNASVRKVKNDKFDSIKIAKIGLDPKTKKSVIADEFVLNLRLLSRQYYVFSDDRTALINRLSNHVRIAFPAFIGIFSDLAGITSLDILRSIHSLDQLLSAERDDMIAHIAKSARKGFAYAAKKFDAIIEAVHISKKLTFNLPDVFSVIHAFIDQIFLIDKHMDDIANRIHDIVKDNIFHPFVNQIMLIDAISGVGFLSAVTLMCEIGNFNAFSSPKQLFAFFGLDPSVNESGKFKGTNNHMSKRGSRLARRIIYTIALASIRNKPNGQPFNSVLQAFYQDKVKSKLKKVALGAVMHKVSNIVFAVLRDESSFAVRTPEEHIRFHVASV

SEQ ID NO: 112573 - protein, 483 aa, unidentified
MLNSRGEVSMKVKCRPQQGKWHEMNRKQRRETMRKIQSDDLSLEVVHPDAAGIDIGNESHYVAVPPSRDSQPVLRFGCTTAELKAMAQWLKQCGIRTVAMQSTGVYWIAVYDILEAAGFEVYLVNARETKNLPGRKSDVQESQWLMKLHTYGLLRNSFRPPQEIRTMRTYWRQRSDLVRAAGRHIQRIQKTLTQMNIQLANVLSDVSGMTGQAIIQAILTGERDPHKLAAFRDSRVKASEEEIARSLEGNWQEDLLFVLQQEQDGYEFCQKQMAECDRRLRQYLQQREDRSRGATLPEEKRKERRRKKKKGNAPAFDLRAELFRMTGTDLSQIDSIDVTTAMTILSEAGSDMSKWETENHFVSWLRLCPDNRISGGKIIGKGRLPTNNRVTLALKMAASTLRLSNTYLGAQFRRLRTKLGAPIAIKAMAAKLARLVYRMLRYGMQFVDRGAKFYEAQHRKQQISYLKWKATKLGLKIIEAPAA

SEQ ID NO: 112574 - protein, 435 aa, unidentified
MAKPLEMMHPLACGIDIGSRNFYVDAGEEKIRVFPTFTADCNHVRDYLLSLGITTVAMESTGVYWVTLYAVLEGAGIDVYLVNGRDVKNVPGRKSDVKDCQWLRQLHSYGLLRKSFIPNGDIRKVRAYLRLRQDHIRASATQVHLMQKALTQMNVRLTEVINDISGASGMRILTAMLQGERDANVLTELCEGSILKKKKEQVVKSLQGHYSEEHLFALRQALQTWHYYNGPIKECDTEIERQLTIMTKGKDDMETNGRRKPIRYHNPEIKDLHKPLLKLSEGKDPIGIAGITDYSFLQIVSEVGTDMGHWPSEKHFTSWLKVAPMRSSSGNMSKRVRLKRHNNAGLIFRNLAQGILNSKHLALGSFGRRIKAKRGSSVAIKAIARKIACYYYRVMTQGNEFVEKGIQAYEEHLKEKQKKYLEKMALQLNLQLVPA

SEQ ID NO: 112575 - protein, 400 aa, unidentified
MRVVFGIDVSKASSEVAILVNGEKVHGYTIPNDAIGFNRLLGDLKTVHQPEIVFEATGVYSRRLQAFFEDNSYAYTRLNPLESKKQLDSLRVRKTDKIDAEKLAMSQFILNRKPSYVQEALYQELRDLSRFYQNLTEDIVCAKNRLHKVLQVTFPELENILSAPTGEQYWNLVITFPCNSFVLESDDATLTAIIRQSTAKRISEKRVTYLVDKLTKLANQSYCAVKKTSPVIEEVKYYARELLRLSEHRQGVLEEMVTLAQSLPEYEILLSIPGIAETTATSIIGELGDIRRFHSANQINAFIGIDLRHYESGNFLAKEHITKRGNPYARKILFKCIHNIASASHTNPCHIADFYEKRKRQSQVTSTKPHTIASIHRLIRTMYYLITHNKLYDYTSTQNL

SEQ ID NO: 112576 - protein, 425 aa, unidentified
MNYKQNEKINQVKESTLVVGIDIGSTTQYARAFDWRGIELGKVFTFSNSREGFEAFKAWMQRLQDKYRKSDVIVGIEPTGHYWFDLGAYLEDEGILLVMVNPYAVKQTKELDDNSQSKNDRKDPKVIAKLVTEGRYSAPYTPDGVYADLRIMVTNRKRLIREMTQIKNRFARWFAIYFPEYTDVFGDYEAQSSMLLLKKVCTPEAIVELGAEKINQIWRDAKLRAVGMKRATTLCETAKRSIGLKKGSSAAQYEMKLLLEDYEYKKAQLDAVMEEIEKLCRKIPESEQMLAIKGIGVITVAGFLAEVGDVRRFESPRQIQKLAGLSLRENSSGKHKGQTTISKRGRSKLRAVLFNAAIPLIAKNPEFKSLHEYYTTRANNPLEKKQSVIAISCKLIRVFYAILANGVTYDAQKLLSDIHRQPQVA

SEQ ID NO: 112577 - protein, 387 aa, unidentified
MAVIEGRERHIVGGVDTHKDLHVAAVVDEQDRILGTRSFPTTRQGYRQMLAWMLSFGELQRIGIESTGSYGAGLLRFMQQAKVVVLEVTTPDKQDRRRRGKNDDLDAQNAAHAALAGQRTVTPRSRDGMIESLRILMACRKTAVSARRIALQMIHNTIVCAPDALRDQLRNLTRMQLVRTLASWRPDLTAYRDLDSAYRIGLKSLARRYLELHDEIADLDVMIAAIVNELAPNLVARNSIGHIGAAQLLLTAGDNPERLRSEASFASLCGVSPVPASSGKTVRHRINRGGDRAANSALHIIAIGRLRTDQRTKDYVARRIAEGHSKLDAIRALKRYLAREVFTLITQRRRNQRHPNRRLTNRRASGAANTSRSNTPSAWRKRVSSLL

SEQ ID NO: 112578 - protein, 320 aa, unidentified
MTTDVIALGVDISKKKFDVALLKNDKLRHKTFKNETAGFEYLLEWLEKQDVTYVHVCQEATGCYGEALAEFLFDAGFAVSIVNPARVKGYALSQLKRSKTDKQDAGLIARFCAAMGPELWQPQPKEIRQLRDLVRRLEALNDMRQQELNRLEAAIGIVKEQVERHVSFLDKEIKETKNLINQHIDNHPELKERKQLLESIPGIGSATINVVLSEFGDITQFRNAKALAAFIGVAPRVRQSGTSLRERGMMSKMGRRALRKAFFMPALVALRYNPSVIELKQRLTEAGKAKMAIVGAAMRKLIHIIYGVLKNGVPYDAKFA

SEQ ID NO: 112579 - protein, 356 aa, unidentified
MSEGSCVGLDVHARSVVAGVIDMGSGEVRSLRVPPGSEATVAWLKTLPAPVRVVYEAGPTGYGIARLCAEAGISCVVAAPSKIRPAADRVKTDRRDAERLARLLRLGEITPVRVPAPVEEAARDLVRAREDARGDLMRARHRLSKLLLRHGAVYDATAWTRAHDAWLRKQRFQNGPLAIVFDECYSRMIDAKTRRDTLDKAIAELAASEPYVDVVERLVCLRGVSTLTAFALTVELGDWNRFRPEALAPFLGLTPSESSSGERRRQGGITKTGNTHARRLLIEAAWHQRSAPRLSVTLERRRTGKSLAVRAQADSSARRLHGRWHALEARGKPRLIVVVAVARELAGHCWALATME

SEQ ID NO: 112580 - protein, 402 aa, unidentified
MIFVGIDWADKEHEISVLDHNGNELTRFRVSHNPKGLEILKKRLLQLSNDPEETLCFLEINQGLLVQFLLEAGFPVYPLNPKVVDNRRKPSGAKSDAIDARLLAEIGRSDFKRLKRLNPDSQHIQELKMLCRDQDTLVKDATRLTNRLTACLKEYYPVALELFSEITLPVSLNFLKRYPTLEAARSASVQELAAFLKEHRYPQRNLAAQRIYEKLHAPQLQANPATVRAKSRLLLTTITQLEQTLAEIKAYDREITRLFESHPDSVIFASLRGSGPRLAPRLLAGWGEDRDRYENAAVMQALAGTSPVLYQSGKVRFARYRRACLKFLRQTLQLYAFQSIRLIPWAREYYQRKRDSGKTHHEALRALANIWVRIIFAMWLNRQPYNEAVFLTAKAKHAPFVA

SEQ ID NO: 112581 - protein, 406 aa, unidentified
MPRLINRGDTLVTIAGFDNAPTPPIFFDHATTIVGVVELSKKTWVVGGYIPGLERRPLKRVNNHAAGLLDVLVAWRKKAEQAGRTIARIVVAFEAGRDGFWLPRWLQANEIEAYVIHPSSIPVPRGARAKTDRLDTAMLLRAFSAWLRGDTDACRMVAIPSREQEDLRRPSRERAELVTERTRLINRMRSLLTLHGLSQVNPNTPATRRNLAQLRTAEGEPLPPNTFAELERMFERLELIKKQIKAIEDDYIHPARQCVLEREESGLAEQAQKARRQLATIAGVGAATAATLVSEVFTRNFAHRRALARFVGLTGTPDESGSRRRDRGLMKAGSARVRHTMIQLAWRMLYHQPNATLVQWYRERVARANSAGRKTFIVALARKLVIALWRFVQTGELPNGMHLARA

SEQ ID NO: 112582 - protein, 350 aa, unidentified
MVVVGADVHKRTHTFVAIDEVGRKIGEKVVAATSSGHAEAVMWARERFGAQVVWAIEDCRHLSARLERDLLTAGQQVVRVPPKLMAQTRASARTRGKSDPIDALAVARAFLREPDLPIASHDEVSRELKLLVDRREVLVAQRTAAINRLLWRVHELDPERAPKPRSLDLAKHRRILGDWLDTVAGLVAELARDELADITRLTETINGLAKRIGDRVRQVAPVLLALPGCGELTAAKLIGEAAGVSRFKSEAAFARHAGVAPIPVWSGNTAGRVRMTRSGNRQLNAALHRIAVTQIRLDGLGGTYYRKRLNTGASNPEALRSLKRRLARIVFHHLHIDHHNRNQPCQPAAA

SEQ ID NO: 112583 - protein, 341 aa, unidentified
MEEYIGLDVSMKETAVSIRRAGQRIWRGKCASDPSIVAELIRKRAPSVKRVVFETGPLSVWFYHSLRTEGLPAICIDARHAKAALDMATNKTDANDADGLAQLAEVGFFREVRVKGFDSMLTRTLVAARTRLVRITTELSNQIRGVMKTFGLLVPAGKGSTFEKNVRSLLGDQDRLASIVLPMLEAWRGIRVRAAELGRQLVRDARQSRACRILMSIPGIGAITATSFTTAIEEPDNFRNSRSVGAWIGLTTRRYQSGEVDYDGHISRRGDRPLRGLLYEAAAVILTRSSTHSTLRTWGLQLRERIGFKRAAVAVARKLAVIMHTMLKTGELFNPNAGAAA

SEQ ID NO: 112584 - protein, 372 aa, unidentified
MNQNNRLFVGLDVSKLKISVAVADGERGGEVRFYGDIASDPNSVTNIVEKLAKRGAVLHFCYEAGPTGYELYRQLTGMGHDCVVVAPSLIPKRPGDRVKTNRRDAVSLARLHRAGELSAVWVPDRGHEAMRDLVRAREAAQEAQKRARQQLQSFLLRHGRIYSGRSSWSLAHMRWLSTLKFEHPAHFIVLKEYCQAIEDAEVRLKRLTDLISETVKSWTMAPVVEAYQALRGVSLIAAVVFVAEIGDIRRFENPRQLMAFLGLVPSESSTGEHVKRGGITKAGNSRARRMLVEGAWAYRFPARVSRTKQAQLESLPRAVREIAWKGQLRLCSRYRKMILAGKHKAIAITAIAREMGAFLWAIGQEVQPADYA

SEQ ID NO: 112585 - protein, 425 aa, unidentified
MKYRIAGIDVHKRMLAVVIADVAVDGEFQFERRKEGTSPSEMCRLAEWLVAEQVEEVVMESTAQYWRPVWATLEQQWRPKRLQDGGARSGQLHLAQAQSNRGAAGRKKDFPDAERLVKRLVAQELTLSFVPDGEQRLWRTIMRRKHQLTRNRVQFQNRLECLLEEAHIKLSSLVSDLLGKSARRMLQAVAEGATSPEAIAALADQRLRATAQQLCDALGACRNMHPVYRQLLKMALEELKLIEEQIDKLDQEMARLLSAHQDVVQRLAEVPGLGADSAQQIIAEVGPAAAAFPSAKHLASWVGVCPGEEESAGVNYSHRSPKGNRQMKGLLNQAANAAARTKGSIFEFVYRRLVARLGHAQAIGAIAHRLCRLIWIILHRAIRYEEHGPAVSRSKSERRASLMIRELRRLGYRVEPMAAQAGVSE

SEQ ID NO: 112586 - protein, 370 aa, unidentified
MTRIAKFVGLDVHKDTIAIAWAEGGPLCEPVIDRTLPHDVPRLVRRLLELAPAEHLWVAYEAGPTGYGLCRSLLVKGIHCIVVAPNRVPHDPGRRIKTDKRDARDLARALRVGNLTGITLPEQAVEALRDLIRAREDCVRALRRARQQMKGFLLRNSVTWSGRSSWGVKYMEWLRGLRFGAEAQSVTFRHYLCEIDRLVLARDHLTAEVERLMPTLSQEPLYRSLQALRGVSTIVAATLVCELGEFTRFPSAGRLMSYVGLTPSEHSSGARISRGSITKAGNGHARRALVEAAWAARLRPSRSITLQRRQHGLDPAVVDIAWKAQQRLHQRYVTLRGARRPQNLVIVALARELTGFVWSIAQTVAQSSAA

SEQ ID NO: 112587 - protein, 368 aa, unidentified
MTTNTLKAAPAASAKELKNEKPAKAKRMLVGVDTHLRGYQAARKIDSGVIGVVENFRSEEELRLYVAKQTTRAEQVVVVYEAGPLGYTLYRKLTAAGVLCYVCAPDSGEQRKKRRKNNKIDARSLTSKLFNYLNGDQNALQLARVPTEAQEQLRMASRQHDQLVEERKRLGAKGNAMLLSQGFGSWSNWWRPKAWADLSSKLPPWLLERLEIWVDVLKVLDEKIAQAKAAFARSCNGPRPKGVGALSQMQLQSEVLDWSLYSNRRKIACLAGMVPSEWSTGDKERRGSITKVGVPALRRIIVEMVWRIIFFQPQYKPVQKWLEVLRGPNPALKKKAVIAIGRQLMVDLWRLQTGRVTAQELNLIMVTD

SEQ ID NO: 112588 - protein, 309 aa, unidentified
MSCVVGIDVAKERLDVAVRPGDERWSVSQGEQGLSELVARLQALGPSLIVLEASGGWEAPVVATLAVAGLPVVVVNPRQVRDFARATGRLAKTDALDAAVLAHFGEAVRPLPEAEERVLAACLARRRQVVEMITAEKHRLSSALPVVRPSLEAHLAWLEEELRRLEEELDQRVRQSPLWQEKVELLRSVPGVGKIVAYTWAIDLPELGRLGPKEIAALVGVAPFNRDSGRGRGRRCVWGWRSKVRTALYMATLAATRCHPVIRAFYQRLLGAGKARKVALTACMRKLLIIMNAIVRDGRPWNPALAQGG

SEQ ID NO: 112589 - protein, 349 aa, unidentified
MAMTIVEAAPGIAGGVDTHLDEHVAAALDPLGRLVGTELFPADAGGYKALLGWLEEFGQVTKVGVEGTSSYGTGLARFLRRHGVEVVEVDRQNRQSRRNQGKSDPLDAVEAARAAISGRASGAGKTKDGAIEAIRVLVVAKRSARQARVKAITQMRHLGFTAPDQLHSRLKGLRVSALVTESAQLRPTRSTDPVTAATKASLSSLAHRIKSLDVEIAGLDEKIEPLIAAAAPDLLALFGVGPDTAAALLIAAGDNPERLHSEAAWAHLCGVSPVPAGSGKTSGHLRHHQGGNRQANSALWRIVMVRIAHDPETTNYFKRRVKEGRTKRDVIRILKRYVAREVYRHLPRG

SEQ ID NO: 112590 - protein, 458 aa, unidentified
MKNFYLGADVSKGYSDFMLLDAKKRRIEEDFQLDDTFDGHQKLYHFLSGLCAQHPDAQIYAAVESTGGYENNWFDALVKFQSSLPLKTARLNPCGVHHNSKAGLERNITDPISAENVAKYMIEHPENVTYQQQDPLASLRKQWSFVKMLSKQKTQLLNQLESNLYAANPEVLAYCKNGVPNWVLSVLARFPTAAKLAKAKKSSLTLIPYVTEKKAKELIQSAQKSVASATDQITAQIIKATVTQIRQLTKAIEAQEKILAQSCSIPEVQLLKTFPGIGDTSAIGLILEIGSVERFATAKKLASFFGLHPLYKQSGDGKWGFHMSKKGRIVPRQILYMVAMVALQCNPLIAEIYLKHTEKGMKKMAALGLCMHKICRIIYGMLKHNSAFDANIDRNNREKSLKANTTKVRKDKTRRYQSFDAKAPISGRHNKKRKERKQSQSDNIADNGIIKASVPLSV

SEQ ID NO: 112591 - protein, 349 aa, unidentified
MNILALDLGKYKTVFCNYNPTNGEHEFGKIKTTPHEIHDLIVEKEPQKIVLEVCHIAGWIVDIAKTLGIETEVANTSHEAWRWKNVKKKNDREDAIKLAKLSAMNQLPTVHIPEKKVREKRALIKYRQRLVRYRVSIKNAIRAVFAREGITMATGKGTWSKGGLQWLKGHAEPLEEIADVNQLWRGQLHVELETFEAISESLKKVEDKLNKLGACDERIKRLQTIGGVGPRLAETVVAFLDDPRRFKNSKHVGSYAGLAPRQYQSGQMDRQGKTGGRGNKLLRNLLVEICWRSLRCNPWARDTYNRLLRGSPSRRKIAIIALARKLVVRCWVMLRDEQDWKNDIQKNVA

SEQ ID NO: 112592 - protein, 394 aa, unidentified
MKLIGIDIGKNKHFFCIMDQQTGEIISQPISFSNDKEGFDFLIQKIKSYSKDSILIGMEDTGHYHFALLKYLLNLQYTVALINPKTTDFNRKIQGGITKNDKLDTINICDVLDTPERKKQYRITKVNSFDLYEQKQLTRHHHNLKEEENVYKNRLQKCIDIVFPEFNNLFNSKYGTVYMNILKMFGSAENIANTDIRTIRKCFEIEGRGNRISLTPERLKECAGSSIGISSSAEVIQIKHLTAQIELIEEQLTEIDKKIEEFSIQNNSPILSIPGISHFSGTSILAELGDISNYSKPSQIIKFAGVAPLHYESSQFNAQHTSITKKGSKYLRKTLYQIILPVIRHNPVFTKYYQLKISQGKGHRCAQGHCVRKLIRIIYHLLKTNQQFDPQLLR

SEQ ID NO: 112593 - protein, 530 aa, unidentified
MTCSTPHRRRPSRRSRASRAPVTVAKARGQLHPQAQQVGPERFGILCVDCAKARSTWMLADFYGRILFPPTDVCHTRGEMEATISQLQQTLARDGIADAIAVVERTGSYHLLPKQALARAGWQVRIVHPLATRQFRQSADAGNKTDQTDLMAIHRAAVTGLGLTEQTLEEPYQKLRLLVRHRRALVSMTTQLRCQIHHHLHAAMPGFGALFRDLWSSPMPMTIVREVGSAAAVAQMGQAELARLLHQRRITHQQRSLDKVVAWAHAAPPPDDNAATHHQFCIQLDEGLTNLHHLIQDTERQIAQLLVLTPYILLLSIPGINVVSAGELAGEMGPITHYASATCITGRAGLYPSRYQSDRTDHPDGPLVRRGNRRLRRALMIIAENLLTCNGHFRGKAQYWELQGKNKAKARVKVANNFARIAFQMVAGRMVFAHRCCRERDYVLHKLVEFACVHQMPGEQLLHALQAATGQLPAAEHKAEGEKLQPWLRRPHRSRNQEPQSLGEILPQVLAELGLTAVLESASLRSQGSS

SEQ ID NO: 112594 - protein, 399 aa, unidentified
MFYCGIDIAKYKHEASVIDMSGKALSNSISFANDRQGCEKVLAIFEKSEITPDNVVIGMEATGHYWLSVYTFFLELGYTVKVINPIQSEAFRKMYIRQTKNDSKDSYIIAQIMRFGEYSATTLSEDNIIALRQLSRYRLALVDACGDCKRRVIALLDQVFPEYDKLFSDTFGKTSSELLLNCPTPEDMLAVSTRKLTNILNKASRGRFGKEKAEELKDAAKNTFGIAFAKDAFSFQIKQLMQQIIFTEKQLSELEEQIANLLHETNQYITTITGIGDVLGAIIVSEIGDINRFERPNQLVAFAGLDVTVKQSGEFSGTKNRISKRGSPYLRRAIWLAAQRAAFCDPILSEYYQSLKARGKHHLTAVGAVARKLCNIIFVILKENRPYFPTPPKKSQNLS

SEQ ID NO: 112595 - protein, 357 aa, unidentified
MSDTAPSTDVIIGVDTHKSTHAAVAISALGARLGTMTIPAKGHGYQALLAWARSLGAIRAFGIEGTGSYGAGLFRFLSEHGYPVFEVNRPSRQLRYQKGKDDPLDAESAARSVLAGQATGLPKSGTSTVEIIRHLKVARDTAVKARSQAMLALKAIIVSAPSALREQFDRLAGKMTLVRHLAALRPGPLTSTAASAKTSLRAIARRWLALDAEVKSHDASLEQLTRQLAPELVQAHGMGPGTAAEMLILIDDNPERIRSEAALAKLCGAYPIPASSGKTTRHRLNRGGNRQANAALYRVVIVRMRGHQPTLNYVKRRTAEGKSKAEIIRCLKRYVVREIFGYLCQPICPPQTASAPS

SEQ ID NO: 112596 - protein, 468 aa, unidentified
MSQHNRSRPVDAPRRSRTVFDPINPHVAGIDCGSATHYVAVPPDRDPQPVRHFPTFTSDLHALADWLTACGVTSVAMEATGVYWIAIYELLEARGLDVRLVNARHVKNVPGKKSDVADCEWLRDLHSVGLLRGSFRPADQIVALRTYVRHRQTLIETASTAIQRMQKALVQMNLQLALVVSDITGATGLRILRDIVAGRRDPQQLAQHRDGRCHATPAEIVAALTGHYRADYLFVLEQELALFDMCQTQIAACDGAIDAQLQTLTADRPAPDRALPAARRPHRAAKNNDLACDVRPALFQLTGGIDLTQIDGLGSLNALKLLAEIGTDMSRWPTDKHFTSWLTLAPRNKITGGRLLSSRTQPSANRAAGILRMAAMSLGRTQTALGAFYRRLAARIGKPQAITATARKLAVLVYRMLKGTLVYQDPGADHYNATQRARVLRRLRQRADALGFELVNRTTGEILSPGVS

SEQ ID NO: 112597 - protein, 369 aa, unidentified
MDLKYSVGLDVSSKKINGCISLIDNNQKVTVKSSIVFNNDLKGFKSFEDWMIKHRRGLEIPLVICMEATGIYHENCALYLFERNYRVSIILPNKAKKYLEAIGLKSKNDSIDAKGLSQMGAEQCLEQWEPFGKYFYELRLYTRQHQNLQELKTVISSQLHALKQAMYTNQIVIEQLESTIDLFDLQLKELEKKIKLHLELDAEIKQKVANVIKIKGLGVLTIATILAETNGFDLFKNYKQLVSYAGFDVVESQSGARIGKTKISKKGNSRIRRALHMPSLVVITYKEKPFLDLFERTYAKHGVKMKSYVAVQKKLLTMIYYLWKKNQMYNSDYQNNIQEKELEFSSLLAFEKGKKIASNKLRLYKVNIQ

SEQ ID NO: 112598 - protein, 390 aa, unidentified
MRFAGIDIASETHVVAVVDIEGKVLVKATEFTEDAGGHARLLELLGSPSDCKVAMEATGHYWQNVFAALASAGFEVSLLNPLSTRRFAEADLARTKTDAIDAVGIARFAQQKRPVATKLPDSATQELRELVRLRDRVVQDLGDAVRRLHRVVDLGFPEFTRYVKTLDSELATAILHEYPTAAAFPLATRPLSKLVYDGRHKVGPELARQLVDAAKSSVGRHHGDAYRVQVRYACEDVDVARRRLRELERRIETTLRDHEVGTLLTTIDGIGPQTAARLVAEVGEFERFSGPEKLAAFVGSIPGINHSGKSRPNGAMTTIGNARLRSALWMPLLTAVRRNAWLRAYYLRLVANGKLRKVALVASMRKLLHAIYSVATNRRPFVARIPEVTP

SEQ ID NO: 112599 - protein, 350 aa, unidentified
MKKDSSGKRRMHGETVGIDLGDKVSRYCVVDQDGTVVAEGSFRNQASSIEKHFAGEPRRIALEAGGQSAWISRELQRLGHEVIVANARQVKWITASDNKNDAVDARKLALLARADARLLAPVEHRSAGQQAELSVIRARDALVRARTLLVNAARGLAKGFGQRLPATVTATFGQRALALVPPLLEAALAGLLAQIDALGGEIREYDKRIDQAAAAHPESKRLTSIPGVGTLTALTFVLTLGRAERFAHSRDVAGYLGLRPKQRQSGGQNPQLGISKSGDKYLRKLLVQCAHHTLGHWGRDSALRKWGLDKGGGAKGATKRAIVAVARKLAVLLHRLWVSGEFYKPFPRMA

SEQ ID NO: 112600 - protein, 369 aa, unidentified
MKFYTLKAAPAASAVELKNNHKSTKAKRILVGCDVHLRGYQGARKVDEGAIGVVDNFRSEEALLLYIEKQRQQAEQVVVVYEAGPLGYTLYRKLRATGVLCYVCAPDSTPQRKKRRKNNQIDARSLTSKLFNYLNGDQHALQLARVPSEAQEQQRMASRQHDQLVEERKRLGAKGNAMLLSQGMGSWSNWWRPKAWSQLSRVAPPWLLERLQIWVDVLKILDEKISQAKAALARACSGPRPKGVGALSQMQLQSEVLDWSLYSNRRKIACLAGMVPSEWSTGDKATRGSITKVGVPALRRIIVEMVWRMVLFQPQYQPVQKWQEVLKGPNPALKKKAVVAIGRQLMVDLWRLQTGRVTAQDLNLIMVEN

SEQ ID NO: 112601 - protein, 460 aa, unidentified
MAPFAGAMKCCDTSTRIKSLSGLASAPETRCQPVPDRLADRLWRWFAMEVVWQRVAGIDVGKRDAKVCVRVQGRGSTPTSTTVTTWSTTMPQILRLRDHLVESRVELVVVESTSDYWRPFFYVLSEAVPVMLVKASDVKGMPGRKSDVSDAEWLADLAAHGLVRASFVPAEPMRQLRDLTRARVGLFEERTRELQRLEKELEDACIKLSAVVSDLAGASARSMLEALIGHESDPATLANLAKGRMRPKIDQLTEALTGRFNNHHRFMVGFRLSRIDRTTAEIAELDRRIDEVMEREDLVIARELLVEIPGIGRHGAEELLAEIGADMSVFPTPQALACWAGVAPGSHESAGKRHHVRTRAGNRYVKRSLGIAAKSAARTKACFLGARFKRICARRGYNKALVAVEHSMITAIWHMLSTGETYRELGGDYYQRHAPQHALKRKIRDLEAAGYRVTAVAATA

SEQ ID NO: 112602 - protein, 455 aa, unidentified
MKDQTKKKEVVTNDEFRLAIIQHQSGAIDVGSTMMMVSYADKNGEHHLLETSAYTDDLEGLARTLQTAGVQYVAMEATGVYWMALYELLEHSAIEVTLVNPHHFKNVAGQKTDVKDCQWLHQLQAHGLLRPSHIAPEVYRELRDYIHERNILQKQKSDTLNRIQKLLTRMNIKVQHLISDIEGVSGMRLLRGIAEGINDAEELLSLIDVQRLKADKTDLIKSLKGNYKIQYICILKRTLKAYDFFKAQMREYEGLIEEVLIKMLPKDVEHGDPKIRVKTSHVRKNQYSINVKDYLQHITGIDLTRIDGMDEISILEIISVTGLDMKKWPTENHFTSWLNLSPRPKKSGGKIIGYQQRFTKNQATQCFRLAAQTMWKNKGSLGQLYRRLAYQKGSKKAIKALARKLAVIFYCMLKNKTEYEVDKLQIDTEKHKQIKIARLKKEAAKYGLIFKESAA

SEQ ID NO: 112603 - protein, 389 aa, unidentified
MRFAGIDIASETHVVAVVDVEGKVLVKPSEFTEDASGHARLLELLGSSSDCTVAMEATGHYWQNVFAALAAAGFEVALLNPLRTRRFAEEDLARTKTDAIDAIGIARFAQQKRPAPTRLPDSATQELRELVRLRDRVVQDLGDAVRRLHRVVDLGFPEFTRYVKTLDSELATAVLHEYPTAAAFPVVARPLAKLVYDGRHKVGPELARQLVDAAKASVGRHHGDAYRVQVRYACEDVDVARRRLRELERRIETTLRDHEVGTLLTTIDGIGPQTAARLVAEVGEFERFSGPEKLAAFVGSIPGLNHSGKSKPSGAMSFGNARLRCALWMPLLTAVRKNPWLRAYYQRLVANGKKRKVALIAAMRKLLHAIYSVATNRRPFVARIPEVTP

SEQ ID NO: 112604 - protein, 414 aa, unidentified
MQPRFIVAIDLAKHSHVAYVYDTTNQQLSKPLTVAVSQEGFSQLERDLSSYSDRPTDFLIGHEATGHYGETLLRRLRNQGYPLVELNGRQVAEFRRGMGRRAKTDKLDAQAMVRQLATGEFNPTPAPSSTQLALRRFTRLREDVVKEQTRWVNRLRSLLDQTCPELGNLWPDLTKPTVLALLAHFPAGQAIAQASLSELTIVIRKASRGQKGQDFAQQLQTTAQNTVGFTDPWLETELRLVVSHLQTIVAHIRTLEKEIAILTDAFLIEWSGQLNLTTPLTVEDFPWGRHIAIGTLLAEIGDIRRFASIKHLLSFLGWCPYIQESGTKRASRLEMSHQGNRFARRMLWMIALNAAQRVPEYQAYYQRRLEAGKSKMKSLVAIGRKLLSVIYTILKSGQPYDPQRYLKHQPQAAN

SEQ ID NO: 112605 - protein, 391 aa, unidentified
MIYVGIDVAKDKHDCFITNSDGEVLFKSFTIPNNRDGFETLFQKIQSVSDDLTKVKVGLEATGHYSYNLLGFLLDKGLTTFVINPLHTNLYRKSLSLRKTKTDKVDSRTIAAMIMSDMNLKSYSDTSYHNEELKSLTRYRFDKVQERAKLKTSVSRLVCILFPELEKLVPSLHMTSVYALLSEFPSAHAVASAHLTRLANLLSESSHGRYGKNTAVTFREAARSSIGSHMPAKSLELKHTITLIQELTAEIDEIENEIKSIMDEISSPILTIPGISYKMGAMILAEIGDFSRFDSPDKILAYAGMSPSTYQSGQLDNCYSHMEKRGSRYLRYALYNATKYVCHWDESFGTYLAKKRAEGKHYNVALSHATKKLVRTIYAMEKSGQAYLPTF

SEQ ID NO: 112606 - protein, 391 aa, unidentified
MIFVGIDVAKDKHDCFILNSEGTVLADVFTIANNRIGFETLLSRIQSCSQGESKIKVGLEATGHYSYNLLGFLLDSGLATYVINPLHTNLYRKSLSLRRTKTDRIDARTIAMMLMSDVDLKSYSNTAYHNEELKSLTRYRFDKVKERAKLKSSVARLVNILFPELEKLVSSLHIAVVYALLSNYPGASYIANANTEELAETLCTASKGRYTKSKTAEIKVAAGVSIGSKMPAKSMELKHTIALIRELDKEISEVESAIDKITSQMDSPIFTIPGIGRHMGAMILAEVGDFSNFASADKLLAYAGLSPSTYQSGQLQNCYAHMEKRGSRYLRYALFNAAKYVCLWCPTFSAYLEKKRSEGKHYNVAISHAAKKLVRLIFAMQRSGKAFLADY

SEQ ID NO: 112607 - protein, 430 aa, unidentified
MKSNTQNAKIEAITEKTLVLGIDVGSETHYARAFDYRGIEYSKKPFKFSNTEAGFVTFKEWILDLKERHEKDKVVPGMEPTGHYWFNLGKFLQDNEMKPVLVNPHHVKKSKELDDNNPTKNDRKDPKVIAGLVREGRYMIPYLPDGVYADLRTASNIRFQLQAELTRIQNRISRWFNIYFPEYKTVYGKPDAKSGMLILKAAPLPEDILTLGIDGVNQIWRDAKLRAVGKARAKTLIEAAEHSVGSKEGAVSARMEIRMLLEDYESRNIRLQEVMTLIEGLVKQIPMAEKLLEIKGVGIKTVSGFLAEVGDISRFNTPKELQKLAGLALVESSSGKHKGETTISRRGRKRLRYLLFEVAMSLVAKNPEFRELHTYYTTRRLNPLKKMQSLMAIAAKLIRVFYAMLTKGVDYDPKKMVSDIKRPAVYLQAA

SEQ ID NO: 112608 - protein, 410 aa, unidentified
MEVLHARCCGLDVHKETVVACVRRVIDGKTVKEVRTFSTTTADLIALSEWLAESKCTHVAMEATGVYWKPVWHILSDGGFELVLANAAHIKNVPGRKSDVKDSDWISDLLAHGLIRASFVPDGPTQEMRTLLRTRKQLVHEKARHILRIQKTLKDANIKLDSVITDIMGLSGRKMIEALIAGESDPAKLARLADPRVKASRETLHQALRGRVTGHHRFLLRLHLDQIDVLDAAIAKIDREVEVGIEPFRTAVEQVSSTPGIKTLAALQILSEIGTDMSRFASDANLISWACICPRSDESAGKRRSTRIRKGSPWLKTALVQCAWAAVRKKDSYLHAQLHRIKARRGPKKAIVAVAASILTAIYHMLKDGTMYQDLGPNHFDARTKERQKNRLVKRLADLGYTVQLAPIPN

SEQ ID NO: 112609 - protein, 353 aa, unidentified
MTSTGLDVFGGVDTHGRTHHAAAVDGAGRLLGDAEFAATAAGYAALLAWLTAFGRPVTVGVEGTGTYGAGLARHLAAASVAVVEVDRPDRKTRRRQGKSDPIDAIAAARAVLAGTATGAPKTRTGPVEAIRALRVARRGAVKARTAALNQLHGLLVSAPEALRADLAGLRTTELVGRCAGFRIDPARLLEPTTATKAALRAIARRIQGLEEEIALADARLRPAVTTVAPRTAALFGAGPDVAGQLLATAGDNPHRLRSEAALAHLAGISPLPASSGRTDRHRLNRGGDRAANAAIHRIVLVRMRHDQRTRAYVERRTTQGLSKKEIMRCLKRYIVREVHTALLADFEDLTRAT

SEQ ID NO: 112610 - protein, 417 aa, unidentified
MPSSITLFVGTDVSQATNRTRFYDAAGVEIGRRYQSANDLPGARALAAEAILRADTVGADEIRWALEATNLFWWHLATHLTTSPELVARRLKLYSFNPRVVSKFRESYPDLGKDDWVDAMVIADRLRFGRLPAECYLDERYQPLQRLTRYRKHLVDTIVAEKQVALGYVWLKLSGYELEEEGLTNTFGATSQAILERYLTPDEIVAAPFEELVSLIAAESRGKADAEAVAQAVQQAARRSYRLPAGMVEPVNLVLSSSLVTIRTLTAQLKPLAKAIATELEAAPSQTIRTIPGLGPVFTAGIVAEVGDVTRFDNEEKLAKFAGLTWRRHQSGEFEGEDRSLTKTGNRYLRYYLVEGANSVRQHCPEFGPYYAIKYKEATRHKHKRGVVLTARKLVRVVDSMLRSGQIYRPPGARQAS

SEQ ID NO: 112611 - protein, 344 aa, unidentified
MEPMYYIGLDVHKRTISYCVKDGSGTIHAEGAIPATRFDLDRWMKTLPQPWTAAMEATVFTGWIYDHLQPHAAALKVAHPLMLRAIAAAKKKNDRIDASKICDCLRCDFLPECYMASTAIRERRRTLRYRNLLVRQMVQMKNKIGMLLMEAGVSYNKQRLHKAGYFRELLATNPDIDEGLRSLLRLCRETVVRLQKTESALVRSLEHDSLLMDRVERLMTIPAVGPITALTWALEVGDVQRFSSIKKAISYCGLCGAEKSSGNTVQRTPLSKQRNKHLQCTLIEAAKMAPRYNPDLAMLYDREKQKGNANRATLAVARKLVAYLMAVDRGQRNFQVVETNCIAA

SEQ ID NO: 112612 - protein, 406 aa, unidentified
MELVTLYKRVVGLDVHQAKITVCAIIEDETGDVTVELAEFGGFKRDRQALAEWVSTRGPEVVVMESTGIYWKSPYAALERVGIVATVVNARHVKTVPGRKTDWADAQWLATLARSGLLRASFVPPARLRELRQVARQRQQLVGILAGEKNRVHKVLSDGGIRLSVVVSDIHGVAGRAMVKALIEGQSPAEVLMLAGNRLQADRGELLDALDGDLTAEHRFVLRELMAHVQELEQRIDRFDRHLLNELEPYRTTLALMQTIPGIDAIGAALLLVEIGNDMDAFGSVDRLASWAGICPGNNESAGKRKSGRIRKGNPWVRRLLCQFAHAASRTQCAFKSKFEALRLRRGHKRAIVAIAHKVLKTVFLLIRRQTHYRDSVVDFEAMSVTRNAPRWLKMLRKHGFIPAAA

SEQ ID NO: 112613 - protein, 371 aa, unidentified
MKTELPQITIGVDLGDKTHRYHVLDQAGNTVGSGILPNIRGGFDDLAEQYPGARVAMEVGTHSPWINEHLLGKGFEVHVANARKLRAIYENERKCDEFDAEMIARIARLDTKLLKPVTHISQEAMTDRLVLGAREQLVEARKSLIQSVRGSVKSLGYRIDTCSAACFGKKAKEVLGENGAAMRALGPMLAAIEEMSASIKELDGEIQRLGREEYEITKIFQQVTGVGPVTSLAYALAIEDPGRIGKTRDVGAYLGIVPKRDQSGDSDKSLGISKTGNGYVRKLLVQCAQYILGAHGPDCDLRRFGLKLAERGGKAAKKKAIVAVARKLAVLMLSLWKTGEDYDPDRTEKRREDKAARREDPNAGMELLRAA

SEQ ID NO: 112614 - protein, 372 aa, unidentified
MESIIYVGIDVHKDTYYLSSYLPEKGLIFAQTEMKADSKNVMKYLDKVSEMNDGAIVICGYEAGPTGFKFCRDLIRRNYNCVVMAPTSIAKTPRDKMVKTDKADSVLLAKSLAFHSYKQVVLPDENIEALREVVRLRHCAQKECKRAKQSFLSFLLSNGFSYPYGGKDTYWSRKFMLWVNSIHFTSEYLNLCKDEYLAEAVRMIQRVKALDKKLEELQENEKIRDKVKSLKCICGINTLTAMTLVTEVGDFNRFKTAGNFASYTGLCPGSHSSGLTDRTTGITKQGNRIIRKLLIESAKAIGRSGAQKSVTLLKRQEGMPSEIINYADKASDRLRKRIRRLENHGMNYNKISAACARELACFVWGMMTNHIA

SEQ ID NO: 112615 - protein, 309 aa, unidentified
METSVGIDVSKDRLDVVVLPQGEAFAVGNDDAGIDELIGRLKTIGADVIALEATGGFETQAVAALSSAGLAVLVVNPAQVRAYAHAIGRRAKTDPIDAAVIAAFVLATKPEVRPLRDAETQALSELVARRRQIVQMIVSEENRLRMVLAKQAQKSIKRLLAALRRELESLDADLDDHIRKSPIWRGGGARLLSPPGGGAATARTLLAELPELGSLDRRQIASLAGLAPWTRQSGKWKGKSFIGGGRGKVRAVLFMAALVASRHNPSLKAFRDRLVAAGKPRIVAIVATMRKLLTILNAIIRDNKPWQNA

SEQ ID NO: 112616 - protein, 375 aa, unidentified
MSKIRFVGLDVHADTIAVAVAEPSGEVRSFGIIANRPESIRKLMHKLGPAQQLRVCYQAGPTGYVLYWQLATLGVRCEVIAPTLVPVKAGDRVKTDRRDAMKLARSYRAGDRTPVWVPDAAHEALRDLVRAREAANRDQLRARHRLGKFLLRTGWQRPEHLKTPWSIPHLEWIKNKVHFEQPAQEVALADYVHEIEHVAMRLERLDRAIQEAARLAPPRMRAVIAALQALRGVAEITAVTIVAELGEISRFRTPRQLMAYSGLVPSEYSSGSTRRPGSITKTGNAHLRRVIVEAAWAYQFRAWLGGYLLKRQTGLSQEIRDIAWKAQNRLHLRYRKFLARGKNKPQIVTAVGRELLGFIWVIGVKVEAEHQRIAA

SEQ ID NO: 112617 - protein, 411 aa, unidentified
MKRFAGIDIGSERHVVAVVDEHGAVLLKPTPFGEEAAGYRRLMELLGSPQGCLVAMEATGHYWRNLFAYLIAEGFTVALLNPVRTRRFAEEELERTKTDAVDALGIARFAAQKDPPASQLAEDGLDELREVVRLRERLLQDFGDRVRQLHRALDLSFPEFTRYVRSLDSELATTILTHYPTAAAFRTVSVKKLAGLRYDGRHRVGEELAHELLAAARISVGRHQSEPYRLRIRYACEDIVMLRRRLHQLKADIEQRLERHQVGKLLTTIEGIGPQTAACIIAELGDPARFGSVKALASYVGVIPRLRQSGKRRLSGRRMLPLGNTRLRRALWMPTLSAIRVNPWLRAYYLRLRGAGKRPKVALIAAMHKLLAAIFSVARRRQPFVASLVSPPATIVAGGAVVDPAAGLTAR

SEQ ID NO: 112618 - protein, 410 aa, unidentified
MDVFLERCAGLDVHQASVVCCVLIGAPGRKPQKLLRSFGTTTRDLKTLQAWLAEHGVTHVGMESTSVYWKPVYAVLEGHVDLTVGNAHHIKNVPGRKTDVKDAEWIAQLVRHGLVAKSFVPPPAIRDLREMVRHRRTLIETRTAVRNRVLKLLEGANIKLSGVASDVFGVSGLAMLEALAAGTNNASEMAGLARGRMRRKHAALEAALDGRMREHQCFLLGMHLRNLKAIDQDLDALDARIGTQLEPYQVQHRLLTQIPGVDWVTAASIIAEIGTDMDVFATARRLAAWAGVAPGNYESAGKPKGAGTRRGNVFLKSALFAAASAAVRTKGSYYRDKYNRLRARRGSVRAIMAIAHKLLLAAFHMLSTGEAFRDLGEGYLDQVARKRSTTKLVQRLSNLGYDVMLVPKTA

SEQ ID NO: 112619 - protein, 463 aa, unidentified
MAKKNTTSAKSKSKARKNILERINPNAAGIDVGANFHLVAIPEDRVQENVRKFGPFTSDLHRLADWLIEHHIETVAMESTGVYWIPVFQILEQRGLEVKLVNAAHVKNLPGRKSDFSDCQWLQQLHSFGLLNGSFRPKDVVCVLRSLLRLRDTLVKDCSSHVLRMQKALTEMNIQIHRVLSDITGYSGMAIIRAILAGERDGLKLAQMKHPQVKASTEQIVKALEGDYRAEHLFALRTAVELYDAYQLKIMECENQIEQQLEHFDTKLDSQQVLEQSGALKTRSAQVRLELQRQAHLTSVCGVDLTRLPGLRTLAVEIIISETGLDMSGWKSEKHFCSWLKLCPDNRISGGKLLSSRPRKTKNRAAAIFRLAAQGAMQSKTAIGAFIRRIKARLGAPTAINAGAHKLARLFYRMLKFGAAYVEQGQIYYEQKYKERLLRNLHRRAKEFGFQLTPFEPATDLVS

SEQ ID NO: 112620 - protein, 411 aa, unidentified
MKSPQIEFEQMIQRGCGLDVHQKTIVATVSGVDLEVSTRTFGTFTTQIEELGMWLNSLSVTHLAMESTGVYGKPVYNILEEDFEIILVNARHIKNVPGHKTDKKDSEWIAKLLLSGLLKGSFVPPVRFRELRDLFRYKRKLIAQRVAQRNRMHKILEDANIKLASVVSDVFGVSGTLIIEALIEGKEDPAYLADLAKGSLRKKIPDLQLALQGKLSDHHRFMLITLRDSIHSIDGQIQAVETRIDTYATELQEPVEKLQTIPGVGKTTAINILAETGNDMEVFLDHKHLASWAGIAPGNNESAGKKKSTRITHGNKYLKTALVEAAWAASHTKDTYLNRKYKSMVARRGPKKALIAVAHKMLTAIYYILKNQELYAEPDDAKYMEKRKQAQIKKSLERLHELGVQVDIRLN

SEQ ID NO: 112621 - protein, 365 aa, unidentified
MQKISTMRTSGKNIFEGQLTIGLDLGDRSSAYCVLNEAGEIIFERKLATTPEAMKQVFASLPRCRLAMETGTHSPWVSRLLTALGHEVIVGHAQKVRLITKSRRKDDRLDARTLARLARIDPELLSPVKHRSAQAQLHLTEIRARAVLVSARTALVNAARGLVKSYGERLRKCGTEQFSRETTSGLSAGLREALEPLLREVESLNERIQEYNRRIAKMTKENYPETALLKQVKGVGDLIATAYVLTIEDAHRFRKSRDAGCFVGLQPGRRNSGESEPQMRISKEGDEYLRTLLVQGAHYILGPFGEDSDLRRWGLKLSARGGKNAKKRAVVAVARKLAVLLHRLWVSGEVYEPLRNSQKAMTVAA

SEQ ID NO: 112622 - protein, 355 aa, unidentified
MKEVSRVSIDISKQVFQVHAASSKGEILWRKRVRREDLYNLIKELSPCEIGMEACGGAHFWGREFQALGHTVRLLAPQYVKPYVKRNKNDSADADAILEAMSRPTMSFIPVKSAEQQEVCQLHRARELAVKHRTALVNEIKGFMHEHGIALSCSGYSKLMSEYLSVLEQCGSRLRDGTKRLMSTLFEQLFAINKMIEKYELELKAHHAINEISQRLESVPGVGLLTATAIAASVGDPSRYKSGRDFAASLGLVPRQHSSGATQRLGGISKRGDSYLRKLMVQGGHTVVMHAKKHQDSRSRWVVGIAERRGRVKAAVAVANKNARVMWALMVKGGSYQENYGEKNQREVEPSALAL

SEQ ID NO: 112623 - protein, 333 aa, unidentified
MSSLAVFVGLDYHQAFVQVCVMDASGTMLMNRKCDNSVAALVEAVRPYGVTVTAAIESCCGAADLAEELVAAGWQVSLAHATYVHKLKQSPDKTDWSDARLLADLLRVGYLPRVWLAPAGLRQLRHVVRHRQQLAQARRAAKLRVTALLRAERVAFTGSRWTKAWINAVRNCADLGEQGRWVVNQLLDEIVHLQSQIDQTEVRLEQLTEHDSFVTALRAMSGIGLVTAVTLRAELGTMSRFRSGKQAARFCGLTPHNASSGLKQADAGLIRAGNKGLRAVLIEAAHRLMRYDPRWSTLSRSLRSRGKPGSVTAAAVANRWVRWLYHQLLPLAA

SEQ ID NO: 112624 - protein, 387 aa, unidentified
MTVRTVNNLPAATHGETVRCLFAIELSKQSWVIGFNTPLSEKISRRTLSGCDWKGLLELIEDVRARVSREMGRAVAVMSCYEAGYDGFWLHRQLEAHGVRNYVIDPASLQVDRRARRVKTDRIDAERLLRSLMAYLRGEPKVWSVVRVPSVAEEDARRLHRERDRLVLERVQHVNRIKGLCALHGIYDYHPLRPQATARLEQLRTAQGGELPPRLKSEIKRELHRLELVVEMIATLEAERDAIVEDEASTHLNAEKIQNLHKLKAIGPEFAAVLVGEIFHRSFDNRRQLASYVGVTPSPFQSGSMAHEGGISKAGNRKGRTTGIELAWLWLRYQPDSDLSIWFRARVGIMKGRIRRIAIVALTRKLLVALWRYLETGLVPRGAVLKG

SEQ ID NO: 112625 - protein, 270 aa, unidentified
MTFRPHALHLKAELFVKSSRVHVRDDGFTRCNFHLKFFIMVYRGIDISKSSFVAAYPSTNGNPTKTFPNTTAGMRELIGTLAVAEHHCVMEATSNYGCCCTCYIRTVLPSVLPPPKKKQIKHFSRMMMPVTKTDEKDAYMIAMYGEKMNPPIYKMPSQATIRILTTEGFTYFDNAKQLSRFIGICPTYQQSRTSVNIREHINRNDDERLRSLLYIAFWTALRYNSRECYIRLKANEKPFKVALIAVTNKLVRPILTITTINSIYRWICPG

SEQ ID NO: 112626 - protein, 369 aa, unidentified
MADRITYVGLDVHKEGIVVAVAAGGLRGEVREYGRIANTPTALERLLRKLGGDGVMLRFCYEAGPCGYGIQRQISATGHECVVVAPSLIPRRAGDRVKTDRRDAASLARLHRAGELTAVWVPDARHEAMRDMVRARLDAVHSLRRARQQLSGFLLRQGCHYARPAWTKLYRRWLAGLKFEQAVHHIVLEDYLAAVEAAEARRDRLTTQIEAMLPDWTLAPVVAALQTMRGMALVNAATLIAELGDLSRFADPRQLMAYLGLVPCEHSSGASVRRGGITKAGNGAARRLLIEAAWSYRFPARISRELLLRQEKQPKPIRDIAWKGQVRLCARYRRLARTGKPANVVTTAIARELTGFVWAIARQVIVAAG

SEQ ID NO: 112627 - protein, 463 aa, unidentified
MKRKGNAKATRSGMAMVHPNAAAIDIGATMHMAAVGADRTSDPVRNFGTFTGDLRRLADWFAECGVKTVVMESTSVYWIPIFELLDERGFEVFLVNARDAKHVPGRKTDVSDAQWLQRLHSYGLLRASFRPKGEIAELRAYLRQRERLLDTAASQIQHMQKAMTEMNLQLHHVVADITGATGMRIIRAIIGGERNPSVLASMRDKRCHSSVETIEKALTGHYRAEHLFVLEQAVALYDVYQQKVAACDVQIESVMNALSSVRSRQEGATADRSVSPKPHRNRTANEPAFDVGGSLHTLLGKDLTRIDGVGPYLALKLVSECGDDLSAWPSAKHFTSWLSLAPNNKISGGKVLSSRTKRSGSRVASLLRLAAVSVGRTETALGAFYRRLSSRVGKAKAITATARKIAVLFYNAMRHGMNYVDPGASYYETRYRERVVKNLHRRAKALGYIMLAADAPTAVPAVS

SEQ ID NO: 112628 - protein, 368 aa, unidentified
MEKIGVVDGRPQEGLAVPRRPPDGTAVWMAIDISRSKAVYCLRWEGSEQRRLSTPLGIEHVRALLDHYRGCQVHVAYEACGFGYELAWWLQEQGVEVSVIAPSRVERLPGLQVKTDRVDAGKLARKLEKGDLKAIYIPRRTVHEQRQLGRTYAQCLKERKRAQVRIRSLMQEQGRLGPLPAAGWKAYSTWLNGQNLPESVRLCVQVHEQLRGVADHQAKRMNAELYTLARSAEYRPLVTALSAQAGVGWQSAIRLVLELGDIERFRTTDALPHYLGLTPSQYSSGELDHRGHTLKCGPGFLRALLLQCAWSAVRHGDDPELKECFTTLAPRIGRKRAIVAVARKLSIKLRRRWRHHLVSSAPASAVTV

SEQ ID NO: 112629 - protein, 347 aa, unidentified
MFTIGIDAHKETLTAVAVDEVGRELGQRMFAATGDGHFALVRWAARWPQRRFAVEDCRHLTRRLESDLLAAGETLVRVHTQLMAGERRSGRERGKSDPIDALAVARVALREPDLPTARLDGPSRQLRLLVDHRDTLVRERTRLQNRLRWHLHELDPLLRVPSRGLRASTHLERVASALDGMEGLVAELARDLVGRCRDLNRRIRDLEGRIQPLVVELGPSLLAIPGCGVLAAAKILGETAGVDRFPSSAAFARFNGTAPIPVWSSNSERFRLNRGGNRQLNYALHMIAVTQLRGIGPGRDYVNRRTAGGNTKTEAIRLLRRRISDTVHRALRADLATQSHSPVLVAA

SEQ ID NO: 112630 - protein, 448 aa, unidentified
MPGSSSPSRRRRARLRVVNPRSAGIDIGSRFHVVAVPAELDDDPVRKFSSFTNDLKSIAEWLLAIDIKTVAMESTGIYWVPLYEILVGRGIEVFLVNARHAKNVPGRKTDISDSQWLQQLHSYGLVRASFQPDPCIAKLRAYFRQRDILVRYRSSHQQHMQKALMQMNLQLHHVVKDITGQTARRVIDAILSGERNPEKLATLRDRRCKETEATIAAALDGNYQEEHLFELKVAVEMFDAYSEKIRECELAGQVVLNELAGGDYVEPKKQASDCQIRSNGFSFNPQALITSLAGHDLLSLPGLGPATVITLISECGLDMSRWPSAKHFVSWLGLSPQNKISGGRVLSSRTRQGATRAGSSFWMAAVPISRTNTALGAFQRRLSARVGKGKALIATARKIAILYYKMLRYGMAFQEPGASAYQKASQERHVRGLERRAKALGYQLVPTG

SEQ ID NO: 112631 - protein, 241 aa, unidentified
MILEHNLPTTPKGIHQVFSKIPRSRIALETGTHSPWVSRQLSQMGHEVIVAHARNVRLIGESSRKDDQLDARTLARLARIDPGLLGPVRHRSAKAQIHLTVIRARAALVSTRTALVNAARRLTKSYGERLKKCGTEQMNREIAKGLSQELQDALNPLLGEIESLNERIAEYDRRVEQIAKEIHPEVALLKQVKGVGTLIALTYVLTLDDPHRFRRSRDAGCFLGLRPEAFVRGMRCSELTG

SEQ ID NO: 112632 - protein, 317 aa, unidentified
MQETTPLTAGIDTAKDKLDIAVPGQAAGLVVGNDAAGWRKLVRELARLGVGRVGIEASGGYERGAVTHLRRAGFTVLLLQPLQVKAWARLHLRRAKNDTLDAALIAACAAVLDPPAVEPDARLVPLADHLTFVEQIEEDIVRLKTRLEHLHDPRLRRLAATDIARLRRRRTAELRRIAAALAQHPDLDARLQLILSVPGIGQRTALAILIRLPELGRLSREQAAALAGLAPFDDDSGQHHGQRHIAGGRARLRRSLYAAALPAAFRWNPTLHTLYQRLIARGKTHKTALVACARKLLIFANTVVARGTPWTSDPAAI

SEQ ID NO: 112633 - protein, 360 aa, unidentified
MHATTVAVDLAKSVFQIAVANEHWRIVETQRLTRSQFERWFANRSVGLVVMEACGSAHHWARWLNGLGITVRLLPAQYVRAYVRRNKTDATDAAALLEAARAADIRPVRVKSVEQQALQGLHRIRSLWMGTRTSRINALRGFCREFGITIPQGARTGVETIGRVLADPRSAVPELIRHTAGMLLEEIRLLEVRIAQVERELASVARHSPACTLLLSVPGIGLLTATALVAATSGDVTHFADARHFSSWFGLTPREYSSGSSRYLGRISKKGDRYLRMLLTHGARSVLRAAKVAEGAGKDVCGIRRWALEVQGRSNHNKATCALANKLARICYATLRDHAPFDEAARLNKKQSRQSFALPA

SEQ ID NO: 112634 - protein, 406 aa, unidentified
MKLFVGLDVSSFDIKVCLLNGEGEELETFAVSNDLPGATLLRDRLLEVAKNQSIETFKIGLESTSVYSFHPSMFLHYDKALTELGAQVFVMNPKQIANFKKSYADMDKTDEIDAFVIADYLRFGRNQMSVVKEEQYIALQQLTRSRYQLIHQVTSEKQHFLQHLSYKFNTFSQEVDSSVFGHAMMELFSEKYSLEELAEMPLEDLANYLQEKGKNRFNDPKQVAKSIQRAVRSSYRLNKVVEDSIDVLLGTSIEVIRTFQKQIKEIDKAIERIMAGLTETLQSIPGIGPVFAAGIIAEIGQIDRFEDETRIAKYAGLYWRKHQSGRFTADDTSLSRNGNQYLRYYLVEAANSVRRHIPEYQEYYEKKFNEVPKHQHKRALVLTARKFVRLVDALLRNHQLYTPKGA

SEQ ID NO: 112635 - protein, 422 aa, unidentified
MLEETNDTEEIIQRVAALDIGKAELVCCVRVPDPRGSGKRLQEVRTYATMTRSLLVLADRLAELGVTRVVMEATSDYWRPPFYLLESHGFTVWLVNAKDVKHLPGRPKTDKLDAVWLCKVAERQMLRPSFVPPPAIRQLRDLTRYRADLVATQTAEKQRVEKLLEDAQIKLSVVASDIFGVSGRAMMAALIAGERDPGVLAELARGRMRAKRSQLVEAFTGRFSDHHAFLLETMLSRIDQAGADIAAVEAKIAEQIAPFQAAADRLDEICGIGRTAAQVIIAELGVDMSRFPTAGHLVSWARYAPGVKESAGKKKGKATTGHGNPYLARVLGEAAISAGRTDTFLGERYRRLAKRRGTKKAIVAVGRSILIIIWHLLSDPDARFHDLGPGFYDTRIDAERRKRNHIHQLEALGYKVTLQPAA

SEQ ID NO: 112636 - protein, 318 aa, unidentified
MTYTQQQTALYVGIDGSKETLAVATYPTHQVKVIPNDADHCEALADELAQQSVQFVLLEGSGGFEKLIVRALQQAGVPMAIVPPQRARYFAKSLRGNLKTDRVDARLLARFASCYLALEATEVPAVQAQLKELWARREQLVQMLESEKKRVQVATHPLVRASLERTIAGLHAELAQIEAAIEALVASDEALAQKAALLQTVVGVGWVVASGLLAELPELGQVSHKVIAALAGLAPVRRESGRWRGSARIGGGRCRVRRLLYLAAVVAVSHDARWKAVYQALLAKGKAKKVALCAVARRILVVMNAMVRDGRAYERKRE

SEQ ID NO: 112637 - protein, 399 aa, unidentified
MKAYIGIDVAKRHHYAWILGAVAPHKNPFVFSHSEQGFTRLAEWIGSAAPGQELIFGVEPTEPFSGALSAWLRQRGWTCHLIPGVYCRRGKYFYTNSGLKNDTIDAQVLAMLLRDGQFKTHVPQAEAFGELRELSNQYLRLASMRRASLQRIHSLVDHIWPEFSLHIKLRTKTALALLRRFSRPSEVAALGQAGFEKFVWEVSAGKLKQETAVALYESAIASIGLPRQSNAVEMRIELELLDYFDDCYAEMQEAIIGWCQHIPYAKNLRTIPGFGPLLTGLLLGQAGDLRNYPTPRHLYKVAGVNLTERSSGLYKSPVRISRSGSPALRRCLFSAAASQCGGSRGKGIFREWYLERRERSIPRSKTVIAAARKLLRVAHAIARDGGHFRDCRLPTPVCT

SEQ ID NO: 112638 - protein, 349 aa, unidentified
MNFYTNTHPYYCGIDLHTRLLYVCIIDNENNNLVHEKIDDSPEKLLALLTPYLGNIVVGVECMHCWYWVSDFCEQHNIDFILGHALYMKAIHAGKTKNDKIDALKIAKLIRGGNFPLAHAYSKEHRSIRDALRRRTHIMRMSAQLKAHVASTISQYNLPALETRLNLQNSPDRQKMHHFFPDEAVQKSMDLNLNIISTMVHELYKIEHYVKTQAQTHNARDLHILKSFPGIGKILALTILYEVGDIQRFPSVQKFASYSRLVKCKAESAGKSYGTQGNKIGNAHLKWAFSEAAVLYLKGNDNAKRYLANLQKRMSKAKALSALAHKIGRCIYFMLKNQQVFDEERFLNG

SEQ ID NO: 112639 - protein, 348 aa, unidentified
MSQILNTVAVFGIDIGKNSFHVVGLDRAGALVLRQKWSRGQVEARLANMSPCLIGMEACVGAHHLSRKLKALGHDARLMPAKYVRPYSKGQKNDFRDAEAIAEAVQRPTMKFVATKTADQLDLQALHRVRERLVSQRTGIVNQIRAFLLERGVAVRQGLRFLRAELPRILAAPPEVLSARMIHVIEGLAEDWRRLDERIDCLSGEITALARQDAGCKQLVSVPGIGPIISSAMVAAIGTGDAFSKGRDFAAWLGLVPKQISTGDRTILGKISKRGNRYLRVLFVQAAWVVLIKPQSWERHGLKRWIEAAKKRLHRNVLAIALANKLARIAWSVLARSRIFEASKLQAA

SEQ ID NO: 112640 - protein, 374 aa, unidentified
MSVGKKFIGLDVHQDTIAIAIADDGVDKEVRYYGTIANRAEPLRVALKKIGQDGSELRVCYESGPCGFVIFRFLAKIGVDCIVISPSSMPRRQGDKVKTDRRDAKTLARLLRAGELVAVWVPDEAHEAVRDVVRARRQVKDDLGSAKSSLKSFLLRHGRRFTSKAIWGKAHWGWLAEQKFAYPHQQFVFEEYKRRIHDLIDRCNQLDEVLKEAVSGWTLSPLVYALQALRGIKLTAAVTLVAEIGDLHRFDSPKQLMAWLDLVPAEHSSGRRIKRGEITRSGNAAARTMLIESAWNYRFPAREGRSLIERNGDIPERIRAIAWKAQVRLCARFRRLAASGKQTVKVVTAIARELAGFIWDIARHTPAIAVEVPR

SEQ ID NO: 112641 - protein, 344 aa, unidentified
MEYFAGLDVSLRTCAICVVVAKGKVVLERELPCEVDDITDCLNSCGHVIERVGFEAGTLSQHLFFGLTNEGFDVVCMEARQVNAALSAMRNKTDRNDARGIAHVLRTGWFSPVHMKSREAHGVRALLSARKALLSKTIDLANEVRGLLKIFGLRLPKTVQHGSFDELVRPMIDMDEVLAHALIPLLDARLVLYQHFLELDRRVKRAAARDETCLRMMTVPGVGPIAALTFKAAVDDPARFKKSRTVAAHFGLTPRRYQSGEHDNPGRISKAGDRDVRATLYAAANALLMRTMAGSQIKSWGMRLMRTKGRRRAVVAVARKLAVLLHRMWADGTEFRPAEVEGTA

SEQ ID NO: 112642 - protein, 358 aa, unidentified
MRIIGCDLHARQQTIAMLDTDSGEFVEKTLEHDGEELRKFYSGLTRPVLVGIEATGSMQWFLRLMEELGIECRVGHPKKIRKAETRKQKYDRRDARLLLTLLAENRFPTIWMPSSEQRDLRTLLRHRHQWVRMRSRVQHTLQSMALANGLRRGHSLWSQAGQHELQVLPLAPHASQRRTALLNLYPRFQESIDDLDRQVSEEAHQRPQAQRLMTHPGVGPVTALATEVFLGDPKRFADGKTVASYIGMIPSEHSSGRRQRLGAMSKEGNALVRYLWCEAAMHAVGRDPELKRFYRRKLIQKGMGKARVAAARKLGIRLWIMMRDEIDYQEFCRRGQLRQKSGGARAGMPDFNSGPAVQ

SEQ ID NO: 112643 - protein, 394 aa, unidentified
MSRHDDGAPVAAHDATILVVFELSKSKWKIGVLLPGSSKLSRYTVDGGDLAGTAAVLAKARSRVAGPVRVVSAYEAGYDGFWLHRWLEGEGVENRVLDSASIQVNRRARRAKTDKLDLDQLMRVLAALERGEPKVCSVARPPSVEAEDERRITRERERLVRERVGHSNRIRGLLFGQGVRDLEPLGRGFLQSLDEARTGDGRALPPNLVDEIRREHERLKLTVEQIGVVEARARTLTKVAAKEAQAEGAPEAQTASAADKVARLTRFKGIGQASAWPLVTEVFHRRFDNRRQVGGYFGLDGSPFDSGESRREQGISKAGNRRARALAIELAWLWLFHQPDSELSRWFVERVGTARGPVRKIAVVAVARKLMIALWRYLETGLVPHGAVLGPAGG

SEQ ID NO: 112644 - protein, 343 aa, unidentified
MYYIGLDVHKKTISYCVKDAAGCVHQEGKVGASRRELDGWVRTLPQPRTIAMEATMFSGWIYDHLLPHAAAVKVAHPLMLRAIAAAKKKNDRIDAGKIADCLRCDFLPECHMAPRAIRDRRRVLRYRHLLVRQMAQTKNRVSGLLMETGVEHNRSRLHKVGYFRRLMATSSEIDDNIRPLLRLSRDTIQRCQKTEYALVSSLERDPLLKERIRRLRTVPGVGPITALNWALEMGEISRFRSVRQAVSYCGLCGDEHSSGDKVMRMPLSKQRNKHIQQVLIEAAKLAPRLSPELALVHQKAMERSNNRNRATLAVARKIVAWLLAVDRENREFIPAEQRAGEAA

SEQ ID NO: 112645 - protein, 327 aa, unidentified
MEQRVLGIDVAKETLDIALSDGVHMSHNQFSNTPKGHEQLELWLRKQTNSNVPVCLEATGQYGDGVAEYLFTQGYPVSVVNPARIKHYANSKLRRNKTDKADAQLIAEYCLREKPAIWTLPPASFKDLQALVRHLEDLKGTRQQESNRLQSGVHTSFVLDSLASMCDFIDDQINQTKKAIQDHINQHEELKRMQNLLVTIPGIGKLTAAKLLGEIRNILDFQSARQLAAYAGLTPRNFLSGTSVHKKSRLSKTGNANLRKALYMPAIVAIKHNPIIHSFCAKLSQTGHKPMELVGAAMRKLLHLVFGILKSGCPFDPNYLDLKQAFS

SEQ ID NO: 112646 - protein, 342 aa, unidentified
MTRAITGGVDTHADVHVAAALDPIGGLLGVEEFPVTPAGYALLLGWLGGFGTVGLAGIEGTGSYGAGLARHVTAAGVRVVEVDRSDRQDRRRQGKSDPLDAVSAARAAQSGRARGAPKGRDGAAGAIRALMAAKRSAAGERTRTINQARALIVTGPDDLRTRFTQHTAASLVAGLASLRPRPGDVVGYATRIALRELGRRAEFLDGQLERLDDLIVPLVTARAPGLLALYGIGPNTAALLLIAAGDHPGRLRSEAAWAHLCGTAPIPASSGKTVRHRLNPGGDRQANHALWRIVFTRLGSDTATRAYAERRTAEGKSKAEIIRCLKRYVAREVYPHLRTAAG

SEQ ID NO: 112647 - protein, 326 aa, unidentified
MIIIGCDYHPGVQQIAWVDTDTGEFQETRLQHREPAEQFYRQLAMRGVQVRLGMEASGQARWFERLLAELKMELWIGDAAEIRAKRVRKKKTDREDARHILRLLVEDRFPRIWVPSWENRDVRQLLWHRHRMVQMRTRVMNQLQAVALNEGLRCKKRLWREKGRQQLESFPLAMWGSRRRGDLLELLDRLNPTIAELTQAIEGEVENYPAAQRLMTHPGVGALTALAFVLIIGEAERFQCGKQIAAYLGLVPEENSSGESRRLGHISKQGSGLMRFFLGEAAQVTVRNDGEWRSKYFHLAMRRGRKDRERSDGASTRGSSVLDVAE

SEQ ID NO: 112648 - protein, 317 aa, unidentified
MSSEPVFVGVDVGKDSVEVATCPPSVRCALPNTPAGRRELVEALRGLPVALVVVEATGGYERAVAADLLEAGQRVVVVNPRQVRDFARGMGELAKTDRMDAAVLARFAQVVRPEARPAPTPEQTDLAELVTRRRQLTALLTQETNRLAMVRHPKVRRSVRTVIRTLEHEIAALDGLIGRHIQSDDQFRDKDRIVRSTPGVGPQTSAMLLAHLPELGRLNRQQVAALVGVAPWDRQSGQWTGRAHIGGGRKEIRSVLYMATLTAIRCNPVIRSFAQRLQQHGKAFKVVITACMRKLLVTLNTMVRNHTLWHPQLVKNA

SEQ ID NO: 112649 - protein, 391 aa, unidentified
MRFAGIDVGSEHHTIAIVDEHGDPIQRSLSITEDADGYRRLRDVLGDPTDCLVAMEATGHYWRNLFASLTTDGFTIALLNPIRTRRFAEEELQRTKTDNVDALGIARFAAQKRPKATQLPHQATQELRQLVHLRRQAIQHLGDRVRNLHRAIDLTFPEFTRYVRGLDTELANAILSRYPSALSLAAVTVTKLAKLCFDGRRRVGPTLARALIAAAKQSVGSLQTAPFELEVRYACQDICEMRERCRQLEGDIQRRIDSHDLGKLFTTIKGISTLTAAAIIAEAGDPARFPNAATFASYVGVVPRLHHSGKRKFSGNGAIPLGNARLRHALWMPVLVAIRVNPWLRAYYQRLRAVGKRPKVAIIACMHKLLAAVYSVAKNRRPFVPRLSADL

SEQ ID NO: 112650 - protein, 315 aa, unidentified
MSAVPCFIGIDVAKAQWDIALRPSGERWAVPNDTSGVTMLVDQLQALSPTLIVLEATGGLERLVTSALATAGLPVVVVNPRQARDFARATGQLAKTDALDARVLAHCADVIRPTPRPLPDAQTQELRALLGRRQPLIVMRTAEQNRLAGTSERLTKDIVAHMTWLNAGITTLDDDIETVLRASPLWRENDDLLQSAPGIGPVCARTLVLELPELGTRTRQQSAALVGVAPLNCDRGTMRGRRMIWGGRAHVRTVLYMGTLVATRFNPVIRAFYKRLLAAGKVKKVALTACMHKCLTILNAMLKHRTPWKAQEVQS

SEQ ID NO: 112651 - protein, 381 aa, unidentified
MIYCGIDWAERTHDVALVDDTGQLLAKRHITDDAAGYRSQMDLLTEYGDTEETPIPVAIETSRGLLVAVLRAGKRKVFAINPMAAARYRDRHAVSRKKSDPGDALVLANILRTDMHAHRPLPNDSDMARAIAVLARAQQDAVWNRQQVANQLRSLLREYYPAALEAFAKWDNGLCRPEARELMKLAPTPAKAASLTRTQITAALKRAGRKRGIESDVERLREAFRTDWARQPELVEDALGKQTLALLGQLTAACTAAADLAQAVEEAFPQHPDSEIILSFPGLGIQLAARVLAEIGDDRTRFADARGLKAYAGASPVTRASGKKSSITRRWVKNNRLNHAGYLWAFSAITASPVPKPTTGGDVTTTETGTPLASAICSTGC

SEQ ID NO: 112652 - protein, 351 aa, unidentified
MRKIAYLAIDVHASNSVLGEMESDGHFRGNQSFTTSEKNIIDTLKAVKAKEKYLTIEEGPLTYWAAQVAAPYVTEVIPCDPIENALIYKSPHKRDKVDTKKLCRLLRLGELNRVYHPENDHRALFKAAAKHYIDLRDQLKALKQKIKAMYRHWGIIDVNGMSVYSPKGREEFLRLIKHIHIHNQLHRLYCLMDKTESMREQALKAMKRMGRKYPEIKEFIKIHGMGEVGAHIFDAYIQTPHRFPDKHKLWRYCRMGVTDRSSDGKQLGFKRLDKSGISELKAIAYRAWMVSMKGDNEVKRFYSESFRRTYSHVHARLNTQRKILAVMYGLWKRGEPYNPQLFLDSSHSGVV

SEQ ID NO: 112653 - protein, 321 aa, unidentified
MTHFNLGIDVSKAKLDCALRLPNGKFRCKAIANNAQGHEGLADWLARHGAAEVHACMEATGVYWEDIAQFLSAQGFAVSVVNPAQIKAYGASRLARSKTDAVDAKLIADFCAERNPPAWQPYSDGELTLRALVLRLDALQAMRTQESNRLDVSRDAVRQGIQEHLDWLDQQIKSVVKAINDHIDANPGMKDKKALLDSVPGLGERTIAILLAFFSDTSRFDNSRQVAAFAGLDPRQHESGSSVKGKPRLSKVGHAFLRKALYMPAMVTLYKTDWGKRFRDRLAAAGKPPKLMIGAMMRKLLQVAFGVLKSEKKFDPALHGA

SEQ ID NO: 112654 - protein, 319 aa, unidentified
MKITTVGIDLAKNVFQVHGVDERGKAVLKKQLRRHQVLTFFGNLPPCLIGMEACCGAHHWARRLQAQGHTVRLMAPQFVKPYVKANKNDAADAEAICEAVSRPSMRFVPIKSVEQQAVLSLHRARQGFVKARTAQANQIRELLAECGLIIPQGIAHIERRVPEILDETSNELPDSMRALLQRLLEHLKELDQRVKELEIQITAWHRNDEHSKKLAAVPGIGPITASALVATVGDAKNFSSGRQLAAWLGLVPRQTSTGGKTVLLGISKRGDTYLRTLLIHGARSAIYAAGRTRKRVDRWLDGLIERRNTNVARCVSTQI

SEQ ID NO: 112655 - protein, 340 aa, unidentified
MQITTKFYLGIDVSKHWFDLSLLTVINHQKQIMVTERFDNNETGIKQMEQWLKKQNVSFNDNTLLVIENTGIYHRLIWEFCSTHKLPIHIGNAAHIKWSFGIARGKNDVIDSQRLCNYAHKHADELKATPELNPVFIELKDMMTSRSKLVSQLGSIRSHLKELKLSNNKATQKLIEQAHKPVLDGLKKSIALIEKQILNIIHKDDTIKTNYDLLITVPGIGHLTAVYILCCTNNFIDKISGKQLACYAGLVPFQDKSGSSIKGRNKVHKMANKELKKMLHLCALSAVKCYPEFKQYYERKKKEGKHVMSVLNAIRNKIVLRAVAVVNNQKPYVENYRKAV

SEQ ID NO: 112656 - protein, 349 aa, unidentified
MTIVGNPDVVIGGVDTHADVHVAAVVDHVGGVLGVEAFATTRVGYRQLVSWLRSFGELVLVGVEGTGSYGAGLSRYLRTTGIDVVEVDRPNRQVRHRQGKSDPVDAVAAARAALSGQATVTPKSRDGNVEAIRVLMIARRSAVDTRIETLNQLRHLVFTASPEIRAKFTGLTAISLANKAATLRPRPGEDPVRQTTLVTIRTLGQRVHYLREEIKGLNRLLRPLIRDTAPGLLEVYGVGFDTAAKLLIAAGDNPERLRSEAAWAHLCGVAPIPASSGKTIRHRLNRGGNRQANSALYHVVITRMRHHQATRDYVARRLGEGKTMGEIARILKRYAAREVFKHLPRPACG

SEQ ID NO: 112657 - protein, 375 aa, unidentified
MSEHSEAFVAFDTSKLRNAVAIADAGRTGEIRFLGEIDNTTTATAKLVRKLCARHRRLMFCYEAGPTGYGLYRQIKSLGHECIVVAPSLIPKKPGERVKTNRRDALSLVKLLRAGELTAVWVPDRHHEAIRDLTRARGAAVLDLRRKRQQLSAFMLRQGLHYPENRHTWTKAHMNWLMSQKLAHAEQRLVFEEMMLAIRQAQERIERLEQAIRAAVPDWSLAEMVIALMAMRGMDLVSTTTFLAEIGDLSRFASPSELMAYLGLVPSEASTGDTIRRGPITKAGNRRARRILVECSWSYQHPPRVGRDKQQKVEAAPPAVREIAWKAQCRLYKRYRALIRNGKLKTIAITAVAREFAGFIWAVSREIATARAAAR

SEQ ID NO: 112658 - protein, 350 aa, unidentified
MNECMARVRTLAIDLAKSVFQVAGEDERGTVVFEDRIKSRESFVEFLRTLKPPLVVLMETGPGAQSWARELQSHGIEVFVLPAQRVEEHRSGAKNDRKDTFAILRAGRDKSIHAVPVKSVERLTMQALHRVRSGYVSRRTAISNQIRGLLTEHGLVFARGEMALVVRLRQVLEDASLPIPFRLRDLIADLWAEWECLGERMAALDAELQSVATTDPLTRRLMTVPGVGPMTATALVCKDLNPERFANARQFAAYFGVVPDQASSGNRIRLRGMSKRGDGYVRSLLINGAHAVLRQVNPACEERKHPHRLRRWKEKLGSKAAAVRLANRNLRIMYALLKNGGSYREDAAMR

SEQ ID NO: 112659 - protein, 427 aa, unidentified
MLIYRNYIVIGIDVSSKFHVASAIDPDGRKLFSNFKFDNNFDGIGSFIKKINELKQSVQTNIVCALESTGAYHLTLLKSISVHGFENILVNPLITNSSRKSTVRKVKNDNFDTFAIIDAVRNQDFKPSIVASSSIMALRQFVRDYYTYSNECTKYKLKLRTLLDSFWNEYSSVFSNISNMTSLTLLKSFPSPKSIIEADKSDIIDILLISKKGLKYANSAYDKLLVVCQHSLDVFSTVYFDCAIRQYVDTIINFEATLNNLKQYVTDFINSDKCDSKVRTNLDLLISISGIGPISAITVLAEISDFSSFKNYKKIIAFFGMDPKVVQSGQFTAKHTPVTKCGSHIARRAIYTIALRCISKTRNGVLINSNIRSYYDAKCVSKAKKVALGHVMHKVVSIMFSVIKNQKPYELITKDEHISRFNLQKTA

SEQ ID NO: 112660 - protein, 329 aa, unidentified
MEIKEVIGIDVSKLTLDCCIHTSRKLKVFGNNFSEIHSLINWVSKSVKNSKDQILFVFEHTGLYSDLLANLLSKNGFLIHLASGLEIKRSMGITRGKDDKTDAKRIATYGYRLREEINPTKLPSMTLVKLKRLMSMRKKLVMQRAGHMATIREHKSILKGEKIFFQVQQRVIAVLTRQINTLEKEMDRIILEDPELESMLQLLVGVKGIGKVTARFLIVYTVGFTAFDTWRKFASYCGIAPFPYRSGTSIRGRTKVSRLANMEGKSLMHLCATSAIQCNPEMKAYYERRLKKGKNKMSTLNIIRNKLLARAFAVISRGTPYVNTMKYAS

SEQ ID NO: 112661 - protein, 241 aa, unidentified
MEQIIIGVDPHKLSATIEVVDGRERLLGSGRFTTDRAGYAAMLKYAKAWPERVWAIEGANGVGRPLAQRLMEAGEQVVDVPAKLAARVRLFDTGHNRKTDALDAHSIAMVAVRTTTLRVLQVDGGLEALRMLTDRREALTRCRVQTVGRLQALLAELLPGQAKMKKATAELKAIVLARGSHLMDIHGVGPVVAARVLADVGDVTRFADRNRFASWTGTAPLDASSRWENSDIAGRRGADAW

SEQ ID NO: 112662 - protein, 422 aa, unidentified
MLEETADREEIIARVAALDIGKAEVVCCVRVPQEGRPGRRLQEVVAYSTMTRSLLGMADHLRSLGVTRVVMEATSDYWKPAFWVLEAAGFETWLVNARDVKHLPGRPKTDKLDAVWLCKVAERQMIRPSFVPPPQIRRLRDMTRYRIDLVGARTAEKNRAEKLLEDAGIKLSVVASDIFGVSGRAMMAALIAGERSPAALAQLARTRMRARIPALQEAFTGHFTDHHAFLLSKMLARVDGINADIAELDAKIEEMIAPFEAAAGRLDEIPGIGRIAAAVIIAELGTDMTRFPTPGHLASWAKFTPGVKESAGKKKGSGATGHGNRYLARILGEAATAAAKTDTFLGERYRRIARRRGAKKAIVAVGRSILVIIWHLLSDPQAHYTDLGPGFYDQRINPERRKRAHIHQLEALGYKVTLEPAA

SEQ ID NO: 112663 - protein, 425 aa, unidentified
MNSISNKKINQVTDQTLVVGMDIAKKKHYACFVDERGRVLKKSFPVPQSREGLEWLYQCIVKAMEEFEKTEVIVGIEPTGHYWLNLAYFLDEKGISLVMTNPMHVKRSKELDDNLPTKHDAKDALVIARLVKDGRFSYPRILKGMEAELRTGATFRSKLVEEQGAVRNQMIRWLDRYFPEFTQVFPSFGEMALAVLEQTPFPSDLAGKEIEEVLTLYRQSEGLQSPQKPKAKKLMELAQHSIGVTEGQQMARIEIATLVRRYRQLEEEIEALTQQLTELVQTSVEYEWLKTVPGLGDATIVELLSEIGSFSHYQDPRQLLKLAGLTLRKHSSGQHKGQKRISKRGRRRLRALLFRVMMPMIRHNEAFRQLHEYYTTRPDNPLRKKQSIVVLCGKLLKVLHAVCTKRQAFDVKRMMQDIFGLETAA

SEQ ID NO: 112664 - protein, 346 aa, unidentified
MRFYSKQHKYYCGIDLHAKNMYVCIVDQQTQILVHKNIAAHPDYLYPIIKPYLKDLSLAVECMFTWYWVSDFCLKYSVSFVLGHAFCMKAIHGSKTKNDKIDSKKIAMLLRRGLIPMAYVYPQRMRETRDLLRRRMYFMHKRSERLSHIQNTRSQYLVEAFDSPVARKRHRHSIVEKFHDQAVAKTIESDLKLLNDYDDVIRDVENYLQRSVKTHDYNTFYLLRSIYGVGKILALVMLYEIHDINRFEKVQYFTSYARLVRPQKESAGKIKGGANKKMGNAYLKWAFGEAVLLLIRESEEVKQLHMKLKNKHGKKTALAILSHKLGRTVYYMLTRQKVFDVDRYVN

SEQ ID NO: 112665 - protein, 330 aa, unidentified
MPDVAGIDVAARKLDVARLSDTGSAQLRQFEQSPAGHRELVAYLRKHQVEAVVMEATGIYYLDAAVALHNAGIPVSVINPRAAHHFTKVMLQDSKTDRIDARLLAEYARRMTLKPWQAPKEDWLALRDIARRINQLTGMRTAEKNRLHALQAQQHTRKTMIDELVAHIEQLEHSIKRLTKVAVDVIDQDPALARYDACLISTTGIARASAVALLGELCLLPQELRSNQISRQAGLDVRLTESGSSIDRPGRLSKVGNAYLRAALHMPSLSLVRHDPRAKAHYEALIARGKKKMQALCAVQRKMLTGLWACMHANEPFDSTKLFAIKPKEA

SEQ ID NO: 112666 - protein, 347 aa, unidentified
MECVAVDQTAEDMSRKDSSAVLSVGHHHCCGLDIHKDKISATSIRTCEDGSIEEEFAEFGTFTDDFCRLKKWLLEQGCQVVAMESTGVYWRPVHNVLEDIFQVILVNARHVKHLPGRKTDVIDSRWLAGLLRHGLLKGKEEELLKSIKGFLSEHHRFQLVSMLTLIETVEKQISLVHDRLCQLLSDRRDKIERLMEVPAISEVSAHALLSDIGETLDQLESAAFLASWAGLCPGNNESAGKRHSGRSPVRNGRVKTIMVEVAWGAVKKKGSYYRESYYSLRARKGSRKAIFAVAHRILKAVFFILKFDKSYRERGDVYLVQLNTKARLHNLQKLAAKLGYTLVAAQA

SEQ ID NO: 112667 - protein, 310 aa, unidentified
METYVGIDVAKDKLDIHVRPGGEAFCVTRDAKGLIELVQRLQALPAPMLIVLEATGGFERTVAAALAAAKLPLAVVNPRQIRDFARAVGRLAKTDAIDAAIIAHFAEALQLEPCPIRDDEAQALDDLVSRRRQLIDMIVAETNRKKAIASKRIVREIDRHLLYLQKLLTELDGDLDDAIRASPVWREKEELMVSVPGVAQKTARSLIAELPELGTLDRRRIASLVGVAPMNRDSGTMRGKRKIRGGRATVRSALYMAAVAAVRWNPPLRDTYQRLRAAGKPAKLAIIAVMRKLVVTLNAIIRDKTPWKTA

SEQ ID NO: 112668 - protein, 369 aa, unidentified
MNDITYVGLDVHKATVCVAIAESGRGGEVREVGVFENRPDVLRKMVARLGKHRRRLNFCYEAGPCGYGLHRLLTGLGHDCVVVAPSLIPMKAGDRVKTDRRDALMLAKLHRAGELTPIWIPDAAHEAMRDLVRARATAVRALSKARQHLQGFLLRHDRIYHGARAWTLAYRRWLTTVRFDHPAQQIVLQDYIHAVEDAESRRDRLTRQIEELMPSWSMAPVAAALQAMRGVALVAAVTVVAEVGDFRRFTNPRQLMAYLGLVPSEHSSGSTVRRAGITKAGNALARRVLIEGAWTYRMSARVSRKLHDRLEPLSAAIRDIAWKAQVRLCARYRRLVAIGKPKVVVTTAIAREMVGFIWAIARVAQPERI

SEQ ID NO: 112669 - protein, 415 aa, unidentified
MTHSALDARPARPAAVVTGGVDTHKDTHTAAVLDATGRLLGHRQFPTTPAGYGLLLAWLRSHGELDKVGIEGTGAYGAGLALHLRVAGVELVEVDRPDRKARRQQGKSDPVDAEAAARAAQAGRATGIPKDRVGAVEALRALRVARRSAVAARAQAQTQMKSLIVTAPDPLRSQLRELGVRQLVAHCAARRPDRGAAAESTTATLIALRALARRHQRLSAEIDDLDALITPLVTQINPALYALRGVGPDIAGRLLVTAGDNPHRLRSEAAFAMLCGAAPLPASSGRTQRHRLNRGGDRQANCALYQIVLCRLRWDPHTRAYAQRRTAEGMGKKEIIRCLKRYVAREVYTALLNPDPSSVPATSCAAQEESTCSARSAARTNEVDTDKRCETIKHGGSTRESTPPPTIAGNPASAA

SEQ ID NO: 112670 - protein, 415 aa, unidentified
MYYGLDVHKDFIQVCRLSGDGRQRLNFPIPATSKAIEAFAGTLSSEDQVALEVTFHTWAIHKILAPHAGRVVPVNSMQVKAIASAKIKTDKVDAHTLAQLLRSDFLPAVRMPSRRAWTLRQLVSHRRFLLKQQTATKNTVHSLLSRQLIPIPDAWTPFARKTREWMRELTIPPAEHFMLNNALDLLEQLEARVANVDEQLLRQARISEDIKLLMTIPGIDVTVAIGLLAAIDDIGRFPTPQKLASYFGLVPRIRQSAGHCYHGPITKAGNSTARALAIEAAQCLAHSSSPLAATYYRVRNKRGHNVAVTALARKLVCVVWHLLCQRQPYRYAPIPRTREKLLRVTSNHTRSRSVPQTLEAVYSEAGLPPNTIATSGERRAAASNRRTITRLAKGPVKTKTVKKIHKEENPALTNS

SEQ ID NO: 112671 - protein, 351 aa, unidentified
MEEYIAFDSHKRYTWVEREEVASGKLRQFRLAHAPGAIRNALVGCAAGTAVAIEATANWYWITDEIEQAGLQPRLVHPRKAKLMMGLTNKTDRLDAHGLNQLQRNKTLPTVWIPPGPLRELRELTRTRVVLVAQRTRWKNRITATLTKWGLPASEYSDAYGKSARGELQTRIESLPTQTRWVVQQMLAQLDVLGEQIRQFEQRLKELVEVTPEMQRLESLPGVGEILAATIVLEIGEIGRFLSAERLASYAGTVPRVHASGDRVRYGRTRVDVNRYLKWAFAEAANSVAVNYKRRPERHVSRLYARLRAKKGHSKAVGAVARHLAEATFHVLSGRQDYRDPAVAVGRTREV

SEQ ID NO: 112672 - protein, 311 aa, unidentified
MSAAEKELSHKSFDNTPEGIQSLLDWIAGYHLSLSKLLFCAENMGSYVTELSVSSVSMGFSLALVCPLTIKKSIGLQRGKNDRIDAKRIANYAVLHYRKLELYKLPNKDLVRLRGWIIIRDNLVKQKVSSIKLLETFSQMAKLADVTESISFLEEQLKSIKEKILQVEEVMEQLIAASSSLCTNYLLLRSIKGIGIINAIVLLCVTNNFQRFDNPRKFACYCGVTPFEHTSGISIRGKTQTSPLANKEVKVYLTRAAITAISWDPQMKAYYKRKIAEGKHKASVINAVRAKIIARSFAVIRRQTPFVTLVV

SEQ ID NO: 112673 - protein, 459 aa, unidentified
MGKAKACKGGKNQLQVIHPRAAGIDVGSKFHVVAVSAEYDPDPVRKFNSFTTDLHRLADWLKAVGVTTIAMESTGVYWIPVFEILESRGFDVILVNAREAKRVPGRKTDIKDAQWLQQLHQYGLLSASFRPGEKIASLRSYLRHRERLTEYAAAHIQHMQKALMQMNLQLQHVVSDITGDTGMRIIRAIIEGERSAAKLASYRNPHCKQSEKTISAALTGNYRPEHVFSLKQAVALYDFYQNQIKECDQEIEKALAALNSDKNSPSEPLPKARRTQKQKNEPGVPIREMLYTLTGVDSTQINGIGPYTTLRLVAECGTDMAKWPTSKHFTSWLTLSPGNKISGGKVLSSRTRRTKNRATTLLRIAAVNIGKTQTALGAFYRRLAARVGKAKAVTATARKLAVLFYTLMRYGKAYVEPGADYYERQYRERVLLALSRKAAALGYRLAQKQETSPVTGNVS

SEQ ID NO: 112674 - protein, 388 aa, unidentified
MAQFQGSAQAAVDYNATIIGALELSEKKWVLAVQLPGVDRHSRHVLDACGHRLVSFVERLKARSAAAGRKIARVIVTHEAGRDGFWLARFLARQGIEVHVMQPSSLPVDRRARRAKTDKIDVEMLLRTLMAWLRSEPRVCSMVPVPSEADEEARRAHREREDLTRERRSIVNKIDGILATLGIKGYRALRRDRRGQLNGARQPGGDPVPHRAKARIERLLDRLELVLKLIDQVEAARDAVLEKDAPADEAERMIRSLTALRSIGPDIATLLVREAFVREFRDRRALAGYVGLGGTPFSSGGSEREQGIGKDGNRRVRAAMVELAWTWLRWQPDSALAVWFRVRVGAMGGGRIRKIMIVALARKLLVALWRYVKDGVIPEGANMKVAAA

SEQ ID NO: 112675 - protein, 341 aa, unidentified
MGEVSTVGLDIAKSIFQAHGADAAGEVVFRKKLGRGRLLSFFADLPPCVVALEACAGGHHWGRELARLGHTVRLIPPAYVKPFVKRQKNDMADAEAICEAAQRPTMRFVPVKSEHQQASGVVFRARDLLVGQRTQVINALRGHMAEYGYVTAKGVGHVQRLIERIEDPEGDLPPAARASLQVMVQMLRTLAEQIVVLDAEIARRAKEDPVARRLLTVPGIGPVTAAAIVALAPSPETFGCGRDFSAWLGLTPRQHSSGGKERLGKITKMGERTLRRLLIIGASAVIKQASLRGAPAGSWLAQMLSRKPKMLVTVALANKSARIVWALLAKGGVYRAPAVAA

SEQ ID NO: 112676 - protein, 320 aa, unidentified
MMAQNDLVVAGIDVAKDKVDVCIRPLQLQRTFASTAEGRRELASWLRRKKVGKAVMEASGGYEREWAKALRDAKIEVRIVDPKRVRDFAKSAGRLAKNDTIDAEMIAWFAETFDEAPGQVHDAAREELAQIVNARLGLLDLQTKLQNRDEHAGPEPVQKMHARLLKKIAAEVAKLEAVIAAMIKATPRFAELAEIIESVPGLAETTSATLIAKMPELGQVNNKIGAALLGAAPYDDDSGRRRGERHIKGGRRKVRNLFYMACLGAATQHNPVLKAFYDRLIAKGKKPKVALVACMRKLIVILNIMIARRQKWNPGLYALG

SEQ ID NO: 112677 - protein, 355 aa, unidentified
MNAIKYIGMDVHVATISIAVLDANGKLIMEVTIATQAGALLDFIRGLSGTLNVTFEEGTSAHWLYTLLEPQVAKVVVCDPRQNPRRLGEKKSDRLDARKLAEWLRLGTLKPVYHGNSLGPALKELARSYRTLVSDTARVMNRLKALYRARGIGCAGTRVYSPRFRDQWLEQLREPGARARAERLYRQLDLLLPLRQEARAAMVAESRKHPAHKILCSIPALGPVRVALLLALLQTPYRFRGKRQLWTYAGLALVTRTSADYQVVGGQVTRARKPALVLGLNANHNHTLKGLFKDAAASTLAHPGPFKDFYTTRVAQGMKPELARLTLARKIAAIVLTLWKKGECFNVEHVKAQAA

SEQ ID NO: 112678 - protein, 341 aa, unidentified
MKQYVGLDGSMEETNVCVLDDAGMVVFVGSTPSRPEALTKLLRAQAQHAERIALETGSLSSWLWCELKAVGFPVVCLDARHAKAALSMRINKTDRNDARGLAELVRIGWYREAKVKSMGSRQVRAVLAARSKLVDLRRDLENQMRGLLKSLGLVIGKAGVRALPSRIATLLRQAPHLRPLIDPLMAAHSTLAKQVAKYDAQIRELAKANQTVRRLMTVPGVGPVTALAFVSTVDDPHRFARATDVGAYLGLTPRRYQSGELDRNGRISKRGDRLARYYLFEAANVLLTVVRRPSSLKSWATKLAKRVGPKKAKVAVARKLAVILHCIWTDGTKFDWGRTTA

SEQ ID NO: 112679 - protein, 362 aa, unidentified
MTMIGAERPETRVEVILGVDTHLEFHVAVAVDHLGRRLGESSVPTTTKGYERLLCWAEGFGPVRCAGVEGTSSYGAGLARHLKTQGVEVLEVERPKRRQRSPRRNVKSDSSDAERAARAVLAGETSGAPKSGDGCVEMIRALRAARRSAMKARTQAANQLQGLRVTAPDELLNRLRGLSTKELVAAAARFRLGDDPRDVPAATKFALRSVARRYEALSGEIAELDAHLDRLVAQVAPELVSLLGIGTDHAATLLIVAGDNPKRLRSEASFASLCGVSPIEASSGKVVRHRLNRGGNRDANRALYMICLARMRRDRRTQEYVARRTAEGKSKREIIRCLKRYVAREVYRVLISCVACSSPIGS

SEQ ID NO: 112680 - protein, 375 aa, unidentified
MNQGTDPILVGIDLAKDSFTCAVWHPSAEEIRSFLLTHEGLADFCQFLDHYGPFPESFVFGLEATGPYTNLLLAWLVDHQVRVHLINPLLIYRFAKAQSLRRAKTDAIDAHTIAAYMAQATQLPKPISACDNLLPLAHEYEQITDQIARIKTQLRQQLHSLFPELAGIPGLFARYLLGTLLVFPSARAIRDAQPDDLLSTWSAALSATGKPPAMNCQRLSDLALHSIGVDSLQREFVLQSKIRQLLHLLSEQKILRDSLAQAVRREHPQAWHILSAIPGLGPVTVAMFLAQVHSIDRFPSHKQLIAYVGTDPTVYESGQYRAPGHISKRGSPHLRKTLYLMAQSVIRYTETFANHFDRLVSRGKPYRVAVIATAN

SEQ ID NO: 112681 - protein, 327 aa, unidentified
MITIGIDPHKRSLTAAALDPRSRLLSQLRVPTTGQAAQQLLTWAAAWPERRWAVEGATGLGRGIAQLLVAAGEPVVDVPAKLAARARLLGTSSARKTDLADACSVATAALHHRRLRPVTLEDHTVVLRLLSDRRDDLVAERTRTLSRLHVLLAELHPGGATRELSATRAADLLRQIRPMTTVATERKRIARELLADVRRLDRQIKTASQAIRTAVSEHGTTLTQVHGVGPVLAAKLLGHAGDITRFPDRDHFASYTGTAPVEASSGDVRRHRLNRGGNRQLNTALHLIAVCQIRDPSPGQAYYQPKLDQAKTPEEARRSLIGRVSVV

SEQ ID NO: 112682 - protein, 386 aa, unidentified
MKCNDLSRSLVAFDQNSTLVAVVELSLNSWVAAGVVPGLGRDPVKKQSADCNALLKLLHRWRDEAIKAGGEIKRMVVAFEAGRDGFWLARWLRDQGIEVYVIHPTSVAVSRESRRAKSDRLDTQVLKRAVLGWLRGEPKHCSMVEIPTLAQEDAKRPNREHDHLVGERTRIVNRMKATMARHGIRGFKLNLRKARKQFAELRMPEGGPLPPNTLAELERDVARLQQVRDQINTIEKQRLKRLRAAPQEGPHPMILLLAKVLGVGIETADMLVNEALWRNLRDERAVGRYAGMTGSPDESGSKRREKGLAKAGNARVRRGMVQLAWRWLMFQKESALTKWFRARTAGAPRDVRKTMIVALARKLLIALWRYVTTGEVPAGAKLRPAV

SEQ ID NO: 112683 - protein, 361 aa, unidentified
MVYLGVDLHRKRSVIAGLAEDGTVLFSRRIASRPEDFQRVFGELEPSSLSVAFEATYGWFWFADLLADAGIEAHMAHPLATKAIAAGRVKNDSVDARTLAHLLRTNLLPEAWIAPPAVRERRRLARTRTSLVRIRSRLRCQVHAILADHYVQPPVDSIFGAGGRRFLASVELPGVDRGRVDAALRLTDAITAEVISVDKELRAAFAGDERIRRLMAIPGVGFLTAAVVLAEVGDATRFASADQLASWAGLTQTERSSDEHTRRGHISKQGSRWLRWMMVEAASRPVRDPTLRRFEEGIARRRGAKIARVALARLLTLCFYALRDREGCRAFPLRAHARASRQIRPGALAKSHDLPHGTVAA

SEQ ID NO: 112684 - protein, 312 aa, unidentified
MIAVGSDISQKTIDVQILDENETYIKIQNNEIGFNKLLKKLSDNPCNYHFCMEATGNYYENFADFLVENGFQVTVANPLKISKFAETEFQKTKTDKQDCKLIAQYCQEKLLKKHGTYKKPTEQQYQVKRLLSYINQLKQQKTALMNRQKNCKDEFIEIELKKQLVELKAHIKTAESKLSELTKSEEKDRLKTIPAISETTARVLVHFLTMFDFKTANKFTAFAGLSPQQRKSGTSVNKKEKLSRYGNRILKTALYMPAVVAYRMGVFKKMTDRLEKKGKSGKVVIMAIMRKLAVLAFNLYKKGQVYDIRKFG

SEQ ID NO: 112685 - protein, 387 aa, unidentified
MYFVGIDISKYKHDCFICTETGEVIESNFSFPNTSDGFEQLLNLLKSIDNFKEIRIGFEATGHYGMNLKLFLEKNNYSFMEFNPKLVKEFISGQTLRKTKTDKKDAYQITKYLISADYKPHPKQFYHKYSLKSLSRMREKLVKQRSYYEVALTNVLDHIFPEYKPFFNNTFSASSIFILSKYKSPDKIKNMKDYDSIRKISRGKFTSAQFFLLKDLAKNTIGTSNEIFELELETLLILRSQIEVEIKKLESNIEEIIKELNPPILSIKGIGYILGAGIVSEYGDVSRFKSADAMVAFAGIEPSICQSGTESHTGHMVKHGSGHLRYYLLNAADCIFLHEPIFTEFYYKKRNEGKSHRVALNHVAKKLIRIIYKLETENITFDSSKVK

SEQ ID NO: 112686 - protein, 299 aa, unidentified
MQIRSVGIDLGKTTFHLVALGDNGEVLLKKKFTQKQLIDFTANLETSLIGMEACSGAHFLGRALRAQGHDVKLIPAQFVKPFVKSNKNDFIDAEAIAEAVDRRNMRFVPIKTDDQLDLQALHRVRDRLMVRRTSVINQLRAFLLERGMVFAKSPIRLREAIPEVLENANENLTPRLRNLVAMLWSEWKHMELQIQEMNNEIERIASSDAACCRLRQIPGIGPLVATAIVASIGNGAAFRKGREFAAWMGLVPKQHSTGGKTKLYGISKRGNRYLRKILVHGLVPSCCDRREIGLRWAHG

SEQ ID NO: 112687 - protein, 343 aa, unidentified
MNIASIGIDIGKATFHLVALDEHGSIVIRKKFSRKGLLAYSAKLTTSLIGMEACGGAHCLARLLRDQGHQVRLIPGQFVKRYREANKNDYLDAEAIAEAVTRKNLRFVPIKTEDQLDVQGLHRVRERLVHNRTEVINQIRGFLLERGVTFNRGPLSLSKEMPDLLEDAEQNLTPSLRTLLSHLWQEWQGLNSQIDRISAALEEVAERDAACQRLRKIPGVGPLVSTATVAAIGNGAAFKRGRDFAAWLGLVPKQHSTGGKAKLLGITKRGNRYLRKLFVHGARAVLLRVKYDTAGFGQWVHRLAARAPRNKVIVAIANKLARIAWVVLASGNEYQHQPVAAAA

SEQ ID NO: 112688 - protein, 392 aa, unidentified
MMISVGIDVSKDKHDCFIVSSEGEVLADAFMIPNDIDGFHCLLQRIQDCATPQDKIKVGLEATGHYSYNLLGFLLDNGLTTYVLNPLRTNLYRKSLSLRKTKTDRVDARTIASMLLSDAGLKPYTDTAYHNEELKSLTRYRFDKVQERAKLKSSVSRLVCILFPELEKLVPSLHIASVYALLEEFPSAKQVASAHLTRLKALLETASKGRYKRDMALAIRNAARNSIGSRMPAKSLELQHTIRLIRELDTEITEIEEQIQSIMDELHSPITTIPGLGFRMAAMILAEVGDFSRFDSPDRLLAYAGMSPSTYQSGQLKNCYSHMEKRGSRYLRYALFNTTKYVCHWDTNFAAYLAKKRAEGKHYNVAISHAAKKLVRLIFAMEKSGTPYHLTV

SEQ ID NO: 112689 - protein, 377 aa, unidentified
MAKLEGFDRIIGMDLSKRTFKACLLTREKNFEDRKIFSGSMTNEGRKHILSQLGKTDVVAIEGGTSSNNFARELEKVAGKVFLLNPGKLHIIFQSQRKTDAADCAKIAKFIRDTHEDNICDMEIPTEAESELRELVNSYNFAKKQRTQLINKLHSIFNMNGYPEVRAAHLKDNESRINIIAELLKGVAFNDALLVEGMITSVEFAIEDYLEMMRGFVLANPEVSLPWLSLPGVGMITCASIMAYIGDCSRFYSAKQLRNYVGLVPIIDQSGDHNWQGGTTSFGCMPVRRNIMQCAWSMDHRKSDSCQLKVEWDRIVLRGKRKSSAAIHVANKLLTIGWTLQKKHELYNGFGDYSNLKAKLRREKLEGIDTSKFPDLA

SEQ ID NO: 112690 - protein, 384 aa, unidentified
MNKHSMIFIGLDTHKEFHEVAYCEEQRGASAVHYGRIPSSKVSVKKLIRQFESKYPGATIHVVYEAGPCGYWIYRLITSLGHCCYVVAPSLIPKKPGEHIKTDRRDALKLVKLLRSEDLTPIYVPEPEDEAVRDLSRARELAMKDLKEAKYQLKALLLRNNIRYEGSANWSKKHLRWLTELILPHPAQHIVLQEYLQTIEERIRRLERLDNELTHHVHQWRYYPVVKAIQAMRGVRLLVAVGVVAELGDLHRFDHPRKLMAYLGLVPSEHSSGGKRHLGAITKSGNGRARRLLIEGAHSYRYPANVSTNIQIRQEGLPKDIVDIAWKAQLRLCKRYQRMSKKGKHYNLIITAIAREMAAYIWAIAKEVVLTPVNPKLRLSRVPA

SEQ ID NO: 112691 - protein, 424 aa, unidentified
MDRVLERPAALDVHKEQVTACVRTPGENGRRDQHVREFKATVRGLLALADWLKALGVSHVAMEATGVYWRPVWAVLEGDFELLLCNAAHVKNVPGRKTDVADAVWLCQLLEFGLLKASFVPPAAVRELRELTRRRRTLVRERAQEANRLHKTLQDTGIKLDCVASDILGVSGRSMLDALIAGQRDPQVLANLAKGRLRVKIAELQEAMEGCRFSAQHALLIGGILRHIDFLDAEIAALGEAIGAHMAADRQREDSERPFELAVQIACSLDGIQARTAQMLIGEFGTDMSRFPTDAHFASWAAQCPGNHESAGKRRSGRSRKGPKWLDGALHDAAMGAIRVTDGHFARKYRRIKARSGHKIAIGAIKHAIMIALYHMLKNGELYRPPTPHPDAERKQRERTTKRLIAQLERLGHSVTLQEGAATT

SEQ ID NO: 112692 - protein, 346 aa, unidentified
MTIVEATRPVTGGVDTHLHVHVAATLDSIGGLLGVESFPTTPAGYRKLLGWMGSFGPVERVGVEGTGAYGAGLARYLHRRGVTVIEVDRANRQARRQAGKSDPVDAVEAARAAQSGRARGVAKTRDGNVEAIRALMVTKRSARTVRTKTMLQIRHLCFTGPDELRQRLQPLSAIMLAREAAALRPRAGGDIVAYATKVSVQTLARRVLALDEEIVRIDELLADLVERTAPSLLALYGVGVDSAATLLAAAGDNPERLRSEATWAHLCGVSPIEASSGKVVRHRLNRGGDRQANAALWRIVMVRMNSHPPTRAYVERRSKEGRSKLEIMRMLKRYVAREVYRHLPRA

SEQ ID NO: 112693 - protein, 366 aa, unidentified
MKISPVAIERIQIFKESQRTIGMDLGDRSSQYCILNEAGEVIWESKLPTTPKGIEEVFSRIPRSRMALETGTHSPWVSRQLTELGHEVIVAHARNVRLIGESSRKDDRLDARTLARLARIDPGLLSPVRHRSAKAQIHLTVIRARATLVSARTALVNAARGLTKSYGARLPKCGSEQMNREIAPGLSQELREALDPLLAEIESLNERIAEYDRRIEKVAKEAYPEAALLRQVKGVGPLIALTYVLTLDDPHRFRRSRDAGCFLGLRPGRRNSGMSEPQMHISKEGDRYLRTLLVQGAHYILGPFGQDSDLRRWGLKLAKRGGKNAKKRAVVAVARKLAVLLHKLWISGEDYEPLRNNNHKVVAAVA

SEQ ID NO: 112694 - protein, 321 aa, unidentified
MLSLPIVLWSEAMSIHVGIDTGKSMLDVGFYPGKRCERFANTAEGHRALLLALAPLDVPHIAIEATGGYERGIVDALAQAGYCVTRLASHRATAYARAMGSFAKSDALDAQMLARMAAHITPQPYEVPATERAELAELVRCRLQMVSQRDDNKRRLLQTRLAAAQQALRGMIEAASMQIRELDRCIATATKVADPASRLREVPGIGPVAEATLIAYLPELGRLTRQQIAALVGVAPYIDQSGCRNGARRVRAGRWIVRRAMYMATWAAIRTKGSALGERYRALRARGKVAKVALVACMRCLITAINAMVRDQVGWRQSAAA

SEQ ID NO: 112695 - protein, 345 aa, unidentified
MKYFAGLDVSLEETAICVVDESGRIVKEGRAVSEPQALSQALRKVDLQLERIGLEACSLAAWLYDGLRAEGLPVICIETRQANAAMKTMPNKTDRNDARALAQIMRTGWYRQVHVKSQQCRLWRSLLVARRTVLNEMRTIENVVRSILREAGIKLGTPSRAAFADRVRELIGADTVVMALVEPLLAIVATMLREFGRLTKQVLNIARKEQVCRRLMSAPGVGPITALAFRATIDQPDRFRRSRDVGAHLGLTPARYQSGETDIQGKVSRCGDELARTALYEAAHSLLVLSKKWSSLRAWGMNVARRRGMARARVAVARKLAVILHRMWSDATEFRFGKEAGPASA

SEQ ID NO: 112696 - protein, 317 aa, unidentified
MSKRSIICAGIDTGKYKLDVALHGRPERLQVANTAEGHEELFVWLRQHRVKRVGIEATGGYEQTVVRRLRQGRFVVVVFQPAQVRAYGRFHLRLAKNDKIDAALIAACTSDVRTIHAPPDRRLAELAELQTQIDQVVRAMARFKNHRESCRDAGLRQLWDDEIRRFRGLFRQRLKQLVAAIRQHPDLAERLDLILSVDGIALRTASALVVRMPEIGQLSRGQAGALAGLAPYDDDSGEHAGDRHITGGRERLRNNLYAAAWIASLRWNPQLTALYKRLRAAGKEHKVAVVACARKLLIFANAVVARGTPWEVRTIAH

SEQ ID NO: 112697 - protein, 396 aa, unidentified
MTTIGIDIGGRSHAVARCRDGDQRADREILRVSQSRAGFAALDTWLERQTDPVRLVTMESSGHYWMPLASHLRRRDVPVAVVNPLAAKYFARSRLARTKSDPADARSLAEMAMRDTPPTREPLAGVELRQAARFAMTLVAEQAKVCQRLIRLVELGFPELGELFDDPTCRTARAVLRVAPTARAAVRRRTVTLANANAGPGHRRLGLAKAERLQTAAADSIAVPELDAEVAFEVDLLLDQYDVLEGQIAKADRRVAGLLDGETARRLQTIPGVGPAIAATLLAEIGDIDRFTDFDQLLAFAGVHPAERSSGRKGANPETAWHMSKAGNSHLRAAAYRLAVVGIQHNPVIRAHYARKRAAGKSKMNALGHCMRKALSLVWGVWRNGQDFDPNWGSER

SEQ ID NO: 112698 - protein, 388 aa, unidentified
MNYMGIDISKYKHDGFILSCFGEIVNEGFSFTNDADGFKKLEQELNLCGKGNVRVGFEATGNYGLNLKLFLERTGFEFMEINPLLVKEHIRGKSLRRTVTDKLSAKAIAEYMLSNGYRPHQTEFYSLFALKQLTRFRSRLVSIRSSYLVKMTNVLDCIFPEFKPLFGNKFSVTALYILANYKTTQAIANMNSRSYDLLRRKSRGSFGMDKFVTLKYLAKNTVGVYDKCYGTQLDTLLDLHSQIDCKITEIEDEITRIVNELNPPTLTVKGIGAISAAVIISEFGDISRFDNPSKMLSFAGLEPGYFQSGTFEHTGHMVKRGSPYLRSTLLNCCRSMRLHNEAFAVYYHKKISEGKHESVALSHMAKKLVRLIFALETKGVAFDPEKLR

SEQ ID NO: 112699 - protein, 348 aa, unidentified
MLADELDYVIGVDTHRDEHVAAVVTAPAGAVIAGKTARATACGYRDLLRMTERYGAGRRAWAIEGTGSYGAGLARYLAERGEMVLEISRTPRSERRLRGKDDTLDAERIARAALVAETLPLPRVGERRDALRLLLVARRSAVDVRREALTQLRAVIVTAPDALRQELRGLPTGKLLDRCSRLRSTRSAGADELATRLVLRSLARRIQAATLEAGELERELLALVRALAPALLDEPGVGPVVAAQLIVAWSHHGRLRSEACFARLAGVAPIPASSGQTVRHRLSRGGDRQLNRALHTIVLHRRQHDPATKDYIARRIAEGKSKREATRLLKRYLARHLYRLLEQQPQMT

SEQ ID NO: 112700 - protein, 355 aa, unidentified
MTSTKYIGMDVHKESISIAVRNSVGKVVMESVIETKASMILQFIDGLRGDLQVTFEEGTSAAWLYDLLKPHVTKLVVCDPRKNKSMREGNQNDKIDACRLAELLRVDHLAPVYHGEHGLRTLKELVRSYLTIAKDLARVKSRVKAIYRSWAIPCTGKQVYARCHRAEWLGKINEPGVHRRAEFYYQQLDALRVLRQEARRDLLAESKKHKAWKRLCEIPSIGPIRAAVLLGILQTPHRFRTKRPLWNYGGLAIEMHSSADHRRVDGQLQRSRKNVLVRGLNRNCNHDLKNLFKGAAAVASSKPGPFQEFYAGLVAKGMRPEMARLTLARKIATIVLIVWKKGVCFDASHLKPQTA

SEQ ID NO: 112701 - protein, 344 aa, unidentified
MNVTTVGLDLAKNVFQVHGIDSTGGVIVRRSLRRRQMMPFFGKLEPCLIGVEACATSHFWARELRALGHEVKLMAPAYVKPYVKRGKTDAGDAEAICEAVTRPTMRFVAIKTAEQQSVVALHRTRGLLVGQRTQLVNMIRAQLAELGIVLAKGIHHALRLVDQLVEGVVPDIPALACKIIIALAEQIRELQARIAMLEGEIKAWFRGNELAKRLETIPGIGFITASALAASVTDPHRFTSARQFAASLGLTPKADCSGGREGQGRISKMGDRYLRRLLVNGMTSQLQSARRKPDAYPWVAGLLASKPNKLVAVAMANKAARIAWVVMTRGEVYRAHRPATEGTA

SEQ ID NO: 112702 - protein, 445 aa, unidentified
METLIPRAAGIDIHKKTAVVCVRLTSPDGSVERLTQTFGTMTADLLKLSAWLTSLEISHVVMESTGEFWKPLYNLLEGSFEVLVVNAAHVKHVPGRKTDMRDAEWLSELLAHGLLRASFIPPQVQRDLRDLTRQRTNLVRDRATVVNRLQKVLEWSNLKLAAVATDVLGVSARAMLEAIVGGESDAQVLAELAQGRLRAKRALLEQALSGRVRQHHRFLIAQHLEQIDFLDEQISTFDTAIAEALRAGPTAPPQAPPTGHQSSDERASETPGAVDGALLWDQARAIWDSIPGIGPRVAEQLVAEIGTDLERFADAAHLASWAKLCPGNNESAGKRRSASIGRGNQWLRTSLVQAAHAAVRVKESALAHFYRRIAARRGAKKAIIAVAHKLLTIGYTLLLKREHYSEPDLSEREVQRREQLARQLQRRLARLGYTTQIESTTAAAA

SEQ ID NO: 112703 - protein, 359 aa, unidentified
MQTQRKELNFEGQSVFVGLDVHLKSWTVSIFTEKLHHKTFSQPPRAEILSDYLKFNFPNASYFSTYEAGFCGFWAHFKLEELGIRNIVVNPVDVPTTQKDQMRKSDPVDSNKLGRSLRSNELKGIYIPRQETLEDRTLIRVRFTIVKDMVRLKQRIKSFLNLYGIEYPDEFQNTNTHWSKRFINWLKTIQLQYYTGTEALNLLIKEAEQQRLILLEATQKIRALSKTERYSKNMILITSIPGIGLITGIMLLAEIEDIKRFENSDKLAGLIGIVPDCHSSGPSEKKGEMTKRGQYFMRKGIIECSWVAATRDPALSLAYYEYCKRMEPNKAITRIARKLINRIFSVLKNEKKYEFGIIK

SEQ ID NO: 112704 - protein, 367 aa, unidentified
MSSIAHRGFVHLGMDVSKNSIAVAVLPPDRDTAEVDKIFHDAESVRRLIKQLGKPKEIWACYEAGPTGYDLQRLLASIGVRCDVVAPSLIPKGSGDRVKTDRRDARRLAGLHRAGELTPVAIPTPAQEGVRDLCRTRGDMVQDLTRARNRLSGFLLRHSVVWRGGSPWTERHRRWLATLSFDDPAMATTYSHYLATVKLRDTALEAVEADLLPWCEKDPFGDQVQRLAAYRGVTRIGALCLAAEVFDWRRFPKARPFMSFTGLVPGENSTGLTQRRGSISRAGNAHLRGQLCEAAWAYQHSPNVGVGIRERQKGVPPETVARSWAAQVRLSKRFRQLATHKNVRSVVAAAIARELAGFLWAEMVAEV

SEQ ID NO: 112705 - protein, 473 aa, unidentified
MSKGSGTTRGDRRRNARRERLREMLPRDGAVIGIDLAEDKQAIAVVDHDVRVLARKTVKVKAFRLGEALDWAVGQARAKGFTHVTVACEPTGPRWLQVQRLCAERGLPLVCIQPLMSHIAREQQDYTTHKTDESDCVLIARLAVELHCYIPEELDETWAHLRHLGRRRQQLITSATASAQRIRDFLSVAWPTVTETCAQPLESVTWLAALQVVTARCGADPGRLAAMGVEAFTALVRSAVPGWGGKKGWGTICGRIFAALTSTEGVVVSSRRGLLRRVADELGDLQRARAQLRAVEADMVAVLAELGLSRLADIPALSAVGAAAILAETGDPRRYDSSSSLVKHAGMSPSDNASGAFYGEAHISRRGRPGLRLTVWRAVWPMLRYNPVMAAKYQAMTSAADDAAQAAASQADAGSRQASAAAAAARARRARARVACAASLLRWIYSLVVHDTSWDPGIASGPASSQHTPAEAA

SEQ ID NO: 112706 - protein, 310 aa, unidentified
MEQTFIGIDVAKDQLDVHVFPSDDAFAVARDSEGLAALIERLRPLDPHLVVLEATGGFEPTVAAALVSAAIPLAVVNPRQIRDFARATGQLAKTDALDAKVIARFAAKVQPEARPVPDEQARALGELVARRRQVIEMMTAERNRRRQLISRRLLKSVDRLLAVLQKELTELDHDIGEGIRGTPAWRERDELLRSVPGVGDVVARTLIADLPELGRLDRKQIAALVGIAPINRDSGKMRGKRTTWGGRAKVRSVLYMAALVASRRNPVLAAFYRRLVAAGKPKKLALTAVMRKLLTILNAMVRNKTRWQTA

SEQ ID NO: 112707 - protein, 366 aa, unidentified
MDQGITFIGLDVHKRSIVDAVREPGSGGVQEERIPHEIPVVKRWAQRWKRRSGGQLLCAYEAGACGYALQRQLESLGVRCQVVAPSLVPRKPGERIKTDRRDARKLAEYLEGGLLTEVRPPTPSEEAARDLCRAREDAKQDRMRCRHRLSKFLLRRGRSYPAGRRSWTLAHRAWLKQQSFEDLYEQAVFDDYRLAVEQVDARIAALDRQIEGLAQAPPYRAAVGALRCYRGIATHTALGLVTELHGIERFDRASGLMAFVGLVPSEASSGDRQRRGAITKAGNGHARKLLIEAAWHARHKPAIPVALRQRREGQPPEIIAMADVAQNRLHRRYWRLVQRGKPTTVAATAVARELAGFVWAALRAVA

SEQ ID NO: 112708 - protein, 387 aa, unidentified
MIYYIGIDISKYKHDFCIISNTDEIIVENSSFENNKKGFQFLLDQLKPYNKSDVQIAFEATGNYSLNLELLLIDQGYSFMKMNPLVIHQFLKARSLRRTKTDKADSLTIANYLMSVPYKPNSNLLYNIFSLKSLCRSREQLIKERCKYQVLLTNELDLTFPELKPFFNNNFSATLLFILEKYINTEHISLMRDYDSIRATSRGKFSYAKFAKLRKLAKNSVGRHDENTDLLISTYISIIRTFNDKIDPIEKQISTIIKVLNPRMLTIPGLGEISAATILSEYGDINNFPSPNKMLAFAGLEPSIIQSGTIENNGKMVKHGSGHLRYSIMNTAMNILRYSPTFYDYYLKKRSEGKCHRVALSHVCKKLLRVIYTLEKNNINFNPSLLK

SEQ ID NO: 112709 - protein, 422 aa, unidentified
MDVLYERVAGLDVHKATVVACVRRTAAGKVERECRTFETTTAGLLALLAWLRENECTHVAMEATGVYWKPVWNILSDGAFELILANAAHIKNVPGRKTDMNDAMWIADLVACGLLKASFVPKERLQELRSLMRTRKQLTREQTRHVQRIDKTLESANIKLGSVICEVMGASGRRMIEAMISGVRDPHKLAALAHAQIKASPKELYDALHGRLTDHHRFLLQLHIGQYDALSAAIGQIDRQVDTAIARLDEEAADGQASFRDLISLMCTIPGVSTLAATSILAEIGRDMSRFPSAGHLVAWAGLCPGQNESAGKRKRTRLRKGAPWLKTMLVQCAWAAKRKKDSYYNARFNRLSSRRGPQKAICAVAASLLTAIYHMLKDGTEHHDLGANHFDHRSTAAKAKRLVAQLAKLGYAAQLQPLQAA

SEQ ID NO: 112710 - protein, 413 aa, unidentified
MEILHTCCAGLDVHKEIVVACVRRLVEGKVRQEVRTFRTETNQLLALADWLTDEGVTHVAMESTGVYWKPIWNLFEGVFELMLCNAEHIKAVPGRKTDVKDSQWIAQLLQHGLLKPSFVPEKPIRQLRDLTRSRVQLVRQKVQVVNRIQKTLEDANIKLASVASNVMGASGRDMLRAIIRGERDPVVLAELARQRLRAKIPQLQEALFGEIEEHHRFLLGMLWDEVEFLEKQIERLTARVAEVLPPPFVEAVTRLQTIPGIDRRAAEGIVAEVGADLKAFASAGHLSSWVGICPGNHESAGKRKSGRTTKGNAWLRALLVQCAWGASRSKGTYLQSMFRRLAARRGTKRALVAVGHRLLEIIYAVLKKGQSYRELGADYLDRAQNRERLKARLVKRLEKLGVKVTVDEAQPAT

SEQ ID NO: 112711 - protein, 335 aa, unidentified
MKKSYFLGIDVAKASCDFALLKANGSCLWSGQFDNNPSSINRWLALLEARQLDLSKILFGFEATGVYSQTLLLVLQQFDLAGCQLNPAQIKYFGVSLNRRTKNDRADARLIARFLLERQPVATRALSPTEHQLKVLAHEREALAIDLTRERNRSEKHELLPIKVHGVLLKQRKERLHKLKAWIKDLDAVIKELIDLDPVLCAQAKLLCSIPGIALCSAAKILSQLAGKEFQSAHQLALYAGLNPKENQSGRFKGKTTLSKIGNAFLRKALFMPASVATRCCRPIKLWVQQIKSRRPEFTKLAIRGAVMHKLIRIVFGVLRHQTPFDPTLASSDHT

SEQ ID NO: 112712 - protein, 325 aa, unidentified
MNNYAALDLHERTVQCVLKNQDGRIVKESKTVKDEGRILAFLDGTDASVVMESGRNHQHIYDVLKERGYDVTVAHPLMVKAIAYAKVKTDRVDARVLADLLRADMIPESYVPGRDIREIRDLVRRRHYMVKLRTMQKNKVHAELATRWLKYEGDPFTEDGKNYLRSLAIDAVNDYLETIEFLNRKIHQLDEKVRRVVESDKYAKLLMTVPGISYYSALLISSEIADIRRFPDHEHLCSYAKLSPGVRQSGETQHTSKSMGNSMMNWIMIQCTRIHVRRYDSAITRFYQQVSKRRGEKVAIVAAARKLMRAIYIMLKEEQAFRLDG

SEQ ID NO: 112713 - protein, 382 aa, unidentified
MANRKQSTFERLSSGRLNRQQRRELARKLTAENPGLEIVNRNVAGIDVGNESHYVAVAPGCDPQPVREFGSWTADLERMADWLKVCGVEMVVMQSTGVYWMALYDILEVRKFKVCLTNARHTKNLPGRKSDVQESQWLLKLHTYGLLRDSFHPPEEIRALRSLWRLRDRHVKEAGRAILHMQKTMTVMNVQLSNAISDISGATGQAIIRAIVSGERDPWKLAKLRDRRIKATEEEIARSLEGNWRADMLFELKQAVDAYDFIQHQIAECDQRLQTLLAALPQRQVMETEVQAEAPIKESVKRKQKRKKSRADGNAPRFDLQAELKRICGVNLTSIDGIDIMTAQTIVAELGTDFSRWKNESHFTSWLGLTPSRDISGGKIVK

SEQ ID NO: 112714 - protein, 348 aa, unidentified
MRFYTTQHQHYCGIDLHARTLYLCILDAGGNVLLHKNLPCDRERFLEAITPFREDLVVASECIFNWYWLADLCAEHSIAFVLGHALYMKAIHGGKAKNDRIDALKTASLLRGGLLPMAYPYPAKMRSTRDLLRRRTHFVRKRAELMAHIQNTFHQYNLPRPPGRLVYKYQRAPVPDAFDDPMLRKSVETDLALCDTYDELIRDLEKTVHRQARVHDPQTLLRLNTVPGIGEILSLTLLYEIHDIARFDSVQRFASYARLVKCEKSSAGKRLGTSGHKIGSVHLKWAFSEAAVSVIRHLPESKRLHDRLKRKHGKGKALSILAHKLGRTVYFMLKRNQAFDAGRFLANA

SEQ ID NO: 112715 - protein, 305 aa, unidentified
MNEELVYLGVDIAKAYLDAAIANEKRRFSNDAVGHRRLIQWLKQIKGPVQVICEPSGGYERALVRALVAARIKVSLVPANRVRQFARAGGILAKTDRIDAKLLCAFGEAMKPGIISASELEQEQLRELESQRRHLTHLLVMEQNRAARVSEVCVRKLNRRLITQIKKQVEQLDLLIQQQIAASRELATKAEKLTTISGVGARTAALLLAQMPELGQLNRREVAALVGVAPFNRDSGRMRGNGGRRSVRHGLYMAALVAARHNPILRGFYLRLRAAGKPAKVALTATMLKLLIVLNSALKPDLNYA

SEQ ID NO: 112716 - protein, 347 aa, unidentified
MDYRVYCGVDFHARQQTICYLTTEDGVIGTRELKHDNKEAVRKFYAELPGPVLVGLEAGGYSLWFEQLLEELGHEIWLGDATEIRLCARRRQKNDKRDAQLILDLLVRDEFPRIHRQTPASREILRMLRYRHRLVKIRTMIKNCLQALAIQSGLALKAQLFTEVGVSQLQALTMPPTMQQQREQWLQLMASVNQRINACEQWLDEQAAADQRVRRLRTHPGIGLLTSLAVVHTLDPVSRFPNQRKVAAYGGFDPCEDSSAERKRYLGISKAGSKLLRFLLIEAAQTAVKQDAELKRFYQRLAQRRNKPKAKVAVARKLLVRSFILLRDEIDYAEFRRRAVAARLARE

SEQ ID NO: 112717 - protein, 392 aa, unidentified
MYIVGIDIGKNHHEASIVSPEGKQIGRSLRFATTHKGADSLMSFIFKNIGNSPCVFGMEATGHYWYPIYSFLKAKGYTIYVINPIQSDSLRKMYIRQTKNDSIDSFLIAEVIRFGQFGTTSMADENILAMRQLCRYRDSVISSRTEIKLRIGTIMEQIFPEYEKQFSSLWVSTSMGILEKYLTPENIENAPIDELFEIIKDKSHNRLTKAKAISIKEAAADTFGIKIAQDAFSFQLKQLIDRMNFLDKQIEALDCQILEYYEKFDCYLHTIPGIGMIAAATILAEIGDINRFKSSSALVAFAGIDPTVRQSGEFNSTHNHMSKRGSPYLRHAIFLAATTCSFHNSPLNAYYKKKRDQGKHHLTATGAVARKLTTVIYAVLRDSKPYEPKKFC

SEQ ID NO: 112718 - protein, 346 aa, unidentified
MTIVETTRPITGGVDTHADVHVAAAVDANGGMLGVESFATTSAGYAQLHGWLSGFGSVDRVGVEGTGAYGAGLARHLRGQGLVVIEVDRPNRQERRRNGKSDELDAIEAARAALSGRASGIAKTADGDVEAIRALLVVRRSGRNVRIKYLNQIRHLGFTAPDELRERLRDVHRDRLARTAAALRATAGSDTVMYATKLAIATLGRRVLALEADTARLDDELETLVRRCAPNLLEVYGVGINTAAILLVATGDNPHRLKSEAAFAHLCGVAPLEASSGKTVRHRLDPGGNRQANHALWRIVFTRMSGDERTRKYVARRVAEGKTIREVMRVLKRYVARELYPHLVRD

SEQ ID NO: 112719 - protein, 324 aa, unidentified
MSNAIIGVDVSKLDLSISLLIDKIYHQTKIDNNQEGFKIFSKWLKKHRITKVTACMEATGNYGTFFANFLYKNNHEVSVVNPLCISAFAKSKLSRHKTDKIDSMIIAEYASKNDLSLYVPKNSDLQELQNLYRCLQNLKEQYKQSQNYLENKDHLSSTICSSYKKLSQNITKEINKIELEIDKLLIHNHELKQKADNIQTIPGIGKLTAVAILAESPDFAYFSNARELAAYAGLTPKHKMSGTSVRGKSRISKIGSSRLRKALYFPAIVAKNHNPLFKEFSQKLGSKGKPTKVIIVAIMRKLLHIVFGVVKHNTSFNPRFGLDC

SEQ ID NO: 112720 - protein, 455 aa, unidentified
MAKKRRKESKANHAILPVMRPDAAGVDIGATEIFVAVPADRVSENVRSFPTFTQDLYALADWLQECRVKTVAMESTGVYWIPLFQILEARGLEVCLVNARHVKNVPGRRTDVSDCQWLQFLHSVGLLRASFRPDQEVCAVRSLLRHRENLVQMAATHIHHMQKALDQMNLQLHHVISDITGPTGLAIVDAILAGERDPLVLARLRNQRIKASEEVIAKSLVGDYRPEHLFTLRQSLAAYRSYQKLIDDCDREIRQHLEDFQPPTPPAENPPVQRKNQARAPESILQSELKRVFGVDLTHIPGIRTGIAQTLFGEVGPDFTKFRSMSAFASWMGLCPDNDITGGRVVWVGTRKVSCRAATALRMAAQSLHHSKSALGDFYRRMRAKLGAPQAITAAAHKLARIVFHLISTRQEYDESKFAADQLRHQKRQEIKLRAKAKSMGYELIPLKPATPVVP

SEQ ID NO: 112721 - protein, 423 aa, unidentified
MKIVYPICCGVDVHKTFFVATLITTEGIQPKYKKRRFSTFNNQILAFKDWLLENNCRDVCMESTGKYYIPVYNLLEDSINVVVANPKWVRAVKGCKDDEKDSKWIGDLFRLGLVPGSFIPGKDIRILREYTRYRFKLVSCKASEKNRYQNVFTVCNVALDAVVSDMFGVSASSITDYLVSSDTFNPVHCVSLLKRSLKSKADDVVASIEGFQMTDAQKTRARFVKDHYNYLVAHIQALDDRVKELVAPFEGEIKLLCTSPGIDRNSATTVISEIGIDMSQFGSSKRLCCWGGLTPGNNQSAGKKKSVRINRAGVYLKPTLVQIAHAAVKDKENPYYRIKYEQISKRRGKKRAIIAIARMILTAIYHMLSTGEVWNPCDLQQVDMPPVLREKELNKSLRRAANLLAAHGIVSLDDILIPETNSA

SEQ ID NO: 112722 - protein, 354 aa, unidentified
MKTYYVGMDVHQASIVIVVLNGAGKVEERSTLRTSAAAVRSYLQRLKGKVYVTFEEGTQAQWLYDVVRPLVTEVVVCDPRQNRLLAVGNKSDAIDAEKLAQLLRNGSLKVVDHRDHGMRALKELVRSYDCLVQDSTRVMLRLKALYRGRAIECRGHDIYRQDRRRQWLKKLREPGAKQRAEFLYKQLGALKPLRHEAKLLMVREARKQAAYACLLSVPRLGAISVAQLLAVVGTPHRFRTKRQFWTYVGLAVVTRTTADQQVVDGVLRRSRRPVATRGLNRNHNHLLKRVFKMAATSACHSAPFQASYEARLKQGMDPALARLTIARQLGAITLSLWKRGEKFDVERMKKQPAA

SEQ ID NO: 112723 - protein, 324 aa, unidentified
MTLSTLGIDISKLKFDVALLRDNGKFKHRVFPNTPAGFLQLSAWLEKQKVERLHACLEATGTYGQALATNLHDAGHVVSVINPAAIKAYGQSRLSRTKTDKADATLIAQFCSERRPPQWQPLPVEIRELQAMVRRLDALLEMRQMEANRLEVTAAAGAVTESLVGHLAFLDDEIARTEELIRSHIGTHPGLREQRELLVSIPGIGDTTAAKLLGEIVDVKLYESARQLAAFAGLVPRLHESGSSVRRKARLSKSGAPRLRKALYFPAIVAMRHNPLVRVMSERLKKRGKCPMQIIGAAMRKLVHLAYGVLKSGKPFDPELMKTA

SEQ ID NO: 112724 - protein, 426 aa, unidentified
MGKSIKNFSSVTTVGLDIQGNRVKEQTLNPMRRSHPLLGSADSHCANFCSNLQPGRSIMSRVIPAGGRFRLTRRHCRSFTRLPWLDIAKNVFQVHGVDAKGAAIVARLVRRGQLLKFFASLPPCLVGMEACSSAHHWARSLIELGHEVKLIPPAYVKPYVRRNKNDAVDAAAICEAVGRPNMRFVAVRSVENQAELMRHRARELLAGNRTRMLNALRGHLAEVGIVAAQGAQHAYGLKRLLADGCDENGEIVVADCVRKALAPLVQQIDAIDEEIEAIDDHIKAQVKADDTARRLARVPSIGPITASAIVATIRDPSAFASGREFSAFIGLTPRQSSSGGKERLGRITKMGDRYLRKLLVVGACSVLNHRKGHNDALRVWADQLLARKAVKYKFKLTAVALANKVARIVFALMTRGGEYDDRPLAA

SEQ ID NO: 112725 - protein, 413 aa, unidentified
MRAGHHRSDYFSNAGVAMESAVYLGVDIGKTGHYALAVDASGKPIHQTAVPNDETALRKLVIWAKEHRATLVVDQPGGAAALLLKLCWASEVRIGYLHGLAMARARDFYAGESKTDPKDAFVLADVARAHPSRVVWLEPSSEALAHLELLCGYDADLRGDANRLTNRLRALLVTHWPALERALGKRLDTRGVLAVLQQYPSGPAVKEAGVEQLTAALKVQRVRRPEAFAKQLHQAGMAQTVTITGSATAAGLISELAVQLAALLARRDALEKEIEQGFFALPEAAILRSLPGIGPRLGARIAVEIGSITRFRTPGHLAAYAGLGPTPWKSGTSINANMPSRFGNHRLKNALFLAAFASLRHEPSRTYYDRKRAQGKRHNQAVLCLARRRVDVLHAMLSRGVPYRPPAPLAAAA

SEQ ID NO: 112726 - protein, 499 aa, unidentified
MAPCPANRRLVVRGRIEECSSTGHGLCHLSINKSNDITMAKKAKKVKSAKGAELRIVNPDAAGIDIADGIMQVCIPADRSKDNNRAFGAYTSDLHAISAWLRECGIKTVAMESTGVYWIPLFCRLQEDGLDVVLTNARDVKNITERKTDESDAEWLMLLHQYGLLKASFQPHNDAKRMRTLTRHRDTLSREASSMVLRMQKAMQQMNIKLTLVLSDITGKSGIRIIEAILAGERDPKKLAELADIQCKTPKEEIAKALEGNWEEDLMFVLRQNYDTFKHYCTQLGECDAELEKLMENYRAEVAKVEDTSYSPAKKRRDYKKTRHTVSFDVERKAYEMWGVNVFEIPGISHLTALELMSELGHDFTRKFPSSKQFCCWCNISPNTKISGGKRISSHVPHRRNNVGLIFRSIASSLANAKNQLGNFYRRIRSRAGGKAAVIATAHKVAEIFFAMVANQTTYNPERVGIDEKVLLEKRITRYKRELERITGTHIEIGNACVP

SEQ ID NO: 112727 - protein, 373 aa, unidentified
MKKRSSSRPSQKRTMKAKRTQESVTIGVDLGDRNSRYCRLSSDGEILREGQVPTTKAGMTATFGSWGRVRIAIEVGTHSPWVSRLLAGLGHEVIVANPRQVKLITESTRKDDRLDAQTLARLARIDPQLLRPIQHRSEKAQTALMVIRVRAALIAVRTSLVNTARGLAKAMGERLPKCDADQMGVLKAESVPAKLRPLREPLLKEVESLTEKIKDSDREIEQIAREDYPETELLQQVGGVGPLIALSFVLTVDDKNRFQKSRDIGCYVGLRPRRSDSGQRQPQLRITKEGDPYLRTMLVQGAHYILSRRGPDTDLKRWGLRLAERGGKRGKKKAIVAVARKLGILLHRLWVTGEVYEPLRNQNLRELQKKVAA

SEQ ID NO: 112728 - protein, 313 aa, unidentified
MATARVHVGVDVSKENLDVYMPGGKTVRTGNTVSAVRRLVRGVKAKDPSAMFCCESTGGYERTLVDVCREEGQPVCVMNALQCRRYAEHRGMLEKTDRIDARVISMAADDKNPAALIHPGGRQRKLKEMWTLRTHLASQRDGERNRLEHLHEKEAVAAVKRIIASYERQIERLEKLCRDEVSQEEKSQTLLDRFQIVKGVGPLTALALVALLPELLFLDDKRLSKLAGVAPICDQSGTLDGPRHIMKGRGLVRRALYWAAVSASQHNKILAAFYNRLVEGGKAKKVALVAVMRKLLCLVRRIAQNPEFVPAEG

SEQ ID NO: 112729 - protein, 467 aa, unidentified
MAWGRRGLVAGRISVTTWLGIQSEDISLEVVHPDAAGIDIGNESHYVAVPPSRNSQPVRRFGCTTAELKAMADWLEQCGIRTVAMQSTGVYWIAVYDVLEQAGLEVYLVNARETKNLPGRKTDVQESQWLMKLHTYGLLRNSFRPSQEIRMMRTYWRQRNDLVQSAGRHIQRMQKALTQMNIQLANVLSDVSGVTGQAIIKAILGGERDPHKLAAFRNSRVKASEEQIARSLEGNWQEDLLFVLKQEQDGYEFCEKQMAECDRQLNHYLKQRADRSHGAPLPEEKRKGRLKKKSGNKPQFDLRTGLFRMSGTDLTRVDGIDVITATTILSEAGWDMSKWVTEDHFVSWLRRCPDNRISGNKVIGKGRLPTNNRVTIALKMAASTLRLSDTYLGAQFRRFRTRLGAPVAIKAMAAKLARLVYRMLCYGMKYVDKGAALYQAQHRHLQIKQLNRKAASLGYQLIPVPAA

SEQ ID NO: 112730 - protein, 309 aa, unidentified
MEHFIGIDVAKDRLDVHTRPGGEVFAVARDSNGLAMLVERLQRLAPALVALEATGGYETVVASALGAAQLPLAVVNPRQIRDFARATGKLAKTDRIDAAAIAHFAEAVRPPARPLADAEARALGELVARRRQVIEMIIAERHRRRMASQRRVIRAIERHLALLQAELSELEGDIDDAIRKSPAWQADADLLVSVPGVGKVTLRTLIAELPELGHLNRRKIAALVGVAPINRDSGTLRGRRTIAGGRPAVRTALYMAALVASRANPVIAAYYAKLRAAGKTGKQALVACMRRLVVILNAILRDRKPWQPA

SEQ ID NO: 112731 - protein, 449 aa, unidentified
MAKKKRKYRKLERSLPVMRANAGGIDIGATEIFVAVPADRDTESVRSFPTFTQDLHALADWLQQCRVDTVAMESTGVYWIPLFQILEARGIEVHLVNAQHVHHVPGRKSDVLDCQWLQYLHSVGLLRASFRPEHAVCEIRSLMRHRENLVQMACVHVQHMQKSLDQMNLQIHHVISDITGVTGLAIVDAIVAGNTNPKELAKLRDHRIKASIETVTKSLVGDYRPEHIFTLKQSLTAYRHYQKLIADCDQEVQQRVEAFQSNDDGPTAAADSSSATSPTAPSFDLHSHLERIFGVDLTAIPGFDVLRIQTIFSELGADMSPFPTDDTFCSWLNVCPKDGTSAGRRIRAPKVKTKNRVTQAFRMAALSLHNNKSYLGDYYRSQRARHGALKATKNAAHKLARIFYHLVKTRQPYDETVFAKLEARNQKHRLHKLQTLARQMGYSLVQANA

SEQ ID NO: 112732 - protein, 353 aa, unidentified
MKRMLKQVVGIDVAQKELVVCFGRMDDELTAELYAHKTFSNTQKGFAALLEWVKKLADETIAVRFVMEATGVYHEALAYFLDEKGHELSIVLPNKISNYMRTLDTKTITDKTAAEAIALFGLERKLDCWQKPQAFFKKLRQLTREREQIVEERTRVKNQQHAEKTEAEPNKRSLKRNADRINMLNKQEKEIKEEIAVLIRSDKQIADLVVLICSLPGVGLLTAAIVLSETNGFELIRNKRQLASYAGFDVREKQSGTSVKGKPRISKKGNKYLRKAMHLPALAAIRHDERYKAIFARLVARHGIKMKAAVAVQRKLLEMIFTLATKKVTYDKAFLSKQVQTTEAAAVVNKQAA

SEQ ID NO: 112733 - protein, 408 aa, unidentified
MEVLYPRCAGLDVHKDNVVARIRCVCEPLHDEVRTFATTTSELLQLNEWLSSHAVTHVAMEATGVYWKPVWHLLEGDFELILANAQHIRNVPGRKTDVSDAGWIADLLAHGLIRSSFVPPEPIQELRDLTRTRKQLVREISQHSSRIQKVLEDANLKLGSVLADVLGKSGRAILQALIDGESDPEKLADLAQGHARKKRAALVEALHGRIRNPHRGLLKVHLDLVTALHHGLAELDATVGKALASIQEGARLLSTIPGVSDVTAHVIVAEIGLDMTRFATDAHLRSWAGFCPRNDESAGKRRSTRVRKGAPWLKTTLITAAWAAVRVKDSYLQAQFHRLRARRGAKKAILAVASSMLTAAYHMLKNAVEYKDLGAGHFARRDRGKLIQRLVRRINDLGCQVQLTPMAA

SEQ ID NO: 112734 - protein, 337 aa, unidentified
MNYSGIDLHSNNSVVTVIDETDRVLAEKRLPNELARIMTFLEPWKQQLAGVVIESTYNWYWLVDGLQAAGFTVHLAHTTAIRQYDGLKHSGDETDARYLARLLRLGILPTGTILPPEMRSVRDLARKRMQLVRSRTSHMLAIENITARHHGMRISSPEVLRLTAETIDQMGLPAEVALAMQANLAVVTTLCTQIGLLEKRLADKVRPRPEYALLTTVPGIGQILATVILLETGSVERFASVGNFASYARCVDSCPTSNGKKKGEGNIRNGNRYLSWAFMEAANFAQRYCTEARRFYERKKAKTNPIVARKALAHKLARACFHILKENKPFDVTRCFT

SEQ ID NO: 112735 - protein, 348 aa, unidentified
MNKITTLGIDLAKTVFQLHGVDVTGKIVLRREVRRGQLMTTIAQLEPCLIGIEACGGANYWARRFAEFGHQVKMMSPQFVKPYRKSDKNDRNDAEAICEAVARPSMRFVAVKSVEQQDMLTMHRVREGQMKERVALINRIRGSLSEYGIVIAKNVSNLRRELPGILEDAENELTVAARQLFSDLYEDLGAREQRIAHLERSIRALGSQHDVVRRLETVPGIGYLSATALYGAVADAKNYKNGRQLAAWMGLVPRQSSSGGKQRLLGITKRGDKYLRKLLVHGARSIATRAQRTPRPHDQWLNDLRERRGKPRSYVAQANKTARIAWAIMAKGEVYRAPVATLETNMAV

SEQ ID NO: 112736 - protein, 391 aa, unidentified
MIFVGIDVAKDTHYAAVSDDSGAVLVKPFAFQNNAEGFCLLLKKLSEFDRSKLLIGLESTGIYSENLICFLYESGFRLAVINPIQTATLRKTAIRKTKTDKVDTMLIIKSLMVNSYRLYSQRDADSLKLKTLCRFRQNLKKSMARLKIQLAGYVNLVFPEFGKFFKSGIHIAASYALLKKYSSPKEIAALRTSTLCTLLSKASHGRFGKDTAEALKSLALSSVGVKNPYISIQIAQTIAQIELLEQQIKDLNSAIEEAMESLNSVLMTVPGIGAVNAACILGEIGDIKRFSKPCKLLAYAGLDPTVRQSGQFTAKSTRMSKRGSALLRYVLINSAWQLTLNDTTFKAYYDLKRSQGLNHYGALGHVAHKLTRVIFKLLTSDTPFNPAKLVA

SEQ ID NO: 112737 - protein, 365 aa, unidentified
MTSIPVFVGLDYHQDCVQVCVLDLAGKQLCNRSVDNDVDLIQQVVSRHGAPQRIAIEACCGAANLAEELASKRNLPVQLAHPGYVNRMKRSPDKTDLSDAQLLADLVRVNYLPRVWLAPQAIRELRRLVRHRANLVRQRKDTKLRIRGLLRENRLKCAEARAWTKRWYEWLQEEAELSDSDRWLLQQHLDLIVYLEGQIAVTLARIEAAVADDPVVAKLQGLYGVGLITAVTFRAEVGRFDRFDSGKQLARFCGVTPRNASSGARQADAGLIKAGNPELRQVLIEQAHRLIRFQHAQWGKLAHGMLQRGKPKNVVVAAVANRWVRWLYHELKRDADSPVNTTSAPARQKGAAPSVSTVASTATKG

SEQ ID NO: 112738 - protein, 429 aa, unidentified
MNVEDRSRLEAFRQLKKGIRRSETHLIVGIDIAKIKHHAFFGTATGKTLLRRLIFTNDADGFNKLLTYVDAVKTKHMLEKVVFGLEPTANYYKPLGEYLINCGFDVVLVSGKAVTNNREMMDNRWDKNDTKDSANIADLVSQGKFMYYDYPVLPLRDLRNLLSLKRRLKKQEHGLKVRIRNNLLAQYFPELDGHYGQSESVGLPVVKWCLSPTAIAGMRYEQFEDMLFPGGRIKMTQQERLKRIWKTAGHSIGCQVGEALGFEAHMMVDWLKRMRDAIRVTDEKIKEVCLYFPEYSYLLTIPGFGPDVASRVLAAIGNPYRFENHRQVLKMAGWDLSASRSGKNSNAITPVISKKGKAELRYALYQAALIASTRNQVFVMYYTNKLRGRERERGIKTKMRVKLAAKLLVIAWTLMKKKEPFNPDFLNMD

SEQ ID NO: 112739 - protein, 343 aa, unidentified
MKLSRVGVDLAKNVYQLHGVDRYGKAVWKRRLRRAQWLQALLDKTDPGCEIGMEACTGAHHWARELQSRGYTVRLIAPQFVKPYVKSNKNDANDAEAICEAMSRPHMRFVTVKSVDQQDIQATHRVRTELKDHRNAKANQIRGLVAEYGLVAPQTLLALRRAIPEWLEDAENGLTDYFRSLLHGLWDDLLTLEDRLKELDKAIEKLARSNEVTKRLQQLRGVGPIVATALVATVGNGEQFKNGRQMAASLGLTPRQSSSGDKRRLLGISKRGDVYMRTQLIHGARAVVSQAKNRDDPLSRWATDIAKRRHPNVAAVALANKTARMAWAMLQNETDYDPSLAVG

SEQ ID NO: 112740 - protein, 333 aa, unidentified
MVEGTEGSHHKEGTTKMDKHSMVCAGIDTGKHKLDVALDQGPEQLQVDNNPDGHKSLSAWLRQRRVWRIGIEASGGYEQAVVAALRRDGFIVILFQPAQVRAYAKFILQLAKNDKIDAALIAACTAATKTIREPPEPRLAALAGHLTMIEQITEDIARLKTRRESCRDERISQCWKQQITRLRALARSEFKQLLAAIREHRDLAERLELMASVEGVGLKTAVDVLIRLPEIGSLSREEAAALAGLAPYDDDSGTRSGERHISGGRQRLRTSLYAAALPAAFKWNPQLIAFYRRLIAKGKSHKKALVACARKLLIFLNTVVARGTPWTPNTAEI

SEQ ID NO: 112741 - protein, 342 aa, unidentified
MDEYDGRQFVGIDLHRQRSVIVRQSESGEQLSAVRIVNEPVALELQLEQAGADPEVVLEATYGWYWAVDVLQACGARVHLAHPLGVKGFRYRRVKNDVRDAADLADLLRMGRLPEAWIAPPQTRELRELVRYRAKLVAIRSGLEAQIHGVLAKAGVLIAVSDLFGVTGRQRLAKVPLGPAYAQRIRSLLELINILDSHEARFAVMIAERLATHRGYQAIQQVPGIGPTLAAVFVAEIGDVHRFTDAAHLCSWAGLTPRHRESDTVVHRGHITKQGSKAVRWAAIEAVQRHPTTAKIAADKHRIEARRGKNIAKVAAARKLLTLIYYGLRDGQIRALDRARPA

SEQ ID NO: 112742 - protein, 335 aa, unidentified
MQSAKLVVGIDVGKEWLDVCYPNGKKEHVRNIKSSRTKVVKKAAALGAIVCFEATGPYEEPLADECLARSVRAVRLDAWGTRRFAESQGRIEKTDKIDCEMIRDYALSLKDEKLHFIKQRSDAQKRLKKGVRTRRNLKKARNIIANQFEDDLDPETAKHLRNALKSIDRNIKRIEEECAAAIASDERLKDLDRRFREVKGVGPCLSRTMLAECPDIGEFNGKSIAKMCGNAPISHESCTIKGKARPKRGRGELTKALYMAAVSASRNNHVLREFYQRLVANGKARKLALTAVARKIAVLLNAIAKYPDFKPAQDPKDIAKANRTKRGRGRPRTTA

SEQ ID NO: 112743 - protein, 348 aa, unidentified
MAMLADSADAVIGVDTHTDTHTACLLDSAGRELATVTVEASPDGYAALLDWAVQQAPGPRLTWAVEGCRSHGAGLLRCLLAAGHHVVEAGRPERVGRRPGGKSDPADARLAAREALAATVHAQPRGDGDREALRILLVAREHANSTRTAAINLFKSLVLTAPDQLRESLRRLSTPRQTAACSVLRAHPSHSATERVLRQTLRSLAQRIRLLDKEIRVNERQLRGLVSTMVPALLEEPGVGPVSAAHLIVAWSHRGRCRSEAAFAALAGVSPLEASSGRVKRHRLNRFGDRQLNRALHTIVNWRMLHGHETTQHYLTRRRTEQKSDAEIRRCLKRYTARHMFRLMETAE

SEQ ID NO: 112744 - protein, 401 aa, unidentified
MIDTGDVDVFLGLDVGKGEHHGTAVTRAGKRVFDKRLPNSEPKMRAVLDKLTAKHGTVMFIVDQPASIGALPLAVARDAGCRVAYLPGLTMRRIADLYPGEAKTDARDAFVIADAARTMPHTLRGIELTDETIAELEMVVGFDDDLAGEATRIANRLRGLLTQIHPHLERVLGPRLDHPAVLALLEQFGSPAALRKAGRRRLLGVARPLAPRMFERLVEEILTALDEQTVVVPGTDAAELIVPSLAGSLRAVLDQRKLLEKRIQELLDEHPLSKILTSMPGIGTRTGARVLIDVGDARAFPTAAHLASYAGLAPATRSSGSSIRGEQPSRRGNKQLKRAFFLAAFASLSDPASRAYYDKKIGQGKPHTQALLCLARRRVDVLFAMLRDGTFYESRPAEAVS

SEQ ID NO: 112745 - protein, 427 aa, unidentified
MNYTQNHKISQITPLTLIVGIDIAKDKHVARAQDDRGIEFGKRLIFENRKHGFQKLVTWAESLRKENGKNHVILGVEPTGHYWFSLAYFLVEKGYDFVMVNPMHVKKSKELDDNSPTKNDTKDARVIGQLIKDGRYSVPNLLDGVYAELREGVKLRDQLTKQLMTTEGRIQNHIQRYFPEFFDVFRDWEGKAAFCTLRMFPFPSQIKEMSAEEVLKKWKPFVQRGVGIKRARKLVEAAKKSIGIQIGIQFAQRELDYLLDQYELYKQQLAQLDKELEALVETLPGAKQMMEIPGLGSTTIALFFSEVGDMTKYSHPQQLVNLAGLSLREHSSGKFKGQTRITKRGRSRLRRALYLAIRPLVAHNPTFKALHQYYTMRSEKPLKKQQSLIALCCKLLRVLFVIGQKQCQFDGSKLLRGLPRTQELQVV

SEQ ID NO: 112746 - protein, 355 aa, unidentified
MTSTKYIGMDVHKESISIAVRNAAGKIVMECVIETKASMILQFFGGPRGDLQVIFEEGTSAAWLYDLLKPHVTKLVVCDPRKNKSMREGNQNDKIDARRLAELLRLDHLTPVYHGEHGLRTLKELVRSYLTITKDLAQVMSRVKAIYRSWAIPCTGKQVYAARHRAEWLGKINEPGVRRRAEFYYQQLDALRVLRQEARRDLLTESKKQKAWKRLCAIPSIGPIRAAVLLGILQTPHRFRTKRPLWNYGGLAIEMHSSADHRRVHGQLERSTKNVLVRGLNRNCNHDLKNLFKGAAAVASSKPGPFQEFYTALVAKGMRPEMARLTLARKIATIALIVWKRGVNFDAQHLKPQTA

SEQ ID NO: 112747 - protein, 351 aa, unidentified
MSRKTDAVVARTIGIDTGKNTLHLIGLDDNGAIVLREKVSRGRIAARLTNVPQCLIGIEAGMATHYVARELIALGHDVKQVPPAYARPFRQGHKNDFRDAHAIAEAVQRPSTRCVPVKTNDQLDLQALHRVRSRLISDRTAVINQIRSFLLEHGIAVRQGLRFLRQQLPELLAKRIDVLSPRMIRIIEDLSGDWRHLDGRIEQVTEEIEVLARGTEGCRQLMTVPGVGPIIASAMIAAIGNGAAFAKGRDFAAWLGLVPKQMSTGDRTILGRISKRGNRYLRMLFMQGARVILLRPENWQKHSFGAWLTAAAKRLHHNVLATALANKLARITWTVLAQGRSYEARVEPRTA

SEQ ID NO: 112748 - protein, 388 aa, unidentified
MTQAPGAVPTPTVLDYERTLILAIELSNTSWVLAAQIPGLPGVKAKRSIEPTPEALMAAIENYRTRAVKAGRNVERVVAIYEAGWSGFWLARWLAQYGIETHVIQPSSVPVDRRARRAKSDGIDAELLLRTLLAWLRGEPRVCSMVPIPAEADEDARRRVRERAELVAERVGLVNRIGAVLATLGVGEYNPLRRDRRQRLDELRTALGGSLPTHARAKIVRMLDRLELLLIQITELEKSRDAVLEDENPDKAASMIQQLAKLRGVGVQSATVLVREGFVREFANGKALGSYAGLTSTPYSSGGTEREQGIGKAGNVRLRTLMVELAWLWQRYQPDSAQVSWFRERVSGTGRRMRKVMVVGLARKLLIALWRFATQGVVPEGAVMKPAT

SEQ ID NO: 112749 - protein, 395 aa, unidentified
MKHILSFDIAKGKSVYCFIDELRNTIIDATLIEHNKNEFDNLFELVKTYPNLVVIMESTSIYHLPVENYFRSKGIDTIVMNPKLVKQFKDTLNKSKTDKLDCFKIARCFLGTIDNFYQKQDEYFMYNPLARQYWSLIESQTRLKNRYKQLIDIIFPEFALIFNDLYDDLALNFIHDFPHPVLFVNRRIDYLMNYLKEKNGTTQAYRFKNKVLKMKKLASNSLCFVAFNSYQVQNLVQVIEMIQYHKSEINKLKNQLINEMENKKLFKIINSIPGFGEFSTALFLAEVGDITRFDDKYQFISFIGIDSVTSQSGVSAYHGPISKTGCKFGRTILFNIVTTILQISAHSDKTNPIYLFFRKKQSEGKHHYKCIIACETKLCKIIYKLCSSNCLYENK

SEQ ID NO: 112750 - protein, 334 aa, unidentified
MENIALIGIDLGKNSFHIHCQDRRGKAVYRKKFTRPKLIEFLATCPATTIAMEACGGSHFMARKLEELGHSPKLISPQFVRPFVKSNKNDFVDAEAICEAASRPSMRFVQPRTESQQAMRALHRVRESLVQDKVKTTNQMHAFLLEFGISVPRGAAVISRLSTILEDNSLPLYLSQLLLKLQQHYHYLVKQIKDLESQLKRKLDEDEVGQRLLSIPCVGTLTASTISTEIGDGKQYASSRDFAAATGLVPRQYSTGGRTTLLGISKRGNKKIRTLLVQCARVFIQKLEHQSGKLADWVRDLLCRKSNFVVTCALANKLARIAWALTARQQTYVA

SEQ ID NO: 112751 - protein, 415 aa, unidentified
MEKKEITFEQVIERGCGIDVHKKVLVVTIRGTGIKEETRTFNSFTESIEQLRDWLKKMGITHIAMESTGVYWKPIFNILEADFEIILVNARHIKNVPGRKTDKKDSQMIAKLLLSGLLKASFIPSKSIRELRDLTRYRRKIVGQIASEKNRIQKILEDANIKLSSVVSDMSGATATKIINAMIDGETSINELLKFRHGKMQSSIEELASSLKGNLTEHHKFMLTTIKESIIEKELIIEKLDKRIDEQLQASELKLDAELLQTIPGVGKDGSASIIAEIGNDMSQFPNEQHLSSWAGMSPGNNESAGKKKSSRITHGDKYLKILLVQCAWAATRTKNTYLRKKYDSLVGRRGKKRALIAVGHKILIAAYFILKDKIKYKELGAEFLQEKKKDKQVKYYLKQLKELGAEIEIKNHVA

SEQ ID NO: 112752 - protein, 433 aa, unidentified
MNNMHIAHHSSEGKTKYIIRAVNHYCAGLDVHRDFVCVTTLCGKDDDISMDYREFRTVKRDLLQLRDWLLSKNITVAGIESTGKYWYPIYNAFEGIIHLNVYNSRHIKNIPGRKTDKSDSEWIARNTRYGELKASFIPSSRIRDTRMIARTRKSVLQIRGTCRQIVHGYLESSSIKIGSVLSDVFGVSGQELLHLLVSDSAISPGKIEQCLHGSLKDKSEEVVIAMDGYVNDVHKSLIRSMLKNEETLTLRIKSLECDLKRQLITNADERHVLNLLTAIPGVSELSALLILAEIGFDLSSFPNEKQFCSWAGLVPGKHESAGKNKTGKIHSRACYMRTLLVELSLSASRVKNSFYSAKFASLRARIEPQKAIIAIAHKIAKAIYVIIKYHQPYEELGVQRIQQDMYQRDINTLRRLQQRLGVETIISQLSGTP

SEQ ID NO: 112753 - protein, 358 aa, unidentified
MIVIGADTHKATHALAAVDAGTGRARGAREIDADGSGHLQAVRWARGVDEERVWAIEDCRAVSRRLEQALLAAGERVVRVPPHRMGASRKGERERGKSDEIDALAIARAVVKEGVARFPCAYLNEQATEIRLLFDHRADLVAERTRIVNRLRWHLLELCPDLERSLNRGSLGNRRTLDRVGRSLRMLPADARVRVAREQVLGLRGLNRQIDALQDELVALVAAHRPRLLAELGCGALTAAILIGRTAGNEHFRSDASFALQSGTAPIPCSSGRRIQHRLNRGGDRQLNHALHVIAITRAQRDPATKEYLARKQAEGKTSKGALRCLKRHLARRFYQLLSEPSNDGSTPVEREHPEAPK

SEQ ID NO: 112754 - protein, 340 aa, unidentified
MSLAKTAICVVDRDGRVPWQGKVPSEPEPLVKRLAEWSGVIDLAGIEACPLWEWLHRGLREAGIPVVCVETRHAQHFLSSRPVKTDKNDARGIAEMMRLGHYRPVHVKSPAAQSMRTTLAARMQLVASQLQIEGTIRGLLKVYGLKIGAIHRNRFVARVLELLEMAALPDLSTAIEPLLRLREGMRAERKVFDRRLAALSRRDDVSRRLMTIPGVGPATSLAFVATVDDPVRFGSSKALGAHLGLTPRVYQSGEIDRSGQISKCGDRMLRHLLYEAASALMTRTRKWSRLRAWGVAVAKRRGMKRATVAVARKLAVIMHRIWVTGDEFDFGGPAVAAKAA

SEQ ID NO: 112755 - protein, 331 aa, unidentified
MNYSHFVGLDVGKKTFDASLMSADEKELSHKSFDNTPTGIQSLLDWIAGYHLSLSKLLFCAENMGSYVTELSVSSVSMGFSLALVCPLTIKKSIGLQRGKNDRIDAKRIANYAVLHYRKLELYKLPDKDLVRLRGWIIIRDNLVKQKVSSIKLLETFSQMAKLADVTESISFLEEQLKSIKERILEVEEDMEQLIAASTSLYTNYLLLRSIKGIGIINAIVLLCVTDNFQRFDNPRKFACYCGVAPFEHTSGISIRGKTQTSSLANKEVKVYLTRAAITAISWDPQMKAYYKRKIAEGKHKAAVINAVRAKIIARSFAVIRRQTPFVTLAV

SEQ ID NO: 112756 - protein, 388 aa, unidentified
MQFAADRLEAPTAIRTDLGAIFISLELSRSSWVITSLSPGGGEKMSKHTVRGGDVAGLLKRFAQLREKALGRTGKVFPLIVIQEAGLDGFWIDRVLQNEGIESHVVDPASVATSRRRRRAKTDGIDGEALVRALLAYKRGEPRVCSMVRLPTPEDEDRRRLCRERKVLTMERVQHVNRIKGLLFSQGVSGYEPLRRDRRERLDALQTGDGRPLPPHLKAQVRRELDRLELLLAQIKAVEAERDVLLAAEQTKAPVAPAMLLGVKGIGPEFAAVLWSEGLSRPFENRRQVAAYAGLAPTPWQSGSVDREQGISQSGNPRLRTTMIQLAWLWLRHQPDSALALWFHDRVKRNGGRLRKTTIVALARKLLVALWKYVTAGLVIEGVVTKTA

SEQ ID NO: 112757 - protein, 346 aa, unidentified
MMIIGCDFHPSWQQVSWVDTETGETGEQKLVHATGDGKAFYQQLAAPALIGMEATGNSQWFIELVQDLGHEIWIGDAAQIRASYVRKQKTDKRDAAHILKLVVEGRFPRLWTPDREQRDLRQLVLHRHKLVMIRSRVKNELQHLSLNKGMQKKRTLWSQAGQKLLRELPLKPWAACRREDLLGLLAMLDQQIGKLDHAVQQAADQHPQSKLLMTQPGVGPNTALAFVLTIGDASRFPRGKQVASYLGLIPREESSGGRQKLGAITKQGNRLVRALLVEAAQIAVRYDPQFRKEYLHRCHQKPKAMAKVAAARKLAVRLYWMLRTQTAYPEIVRIESSPRVALVSAS

SEQ ID NO: 112758 - protein, 390 aa, unidentified
MNEDKGKRIIGLDMHPDVFAAAALSVDPKRQNAEWVQDRMATAGLEGWAKKQLRKEDVVVLEASGNSFEVAARLHAIGYTAVVMESAQAGKIRDNFCNDDRHSAVKLAKVYRSGLAKEVWQPDAKTREYREVFFAHRNAVKDATRCRNRIHSFLNEHCVRLKPGVRLTHSSGEAIAKAAKAWTPLQSDLLAQKFAQLREVESRREQLERIMVREIATNPRWASLWRLMGIRHRVAFALMAMVGDIHRFPTAKKLVGYFGLAPRRDQSGNDKNGRDKGLGGFGRGDVRGLLLQSAQNALSQRGSPLHKWGWKLLMKKHRNEAAVAVARKLTVSVWHLLMGHFTPLVEATEHLHTKLLKLATVIGKDGLTSLGFANREAFVTAQIKSLQLST

SEQ ID NO: 112759 - protein, 445 aa, unidentified
MLFLPSPRPAAPAGAVTLLVLEMVIMGIDAGMDVVHPRCAGMDISKNDAKVCVRSPLGDNGRFRSVVTTYGATTNEVQRLRADLEAAGVSLVVMEATGDYWKPFFFPLEQSLNVQLVNAKQAKNIPGRKTDVSDAAWLAKLAAYDLLTSSFVPPESIRQLRDLTRTRTHYAQEATREFSRIEKCLEDAGIKLSSVASSLTTKSCRTILDAMVAGQRDPHVLAELVEPGMRVKNAALVEALTGRFTTHHAFLIGEHLATIDEINTHIHKFDTQIDQVMRPFRDVRDLLTTIPGFSVTVADVIIAEIGVDMDVFPTAANLASWAGVCPGQNQSAGRVKSTRTRPGNRYLKGALGIAAMSASRSKTTYLSVKYQRIAAHNSKARLKALVTIEHTMLVIIWNMIRNGVVYNELGPGYYTRRNPNKIKNAAIRQLQTLGYTVELTPATAA

SEQ ID NO: 112760 - protein, 341 aa, unidentified
MKTQSHVGVDLHQRFCYLTAVDASGRKYKQGQVANRPEALRSWLREVPGPRQVVVEASGFWPAFARAVEGEADRLVMVHPQRVKAIASARLKNDRVDSETLAHLSRADLLPEAWMANQRTQQLRQLTRLRITLGRQRATAKNQLQAVLHAEGFQRPVTDVFGKCGRAWLAGLGLSPAGRRVVDTWLKVVDHLDGLIAEQTRELERMAKDDVRARWLQTVPGIGAYSAMVILAEVGEIERFPSKRALASYAGLTPAVRESAGKKKRGAIGHHGSARLRWIMVEVAQVATRHSPAARAWYLRLKQRKPAQVATIALARKLLTAVWALLRHGVCFEEHVFAVRN

SEQ ID NO: 112761 - protein, 328 aa, unidentified
MEYIGVDLHKQFFHACAITETGTRAWEQRFPRNDGGLVLFRARCSPMTAIAVEAMGPTWAFVDALRPSGAPVCVVDPRKTRLKAGYAAKTDRLDARRLADALRRDSVVSVYVPPPAVRELREVCRGRYQVVRLRARVAQMIRALLLRSGCDDVPVTRVFSPRGLAWLSAVQLPSEAGASLERWRRVLMAVHAEAAIADATVRTRAAADPIACGLDAMVGVGPVLALTLRAEIGDIHRFAGGPALASYAGLVPRVDASADRYWSGRITREGSPWLRFALVEVAMHAMRRQDAIGRWARQLAMRKGAYKARVALARRLCDEVVAKWPRCA

SEQ ID NO: 112762 - protein, 353 aa, unidentified
MPTTSSPTAPLKYVVGIDIAKDTFVACCGRIEMSQHLRFGKEATFDNTAAGFAALLVWTARQQPAAAPLWFVVEATGVYYEELAYFLSDKQQTLSVLLPNKVKHFAQSTEQKSKTDQLDARLLCRLGLERALPTWQPPTPALRTLRALARERQSLTRQGARLKTQRHAYAHSYQPDARTLQRLAVRQHLLVEQLRAVDQDLAALLEAEPELARKLAHLTSVPGIGLTTAIVVVAETNGFVLIENERQLASYAGLDVVQRQSGLSAQATRISRRGNVHLRQALYLPAMSSLRYNPQQMAFYARLRARQPSGKPGVIAVMRKLLLLCYSLWKNDQPYDPHYHPAQLAEKEVAPAT

SEQ ID NO: 112763 - protein, 354 aa, unidentified
MSNYSTKFFIGIDLGDVENQICIIDHHGEILEKTSIQNTVSGINTFFDRFDAPRQVLVAVETGTHSPWISQLLNARGFRVLVGNARKLRLIWDSTIKTDDRDAEMLARIARFDPKLLHPIRHRSRCAHMDLAIIKGRDTLVRCRTTLINFVRGSCKTAGTRLPSCSADAFAKTVIEHIPKDLLPATVPCINTILELTKKIRQFDSQIEALCNEVYPETMILRQIKGVGPVTSLAYILTLEDPTRFRKSRDIGPYLGLVPRRDQSGCTDKSLSITKAGNTYLRRLVVNSAQYILGPFGPDCALKRYGIRIASRGGKVAKRKAVVAVARKLAVMMHHIWKNNTVYDPFYQSYLKAA

SEQ ID NO: 112764 - protein, 342 aa, unidentified
MKLFIGLDVSLAKTAVCVISQHGQIVKEAETESEPEALARWLNELDGSIAAIGLEAGPLSQWLHRGLTEVGLDAVLMETRQVKGALKAMPIKTDRRDAEGIARLLHLGWFRPVHCKSVSAQETRALLGARKAIQQNMIALEMSLRGLLRNFGLKVGAISRGRFEARIRELADGNPMLETATDPMLRSRASLLQELAALEKQVRQLAQDDPICHRLMTMPGIGAVVALTFRAAVDDPARFRSSKRIGPWVGLTPSRNQSGERDVSGGITKAGDVNLRRALCQAATVMMNRGRSTWLRTWGAQLAQRRGRKVAMVALARRIAVILHRIWVDGTIFQSDAAPNTV

SEQ ID NO: 112765 - protein, 367 aa, unidentified
MKKTSTVRVNGNMIFKGQKLTLGMDLGDHWSCYCVLDEAGKIILEQKVAMTPEAMKQTFAKIPQSLIALETGTHSPWVSRLLTELGYKVIVAHAQKVQLITKSNRKDDRHDARTLARLARIDPELLGPVRHRSAQAQIHLTVIRARAELVRARTALVNAARGLVKSYGQRLPKCGTQQVNRELAAGLHAELREVLEPLLQEIESLNERIQEYEVRMEKIAKESYPHVELLKQVKGVGTQIALTYVLTLDDPHRFPKSREVGCFLGLCPGRRDSGESQPQMGISKEGDRYLRTMLVQGAHYILGPFGADSDLRRWGLKLAARGGKSAKKRAVVAVARKLAVLLHRLWVSGEAYEPLRNSRQVLLPAAA

SEQ ID NO: 112766 - protein, 411 aa, unidentified
MDVLFPACAGIDVHQKNVVACRLYTGVDGQLHYDKRTFRTMTTELLQLSDWLAEVEITHVAMESTGDYWKSVYNILEGNFEVWIVNAHHVKNVPGRKTDVKDAVWLADLMRHGLLRPSFIPNQDQREWRDLTRMRLTLVRERASLCNRLHKALEGANIKLGAVATDLLGVSSRRILRELATRPEATPTDLADLALGTLQKKRDDLTLALEGRMNEHHRFMIGQLLDHIEELDRRIATFETRIEALSAPFAEAVVRVDTHVGVSQTAAHAIISEIGADMSRFPTAGHLASWLGLCPGNNESGGKRLSGRTRKGNRYARAVLVQVAQVVCRMSGTQYYALYCRIAARRGKKRALIAVAHAVVVTLYHMLTKGVDYTEPGPDYLVKRNPERELSQLRRRAVQLGYDLVAQPQAA

SEQ ID NO: 112767 - protein, 486 aa, unidentified
MKTTRERTQERAKAAAGSAPSKSQRMNRKQRRELARKIQADDVNLEVVHPDAAGIDIGNECHYVAVPSKRDSEQPVRRFECVTAELKAMAEWLKQCGIRTVAMQSTGVYWIPVYDILEAAGLEVYLVNARETKNLPGKKTDVQESQWLMKLHTYGLLRNSFRPTAEIRRMRNYWRQRNDLIQSAARHIQRMQKVLTQMNVQLANVISDVSGVTGQAIVKAILDGERDPYQLAELRDPRVRATKEQIARSLEGNWQEDLLFILRQEHEAHGFCEKQIAACDQELKEYLNEREDRSQGAHLEEEKRRNRRMKKKGHKPQQFDMREALFRMTGVDLTRIDGIDVMTASTVISEAGWDMSKWRTEDHFVSWLRLCPDNKVSGEKVIGKGRLPTNNRLTTALKIAATSLKQSETYLGAQFRRLRTRLGSPVAIKAMAAKLARLVYRILRYGMRYVDRGAQIYEEQHRQRQIMFLKRKAAELGLKFVETAAA

SEQ ID NO: 112768 - protein, 613 aa, unidentified
MSRNDLFLAIFVMAIWGFNFSMIKLGITDVHPLLATAARFSLAVIPAIFFIARPNVAWRYLLAYGVVFGVGIWGMASWSITAGLSSGMSSVLLSSNALISMAVGILVHKESASKRKVLGAGMALVALLILVSATNGNITMQGLMFIMIAATCWTVMGMIVKASKTTQAFAFNVWGMLFAPIPLVLFAVALYGPEIIEQAVKVWDVSTTVAVVFQAYPTTLFGYWVWNRLLIRYPLSTTAPLTLLVPVFALVSGLIIWSASLSSPTLRVGSQNEVNHMSTIHILGIDLGKHCFHAIGNNYSGKEVIRRKFNRSQLLRFLSVLEHTTIAFEACGGAHWLARKCQALGHRVRLIPPQYVKPYVKGNKNDFIDAAAIAEAASRPTMRFVSVKSEEAQVISAIHRVREGYVKERTACMSRIGAVLLEFGLSFPRGHAKMKALFQWLAEQDVELPQSLIAELLSIHEHYKYLNDRVSEQDQKLKSIAISNESAELLKTIPGVGDLTATLCVANISSASNFDGGREMAAWLGLVPRQFSTGGKSKLLGMSKRGNKHLRTLFIHGARAVLSRIESTGKVFGDWLVNLRATKPFNVVLVALANKLARIAWAVLYHRQAFRAA

SEQ ID NO: 112769 - protein, 357 aa, unidentified
MQTQVNDLNFNGENIFVGIDTHKKNWKVALYSSDIALKTFTQNPEPGLLVNHLRRNYPNANFSCAYEAGFGGFWIQKQLAAQGINCIVVNPADIPTTSKEKEFKTDPRDCRKIAKSLRSQLLTPIYIPSDRGLAFRSVVRLYNDAVKNQTRQKNKIKGLINFYGIRYPDEFKLETSHWTKSFCLWLSELKLDCEENTWTFQFYVQEYLKAQGEVTEVTKKVREIAKKAPLSKSVNLLISIPGIGVLSAMKILTEIEDIQRFKSLDQLCGYIGLVPTTKSSGEKENVGEMTNRGNKHLKTTIIECAWSSIHHDPGMSQKYFELIKRMDSNKAIVRIAKKLVARIIFVLTKEEEYKVIK

SEQ ID NO: 112770 - protein, 337 aa, unidentified
MKYCGIDLHGNNNWVVIIDEQDRVLYSRRHANDLPRLLAMLAAHRSELCGIVVESTFNWYWLVDGLQEAGYRVLLANTAAIKQYDGLKHRGDESDARQLAHLLRLGLLPEGHIMPKAARAVRDLARKRMQLVQQRTAQILSIESSLSRHSGWKLSSNRIKCLRQADLDELRLGEMPMLGLKANVAVMQTLQTQIDGLEKVLADYCRAEPGYRLLRTVTGIGEVLATVILLETGGIERFADAGNYASYCRCVGSAHLSNGKKKGQGNTKNGNRYLAWAFVEAANFAVRSCEAARRFYQRKKAARNNAVAIKAVAHKLARACYHMLKTQQPFCVERCFA

SEQ ID NO: 112771 - protein, 370 aa, unidentified
MENRSMFVGLDVHKETIDVSIAEGQREGEVRHYGVIASDLEPLNKVVRALRAPDRRLHFVYEAGPCGFGIHRHLTACGEDCVVVSPSMIPKRSGDRIKTDRRDSQMLARLHRAGELRAIDVPDATDEAMRDLVRAREDAVVVGTQAKYRLKAFLLRQGRRYPGREGWTLPYRRWLTDLSFPNAAQHIALQEYRDAIDETETRIDRLTEQLRQLAPTWRWAPVVAALQALRGVSLITAVALVAELGDLTRFGHPRELMAYLGLVPSEYSSGPSVRRGGITKAGNPHVRRLLAEAAWAYQGIPRIGRQHAYRQEALPKVVCDIAWKAQLRLTTRFRRLVARGKAKPKVATAIARELTGFIWAIAREVSPAPQ

SEQ ID NO: 112772 - protein, 454 aa, unidentified
MEGDMAKRKAVFELKFPNAAGIDIGSSSQFVAVPADRDDTPVREFPSFTVNLCGIADWLTACGIDTVAVESTGVYWIPLYELLESRGFTVYLVNARHVKNVPGRKSDVLDCQWLQQLMSYGLLTRAYRPTDDICALRAISRQREMLLSYQSRHVQHMQKALVQMNIQLGNVITDVVGDTGQKILRAIIAGERDGQVLARFRNSRIRASEDDIAKSLVGNWREEHLFALKQAMALYDAYAERLAECDQELGSMLARLGWYDADPGKPKRRSHAKNAPRVDVRTYLFRMCAVDLTRIDGIDTTTALKVVAEVGPDLSRFPTSKQFTSWLGLCPGTKITGGKRLSGKTKRTANRAARALKTAAASLLKSQSALGAYYRRMCARLDKSKAITAAAHKLARLIYAMLTKGSEYVDRGQDYFEERYRQRVLHHLKRRAESMGFKLEPVTVAENNFVHSVT

SEQ ID NO: 112773 - protein, 316 aa, unidentified
MTVTPVFVGIDVSKERLDVARRPSGDGWAVANDDPGIAALVDRLRELPPALIVLEATGGLELAVTGALAAADLPVVVVNPRQVRDFAKATGRLAKTDTLDAAVLAQFAEAVRPARRPLRDADTQALGALLARRRQLVEMRTAEQNRLGSAPRRVRVEIQAHITWLNRRLARVDADLDQAIRSSPLWRAKDDLLRSTPGVGPVLATTLLADLPELGTLTRQRIAALVGVAPLNRDSGTLRGRRTVWGGRAQVRAVLYMSTLVAVRYNPVLQAFYLRLREAGKAPKVALTACMRKLLTILNAMVKHRTPWEDRFAHSA

SEQ ID NO: 112774 - protein, 420 aa, unidentified
MKYVGIDIAKNFDIACVLDEDNSLITRNYRINSEFTDFDMFYRMLESIDQDKSQFLIGMEATGLLFENLYLFLKNLGYSVVLLNPYQTTKFREMDTMKYVKNDNIDSQMIAALLKSGRYAKGFVSEDIYQAIKSLYRHKATLTQEMKNAKRQVSTSLAVVFPEFERIMKDPFSVSGMALLEKYPTAKHYKGASPQRILKVFRNIKGNNFNLQKAGELYDLATTTIYQGNAKDERAYVILSNLRRIRFLKEEIEQCESQMFTLLNESEQAVSISISKEDEVYIADLVDNLRSIDGVSDKTIFAVLSECGDIARFKSGQSFIGFLGLYPTLHQSGNTTRYGRLAKRGAKLAKMAIYQAAVACVRHNAELKKVYLDKKSSGRAPKECIVVVARKLAMIIYSIYKNNTPYNPARVFSTQASLSH

SEQ ID NO: 112775 - protein, 346 aa, unidentified
MLIVGCDYHPRWQQVAWFDTETGEIGGRKLVNGDGEAERWYRQLPVPSLIGLEATGNSQWFLDLLNQLGHEVWVGDAAEIRASYVRKQKNDKRDAGHVLKLLREGRFPRLWVPSAEQRDLRQLLIHRHKLVQIRSRVKNGLQHLAMNQGMQKKSRLWSVAGQKAFRQLPLVGWAQCRRQDLLQLLVYLDQQIAPLDQAGQQAAEQDPQARLLLSQPGVGPITALAFVLTIGDVARFPRGKQVASYLGLIPREHSSGGRQRLGAISKQGNSFLRMLLVEAAHSVVRLDEGFRKQYAHRCHSKPKGIAKVAAARRLAVRLYWMLRTHTPYPEIVRIESSPRVPLVGKS

SEQ ID NO: 112776 - protein, 427 aa, unidentified
MSTLFVGIDVSSKTNAVYAMDFEENKYISSSFGNNQPGADKLVNMIAECMHKHKNLDTVLIVLESTSVYSVHISNFLSASEVLMPYRPYVFCVNPKAASNYRKSYIGMEKTDPTDAYLIADFGRVGRTKKLEPWRGGQFIALKRLTRHRMHLSECITREKTYMVSNLYLKFSELQLLEGDDKPFGSLYGATSSAVLTEFLSPQEIIDMPEEELLTFLAGKSRNRISDLSKTSELLRKAARDSYRLDKCMYEPLSISLASSFNCIHAYQKEIKLIEQAIEKCINGMNPNALLILQSIPGIGPIWASGILSEIGDITVFHSSDALAKYAGLYWPKGDSGDFTSEDNKMSKAGNPYLRYYLGEAANSVRKHIPEYADFYARKYAEVTKHQHKRALALTSRKLVRLVFGLLVKNQLYTGEKLDTEYNIESN

SEQ ID NO: 112777 - protein, 392 aa, unidentified
MIYVGIDVAKDKHDCFITNSNGEVLYKPFTISNNREGFDTLFQRIESVSDDFTKVKVGLEATGHYSYNLLGFLLDKGLPTYVINPLHTNLYRKSLSLRKTKTDKVDSRTIATMIMSDMNLKSYSDISYHNEELKSLTRYRFDKVKERAKLKTSVSRLVNILFPELEKLVPSLHLSSVYALLSEFPGAAQIAASHLTKLSNLLSQASKGHYGKETAILFRETARSSIGSVMPAKSLELKHTIKLIQELTAEIDEIEAAIKQIMDEEIHSPILTIPGISYRMGAMILAEIGDFSRFDSADQILAYAGMSPSTYQSGQLDNCHSHMEKRGSRYLRYALYNATKYVCHWDNSFGAYLQKKRSEGKHYNVALSHAAKKLVRLIFAMEKSGRTYQPAA

SEQ ID NO: 112778 - protein, 319 aa, unidentified
MHCIGVDVSKQDLVAYDGQQQRVFPNDRGLTDFRRFVRQTKNAFIVFEPTSTYSRRLESFCRMAQIPCCQLNPRVVPHLRQVGKGRSKTDSTDAELLYRYGVERGHRETTQLTRDALADSIQAWLGMYRVTQKSRVAYQNMREALSHDPGIPASLLKELDEEIHALKAKEKAKIREAEKLITDHEDARRSFENLLSVPGIGPITALTLLVVFRRYPGTNRNRIVALVGFDPIQFQSGTSVHRNSRISKRGNREVRRRLFEATLAAARYNPGVRAIYKRLKAQGKPDKVARIAAARKLLLIAHAIFKSGDPFRTAAQLEG

SEQ ID NO: 112779 - protein, 438 aa, unidentified
MLRFVGCDVHKRMAVFTILLEDGKVQATHTVTVTREALSRFAKLHLGSEDRLAMEATTNTWAVADVLLPHVQEIVIGNPLRTRAIAEAKIKTDKVDSRVLAELLRADYLPSVWQPGPETQRLRRLTHRRAALVSDRTRLKNRLHSILHHGLIPLPECDLFSQKGRVWLKELSLPEDEAAARDSDLRLLELTEQEIMLAEQQLVGQAWQDEKVRLLMSIPGIDYTVAQTCLAAIGDVTRFANPKKLTSYLGLNPSTRQSAQHCVHGPITKQGNAHARWLLVQAAQHLGSYRGPLGQTMRSLIRRKNRKVAVVACARKLAVLVWHVLTSGEPFRYAPPKTLAAKFARLRVRATGKRRRGGVAKGSSRSPQYGQGRTRVVPALPQLLEQNGLPAVAPLARGERNMLARKKLDRFYLELQTPSRVPTPKSAGPNNNIKATDY

SEQ ID NO: 112780 - protein, 367 aa, unidentified
MGKIRLVEVVGQQGPHTPRRPDPGSQVWMAIDISRTKLVYCVRWDGAEQRRLSTPMGLEHVRALVEQYRECCLHVAYEACGFGYEIAWWLQEHGVAVTVIAPSRVERVAGLSVKTDRLDAGKMARKLEKGELKGIYVPSRTLHEQRAVGRTYAQCLKERKRAQARIRALMQEHAKLGPLPAQGWTAYSDWLRLQPLAEPLDVSVHALLALRTLADQQARRLRAQLEGQAVSEPYAKLVQALREQSGVGTMSAIRLVVELGQIDRFPTTGSLPHYLGLTPSQYSSGDPDRRGHILKCGPGTLRALVLQCAWVAVRRSGDEELGKVFDGLAPRVGRKRAIVAVARRLAIKLRRRWLEVVQSAPAVAATA

SEQ ID NO: 112781 - protein, 313 aa, unidentified
MNDTIGIDISKATLDAFRRSTGEHRQFPNDANGCKALIRWIGPGHAERARIVFEPTGPYHRVLGLALLAAGLHLVKVNPRSARRFGEATGVLAKTDRIDASVLAGMGALLDLQGRAAKTDIQYDLKELGVARQALIKDRVAARNRKAAALNTLIKRQIAARIKQIESQLAEIDAAILTRLREDPVLARRFDILCSIPGIGRITAAALLIDMPELGAVDNRQIASLAGLAPMTRQSGGWSGRARTRGDRRQIRITLYMPAVASLRCNPQLKKTFDTLSDAGKHAKLALTAVMRKLLIFANSILRDNRKWNENRA

SEQ ID NO: 112782 - protein, 384 aa, unidentified
MLKIVYPICCGLDVHRDFVYACIATTVNGVTTYKSHRFSTFTKGLRELLSWLLASNCKDVCMESTGKYWIPVYNILETDCKIVLAHPKYVKAIRGKKTDKKDAKWIADIFKHDLVSGSFIPPADIRQLRDLVRYHAKLTNFTTGEKNRAQNCLTVSNLKLDSVFSDVFGKASSKIISHILASPSEKLSDVSAFRTKGMKATDEEILEAVDGEIYPEQAEKLRIIRDHMSSLDLCKANLQSLILSTAEKYIPEIDLVCTVPGIATFSAISVIGEIGVDMSVFPTSKHLCSWAGLTPQNDQSAGKKKTTRISRAGAYIKPLLVQCALAAVKSKNKHPEVYNRYSALKKRRGQGKHRKRRCRGCKACVFFQLCPQAEGSVPVASDRG

SEQ ID NO: 112783 - protein, 362 aa, unidentified
MNYVGVDIHKKYSVLCAVDERGRKLREARIEGNSGCGFAQFFASLEGPSKAVVEACWNWGLVHDELEEIEQVEEVVLAHPYKTRLIADAQIKTDRLDAHALGTLLRGNLVARAHVPRRETRVRKNLLRQRLYWARLRTMLRNRIHALLDRQRGLELPQCSDIFGVRGLSFLRRLELPETDAALLGEQLALHDLIAQQMKAQEKRIGLEFGSEAMHRQLLSVPGIGPTLAAVIACEVDSIERFSSAEKLCAYAGVVPTTHSSGGKTRHGQLLPFCNKWLRWALIEASWVAIGCSPYFGALYKQHRARGKKANSAVLIVARRMCRIIWQLLHEKRDFEKRPLRPNFNFPGCSVVRLTAATAARP

SEQ ID NO: 112784 - protein, 368 aa, unidentified
MKQVTTYVGIDAHKKDLFIAMLIGQQKTPVTWQLANEPQAVRRLVRKLEREAPGPVSVFYEAGPCGYALQRQVTTSRVSCDVVAPGLIPRKPGERVKTNRRDARKLVELGRAGLLTTVQPPTLEDEAVRDLARARDDAREDLQRCRHRLGKLLLRRGLHYAGRNWTRAHRQWVDGLVWTHAAERAVVDDYLLAIDHTEARLLELDARLAEMAEREPYRNPVGWLRCFRGIDTLTAMLILAELHDFRRFASAPALMAYLGLVPREDSSGEKHRRGRITRTGNALVRRLLVETAWHYQHRPSVGVALTRRRKGQPGRVIAIADKAQQRLCRRFRKLAAEHKPAPKIAVAIARELAGFLWAALQPTPVAVK

SEQ ID NO: 112785 - protein, 356 aa, unidentified
MNSRGCLYVPGIIVGVDTHKDEHVAVVVDKLGVRIGQRSLPTTNMGYVSLERWASGLGEIDAFGVEGTGSYGAGLARFLRGQGHKVVEVNRPDRSTRRRLGKSDPTDAEMAARSVLAGVARDQPKSGIDKVEMIRMLKRTKDSAMKSRIQAINQMKALIVTAPVELRAVLRGLITNQVVARCARWRHGQLGTPAAAAKYTLRSLARRHIQLTQEIEALDAQLARLTTAFAPALMESFGIGPDTAAALLVTAGSNPERLKSEAAFAALCGVSPIPASSGKTNRHRLNRGGDRKANAALYRVVIVRLRYHDRTRTYFQRRMEEGKTKTEVIRCLKRYVAREVFGILHDIGKRITADNA

SEQ ID NO: 112786 - protein, 371 aa, unidentified
MGEITRGAIVRVGVDLAKRVIQVHAVDAGGRRVVGRTIKRGQFVAWCVQLPAGCLVAMEACSSAHHWARKLRLLGLDARLIAANFVSPYRMEGKSGKNDMTDAAAICEAASRPSMRFVAVKSCEQQGVMSLHRVREGLKEERTGCINRIRGVLAEFGFVFNKSPKALRAELADVIEDASNELSTTARLVLQRAFDHWRELDEHMRWCDSQVGQHVRSSPAAKRAARITGIGELGASALTAGVGDFHQFKGGHQLGAWLGLVPRQNSSGGKSSLGRITKRGDDYLRTLLIQGAKSAVMSAAKRDDPISRWLVQLTARVGWQKACVAMANKNARILWAVMTRDEGFDARHVSEKPQAKTPAHERVAASAPTAA

SEQ ID NO: 112787 - protein, 412 aa, unidentified
METAMHTDFQYFAGIDWGSEKHRVCLMNAAGNVLAERWVEHSGDSLAELVDWLRQQSSAAPQALAAAIEIPRGAVVETLVEQGFAVFSINPKQLDRFRDRYSPAGAKDDRRDAFVLADSLRTDPHCFHAVRLDEPVMIRLRELSRLEDELAQEFSRAANRLREQWHRFFPQLLQLSESADEPWLWELFELAPFPAKAARLTKARIARLLQQHRIHRITAAQVRAMLKTKPLTLAPGAREAAAEHALLLLPRLRLLHQQRSDLARRIGALLKELTAPAEGQTEHRDAAILLSLPGLGRKVAATMLSEASQAIAERDYHALRCYSGAAPITRQSGKKKSVMMRRGCNERLRNALYHWSRTSVVWDQASKNRYAEMRACGHSHGRALRGMADRWLKVLISMLRHGTLYDPQYSVA

SEQ ID NO: 112788 - protein, 348 aa, unidentified
MRFYTEQHQHYCGIDLHARTLYLCILDAGGNVLLHKNLPCDRARFLEAIKPFREDLVVASECIFNWYWLADLCAEHDIPFVLGHALYMRAIHGAKAKNDRIDAFKTVSLLRGGLLPMAYVYPAQMRSTRDLLRRRTHFVRKRGQLMAHIQNTFHQYNLPRPPGRLVYKYQRAPIPDAFLDPILKKSVETDLALCDTYDELIRDLEKTVHRQARAHDPQTLLRLNTVPGIGEILALTLLYEIHDIARFESVQRFASYARLVKCEKSSAGKRLGTSGHKIGSVHLKWAFSEAAVSVIRHLPQSKRLHDRLKRKYGKGKALSILAHKLGRTVYFMLKRNQAFDADRFLANT

SEQ ID NO: 112789 - protein, 381 aa, unidentified
MQSIQTWAGIDVSAKSLEVRRSGGGKEETRTFTNDSSGHGELIQWLGKKARICVEATGVYHLQMSIATHRAKIEVMVVNPRVAKDFAGALSNRSKTDKVDAATLLEYVRRMEFEPWEPPRREVLELRELGRRIGQLVQLAADEKNRRHAKSVASISEAVFEDVQAHIRQLDERISAVEKRAMTVIEQDDDLREQYEILMRVTGIGRRSAVQLLTELSVLDPEMTVRQIVAHAGLDPRRYESGTSVDKPVRISKVGNARIRAILFMIALSAIRHDHNARRFYAALLVRGKKRMQAIVAVMRKLLHGIWIVLQRRVAFDSAILFPSPASLAQAESSDSAIAAPQPEPAQDHPEGRSKAEELREQLDPGPAEATRSRRKRSKAA

SEQ ID NO: 112790 - protein, 348 aa, unidentified
MEHVAIDLGRPNSVLCELGPEGKKVLRRFRLDRPNLTRLFSGRPACRVLIESSTESEWVARHLESLGHEVVVADPNYAAMYGERNRRVKTDGRDADALFEANRLGVFRRAHRRSDPQRRVIAQHGVRGALVRTRTRWINVARALLRREGYQVPSGSAESFGDRVGDLDLPRELRGLIAPLLALIDPLNEQITQLDRTTESLGKEDPRVRLLQTAPMIGVQTSTAFVALIDDVARFPKAHKVESYLGLVPSEWSSSERRIKEGITKRGDSRVRWLLVEAGWSILNRPRVDTAELRNWALNIAGRRGKKIAVVALARRLGGILYAMLRDNKPYDPTRLTAAPLRSRKAAA

SEQ ID NO: 112791 - protein, 362 aa, unidentified
MEGKKQRFVGIDIGKRTYEVAIVGANGKVTMSNGRTTVEGRQKLYQKLVSTDKVALEAGNLAFIIAKELQAAVGCEIRVLNPSHLALIYGSMKKTDKEDALKLAHIIEDTKDERLPVVPIPSDEEMRRRKMVSSYRREQRMRNQAINRLHGLFLAQGITDVVKSDLATAEARAETVQALTGHEREEAEHLVACLKLYEGRIQAVEGKMKEEAKGDEKIQRLQTVPGVGPMISFAFVAHVAAERFENGAQVSNYIGLVPRVYISGDTVRYGQITKRGNGFLRALLVQGSWALIRSKAGGSLKERYEYMTVEKGICKKKAIVAIARRLAELLYVLMRDGTGYEVRRFKAGKGEGKKLAQLAISA

SEQ ID NO: 112792 - protein, 386 aa, unidentified
MTQHSHIAASHQLDYERTLILAVEVSGRSWVVAAQVPGLRQKGVKQQLAPRADALMAAVEGYKRRAAAAGMAVERVIVAYESGGSGFWLARWLQQRGVEVYVMQPSSVPVDRRMRRAKSDRIDADMLLRTLLAWLRGEPRVCSMVPVPDEATEDARRPIREREELIRARVALVNRIEAVLTVLGAGEYNPLRRDCRERLGQLRTALDQPLPPHARAQIERLLDRLDLIRQQVADLEAQRDRAVEGETVGQAERMIQHLARVRGIGVQTATVLVHEAFVRRFRNARALGSYAGLTGTPYSSGGTHREQGISKDGNRRLRATLVELAWMWLRYQPGCALSRWFHDRLGGSRGRLRKVMIVALARKLLIALWRYIQDGAVPQGMELKPA

SEQ ID NO: 112793 - protein, 342 aa, unidentified
MLVLGMDVGKRELFVQLQDTTGSSLGQRGPVANTPAGLHQLSDWVHKWTEPTQLHVVMEATNVYWERCAHHFQSLDCVVSVVNPAQIKYVARSVLRRGKTDVMDAELIARYGVVMHPGGWTPPSTALSDLKQLTREREAVLVRRTQEQNHLQAWQDAHRASETVVKLTQQRLDLMVGQVGEIEAAMRALIEADETLSQQLKLLLSVPGFAFVAAATIVAETVGFAHLETGREISAAAGMAPSPHQSGAKRGQGRMSKTGNARLRRIAYLSALGASTSHSRMRTYSRHLRDTGKPAKVALVALGRKLFITGLAVVKSGRPYQDDFCRSQDGTGPTPTTAQPQT

SEQ ID NO: 112794 - protein, 337 aa, unidentified
MEYFAGLDVSMAETQICVMARNGSVIHKAKVPSTPADIAAELAQLPTCRRIVFETGRMAPMLYHGLRQLGLPVICVESRQAYQALKLLATHKTDHNDARGLAHLARTGFFKPVHVKSLPAHAVRSLIIARKKLVGQRVTLENQIRGLAVVFGVRLPRALSSTFIRQALQASEGIPGLSAAMQGLVAARTAVLAAIVAIDGDIRRMVRASDACRRLMSIPGVGQLTALAFTAAVDDPKRFRRSRDIGAYLGLVPRRHQSGEIDYTGSISKCGDRRVRTLLYEAANVMLTRYKGALKLKEWAFAVAKRSTMRKARIALARRLAIIMHAMLRHGTEFKAA

SEQ ID NO: 112795 - protein, 351 aa, unidentified
MEYNIFNMKQSYVIGIDISKSKIDCVVMSSKFELIKEIEIGNTDLKIKQFIKKILLELKLSESDILVCCENTGIYNRPLERVCQELGVDIWVEHALKIKRASTDIRGKNDRQDARRIAEYAVRYNDKQILFKEPLEVIKELNINIKIRETLKEQKVAIQNQLRESKSHDKKEYDQLNQGYKQILKALVKSIENVEMKIYELSRKHVEISENIDLMTSIPGIGAQNALNILIATNNFQTFNSAKHLACYAGVVPFQNQSGTLIKRDRVSKMANKKLKKLLHMAAMCAIRYDLDIKEYYQKKVGEGKNKMSVLNAIRNKLVHRIMAVINRKTPYIKKISEKISESEEKVCILT

SEQ ID NO: 112796 - protein, 429 aa, unidentified
MTRISAGVDVSKNRSTVCIMDQDGKFIMRPFLVCHSTEELDFLADTLKRLNGEVRVIMESTSVYQYPIALHLKERGLFISIVNAYKVKKFANTDFRGGKTDKKDSRTIASYGISYWDKLVEWQIPKDTYFNLDLLNRTYMNAKKHRQIILQELQHYIDCAMPGMDKELHSLNLNTKKDFMLDFVEKFWHRDEIVNMTETEFTEVFTAWAKKKGYRPVEGKAAKIYAIAKSCIPYYPANPTVKTILQCIVDKLSGVNRTLVTIVTQMIEEAKKLPEYQIVREMPGVGDPLAARFFGYAGDIRRFKNSKALVAYAGIDSPPDESGDFSSTHRHITKKGSKVFRDTGYEIMMALRAQKRTWEKVRKNPDVYDYMLRKEAEGKPPKVAKIAALNKFLRIIYARIKELYDNMALAERAKAKTKSKTKAKTKATA

SEQ ID NO: 112797 - protein, 459 aa, unidentified
MAKQVRQKNAARKADQLEWLPPLNRNAAGIDVGSAVHYVAVPAGRDAEPVQEFGSFTADLHRMARWLQACKVDTVVMQATGVYWTALYDVLESYGFQVHVVNARHTKTLPGRKTDVLECQWLQKLHTFGLLNNSFRPAEEIRVLRSYMRQRENLVQAAGTSIQHMQKALTEMNIQLGNVISDLSGTTGMKILRDIIKGERDPRKLALHKDARIQASRAEIARSLEGTWRPELLFVLEQSLELYDTYVEKIQQCDRRIEEHLKTMEAKADPAQPVPEPRRMRRARQHEPRFDLRGQLYRISGVDLTQIDGVSVQTAQTVISEVGLDMSRWPSEKQFASWLGLCPDNRISGGKVLKRGTRHVVNRASTALRLAAWSLLRSQSALGAKFRRLRSRLGAPKAITAMAHLLARLIYRMLKFGHQYVDKGIEYYETKYRQQQLQWITKQAAALNMQLIPLTGVDG

SEQ ID NO: 112798 - protein, 308 aa, unidentified
MPQAVIGCDLSRAFIDTCDLPSGKIDRIANTPDAIGAWLDTLDHDVRVVFEATSGCDGELIAALAARGHPFSRVNPRQAREFARATGTLAKTDRVDARVLAQMGAALDLPSTIPLSPARARLADFLRRRRQLVDMRKAEKLHRHSAGQPEIAQAIETMIDLLSEQIAALDQQIAGFIAEDQTLSEQARLLTAVPGIGPTVLATLLGELPELGTLCRRKIASLAGLAPHARESGTWRGARRIWGGRRKVREALYIAALNASRRIPVLTAMRDRMRTKGKAPKTILIAVARQLLVILNAMIRKRQPIALG

SEQ ID NO: 112799 - protein, 436 aa, unidentified
MKALPVLNEQAAGIDVGSERLHVSIAGDMPEVFGTMTSDLQKLKEHLLKKGVRTVALEATGVYWLCTYEVLENAGIEVVVVNGRHVQNVPGRKSDMVDCQWIATLHAHGLLRSGFVPPAGVRRLQDYLRLRQDKIALAAGHVQHMQKALERMNIKFHDVISSLTGTSGLAVIRAILAGERDPKVLLGLCAGQIRKNKAAAVCESLRGTWKPEHLFALRQALEGWDFYQQQIAQIDVQIQAVLKELAGPDDPDHPSPPAHKAASSNAPRIEGLHGLLMKLCGQHDPTTIPAITDYSLLELIGEVGTDLKRWKTPKHFTAWTGLAPGSRQSGKRHSSASRGRNRAGRLFCVLAQSLARSVDKALGGFYRRIRARRGGLVANQALARKLAVMFWQVMVHGVAYVEEGLKKYEARVLETEQRHLRKLAKKHGLVLQPAAC

SEQ ID NO: 112800 - protein, 408 aa, unidentified
MRIVGLDIHRVFAEAVMLDDGKVVRLGRVGMTREHLVAFARRLTHDDHVVIEATGNAAAVAEVLEPCVGKVVMANPRQVRLIAEARIKTDVIDATVLARLYASGFLPEVWVPDQRTLALRRQITRRNQIVRQRARLKTIIQSILHAHLVPPCPHADLLGPRGRAWLLAQPLPPDEADAVARHLREHDRLSEDLRVVERELAREALADADTKRLMTIPGIDMVVAVGLLAAIGPIARFDSPDKLVSYLGLNPTVHQSGEGRPRHGRISKQGRTHARTMLVEAAWQAVRGPGPLRAFYERVARRRGNHIAAVAVARKLAVIVWHLLRRGEDYAWVRPALHARKLRDLELRSGQPARRGQRGAAHAYNLTRTRLEERRRAEQAETAYRRQTEGWTRRGRRAPTGAAKEERP

SEQ ID NO: 112801 - protein, 393 aa, unidentified
MVVSVGIDVSKNKHDCFIVSSEGEVLADVFTIPNNMDGFDALLEKIRACTTPQDKIKVGLEATGHYSYNILGFLLDNGLATYVLNPLRTNLYRKSLSLRKTKTDRVDARTIAAMLLSDVGLKPYTNTAYHNEELKSLTRYRFDKVKERAKLKSSISRLVCILFPELEKLVSSLHLATVYALLEEFPGSKQIAKAHLTRLKTLLGNASKGRYGRDMAVTIRSAAQNSVGSCMPAKSLELQHTIRLIRELDAEIAEIEAEIETMMDKIQSPITTIPGMGSRMAAMILAEIGDFSRFESPDKLLAYAGMSPSTYQSGQLKNCYPHMEKRGSRYLRYALYNAAKYVCHWDPTFAAYLAKKRDEGKHYNVALSHATKKLVRLLFALERSRQPYCSLAA

SEQ ID NO: 112802 - protein, 390 aa, unidentified
MDVLYQSCAGIDVHQATVVVCILHGPLTSTRPKREMAQFDTTTKGLKACHDFLSQFHVEAVGMESTGVYWRPVWHELCDDFELILAQPAHMKSIPGQKTDKKDAHWIAQLTRIGLLPRSFVPDETIQELRELTRQRKHYVESRNRETNRIHKILQSGGIKLTTYIEDIMGASGRNLLQLLIDETPLTPRMIHQSVYTSLKRKVPQLLEALDGYFSAHHRFMLGQSLEIYDFYQKQIDCLEERMNGYLNLYERPVEILDSIPGMDLITASVIIAEIGVDMSQFPTAGHLASWAGLCPGNNESAGKKRSTKIRHGNSYLKRCLCQAVFAAKRQKGSPLAERYYQIQSRRGPQKATIALAHQLLKLAYILLKENLTYQEFVLQKKATRDEPVA

SEQ ID NO: 112803 - protein, 367 aa, unidentified
MKKISSAVARQTKNVRNPKLTIGLDLGDRSSWYWVLDETGEVLLEQKLSTTPKAMREGFGSMPRCRIALETGMHSPWVSRLLNELGHEVIVAHARNVRLIGESRKKDDRLDARTLARLARIDPQLLCPVKHRSARAQADLTVIRARAGLVRSRTALINTARGLTKSYGERLRGCNPRNLNPEKAQGLSPELQAALEPLLAAIESLSERIYEYNQQIDKIAKESYPQVARLEQVKGVGTLIALTYLLTLEDPHRFRKSRDVGCYVGLQPGRRNSGQSEPQLHISKEGDPYLRTLLVQGAHHILGPFGADSDLRRWGLKLAERGGKNGKKRAVIATARKLAVLLHRLWVSGEAYEPLRNSHPAAMSAAA

SEQ ID NO: 112804 - protein, 328 aa, unidentified
MCTLGIDVSKNKIDLCLLTAGPGGKKKHKVLTNEPAVARKVVDWLNAQKCVPESVTVVLEATGIYHENLAYGLHEAGVSVCMANPCRVREFAHGMDILNKNDAVDAFVLACYGELKSPAVWVPPSPEVRKLRALLRQRDALREDVQRTVNRLEKANSTSTPQEVIRSLERTKSWLNEELARIEKLITDHTDNDPGLKADLDLLKSIKGVKDQVGREMLALLKDGMFKSASQVAAYLGLTPVEKTSGSSERGRPHMSKTGPSGVRAKLYVAALTASRWNKQAKAIYERLVAKGKAKKAALGAVMRKLVHLCFGVLKTRLPWDENYVATA

SEQ ID NO: 112805 - protein, 453 aa, unidentified
MPGRKQTRGRSSGRLSTINPDAAGLDVGSTFHVVAVPGDRDERPVRTFRTFSGDLHRLADWLKETGIKTVAMESTGVYWIPVFEILEARGFEVLLVNARDVKNVPGRKTDVNDAQWLQQLHQHGLLRGSFRPRDGVVRLRAYLRHRERMVDYAAAHIQHMQKALMQMNVQLHHVVSDITGVTGMRIIRAIIAGSQAPETLAEFRDVRCAASEETIREALTGNYRPEHVFALRQALELYDFHQVKIAECDTEIEAVLHTLNEERTTPEQPLPSVRHAKGRNEPGFDARPALYTLLGGDLTQIHGFGPYTVLRLVAECGDDMRKWPTAKHFTSWLCLAPGNKISGGRLLSSKTRRSSNRAAALLRIAAVNVGKTQTALGAFYRRLAARTGKAKAVTATARKLAILFYKALRFGMTYVDAGASYYEERYRQRVIQNLHRRARDLGFTLVTDSAANG

SEQ ID NO: 112806 - protein, 321 aa, unidentified
MDNNVYGIDIAKKSFEVVSLNDRGESRVKSYSNTASGHLTFIDTLPPGSLCVMEASGSYYLSLAFSLHQHGIKLSVVNPLVIRRYSQMQLRRTKTDQQDARLIAHYGRDHRSLLKLWQPPAAVFLRLQQLLTSINLFQKQLQMLRNQLEAMNQVPIVDPLVRSEQMYLIEQLQTSIKRLEQQMLSLSKEHCSQSFQSLMSIPGIGPKTACLLIWITHDFRRFESAKQLVAYLGLCPRIFKSGSSVKGKESIVKMGQALARKYLYMGAFSAMKVNPLCQSMVESMKQKGKHHKVIRVAVAHKLLRQAFAVAKNQTLFNPDFI

SEQ ID NO: 112807 - protein, 387 aa, unidentified
MTVLTVNNLPAATHGETARCLFAIELSGRSWVIAFNTPLSEKISRRTLIGCKWKTLLELIEEVRARVSRQTGRAVEVITCYEAGYDGFWLHRQLEAHGIRNYVIDPASLQVDRRARRVKTDRIDTERLLRSLLAYLRGEPKVWSVVRVPSVAEEDARRLHRERDRLVSERVQHVNRIKGLCALQGIYNYNPLRPQAMARLEQLPTPQGGALPPRLKSEIKRELQRLEVVVEMIATLEAERNAIVADEASTHPNAKKIQTLHKLKAIGPEFAAVLVGEIFHRDFNNRRQLASYVGFAPSPFQSGNVAHDQGISKAGNRKGRTTGIELAWMWLRYQPDSDLSVWFRTRVGTTKGRIRRITIVALARKLLVALWRYLETGVVPQGAVLKG

SEQ ID NO: 112808 - protein, 397 aa, unidentified
MYIVGIDIAKRKHEAAVIDGEGTVIIKPFSFTNNCSGYNRLLAMLAKAKLPLDEVSFAMEATGHYWLALFTRLQKEGFRVQVINPVQTNSIRSFYIRQAKTDPRDALLIAEVIRFGHFSESTLHPENIYELRELCRGRHAIVSMQADVKRKAVALLDQVFPEYETAFTNLFSDTSMAILQTCPTPKELSEMPLEELCHLIEVSSRKRFRMVKAQELQELARNSFGFAMAGDVFSTMIRLYAKHLVFLKQQVREMDRKIAEIMDTLDTPITTITGIGPTLGAYILSEIGDISRFSSAAKLAAYAGIDPTMRQSGEYNGVRNRMSKRGSPYLRHAIWLAASSAVLHDPALKLYFQKKRDEGKPYMASVGHACRKMVSIIYAVMRDNKAYTPYIPNEISA

SEQ ID NO: 112809 - protein, 346 aa, unidentified
MNQIIRIGMDTSKHIFQLHGVDAAEQPVLRRKLRRSQVLAFFAKLPPTVVGMEACGAAHYWARELRKLGHEVKLIAPQHVKAYVKRNKNDGRDAEGLCEAMSRPTMQFVPVKTEEQQSALMLAGIRERLVARRTQLSNAIRGYAAEFGITAAKGLDKIEPLLAQIAQDESVPALARGLFAMQGRDYAQLQVELKAIEAKLRAWHRTNADSRRLAGIPGVGLIGATALVMKTPDPRAFPSGRHFAAWLGLTPKDHSTAGKTRLGKITRAGDEMLRSVLVAGATAVIQQARHGRGRASPWLLALLKCKPSKLAAVALANKIARIAWKLMVTGESYDGARMPGASAFAA

SEQ ID NO: 112810 - protein, 388 aa, unidentified
MDRPTELTASRIIGLDLSKKTLVGCSLSREDGFQKKKHFDGLMNEKGRAHLASMIGKGDAVFMEGGSSSFTLARYLMNHTEADVFVLNPMQLHIIFESMCKSDRQDAAKLAKYGRDAHLENWCLIPIPTEQESAERSVINLHIAYSQYHTKVTNKLHAVFNGQGHPDLKKSDLKDPKLRRIHAENLLRDVTALFSAVLLTDMLDFLELQIEAIHEKIHQICLNHPQQALSWLSIPGIGDITAATLIAYIGDGQRFGTASQLRNYIGLIPRKDQSGTVDKQLGITKFGCMPVRRHIMQGAWGIKKFSRDCSLTRYWEELEVRRKLGQKAAVAIANKMISIGFALLKTGGLYEMPDGAQYLKRKLKSYKLEALIEHHSAKIDSDKSSIDC

SEQ ID NO: 112811 - protein, 414 aa, unidentified
MELLHERCAALDIGKKDLKACVRTPSPKGKRSRRQEIRTFATTTNALLELRDWLVGERVSLVVMEATGDYWRGAFYLLEDDLEVILVNAAHAKGLPGRKTDVCDSSWLCQMGECGLLRASFVPPEPIRQLRDLTRYRTTLATERTREAQRLEKELEDAGIKLSSVATDILGVSGRAMLAALIDGERDAQVLAEMAKARMRPKIPRLVQALTGNFGEHHAFLCRLHLERIDQLTAAIGELSARIEEQMLPFARQLEYLATIPGVGQSVAEVIVAETGADMSRFRTAAHLASWAGVCPGHHESAGKRRSGKTRHGNRWLTGALGTAALAAARTKDTTYLGARYRRLTRRAGKKKALVAVEHSILIAVWHMLTNDVEYTDLGGDYFARLDPERAMRRIVRQANALGFTVRFDPIQAA

SEQ ID NO: 112812 - protein, 361 aa, unidentified
MEEIIDRNNALYVGIDVHRYEHTAVCADRFEEEKGSLSFANTPIGIQQFINWLSAIGESNLTKIIGVEGSNGNGRFLTESLSQDYSQIYEINPIRTKQRRNFGTRGDKSDAVDARLIIEVLTRKLDELPRITIQDRSKTMTTLEQLVIFHEDLIFQITRLKNQLHLLFHEIEPEYQSHRGSSFSVRILDVWLKKCGKKVILSDPKHIKYFMILEKIRQLRRLKRTSKRVDGEMKLLINQIKPNLLTFPGVGIVTAGKIITAVKGIDRFRLDTFIKYAGIAPVEKQSGRNKKHKQNKCGNRQLNNAIYTVALTQLRGHSKAKAYFQKKIAEGKTKKHAIRCLMKRVACIIYGLLRSRENYRG

SEQ ID NO: 112813 - protein, 331 aa, unidentified
MFPVGIDVSKNTLDLCMLYDGIKGRIKTRNIQNNRHSVENILRWLRLQHCSPEDVHVVMEATGVYHERLATELHDAGFRVSLANPHRSREFARGMGIMTKTDKVDAYMLACYAFLKKPHRWEPPAPEIRYLSALLRRRDVLLGDALREENRLEKYLSTDTPADIISSCRRMAQLLREEVSNIERQIKAHIKASPALRRDYTLLTSIKSVGPQLGMHMLVVLRSHNFVSAEQAAAFLGVVPIEKRSGTSVRRRPRMSKIGPPQLRAKLYMSALCGKIYNKRMRNIYDEMCLRGKPKMVAIGALMRKLVHWCYGVLKTGTVFNDEDLKPALST

SEQ ID NO: 112814 - protein, 346 aa, unidentified
MNYCGIDIGGVSSYVYVTDAGGRKRWSGPVATTKEALRSRLRRFLRGGLAVAIEAGNQTAWIYELLVELGAEVTVVNPAKVKLIAESRRKTDKVDAKILCELLRLDGLPRPVHMPGRQTRGLRGLLAARRQLISARGKLSNVVRGMLRQEGIRLPPRALSTKAGWERLLADSFQHPELMTIIRAYYQSFEALTRSIRELDRRLGEREREEPRAARLETMPKVGRIASLTFLAAVDEVDRFPSSRKLVGYSGLAPTVRQSGERTEYGSISRQGRRELRAVWVQIAHLVAVDRHRATQPLRTWFNRVARRRGRKTAIVALARRLLVIAYCLLRDETEYDASRLKRRAA

SEQ ID NO: 112815 - protein, 343 aa, unidentified
MGEVSTIGLDIAKSVFQVHGVDVDGAVVIRKRISRAKLLEFFATLPTCLVGIEACPTAHYWSRRLQGLGHTVRLMPPSYVKAYVKRSKNDANDAAAICEAVTRPSMRFVATKSEEQQSGLMLHRSRQLLVCQRTMLSNAIRGHMAELGIISAKGRNGTAELLKIIADEQDDRIPAAARFSLNVLARQYAAIREETVAVERRIHAWHRSSEESRRLEEIPGVGPIVATALMAEVGDWKTFSSGRSLAAWIGLVPRQHSTGGKERLGRISKQGNRHLRWLLVAGAMAVIRYARQHGTKRPWLARLMDRRPIKVAAVALANKIARMAWAMMVRGERFKEPKLLPAA

SEQ ID NO: 112816 - protein, 429 aa, unidentified
MNCTQNKKIEQVKEATMIVGIDVGSEKHYFRAFNWRGIELTRKPVLFSNSMEGFNSFYNTIVELMQENKLEEAMVGIEPTGHYWFDLGQFMGGKNIKFVMVNPHHVHKTKELDDNSPSKNDRKDPRIIAGLVKDGRYFYSYMPTGVYAELRNASNRRFVLVEEQTRTKNRLQKWIAVYFPEYKGIYTHIDAKGGLMVLKQAPTPEEITKLGEEGIIKIWKDAKLRGNGHKKAMKILNAAMRSIGLKAGLTEARMEMQDLIEDYELQTKRLERVNDLIKELCRQVRYADKLLEIKGIGITTVAGFIAEVGDITRFDSTKELQKLAGLELVADSSGKHNGRTKISKRGRKRLRYLLFEAAISVVGKNEEFKEIHRYYTTREKNPLKKMQSLIAVACKLIRVFHVILTKGVSYDASKMLEDIRHPKEQLKAA

SEQ ID NO: 112817 - protein, 347 aa, unidentified
MQRILALDLGQHKSAARLHVTDGRPDFTSTVPTTPQALHDLGVATDPDVVIIESSFLSYWVHDLFAAMGKQVIVTANNGPAWRWKNTRSKSDRGDAAKLIKMHLTGQLEPVHLPDHAGRQWRGLIQQRHALVGDRTRLRNRVTGQLRLQGLALATAKDAWNKAWRGQVVALARPLQGCPAEELWRGRLHQDLAMLAQVEELIGQAEEVLAGLSKGRAAVAFLQEEPGVGPRLAETLAAVIDDPLRFRSGKEVGCYAGLTPRHWESGETRRQGHISKQGSRLLRTLLVEVCWLGLRHNAWMRGVYEKVKRGVPGRAKIAIVAVARRLLIRLWARWRDWVRAGQPALAA

SEQ ID NO: 112818 - protein, 431 aa, unidentified
MSTRHRTAELDPPQTWVAIDLAKDAHVVLIATAAHRRLYKVPNTLADVDHLIAQLQAAPQPVRIGLEPTGVYNRPLVYRLITTGLDEVFISSLACSRFREARFTSWDENDPKDTGVLLELLRQGITMRCVDPVIAGWNDVQEVRKTNWQVTLMRTRVQQSLLTHDLPLYYWPEFARYWRTSRGTAFIQMLLAFPTPAAITTLDREQFVAAAWEAPGRKVSKRAWLEGVYELAQRSIGVPVAADSAALQAFRLQLQSYLDLTLQRAQLEAWAQALLATHPDYVALQTIPGVGPIFALTILAEAGDLRHFDHYRQFLKFCGLDLAKSQSGPHRGREVLSKRGNARLRGVFWFAGRIAVRLREFSIRDKYERYLAAGAATVDRKRMAYTAIAAKMARITYAVIKTGHPYRGYYEHELPSGSISLKRAVEAATTS

SEQ ID NO: 112819 - protein, 494 aa, unidentified
MKTSKHTKITSVYRNQNVLIRAVFQRAGDTRKVLCVALDYAKRKHVALICDGNGDILKAAFPVENNPAGIDFLIKEVSATARRRKIPKNQIFLGGEDEAAYVANFTAALREHDYLVVRVSAYEAKENRENLIASTDTLDLLGIAKTLLARRARLTGETDCSNPVYHHLRELNRCRRGLVRQKTAASNRIHALADQLCPGFLNDSKSGLSAFSEASLALMQERFSAPEIARRRPVALANLLRRHRIHNPDETATKIITLAREALPPPPHRVVTLQRTLTATTELYRCLERNALELRSEAAHALATTPYALLTSIPGIGFVLAAGIAGELGDPRNLAPLDSLCAYAGIVPSTYQSGGPDSPAVQGRTSRRCNHILKDWVVQSAQKISLHGPPELKDRIIRWNANGQHGIFAAARRYLRLVRTLAQNEVPYLGPEGRARNVDPDQLNDAAQHTWGVLQRKWRTLSGGIDLITDEAHPVGFWRRVIKETHGIDLPDRS

SEQ ID NO: 112820 - protein, 380 aa, unidentified
MNKSENITNNTITIGVDVSKQYFDIYIYESGKTMRFDNNSKGIKKFIKYITPLNPTLVAMEYTGGLERQLFFALQNNNIPCCCIKPVNIKNFAKTIDAKAKTDLISAKLIAHYAFLYKPAPQPKPDEKSLLLKDLASRHFQLTMFLASEKNRLSSALSAKTKSQLKKSIKVVEKLIEDNKKQLKELIYSDPNLKAKVELLDTMPGVGEHSAMMLAVLLPELGTISGKQIASLCGVAPFINQSGKATGKASIRGGRDKVRQILYMVALVAIVYNPTIKEYYNRLIQKGKPPKVALVACMRKIIRILNAMVRNNLPFIPDYYETYVREQNNSSKLILTKNNEVEQCNYLVLSEPNFLREPDLKTITWQDTCSLSKLLSVIIL

SEQ ID NO: 112821 - protein, 341 aa, unidentified
MTQYKRIGIDTSKAVFTLHGIDQQDRPVLRINLRRAQMISFFKKLPPTVIALEACGGSHYWARELTALGHTVRLIPPQYVKPYVKRGKNDRNDAEAICEAAGRPGMHFVPVKSVTQQAQGMVLKVRETLIGQRTALINTVRGHAAEFGLIAATGKAHVVPLLARIQTDAGLPAMARELFAIQAAEYAQLEAQIAEVDAKLTAWHRADEGSRRLAEVPGIGPIGASLLTMKTPAPELFGSGRQFAAWIGLTPKDHSTAGKVRTGGIPRAGDEALRSVVESAAKSAVLVIPCCNFWSRETKLGRDQLIERIAEFHNSHGGKSEHVVLDFRGPKNHALILLPTS

SEQ ID NO: 112822 - protein, 408 aa, unidentified
MRRKDQRQEVSFRGKEVFVGIDVHKESWQVTVRREGEEVFHGRIASEYRVLQRVLNRFAGSKMKVVYEAGPCGFGLHDQLNADGIEGLVVPPSLIPIESGNKVKTDKRDSRKLARLLESNMLKRVHVLTPEDRADRELLRTRRQMVEHRNDVARQIKSKLLFYGIRSPFPAKAGWSKGFIRWIQGLNWEWGSVKVSLESLVELYEYLTGRIVGLNRKVAELSRSDKYRGRVKLLRSVPGIGVLIGMEILVEIQDMARFYRADELASYLGLTPSEFSTGQYVRQGRITRCGNKRVRICLVESSWHLITKDPWMRRKYEGLRQRKGGKRAIIAIARTLIIRIRRILLNQEPYVVGQLRNRFTESEIRKADVPFCLNRPSTFTLYPTGVRLVGYGDSFYFSDKNHVAFDHE

SEQ ID NO: 112823 - protein, 351 aa, unidentified
MTLYIGVDYHPYQQTVAYWKTGDDEIRYRQFLHSDKAALKRFYGGCGKDPIIGVEATGSLQWFERMLFDNGIELLIGDPRLIRRKALSRHKNDYRDAETILDLLMNGQFPRVEPRSEHSQLMLQIMNYRHSLVGQRTSIANQLQAFARRKGLAKFAVRSKLAKQRLVAAIECEDEALLVGSRFALFEELSTEITKLDGKLEEEADKDERAKLLLTHPGIGRLTAMAIVHTLGDVRRFRKSGQAVAFVGLDPLERSSGEKKRIGQISKHGSRLVRFLLGQAAQTSRDPRLRSHYSQVSRRRGKPKAKVAAARKLLVNCYIMLRDDINYQEFIRRGEVGLCGNALEPQERSIA

SEQ ID NO: 112824 - protein, 354 aa, unidentified
MGMLEGRVEFVIGVDTHRDTHTAAVCDPTGAVLAHATVPTTTAGHRQLLGLAQRHASGRRLWAVEGTGSFGAGLTSLLVGHGELVVEVDRPKRPARRSGAKSDVLDATRAAREVLAREHLAQPRARGDREAMRVLLATRRCAVDARTKAINQLKALIVSAPPGLRERLRRCCTTEQVRCCARLRVHASHTIEHQVTVRAMRATARRIRLLEAEAAQHQAELDRLVAKVAPFLLGELGVGALTAAQLLVSWSHPGRIRSEAAFAMLAGVAPLEASSGRVTRHRLNRAGDRQLNRALHVIALTRLRQDPVTSRYVARRRGQGKSDKEIRRCLKRILARKLFRLMEQALTPSPAPPA

SEQ ID NO: 112825 - protein, 482 aa, unidentified
MKPKPQEKKKRATNHPTQHHWHEMNRKQRRETMRKIQSEDLTLEVLHPDAAGIDIGNESHYVAVPPSRDTQPVRRCGCTTAELKAMADWLKQCGIRTVAMQSTGVYWVAAYDIFEQAGLEVYLVNARDTKNLPGRKSDVQESQWLMKLHTYGLLRNSFRPSQEIRTMRTYWRQRNDLVQSAGRHILRMQKALTQMNVQLANVLSDISGVTGQAIIKAILAGERDPHKLAQLRDRRVKASQEQIARYLEGNWQEDLLFVLKQEQEAYEFCQQQIAECDRQLAQYLQQREDRSQGAPLPEEKRKGRLKKKRANKPQFDLREGLFRMTGTDLTRIDSIDVMTAMTVLSEAGWDMSKWKTEDHFVSWLRLCPDNRISGNKVIGKGRLPTNNPITIALKMAASTLRLSKTYLGAQFRRFRTRLGAPIAIKAMAAKLARLVYRMLRYGMKYVDQGADFYELQHRQLQVKQLKWKAAKLGFQIVQATAA

SEQ ID NO: 112826 - protein, 368 aa, unidentified
MRNSITFVGLDAHKKLIVVAMLLPGNTEPIVWQLPNEAGALRRMAKRILREAPGEVRVCYEAGPCGYALQRILKELGLDCVVIAPSLIPVKAGDRIKTDVRDARKLASLFRAGLLTEVHPPTAGEEAVRDLSRCREDAKEDLTRARHRLGKMLLRRGMIWSRNNWTQAHHAWLEKIRFEHPADRLVFQDYLLAIQHLEERLKGLDQALESVGEEERYRAPIGALRCFQGIDTVSAVAIVAELHDFGRFHSARELMGYLGLVPSEDTSSERRRLGSITKAGNSHVRRILVESAWHYRHPPRLYKRLRDRRAGQPSAVIAVADKAAQRLHRKFQKFQARGKASTKAVVAVARELAGFVWAALYPLSIKSA

SEQ ID NO: 112827 - protein, 339 aa, unidentified
MRKYTFFIGIDISKLWIDVRLGLNGDKSQMPYRRFDNKESGFKALLKFIRKSGMAPKDKTQWVVCMEHTGVYTLPLCGFLEEQQIDYALVNAHHMNLSLGLRRGKSDPADAADIARYAYWRRDELKISQLPSNKLLTIKNLLKLRKRLVKYKTGMTVAAKELKGFAPKATSMDVVGYTKVYIRDSRQMIKDIEKEVKRLIDEDTELKRLYDLVTSVKGVGFVIASTMIVYTHGFTAFDNGRQFATYIGIAPFSRTSGTSLNAPAKVSHLANKMLKGILSAGAESARKNDKELKAYFDRRIADGKLKYKVYNAIRNKFVHRIFAVVKRGKPYTELAQHKS

SEQ ID NO: 112828 - protein, 350 aa, unidentified
MELHTIGIDLGKTVFHLVGLNQRGEVVVRKKFSRKQLLHFTANLQVKLIGMEACGGSHFLGRALREQGHEVRLMPAQYVKPYVKTNKSDYIDAEAIAEAVERPKMRFVPIKSDDQLDLQSLHRVRERWVMRRTAVINQIRGLLLERGITLRQGRRHLDAALPGILEDASAKLSGAVRLLLAQLRLELDHLQMRIDEADAVINKIAGDNEACRRLVAIPGIGPVTATAIIAAIGNGAAFKKGRGFSAWLGIVPGEYTTGGKQKLLGISKRGNSYLRRLFVQGARAVLQQSAKQSSGLSAWLAQLTTRTHSNVAAVALANKLARMAWAVLAKNEPYRPPMLVGAATECLACR

SEQ ID NO: 112829 - protein, 325 aa, unidentified
MTTTTTTTTTTAIGVDPHPASYTAAALDASTGKVLDAVTVENDREGHERLLSWAGAFPGRRWAVEGAANPFVSAFAGRLLAEGEPVTDVPPSLTSQYRSKRGRKKNDEVDAINAARASLANPELPGYDPGPHQEELKLLSRTRDRLAVELKAKRMALKAQPEGSPVRCALERVAACLAEEVKALDALLAELVEEVEPEVLEVQGVGPVLGATILAEVGDVSRFPSADRFASYCGGSPVDRSSGKKTKGRVGVNPGGNRRMNRVLHLIGRVRLRLDPRSKALFSRKRAEGKTLREAWRVLKTYIARELYRTLKALKEGRDLAPIAA

SEQ ID NO: 112830 - protein, 343 aa, unidentified
MDCYVGLDASLKKTSVCVVDGTGKVLCEGVVDSQPSAIAKFLKSRALDAVRIGIETGPTSIWLTTELRTHGLPVICIDARHARAVLKMQINKSDRNDAAGIARIMQTGWFKEVRLKGFDSHAVRALLTSRATLVKMKRDLENQIRGLLKIAGLLVGTARGNAFSQRVLELAEQSPELAVSVIPLLTTREAIGKQLYDLDRKVLRLARGDRQAQSFMTAPGIGPVTALCFRATIDDPARFSRSRSVGAYVGLTTRRYSSGEVDWTGRISKCGDPMLRSYLYEAAGVLLTRVQKWSALKAWGMRLAKRIGMRKARVAVARKLAVILHRMWVDGTDFRWSAKEATA

SEQ ID NO: 112831 - protein, 373 aa, unidentified
MPKYSTAFGMDVHLRSTTVCALDADTGEAVTRRFPGNPWGEIAGWMDGFPGPSLAAYESGYLGFAPQRELAGLGVECVVAAVSKIPRSAADSASKNDRNDAARMAKAILAHDISPVWAPSPEVEGIRDLAGAYDGATARLATAKQRLLAFLAKRGFVYGGTTPAGNPRKYWTYDFLRWLDKVRPEDDGGVRTLAALRNEVEAAAEARADLLSEYRAAVDASPIAAEVAALQSIKGCAFALAAAFSAEVGDFTRFRSGRQVTAYFGLAPSQRSSGDSVRLGGISGAGNALVRKLAVEGSWCYAAARHQPKLMPRDTGVPLEIRMHGRKGSERLLRRREELLARGVPAAKANAATAAELVRWLWALGMMCREGAE

SEQ ID NO: 112832 - protein, 400 aa, unidentified
MRRVLFVGDDWAEDHHDVEVMDEAGRRLSAGRLPEGIAGMARFHAMIAAGLGPDADLDAEAGVLIGIETDRGPWVQALIAAGYRVYAVNPLQAARYRERFSVSGAKSDPADAHLLADMVRTDHHQLRGVAGDSELAEAVKVVTRAHKTLIWERTRHTLRLRSALREFFPAALVAFGDLTASDTLELLGQAPDPASAARLTTTQITAALKRARRHHRDRRAAEIQAALRTEQLGQPPAVTTAYGVAVRAQVAILGVLNEQIGLAQEQVEDHFGRHPDAEIYTSQPGLGQILGARVLAEFGDDPTRYGDTRARKNYAGTSPITRQSGKKKVVLARHVHNDRLLDALGGQAFAALTRSPGARAYYDTQRDRGLGHRAALRQLANRLVGILHGCLKTGTRYNET

SEQ ID NO: 112833 - protein, 414 aa, unidentified
MPYKLAGIDVHKKVLMVVVIDATTPEEKAERRRFATMSSELRRLSIWLREQGVEEAVMESTAQYWRSVWLELEPYMRLHLAQAFSNRARRGRKHDFKDAERLVRRLIAKALILSFVPDGEQRIWRSMTRMKLQLTRDRVRLQNQMECLLEEMRIKLSIVVSDLLGASGLRIPRALAAGETDPKQLAQLGDKRLQCTEEELVDALTGRVQPMHRAMLGLQLERLQLIDRQIAELNRLIAQAMKPHQEAVMRLAEVPGLGVDSAQQIIAEVGVQASTFPSAAELTSWVGTCPGKDESAEENHSSRSAKGNKYLRRVLNQAAHAAVKKKGSHFQVVFRRLLPRMGYQSAIWAIAHRPCRVVWKILHEGVRFIEQGCEPDPKAKNKPAQMLARALRKLGYNVAISPINLAIPENGMQI

SEQ ID NO: 112834 - protein, 425 aa, unidentified
MQTNNIIKHYTKSTLIIGIDVAKYNSVARAFNSEGKELSKAITFTTDYEGLNLFHMWINKIKSTYKLKDSIIGMEPTGHYWIRIEDYIVDKISNSMAVLVEASDVKSMRDLLGMENKKTDHIDAMAIAKTILFGKYSTINKRNSGFTDLKELIRFREEKIKEKVRLDNKIQRWLDINFPEYKLLFKKWNTKTSIAILKNFPTQREILNTNSKKIVSTIKEEVKTGNISKYVELLKEIAEKSIALDKCSEMQKIILKHYLENYLNINQMLVLIENEVNKLLKKIDYAQNLVEIKGVSSMFIGSILAETGDLKNFKVPQQLLAYAGLDLKISESGEKKGKTTISKRGNSRVRAILFKYLLPFINANEEFKALHKHYTTRSNNQLKGMQSLIAVGCKLLRVFFGMSKTNTNYEPTIILEYNQFLSIAA

SEQ ID NO: 112835 - protein, 384 aa, unidentified
MNNDSIVFIGFDTHKSFIQIAVLKDKHGDKPQQCGRINCTKAAIEKFARQCQSKYPKATLHFIYEAGPCGYWIYRLLTSLGHCCYVIAPSLIPKKAGDKVKTDKRDAAKLATLFKAEQLTTIYVPEAEDEAIRDLSRARETAMKDLKDAKFQLKGFFLRNNITCKVKDNWSNQHLRWLTELVLPHPSQQIVLQEMIQTITERLGRVRRLDNELHHQARNWRFYPVVQAIQAMRGVRMLVALGTIAELGDLRRFDHPRKLMAYLGVVPSQHTTSDKRKMGKITRCGNARARRLLIEGAHAYKHKANISTELQKRQEGLSKEIVEIAWQAQLRLCRRYQRLMHKGKHRNLVVTAIAREMIAYIWAISREVVITPVNPRSRVARIPA

SEQ ID NO: 112836 - protein, 342 aa, unidentified
MGEVVTVGLDIAKSVFQVHGVDAEGRVVLQRRLTRARLIPFFEKLPRCRVGIEACATAHHWGRRLIELGHEVKLMPPSYVKPYVKRQKNDVADAEAICEAVSRPSMRFVDVKSPEQQSVLVIHRTRATLMRHRVELSNTIRAHMAEFGLAAPIGRLGLQGLIEIVRDDADERVPASARICLKLLADQLDLVNRQALETDRLILASVRASEISRRLMAVPGVGPVLASAMVASVPDPHAFRSGRNLAAWIGLVPRQNSSGGKERLGGITKQGNRYLRQLLVVGALAVIRYAERHGTRRPWLVQLMARRTTKIAAVALANKTARMIWAIMTSGQAYREPALKAA

SEQ ID NO: 112837 - protein, 337 aa, unidentified
MNFVGIDLHKKTISLCVVGQDRTVLERRRFWCDRPQEISAFFRGLGTFQAVVEATASYEWLVSLIEPLADRVVLAHPKKLRIIAESTRKSDRLDAQCLAEFLALDMIPQSYRPSKRERAHRILVRQRCYLSRRITSVRNKIRRIMSNYNADREDLFSEKGLVYLSKTVVLKADRFAIDQLLTEWRLYTEQLRQADQALAEFAKSAPTREAEARELLGTIPYVGPVTIDVVISELGDVRRFRSQKKVCAYAGLAPGQRESAGRTRELSITKEGSGVLRWVLVQAAWRLVYRTARWRALFEKITNRRGKKKAIVAMARRLLCMMASMLQNGQRYHAGMA

SEQ ID NO: 112838 - protein, 451 aa, unidentified
MNEPLEIVDEEHEQVYERVAAIDVAKATGMVCVRVPDDSRPGRRVSRVWEVQATTRAVIELGDHLVCEGIEKVTLESTSDYWRIWFYLLEAAGLDVQLVNSRDVRNVPGRPKSDKLDCVWQGKLTERGMLRPSFVPPAEIRQLRDYTRLRTDLIQERTRHWSRLEKLLEDALIKVTAVASKIDAKSVRAMLEALIAGERSPRVLADLAPGKMKAKRAALIEALTGRFDDHHAELARMLLDQVDQLDRQVDRLTGRIEELIAAIPAARGVDADGTTGPGAGAGPDAAVRSAVARLDEVTGIGPRGAQVVLAEIGLDMSRFATAGRLVSWAKLSPRTIQSGARSRGGRTGKGNPYLKGIPGEAAAAAAKTDTFLGERYRRLVKRIGKLKALVAVARSILVIIWHLLADPTARYQDLGAGYYASRTDKDRKLNNHIRQIEALGYTVTLVPAQAA

SEQ ID NO: 112839 - protein, 391 aa, unidentified
MIFVGIDVAKDTHYAAVSDDSGAVLVKPFAFQNNAEGFCLLLKKLSEFDRSKLLIGLESTGIYSENLICFLYESGFRLAVINPIQTATLRKTAIRKTKTDKVDTMLIIKSLMVNSYRLYSQRDADSLKLRTLCRFRQNLKNSKARLKIQLAGYVNLVFPEFGKFFKSGIHIAASYALLKKYSSPKEIAALRTSTLCTLLSKASHGRFGKDTAEALKSLALSSVGVKNPYISIQIAQTIAQIELLEQQIKDLNSAIEEAMESINSVLMTVPGIGAVNAACILGEIGDIKRFSKPCKLLAYAGLDPTVRQSGQFTAKSTRMSKRGSALLRFALINSAWQLTLNDTTFKAYYDLKRSQGLNHYGALGHVAHKLTRVIFKLLTSDTPFNPAKLVA

SEQ ID NO: 112840 - protein, 314 aa, unidentified
MPEPERAVGIDCGKDFLDVGVFPGAGQHRVANTPEGHQELVAWIAERAIGVAGLEASGGYERPIRNALRAAGVSVRVFDPARVRHFAKAKGRRAKNDRLDAAVIAEFTATQTAEPLLPADPAREELAGLIKARRLLVDKRADLGKGSLHAPAAAREALTNAVEHLAREIATLDAAIAQATKALSSLSKTVQNLQTAPGIGPVTAVTLAVLLPELGRISGEKIAALVGVAPFDRDSGTLRGQRHIAGGRADVHRALYLATLSAATHAKGVIADFYQGLIGRGKPPKVALAACMRKLIVRLNAMLAKGANWEAKPA

SEQ ID NO: 112841 - protein, 349 aa, unidentified
MLADEVDYVVGVDTHRDQHVLAVVVASSGGVIAQRSVRSNARGYAEAMRFTGDHAPGTRIWAVEGAGHYGAGFARYLSSRGETVHEVSRTARGERRLQGKDDLLDAIRVARSALASTARTLPRSGERQEALRLLLLARRSAVDVRRVAIVQLRSVIVTAPESLRDELRRLPLGELLRRCSRFRRSSSRTPDELAIILVLRSLARRIEAATEEARELELEILGHVRALVPELLNEAGVGPIVAAQLIVTWSHRDRVRNEAAFARLAGVAPLPASSGQTIRHRLSRGGDRQLNRALHTVILHRRHHDPTTRDYIARRVAEGKSTRDATRILKRYLARHLYRVMQNASPTMT

SEQ ID NO: 112842 - protein, 347 aa, unidentified
MRFYTRQHLHYCGVDLHARTMYVCVLDKEGNVLVSKDIASAPEPFLELIAPYREDLAVAAECMFTWYWLADLCAREGLAFVLGHALYMRAIHGGKAKNDRIDAHKIAALLRGGMMPQAYVYPQGMRATRDLMRRRNYLMRQRAELLSHITNTNHQYNLSALGVRPARPAERSGLAEHFAEVPVRKSIEVDLSVIEHYDRELPRLERYLESNAQAHDPVALAIVRTIHGMGKVLGLSILYEIHDIGRFSRVQQFLSYCRLVKPTKESGGKILGHSGKKIGNAHLKWAFSEAAVCFLRANKPAQALRARLMAKHGKGKSLAIIAAKLARAVYFMLRRSEAFDAERFFAH

SEQ ID NO: 112843 - protein, 437 aa, unidentified
MEEAGEDPLFCERAAGIDIGKQSVMVTVRVPSETRKGGRAQESREFGTTRRQLLALAGWLRCHGVERAGMEATSDYWKPVFFLLEREGFECLLYQASQVKALPGRPKTDKLDSVWLAKVTERGSLAGSFVPPEEIRRLRTHTRYRRRLVQAQTAEKQRCEKLLEDAHLKLSSVISDIHGVSGRDMLAALVAGERNPAVLAEMARGRMRRKIARLEEALDCSFFTPEHAFILQMMLENIDHYAAQIAVLDEKIAVLCEPYEHQIAQLDGIPGFGVTSAQELIAEIGVDMTVFATAGHLCSWARVAPRARESGKRKGSTATGRGNPYIGGTLGDAAATVGRTQTFLGAKLRRLCKRMPKKKAHGAIMRSQLVIAHALLSDPAAEYRDLGPGYYEQRADIRRQAHNHVRGLERLGYKVTIEKTAPETGSDTGELITRTAS

SEQ ID NO: 112844 - protein, 340 aa, unidentified
MEQAIMIGLDIAKNVFEVHGCDGAGEAVLRRTLKRSQVEKFFAKQPPAVIGMEACGSAHHWARLLGKLGHQVKLMPPSYVKPYAKRNKTDAIDAAACCEAVGRPNMRFVAVKTEEQQGALSLHRSRDLLVSQRTQLGNALRALLAEFGIVAGKSRAGLTHLVDKLRAGTLELPADAVVAATALADQRAALDAAAEALERRITAQAKATKKARMLQTAPGVGPLTAHATLATVPDPAVFTSGRHFTAWIGLAPRLNGTGGKTRTGPITKQGNQSLRRLLVLGATAWLRHVRANPEKASPWLRGMMARRPMKVVAVAQAARTARILWAMLTHNQPYRAPAIG

SEQ ID NO: 112845 - protein, 322 aa, unidentified
MSGSILGVDIAKKKFDVALLINGKLKHKVFTNDEEGFEELELWLKKQGANHVHVCLEASSTYGDELAAYMHDAGHSVSIVNPARIKGFAQSELMRTKNDKVDAGLIARFCLAMHPEPWTPAPPEMRQLQSLVRRVDALINMRTQELHRLGTAHKAIEHSIREHVAYLDTQIDVLKRQIADLIKNDPDLKAKKDLLKSIPGIGEATIAAILAELHMFERYDSVGKVVAFIGLAPRQFISGSSIKGKPRLSKVGHARLRKALYMPALVSIQCNPIIQVFYHRLKENGKNGKVVVCAIMRKLVHLIFGILKSGRPFDPNYTTNKA

SEQ ID NO: 112846 - protein, 374 aa, unidentified
MDQHSRAFVGIDTSKLRNAVAVAEDGRDGDVRYLGEIDTAEAATRKLVVKLAAKYRQLTFCYEAGPTGYGLYRLIRKLGHECIVAAPSLIPKKPGDRVKTNRRDAVGLAKLSRAGELTAVWVPDERHEAMRDLSRAREAARKDLKGKRQQVSSFMLRLGRHYPGKKTWGPAHMNWLMRQKLEHREQRIVLEELLGAVRQESERVERLEQAIRDAVPEWSLAEVVTALQAMRGIDLVAAVTVLAEIGDLSRFQTPRELMGYLGLVPSESSTGDTVNRGGITKAGNGRARRILVEAAWSYRYPPRVSCEKQIKVAAAPRAVREIAWKAQTRLCARFRSLTRKGKRPNVVVTAIARELSAFIWAINREVVGSHATAN

SEQ ID NO: 112847 - protein, 359 aa, unidentified
MPTQKNELNFNGTNIYSGIDVHLKSWTVTIMVEGISHKSFNQPASSDVLYNYLVNHYPGGVYHSAYEAGFSGFSTHYKLKELGINSIVVNAADIPTTGKEKLQKEDRRDSRKIARSLQGNELTAIYVPTKNCLSDRSLMRMRSTLVRDLARYKQRVKSFLYTSGIEYPAIFASRTNHWSKRFIEWLQQITFTEPSLRISLDALLSQVIHFRLDLLKINKQIRVLSKTQQYASSVELLRSIPGIGLIISMTILTELETINRFSRVDYLCSYIGLIPTTHGTGEKVSTGRITPRGHKVLRKLIIESSWVAIRTDPAMSKCYLDYCKRMTSNKAIIRIAKKLMSRIKYVLTNNKPYQKCKVI

SEQ ID NO: 112848 - protein, 386 aa, unidentified
MQKLNDFSRSLVALEPDSTLVAVIEMSLSSWLIAGIVPGVERQPLKKLAADESALLKLLHCWREEAEKAGRRIERIAVAFEAGRDGFWLARWLKARSIEAHVIHAASVAVSREHRRAKTDRLDTELLKRAFLGWLRGERDHCKMVAIPSIKDEDAKRPNRERENLVSEQSRIINRMKAALIRLGIRGFNPKLKRAAGRLTDLRTPEDEPIPPNILAELRRDMERRRLVRDQIRQIEEARLQRLDHAPGDEPHAMVRLLARVIGVGIETADMLVHEVLSRNMRDRRAVARYAGLTGSPDESGRKRRQKGLARSGNGRVRRGMIQLAWRFLLHQKDSALAQWFRARTENARGTRKPMIVALARKLLIALWRLVRQGVVPDGVVLHPAQ

SEQ ID NO: 112849 - protein, 475 aa, unidentified
MTKHKLIQRTFTTKSNTLKCVNPKVAGLDIGARSIFACVGLNNETQEIREFSTFTVDLKSMVAWLKQRGIRSVAMESTGVYWIPIYDILAIAGFEVLLVNAHHLKAVPGRKTDVKDCQWIQQLHAYGLLRGSFRPDDECVTFRTYVRQRARLFESAATQVQLMHKAMTQMNLQLNLVISDITGATGMKIIREIVAGQRDPMLLAELKDYRCKKDKIEIAKALEGNFRPELVFTLAQSLKGYDFFHAQIVCCEEEIEKILRCWSQAENASQAPLTEQYEQTVVDKGERKRAKGGQGLQKKSAYNRSPYHFNAVDMLQKILGIDLTEIPGFDINTIIKVIGEIGTDMSRWPTVKHFTSWLGLCPGNKISGGKVLSSRTKPSDNKAAQALRLAANVLYRSKTALGAYFRRMRARLGAPKAITAAAHKLARILYNMIKNRQSFIEAGQDEYERLYKKRVVENLIRKATEMGYELVPRNT

SEQ ID NO: 112850 - protein, 319 aa, unidentified
MAQNDLVVAGIDVAKDKVDVCIRSLSLRRTFASTAEGRRELATWLRRKKVGKTVMEASGGYEREWAKALRNASIEVRIVDPKRVRSFAQSAGRLAKNDTIDAEMIAWFAETFGEARGQAYDATREQLHQMVNARQAMKDMQSKLASQGEHAVPAAVQRIHARISKTIAVELVKIEAEITALIQATPNFAELAEIIESVPGLGRTTSAALIAAMPELGQANNKIVASLLGVAPYDDDSGRRRGERHIKGGRRRTRNIFYMACLGAATQHNPVLKAFYDRLVAKGKLKKVALTACMRKLISILNIMIERRQKWDAKRYAVS

SEQ ID NO: 112851 - protein, 342 aa, unidentified
MDHFAGLDVSVKETSICIVDDTGGIVKEVKVASEPQALLKALGNPTYRFKRIGLEAGPLSQWLFSALAEAELPVVCVETRHMQAVLKAQINKTDRNDARGIAQMMRVGLYRPVHVKTLRSQKLRMLLTHRKLLQSKAIAIENDLRGTLRNFGLKVGMVGTVKFEARIQELVENLPDLAVLVEPLLIVRRALREQIVILHRRLLAIVRDDEVCRRLMTTPGVGPVVALTYRATVDVPARFRKSKSVGAVFGLTCSRYQSGEIDWSGRISRCGDEMMRVMLYEAAQSMLRSKKWSWLKAWAMQIARRRGMKKAIVALARRLAVIMHRIWVDGTEFRWTREAAVS

SEQ ID NO: 112852 - protein, 438 aa, unidentified
MSTLADVGLDVSQDDASVCFLLADGAEPVPRWTVPNTQPGADTLSITLAQLAQMHQIDQLRIGMEATGLLWWHLACHLKDTPVLAPFAPRIYALNPHLIKTFRANYGALPKTDRADAFLIAERIRFGRQLPSPFQLAARYAPLQRLTRFRCHLAQNLAREKSYFLSFLFLTFSTYGQIAPFGDPFGATSSAVLDEFTTEELAQQALEELAAYLQSKGRGHFASPATLAATLQRAARDSYRLDKVLQEPLRLVLGTTLATIRSLQTQLKTLDKTIAQELAAIPQTLASVPGLGPVWTAGLIAELGDITRFDDEAAIAQYAGLTWETRESGRFQAEDTDLTKHGNCYLRYYLVEAANSLRQHCPEYGRYYAAKYAETPKHPHQRALVLTARKLVRLIDVLLREGKRYMTPEERQLREDARPPHHARPARQRRSSLAPAVD

SEQ ID NO: 112853 - protein, 377 aa, unidentified
MKKVRFLGLDVHADTIAVAVAEPDGEVRSLGIIPNREESVRKLVKKLGPPEQLQACYEAGPTGYVLYWQLTGLGVKCEVVAPTLVPVKPGDRVKTDRRDARKLAQSYRSGDLTAVWVPDEAHEALRDLVRAREAAKQDQLRARHRLSKFLLRHGRRAPAGAKLWTLKYMAWIRQRVQFEQPAQEYARLDYLHEVEHANDRVQRLEEAIREAVKLAPRPMQEVVQALQALRGIAQISAVTMVSELGQISRFGRARQLMGYSGAVASEDSSGKRVQRGAITKTGNAHLRRVLMEAAWCYRHRPAIGATLRKRQEGLGEEIKEIAWKAQHRLHNRYRTLLAAGKDKRKVVTAVGRELLGFIWAIGVQVESNSNHRTQVAA

SEQ ID NO: 112854 - protein, 365 aa, unidentified
MERYVGLDVHSKQSVYVCQDRDGAVVGRGRFATTTDGLATMARELMLTKGTKVALETGCQANWVAGELGTLGLEALVIEAGEVRAKARRVGQKTDERDAFELCDGLRRGIYSSRVFVPEAGLQRLRRAVSRRRHFVRVTTQQINAAKFVLRSRGIATTRLVLTCAQGWQRLLERENLKPMHEHLRLHFGVWSLAAAHVEGLEKEIVEALGPYRDIAECLRTCPGVGLVTAATFIAVIAAPRRFATSAQVVSYLGLAPSVYASGEREHRGGLTKRGSSELRWVLVEDAHQARRPTHPLHPYYARIAAAEDRKRAAVAVAQRLARILWRMWRDETAFDLNKLNIIHAPRVARKKLHYQLKETTMKTT

SEQ ID NO: 112855 - protein, 433 aa, unidentified
MLLPVGGREAGLLEETHDTEELIQRVAALDIGKAQLVCCIRVPGSGRQGTRLQEVRTYATMTRSLLVLADRLGELGVTRVVMEATSDYWRAPFYLLEAHGLEVWLVNAKDVKHLPGRPKTDRLDAVWLAKVAERQMLRPSFVPPPAIRRLRDLTRYRADLVAVRTAEKQRVEKLLEDAQIKLAVVASDIFGVSGRAMLAALVAGERDPKALAQLARTRLRAKRSLLVEAFTGHFSDHHGFLLARMLGRIDQASADIAELDRKLEEEVAPFQAAVDRLYEITGVGRVAAQVIIAEVGTDMSRFPTAGHLASWARFAPGVKQSAGKTKGKATTGHGNRYLAQVLGEAAVVAGRTDTFLGERYRRIARRRGTKRAIVAVGRSILVIVWHLLSDPNLRYHDLGAGFYDTRVNAERAKRNHVRQLEALGYTVTLQPAA

SEQ ID NO: 112856 - protein, 348 aa, unidentified
MLRLNPNSRLGRCAAEPAFTRKGSTVQTNSTVGGWAGIDVSKEWVDVAVVQQERRIDVGRFTRDPKGLRQMAKQLLKYAPEAVALEATGGYEVAVMAALAEAGIAVVRLNPRRVRDFARAQGLLAKTDKIDAYVLALFGVRMRPAIRALPEPERAQLANWETRRQQVVEMRATERTRLQQVTHPELRKSAERIIAFLGKELARLDAQIDECLQASQPLAEQAALLDTAPGVGPRTACILTAHVPELGVANRRQIAALAGLAPIAQDSGKYQGKRRIQGGRAPVRSALYIAAWSATRVAGRLRDYYHHLIEQKKPRQLALIAVARKLLIGLNEMMRKRQPWTENAVTSA

SEQ ID NO: 112857 - protein, 392 aa, unidentified
MIYLGIDVSKDKHDCCILSQDGELLSKPFSVPNSRQGFEKLFSLVSSFENNPENVKAGLEATGHYSFAILGYLLEKGLTCFVFNPLHTNLYRKAVSLRKTKTDKVDSKTIALLLLSSVGLKPYSKALYHNEQLKSLSRYRFSKVRERAVLKQQLARLVNILFPELEKLVPSLHLSSVYALLEQFPGASYVAKAHLTKLTNLLSSSSSGHYKKEKAIQIRNAAASSVGCFMPAKSLELKHTVALIRVLSEEIEEIETEIKKLMDELHSPITSIPGISYRMAAMILSEIGDFSNFDSPDKILAFAGLSPSTYQSGKLDNAHSHMEKRGSKYLRYALFTAVTYVCIWDKTFSDYLHKKLAEGKHYYVALSHAIKKLVRVIYALQTTGQTYISAVA

SEQ ID NO: 112858 - protein, 342 aa, unidentified
MKHYAGIDVSLEQSSVCVVNANGRIVREAKVASDPRSLIDWFGSLGFGLERIGLEAGPQSQWLFAGMKEAGLAVELLETRHVRQAFKTMPVKTDRKDARGIAQLIRLGWFRPVHCKSVGAQETRAMLTTRTLAQSKLYDIEMSLRGILRGFGLKVGQTTSNRFAGRIKDLVVAHPSLQIIAEALLAVHDVLLREVKGLEKRVRIMARDNAQARLLMTTTGVGAIVSLTYVSAIDDPGRFKSSKMVGAHFGMTPKKYQSGETDITGRISKIGDKGVRTALFQAAHIILTRPVKSSALMIWARRLAKRIGMKKAKVALARKLAVIMHRMLADQKTFNFAAGAAT

SEQ ID NO: 112859 - protein, 385 aa, unidentified
MPQLNDLSRSLVTLEQDATLIAVIEMSLSSWLVAGIVPGVERQPLKKLAVDESVLLKLLHRWREEAKKAGYMIKRIAVAFEAGRDGFWLARCLRARDIEVHVIHASSVAVSREHRRAKTDRLDTELLKRAFLGWLRGERDHCKMVAIPTIKDEDGKRPNRERESLVGEQSRVINRIKATLVRLGIRGFNPKLKKAAERLEGLRTPEGEPIPPNTLSELHRDMERRRLVRDQIRQIESARLDHLEHEPGEGAHAMVRLLARVMGIGIETADMLVQEVLSRNLRDRRAVARYAGLTGSPDESGKKRREKGLARSGNPRVRRGMIQLAWRFLMFQKDSALAQWFRARTENARGTRKTMIVALARKLLIALWRLVTTGEVPAGVVLRTA

SEQ ID NO: 112860 - protein, 457 aa, unidentified
MRTIGIDLAITATHKAIVTGPDGKFVTPLLKFRTRRDEIAGVVTRAREGVPSDYPLWAVMEPTGMAWLPMSVALSQLGVTPYLVNPRRIHDLRKYYKRHSGSDRISARVLAKVPIVDEESLYPLEIPSAIQLACQRGCKEMDRLQTQITAIKNRLRDIDRFAWPGLEEVFKNIFSPCARFFHRTWYDPFRVLEAGTDVIQRSCDASLDQGGDLEWVEALSRLASEVTQLYGPHAIDYTFLQSEVCRELDLLACLEERKLTVWYDTVRPLYRQLHPSRDLESLYGVGEHIAAVFSSFVGRAARFPDGRHFRGWHGLVPDSRQSGDVESKGLHISQAGPDLVKKFAFLGGDVARKYDPQIAAIYHDQMVNKGKHHNQAVCACATHLLDRVYVVLNEARPYELRDGDGTPITPQQARNIIAERYTIPEEVRKRNNRRVRKERTERRMERKHKQRESRRRR

SEQ ID NO: 112861 - protein, 353 aa, unidentified
MMVVGVDPHKETHTAVVVDELGRKQAQLTVRARRDGHRELIGWARDVAPAGRLWAVEDVRHVAGGLIRELLAAGEMVVFVPPKLMAGVRRGGRERGKSDPIDALAIARAALREDAHLPAARLDKQVLEVRRLVDHRDDLVAERTRVINRLRWMVHDLAPELAPAPRALASARGRAKLEAGLRALPDSAGRRIALSQLARIIALTAEAGQAERELASLVRHLVPALLQVAGVGVITAAKILGEIGDIRRFRSLAAFARHNGTAPIPASSGTGKDGPHRLNRAGNRQLNAALHRIAIVQARCHDGARILLQRRGETAHETRKASLRVLKRHLSDVVYRALAADAWRLDDPAQQAA

SEQ ID NO: 112862 - protein, 401 aa, unidentified
MKRLSGGIDVGSESHHIIILDEEDNFLYNQKVAHKLNEFTENIKQFKKIEKKEGGKISFALEGKNGYSAPFDRILLNQGFTLYNVDNLKLKSFREAFAGEWRDDERDSLMLSKMLKLKDYINSKREKVFIKIEKPSLVTESLKLLSRHQQTLIDEKVRLVNRLGKKLLEVCPQILELGKLKNKKIIAILAKYPDFSKYKRITLKSLLKIKGIGKIQAPFLLKRLNNIEYMSGLTDIYKTIISSYAKRIMQLQREIKDIDKSLDEIGGKNKEVNHLKTIPGVATKLASRFIGEIGDINRFPSEKQLAVYCGIACVDNNSGKITKARVVYKANKICKQTLITMAGCSIRFSFQCKDYYLKKRTEGKSHNHTLRCLARQLIKVIYRMLTEDREYIVRKELKKVA

SEQ ID NO: 112863 - protein, 437 aa, unidentified
MGNYAGVDWASAKHDVVVQNEAGEELLAASFAHDEKGLRALCRTLMRLKVMLVAIERPDGLLVERLLDAGLRLLPLHPNQVAAARPRFRAAGGKSDRFDAFVLCELARTDNHRFRVLEPDSDQTKALRAMTRARGELVQSRVALANQLRAELERFWPGPIGLFSDLDNLISLAFLKRYPSPADARGLGVQRLQAFLVRERYSGHKLPAELLAKLRRAPEGRAGALECQARRSAVLSLIAALEPIVASIHQLERQIAAAVREHPDGEIFLSLFRSPRSVITAATMLAEMGDCRARYPTRDALAGDAGQGAVALESGKRKVACFRWACNKRLRGAFDTLADSTRHWHPWATDHYARAIARGHDHPRATRTLGRAWSRVVWSCWQHRTPYDPARHHALQQHVLVTIPASSGPRPDTAATQRMLGDAVTRQGGPGARAQRA

SEQ ID NO: 112864 - protein, 362 aa, unidentified
MGLDVHKDSITVAYAPEDRGAEVVSLGPIGTRQCDIDKLTRTLASKGVPLVFVYEAGPCGYWLHRYLIRKGFSCHVVAPSLIPRKPGDRVKTDRRDAITLARLMRSGDLTSIYVPGIEDEALRDLSRGREDALRDLKASKHRLKAFLLRHDIRYAGRATWNAAHLRWLAEVVCPTPAQQIVFQEYVRAITEQSERLQRLERELHEAVKGWRLYPMVEAIQALRGVELTSAIIVMAELGDLTRFDTPRQLMSYLGLTPSEYSSGARRRQGGITKAGNPHARRALVEGAWAYRYPAKVSRHLQLRLEKLPAAVQAIGWKAQVRLCKRYRQLSARGKHVNQIVVAIAREMAAFAWAIARTVPLAS

SEQ ID NO: 112865 - protein, 495 aa, unidentified
MNNCAAGENFAGERPAPARSQSQSPHPKRVIGRLLAEPEALAPTSNRKTPPEGRYISKMDGRAKRRKNHKEQKQTMNDSQQWQQHRAFGALDWASEKHSVVLVNQTGKVIEDFEIEHSALGWKKFREKLQPYGSIPFAIETSQGVAVEQLLEAGMLVYPLNPKSAQAYRERKAPSGVKDDRLDAWSFADALRMDGQNWKALRPEEPLIKELRLLCRDEVTLIEQRTAFVNQLRHALAEYYPAALEAFEDWTSLSAWMFLQRFATPESLAQAGKRQWQKFLHSRRLWGSDQGPRRMEIFAHATEFTGTPPTVKAKSLLAQSLVQMLFAIEKQLAVYRQRIEELFARHPDHDLFGSLPGAGPKIAPRLLSEIGDDRQRFGGDPQNLQCLAGSAPVTKRSGKQRKYWPVHQRWACDKHLRHALHLFSEQSLSRCAWAEIYYQHHRQKNQSHANALRRLSHRWLKIIYKMWIDRTPYNAELHHRNQLQHGSWIFQLQKS

SEQ ID NO: 112866 - protein, 417 aa, unidentified
MSTDVRFFGGIDWASETHQVCLVAADGKIIGERAFAHGGAGLAEMCDWLVTTSGEEPPTVAVAIEVPHGPVVEILLERHFQVDAVNPKQLDRFRDRFTVAGAKDDRRDAYVLADALRTDRHCFRRLTVEDPVVIELREWSRMAEDLQQERNRLANRVREQLWRYYPQALELGDDLAADWFLDLWALAPTPAKAARLRESRVTSLLKAHRIRRIEAAEVLHILRQKPLVVASGTVEAATAHITAVAARLKLVNQQIKQAHRRLDELSDKLAEGREEDAPGQKSKQRDVTILRSLPGVGRIVLATLLGEAAEPLRKRDYQALRTLSGVAPVTRRSGKRCVVLMRQACDLRLRTAVYHWARVAIQHDVRSHARYAELRKRGHSHGRALRSVADRLLAVACAMLKSQTTFDPEHAVEAVAA

SEQ ID NO: 112867 - protein, 329 aa, unidentified
MKKEVLGIDISKLTIDVYLHVNQSHELFNNNPAGFRKLISWLKKKKIILKDLLICFEHTGMYSFELANFLTIKNIDYVMESAIQIKRSMGIVRGKNDKIDAQRIADYAYRRRDKLEFSVLPSKMIFKIQKLLSLRETMVKQRAGYKVTVQENSRILVKSEHKYFFEAQNKLVKSLTTQICKVEEEIKLIITSDFKLENTYNLITSISGVGFIVAAYFISTTSCFTKFKNGRKYACYCGTAPFEYSSGTSIHFKTRVNPMANKKMKSLLNMSARSAITCDPELKEYYHRKVEQGKNKMSTLNIIRNKIIHRVFAVVNRGTPYVVLQNHLS

SEQ ID NO: 112868 - protein, 343 aa, unidentified
MQTITTIGLDIAKSVFQVHGVDADGKVVLRRQLKRRYVLAFFQKLPPCLVGIEACASSHHWSRELQALGHTVRLMPPAYVKPYVKRQKNDAADAEAICEAVTRPNMRFVPTKTPEQQSCLTLHRTRHLFIRQQTAVINSIRAHLAEFGIVAPVGRNGVERLLEVVADVNDTRLPEIARACVAALGTQLLALKAQILAFDRRIMAWHRSNETSKRLDAIPGVGPALATALVASIADPKAFRSGRDFSAWIGLVPKQNSSGGKDKLGSISKQGDRYLRSLFTAGALAVIRYAKLHGTKHRPWLTALLARRPTKVAAIALANKIARMVWAMMVRGERYKEPVALAA

SEQ ID NO: 112869 - protein, 413 aa, unidentified
MENILLRCVGLDVHKASVEACVRRMEPSGRLHQQTRHWGTMTRDILMMADWMAAQGVTHVALESTGVYWKPIYNILEGRFTVLLVNARHLKQVPGRKSDIRDCQWIAQLLQHGLLKGSFIPPRPQRELRDLTRHRTPLVEEKTRTNNRIEKVLEDANIKLGSVASEVMGVSGRAMIQALLEGEKDPAQMADLARRSLRGKIPELQKALEGHLTEHHRFLLRLLWKELTQQEALIAELEAKIEELTRCFAPEIERLDAVPGVDRRVAEVVLAELGGDMSPFPTHRHLSAWAGMCPGNEESAGKRRKRRITPGNRWLKRTLVQAAWAAAASHTKSSYLASQYRRLVGRRGKKRALIAVGHSILVILYYLLKDGRQYADLGSDFFDRLEPQRLTRYYVNRLQHLGHKVTLEPWVTV

SEQ ID NO: 112870 - protein, 419 aa, unidentified
MKSIETKKVKAVNNKTLIVTVDISKRTNVGYCRCPDGTDTKPFKFNNNGQGFNYFWNRITQMKNTYSMEEVVFGFESTGPYGEPIIYFMKKRDVKLIQVNPMHTKRVKELQGNSPNKTDEKDPKVIADIIELGHALTVAIPEGPAAELRRLTQARERAMQRRTSLFNQLQDLEFIIFPEFSQVFKNVKTKSAMFILEHFPAPQDIAKFKPECLTIVLKKVSRGKVGEERVKKLCEAAKTTVGIREGQKSILFEIKETLATIETTERFIAEIEKEIGTHLKNIPYSKFLLSIKGIGEITIGGLVGEVGDFRNFNTIAEILKYAGFDLFEISSGIHKGQRHISKRGRSLMRKILFFVSLNVVRKGGIMHEQYQKHLEGGMLKKKALIAISRKMLGIMFALVRDHSNYIENYVEKEKLKKAA

SEQ ID NO: 112871 - protein, 409 aa, unidentified
MGAEVPAPQRWVGVDSPKHYLLALGVNADLEITLPQQRVELSRLQSWVARHLTKQDAVVIEMTTNTWQLYDELLPHVHSVTVVHPPHVALITRAQVMTDKIAAFTLAKLHAKGLLTGIWVPPEPVRDLRATLAERGKMTRLATQAKNRLHAVLQRHHLAPPPGTPFLPERREWWLALPVSALERQRIHCDLATLDFAARQVAGLNQVLTDLAATEERLTLLLQLPGISQVTGLTILASIGEISRFADAKHLAGYAGLGARIHDSGLTTHRGRITKAGRRDLRAAVVEAAQAAANTHPHWQAELARLEPRLGRNKAIVAIARKLQVAVWHVLAEQVADRQARLELVARKLLQHAYRLGRSRRPQRQGTGAYVRQQLDRLHIGQTLTEIPWGHRCDASCRNARPGLYGTAA

SEQ ID NO: 112872 - protein, 333 aa, unidentified
MKTGRIAPADRAHLADWLARFHGTQDVTFAFEACTGWRYVAEEMAAAGVGVVLAEPADTAAARGRRRHPKTDRADARLLRELVAEQRVPTCWVPPTRVLEDRALLELYHDLRREHTAWVQRVHAVLFHQGAETLDGVLRTAEGQARLAEIAATRLSPAGRVQITTAERMLEVYEEQLAATRRRIVAQARYLRGARLLHDELYGVGPVTALALTCWLGGADRFTSSRQAVRFTGLDITVYSCDGKRSPGHLSRQGPAWVTTRSRQSSPAHSAARNPWPPDSPRIWPAPDRRGPAGGRGPGAPRSSDGTFEPRPAPPQGMSGRFHPAARGDQRTA

SEQ ID NO: 112873 - protein, 244 aa, unidentified
MPKKTQEYVNDAAGIKAFIKEFKKLLSDGLCILEATGGHEMRLLLTLCEHNFKVHRADARKVNHFIRSFGNDSKTDKLDAKALALYGYERAGRLALFTPQSKQSLTLYELVQRRKDLKKMLVSEKNRFQAPRANVIKESCRIIIESITSQIIAVTDEINLLIKKDMTLNLKKEVLKTIPGIGEIIANELLILLPELGTLNRREIASLSGLAPRANNSGQFSGARSIRYGERGNKTCFIYGSYGR

SEQ ID NO: 112874 - protein, 343 aa, unidentified
MEYFAGIDVSLEQSSVCVVDGAGKIVREAKVASEPEALVGFFRGLETGVTRIGLEAGPLSQWLYAGLVAAGFEVVLLETRHVKAALSAMVIKTDRKDARGIAQLLRMGWFRPVHAKSPAAQEVRALLVARKLLQTKLLDVEFSIRGILRGFGLKMGEVSKGRFATRVRELVAGHAMLERITEPMLRAREALRTEYAKLHGEMLAIVKPDPVCRRLMTVPGVGALVAITFKSAVDHPGRFARSRVLGAHFGLTPRKYQSGETDVTGAISRVGDAMVRMALYEAAHIMLSRVTRFSSLKRWALDVARRRGLKRAKVALARKLATVLHRMWVDGTNFRWGKQAASV

SEQ ID NO: 112875 - protein, 352 aa, unidentified
MQNEVKVLGIDVAKNVFQIHGVDASGKEVFRQKLSRAKLKPFMATQSKCLVGMEACGGAHHWAREFQTLGHEVKLMAPQYVKPYVKRNKNDEADAAAIAEAVTRPGMNFVAVKEVWQQDILMVHRVRERLVKQRTALMNEIRGLMQEYGVVMATGPHRLRQGMVNLLASTNGCLTEMARGILEQLVTEWREMDERLATYTKRLEQMARSHELCRELDKLPGIGPITATAMVATIGNPRVFRNGRQLAAYLGLVPRHEGTGGKVRLLGISKRGDRYLRKLLIHGGRALLRHVERRSDRQSRWALAVINRRGFNKACVAMANKNARMCWAIMMKCLNGETPTTEAPPRHKTYAA

SEQ ID NO: 112876 - protein, 425 aa, unidentified
MKKVANSVKKVKGQMKETVLDKASWVIGIDIGKEKLSCALMDINKTLVCRFDVEGSLAGYKELLDRVKRETKGNGKAVFALEPTGHYWMVLGQFFEDHNQSYVLIHPLVVARSREVHRLSKGKTDSLDARLIGELACDGSITRTQILEDYWATIRFHAREYMDREKDIAREKNRITSYLETTLPEFVEIFPKPMVMTGRACIRALAHFREALKGDWEHFEKHVRTHFPGKRLLTSRVRRLHGMLQRGDALGLRAGRQAMLYRIINSLDRLEMYERQQEAAKQALLDSYEKSEYKKYLDSIRGTTSTVNALVLGFMGDPASYDSPASLIKLAGCDPVPNESGKFKGKTSISHRGRNLLRKAGDRISFLLEKRNNVFRAFFNHLMTRQKNRLTKRQARIACMNKYFRIVWVLCNHHVPFNPALAQTV

SEQ ID NO: 112877 - protein, 443 aa, unidentified
MSELAVLDPRAAFVDVGSEKMHVSIAGGPPALFGTVTSQLHALRDYLAEHQVRSVAMEATGVYWLPLYGVLEAAGKEVVMVDGRQTRNLPGRKTDMKDCQWGATLHAHGLLRAGFVPPASIRRLQDYLRLRGDHIAAAAGHVQHMQKALERMNIKLHEVISSLTGASGLTVIRAILAGERDPQVLLGLCDIRIRNVKAERVVESLRGDWAEEHLFALAQAVQSWDHYQGLIAACDRQIAVVLRQMPDAKVPPPAASTKAGKPRTRPGVNAPDIADLREILAQICGAKDLTTLPAHSEYSVLQLIGEVGTDLTKWRTEKHFTSWLGLAPGSAQSGKRKASVKRRRNRAGQIFCVMARALARSKYVALGGFYRRMAARRGGLVANKALARKLATLFWRVMVKGLDFIETGVAQYEARVLETKHRILHRLARQLGQQIVPNPAAVV

SEQ ID NO: 112878 - protein, 375 aa, unidentified
MKKGTRFVGLDVHKETIAVAVAEVDGEVRSLGTIPNEEDAVRRMVRKLGGPEGLAVCYEAGPCGYVLYWQMAKMGVRCAVVAPTLIPMKAGDRVKTDRRDAEKLARSLRAGDLTPVWVPDAEHEALRDLVRAREAAKADQRRARQRLLKFLLRRGCVQPAKMRSWTDKHRAWVMQLKFEQRALEETLTDYATEVDHQRERVARLERGIDEAIEKVPASMRAVIDALQALRGVSKLTATTLVAEVGAISRFDRASQLMGYSGAVPSEHSSGGKTRRGGITKTGNSHLRRVLVEAAWTYRHRPRIYGALKARQEHIEEPVKAIAWKAQDRLHRRYRRLSERGMPHQKVVVAVGRELLGFIWAIGVHVERQQHEAAAC

SEQ ID NO: 112879 - protein, 326 aa, unidentified
MIQLGVDVGKSKIDVCLLPEGPGGRKKTKVLSNGPDVARQLLDWLAVREVILSELQVILEPTGTYHEHLAYGLHEKGLRVVVASPVRVRSFATGMGILTKNDHVDAHVLALYGALRQPEAWVPPPPAIRELKALLKRRDALREDLQREQNRLEKLHVTRFSTRVEASVTKMIAALDAELLSVQQQIDDHIDNHPDLKQDMKYLTSVKGIGKQVGSNMLAVLRGNAFSSPEQAAAWLGLVPREKRSGSSVNGRSRLTKTGPADLRAKLYLSAMTAIKHNPMLRIFYERLLKAGKAKMSALCAVMRKLVHICYAVLMKQQEFDPNYSA

SEQ ID NO: 112880 - protein, 420 aa, unidentified
MSVQEAAVSLLQRVLFYVGIDWAAETHAVCVLDATGRIRAQFTIGHTAAGFADLLRRLARLSGDPAEVAVGIERPDGRLVDVLLEAGYPVVPVSPNAIKTWRDGEVLSGAKSDAGDAAVIAEYLRLRAHRLQPATPYTAETKALRTVVRTREDVVDMRVAAANQLSALLDAHWPGAKAIFADVESAIALAFLTRYPTYPSAQHLGEKRLRAFCVKHGYSGRRSAAELLTRLRAAPAGSTDEALTDAVRDAVLAQVAVLTALTAAEKNLSRSVIAHLGEHPDAAIFTSLPRSGQINAAQVLAEWGDSRAAYDSPDAVAALAGVTPVTKASGKYRAVHFRWACNKHLRKAITCFADNSRHASPWAADVYARAIARGHDHPHAVRVLARAWIRVIYRCWIDGVPYDPNKHGNAGKLRETATAA

SEQ ID NO: 112881 - protein, 389 aa, unidentified
MPCYTKQHKSYCGIDLHARSMYVCVLNQDGDIVMHRNMQARPDTFLRTVAPYRDDLVVAVECVFTWYGLADLCAQEGMPFVLGHALSMKAIHGGKAKNDTIDAHKIAVLLRGGMLPQAYVYPAEMRATRDLLRRRMSLSRTRAELLAHIQNTNSQYNVPEIGTKLACKANRAGVAERFPDPAVQKSLEVDLALIGSDDHLRSDVELHSVTAAKQHDAQTLYLLQTVPGIGKILRLVLLYELHDIQRFPRVQDFVSSCRLVKWAKASAGKRDGTSGSKIGNAYLQWAFSEAAVLLLRDHPAGQTYLARLEKKHGTGTALTVLAQKLGRAVSSMLRRDTGCDRDNFLHGEGSGAGEPAASLGHYGTSRVTVLCNDASTASPTAHAPIGALS

SEQ ID NO: 112882 - protein, 338 aa, unidentified
MAILFVGIDLAKNVFALHGVGATGQAELVRPSVRRGDLLAHVAALPPCTIGMEACSGAHHWARRFQQYGHTVRLIAPKFVTPYRLSGRRGKNDAADAAAICEAVQRPHMRFVPIKSVQQQGQLAVHRARQGFVEQRTGTFNRIRGLLSEFGIVLPLKAATVRREALAVLEDLPGWANTVIGDLLSEVQHLDERIAEYDRHIALMARADDRAQQLMRLSGVAQTTATALLAMVGNAHEFRNGLQFAAWLGLVPGQYSSGGKPRLGRITKAGDAYLRSLLVMGARAVLAAATRKSDSISRWAMALAERRGYWRAVVAIAAKNARMAWAMLDRGDRFKMPA

SEQ ID NO: 112883 - protein, 407 aa, unidentified
MNNNSFDFFIGIDVSKDFFNYSVIDSNLNFIKDGKLDMDYSGFNEIKNIIKQFDNSIVCLESTGIYHINLLSFIITFKKDICLVNPSLIKQFSKSISLRNTKTDKIDANIIAKFIAKHHSHINLFSLSNMDELVITARTRQSIAQDIAKIKTKLKQIMIIAFPELLHHYNIFTKSFLNLLIHFPTAKHFKKANYKKINSILNQLPNKGRKNNIIANDIIKLAKKSISSASELTATNVIYLVKHLMFLNEQLEEITKIFTEKVNDSKKDDIDIIKSIKGISDTTAAHFMCEIKDIDRFENKNKLIAFCGTDPSVKQSGSSIYGRSRISKKGSKSLRRTVYLMAMGVIRCNIFFKAYYDKKRKEGFCHRKAMIALCNKLLRVIFALLKKREHFSIEKYCNFMDCINKVA

SEQ ID NO: 112884 - protein, 343 aa, unidentified
MSEDYDGRQYVGVDLHRRRSVLVRMTEAGERLETVRIVNDREQLAAVMARAGEDPEVVLEATYGWYWAVDALAELGGCVHLAHPLGVKGFSYRRVKNDERDAADLADLLRMGRLPEAWIAPPATRELRELVRHRAKLVHLRTSLRCQVHAVLANHGVCVPVSDLFGVQGSMLLERAALSAAGRARVDSLLRLIDSFDTQIDQVAKTTARQLANHSGYTAVQTLPGVGPILAAVFVTEIGDITRFPAPAKLASWAGLTPRHYESDTTVHRGRISKQGSRLVRWAAVEAVQRVGKHTYIGGYRDRITARRGRNIGNVAAARELIEYVYYALRDGTCRRALTPAAA

SEQ ID NO: 112885 - protein, 360 aa, unidentified
MFTERTSVGLDVHARSVVAHAMDVQTGEIFKARLCPDPVEVTAWIKALPGPAAAIYEAGPTGYGLARTLLGNDIRTVVAAPSKLQRPAGSRVKTDAIDAEHLSMLLRLDAFTAVAVPDELTEAARDLVRTREDCRSDLMRARHRLSKLLLRHGIVYSGGQTWSNAHDAWLKRQHFDSPLVQAAFDEAYDSVVTITARRDRLDERITAMAADSPWTNTIHRLGCLRGISTLIGFGLAVEIGDWTRFTGNSIGSFVGLVPSENSSGQSRSLGPITKTGNGHARRLLVEAAWHHQHRYVPGKTIRDRWDLASPAARARGDLGNRRLNKRWNQFKARKKTNNVANAAIARELAGWCWSLAVLDD

SEQ ID NO: 112886 - protein, 435 aa, unidentified
MAVRNVALDLAARKIAFCEVADGKVVQRRTVASLRGLEDLLGPDAPPAKVAIEACREAWAVHDTLTGWGHEVLLVDTTRVKRLGIGDHGRKNDRIDAEVLARAVERGGIPLAHVLSPARRELRLKLSVRRSLVETQTNLVVTIRGIARAQSDALPRCDTEHFVERVRTAAIKNETRGVIEPLLHVLAHTQQQLAQVDLELEALCAQEPVIALLTSAPGVGLIVAAMFVAVIDEAHRFKNAHQVSSYLGLVPLEDSSGGGSQRLGSITKKGNSYMRALAVQAAWTILRANDRSDPLCNWAQAVAKRRGKRIAVIALARRLVGVLWAMWRDGTVYDPSSLARAGARGHERHAHDLALQAEGLRRAAEKAKTRVRDAERRLSRATASVTERKGLSTSLRVHKRTCRCQRLERDDGERSNRSWVSATCPLACLMRQDTS

SEQ ID NO: 112887 - protein, 427 aa, unidentified
MVDCLTVAAGILARSEGETICNDPQVCRIVDLPVYYELETNNGNRDYRIQIGGHYMNYNTVYVGMDVHKESFTLCSCKYEDEKASHYQRTPASYKNVLRYLAFLRTIYGEDTRFVCGYEAGCLGYSLYHQLENFNVECVILAPTTMLEQRSKRRIKTDKRDAEIITKSLAQHNYSPVHIPTETDNQTKEFIRMRDDHKAELKKIKQQILAFCLRQGYQYDGSGNWTAKHVKWLRSLKPAGLYKEILDEYLLTYTILTDKLNRLDQRIEELASKEEYKESVSKLTCFLGIKTHTALSVIVEVGDFQRFVSARKFAGYLGLVPGQHSSGDDRNGLGITKAGNTHVRRLLVESAQSYTRGKIGYKSRVLRSRQAGNSPQIINYADRANERLRRRYYKMVLKDGKKYNIAKTAIARELACFIWGMMTDNIY

SEQ ID NO: 112888 - protein, 316 aa, unidentified
MSKVERAVGIDVSKGLLDVAVLPEGEFWSATNDEEGVTQVVKRLKALRPRLVVLEATGGMETALVGAAATARLPVVVVNPRQVRDFAKSVGTLAKTDAIDARVLARFAEAVRPEVRPLKDKEASQFSALIARRRQLVAMLTAEKNRLGTAPEAIHPSIEEHIEWLEQRLTDINGKLKKAIKKSPVWRAKEQLLRTAPGVGPVLSATLVAGLPELGTLNRKRIAALVGVAPFNRDSGKYRGKRCIWGGRGSIRAVLYMGTLAATRFNPVIRAFYLRLCAAGKEHKVALTACMRKLLTILNAMAKTRTPWQPRCEQTT

SEQ ID NO: 112889 - protein, 345 aa, unidentified
MNATLYAADIAKNVFQVHWVDPDTGEIRRRKLSRTKFAEFFAKRQPGRLAMEACGASHHWGRTFTALGWQVELLPAGQVRPFVRGNKDDAADAHAIWLAAQQSSIRRVAIKSVDQQAALSLHRIRSHWITTRTATLNALRGLLYEFGVTLPKGREAGLKAIAERHPQLDDTLPAPMLRMLQAQLQAIKEVQGQIDAMEKEIGLCQKASPTARRLRAVPGIGLLGATALTAVLGDGSSWRNAREFACFLGLAPGHTGTGGRVRMGKITKRGDPYLRTLLISGAHSVLGKCTSSPWVSELLKRRPKNVVAVAVAHKLARTAWALVAHGRKYERQWQSAAPNAASAAG

SEQ ID NO: 112890 - protein, 404 aa, unidentified
MEHNAVGIDVSKGKSTVCISRPMGEIIASPFEVKHTKHDVDELIKTIQGLEGETKIVMESTGRYPLPLLTKLSDAGFFVSMVNAKLIKDYNPDNTLRKVKSDKADARKISAYTIDKWLLIKQYGTMDTLREQLKTINRQFDFYMQQRVALQNNLTALLDLTFPGINNCFSSPTRADGHIKWADFAYTYWHVDCVCGKTMNAFTEHYQNWCRKNNYNFSSVKATELYNTAKELIPILPKDKGTQLLIHQAIDMFNAMSATVESLRKQMDQIASQLPEYPVVIGMTGVGHTLGPQLMAEIGDVERFTKRSAITAFAGVDPGVNQSGSYNQESVHASKHGSPELRKTLFQIMQHLIQFAPKDDPVYDFMIKKRSEGKQYYVYMTAGANKFLRIYYGKVKAYLAEQKQ

SEQ ID NO: 112891 - protein, 416 aa, unidentified
MNAVGIDVSSRKSTVAVLRPLGEVVCLPFDVTHDIAGLASLAEKLKALDGETRVVMEHTGRYYEAVAKALHEAGLFVCAVNPLLIKEYGANSLRRVKTDKADAVKIARYALDNWADLRDFTPMDAIRYDLKTLNRQFQLASKQRTASANNLIALLEQSFPGIRKCFDSPVRSDGTQKWVDFAHSFWHVDCVRKQPFPAFCERYRKWCKRHAYLFKLSNAEEVYALAKRAVVLTPKSKVVKVLVQEAANQLISISRSVEVYRAEMDRLAAMLPEYPVVMAMYGVGKSYGPQLMAEIGDVRRFERKQALVAFAGIDPMPNQSGDKNVRSNKSSKRGSPYLRKTLFNVIRTYLQCAPQDEPVFQFLNRKQAEGKPFYVYMLAAANKFLRRYYAKLRDYFASLDTLQPVDPIPTILKATL

SEQ ID NO: 112892 - protein, 336 aa, unidentified
MFFVGIDLHKKTITVCVVNQEGGVVMRRTLACCEPHNIVAFFQRLGKFQAVVEATSSYEWLWRLLEPMADRLVLAHPKKLRIIAESKRKSDRIDAQVLAEYLAKDEIPESYRPTPRQRQHRMLVRHRCFARRRGASARTKIRRIVADYNADRPNLFTADGLSYLAGLKLADADRFVVDQLVQEWQQHQSRVQQAEKRLRAFAKDAPALEAEARAVLGSIPGVGTVTIEIVLSELADIRRFRSEKNTVAYAGLAPGFRESAGKRKDLAITKEGSRLLRWALVEAAWRLVRHSRRWATIYGRLQQRRGKKKAIVAVARRLLGVMVAVWRTGQPYRHAG

SEQ ID NO: 112893 - protein, 466 aa, unidentified
MGKSRLERRGKLFFNLYGENFSPHEIAIAAIDIGKTHAVAGVFGYFGEVLHESFILTPDRRGVEILCQVAEETAARCGRKHIVFSFEHTGHYHEPVVALLRERNCTVLPLNSVTTKKERESNLDRSKTDELDIHYIAAAVSAGKVVTDRPLRPEDEELRFLSRQRRTLVQRRANAFVELHVLIDHYWPAFQGIPEVADGKAHVERIFAKTWPERALRFLKHVSTPAEALALGEAGLSGLSRRERLALGIRRIRLILRAAGLAPKVPQSLIEQYVERLRAILESIEGLSTRIDALEDRCQEFLTGSRGVLLLTIPQVGAVTAADYMAEIGFLVPSLHSASAVIKLAGTNPVPDQSGNRRWMRKISKQGVAHYRTLTYQLGNNLFYGKGNPYFQAFGRRLVHLKPKQIRIAVGNKAHRVIFAMLKNSEVFAPKTWPGPPLTMNPLPKLKPCYQQRAREQLLRLGITGY

SEQ ID NO: 112894 - protein, 317 aa, unidentified
MTANQPFVGIDVAKDRLDLDTLPHSKAWHTTNDTKGIAQLCQRLRALEPQLIVVEATGGYERVLSAALAADGLPIAVVNPRQVRHFARATGQLAKTDAIDAQVLALFAERIRPQVRPLPEAEQQTMAALVARRRQLIEMLQAEKNRLPMAHKAVQNELRAHIRFLEKRLDKANRALKETIEASPIWRTKEDLLRSTPGVGPVLSATLLAELPELGQLSGREIAALVGVAPFNRDSGQFRGQRCIWGGRVSVRCALYMATLVAVRHNPVLRPFYEQLLARGKTKKVALVACMRKLLVILNAMMKTQTHWNPDFCCKST

SEQ ID NO: 112895 - protein, 415 aa, unidentified
MALKIVYKICCGIDVHKTFVVACIASTDKHGVTSYERHRFSTYTKGLKNLLQWLLEHNCKDVCMESTGKYWIPVYNILEKDCSIVLAHPKYVKAIRGKKTDKKDAKWIADLFKHDLVAGSFMPPADIRQLRDLMRYRFKLTCFKSSEKNRLQNCLTVSNIQLGNVVSDTFGKSAQAILDKILENPEDTSFDLEPLVFKSLKKKLPELRDAIDGYITPEQAGKLKIIKAHYESLESRKAELEELILALAAPYQQEFAILQTAPGISSDFTAIGIISEIGTNMEAFPSAKHLCSWAGLTPTNNESAGKKKSVRVSKAGCYIKPLLVQCANAVVKSSKHPEMRNRYLRLKKRRGHKKAIIAIARMLLTALYHMLKNGENYNAELYRKSDLPPVDREITVEQAILIARNQGYKIKSATA

SEQ ID NO: 112896 - protein, 278 aa, unidentified
MGDLGSALDWAAGRAAAAGWAGVTVSCEPTGRRWRVLGQLAADRSMPFVCVQPMVTSWSRRTEDLTCDKTDEKDAVLIARLTAQLRSYVPEPVDETWGRLRHLGTRREQLITEAGGQVQQMRDLLECAWPAGTAGTSSAPGGWGPPGSGQAVRREITRRGGRKPCLRIVRGLFTALADPAGVIAHRPGALERVQLLAEDWRYAQDRLAETERRMTAVLDELGLTGLVTSMTGLSAVGAAAILAETGDPRRFATARAVARHAGLAPREKLSGRSPAGPG

SEQ ID NO: 112897 - protein, 337 aa, unidentified
MTHITRMGIDLAKHVFQLHGVDERGHTVLRRRISRAQLRPLIAQFRPCLIGMEACGSAHYWARELAMLGHDVRLIAPQFVAPYRKNDKNDGNDAEAICEAVGRPHMRVVPVKEIEQQAVLTVHRARQLLVAERTALVNQTRGLLAEYGLIVSTGVGVLRRALPDLLETPALPGLAREVFADLADRLRALDERIATYDRRVTALARQTEPAQRLMQAPGVGPVTATALVATVGNARAFKNGRQFAAWLGLVPRQHSSGGTRRLGRITKLGDVYLRTLLIHGARAVMRQLTRRTDATSRWVLALKARRGFNKAVVALAAKQARVLWALLATGRPYVACS

SEQ ID NO: 112898 - protein, 319 aa, unidentified
MSEVILGIDVSKKALDTCLIFEGRTLGKQFKNSADGFRLLAAWLVSLQIKRVLACLEATGIYSEAVALFLHESGHLVSVVNPLRIKGYAQSNMRRNKTDRLDARLIASFCQTQKPDVWQPPSEEVKRLQSLVRRVEVLEEMRQAEENRLSNASAEIKPSVERMIGLLKAEIRELEQQIKRHIDQHPNLQEQSALLQTIPGIGSRTANLLLSEIEFERFHSARSLAAQAGVVPRQKQSGTSLKQTSLSKLGNARLRKALYFPAITAKQHNEIIKEFAERLKRNGKTPMQIVCAAMRKLLYIAFGVLKHKRAFDASLAFSA

SEQ ID NO: 112899 - protein, 421 aa, unidentified
MTPPNEVVWAGIDTHTDTHTIALLDERGRPLGAETFTADPDGYDRLIGMLPGPGRVAAVGVEGTNSFGAALARRLTAAGYEVREVLRPRRSVRRRDGKSDPLDAVAAARSVMAGDGTSLPKSPDGWVEALRHLNARRSQPVSAMTAIPDSTNGLLAAAPEPIRERYRGLRSETRMNRLAECRPAGGLVERSVPAALKSAAKAWKALKRQAGLLEERMRLILEEHARPLLDMYRAGAVIAATLAIVAGDNPERIRSEAAFAKLRGVCPIPASSGRTNRHRLNKGGNRQGNMALHRIAIVRLRYHKPTRDYMAKKTREGKGKLEIIRCVKRFIAREAYRALISIRNGEVGRGTPAERGAKLRELRVSRNITQQQIGEALCVPSSRISEIERGARDLPELEQRAIQWIHSTTNPKQHTQTLDNV

SEQ ID NO: 112900 - protein, 316 aa, unidentified
MSPKLNWMSIFFALMAGIVVKNLTIPSPGIEALVRWLRGHDVNRAHVCMESTSTYMEDAAAHLSDAGYTVSVINPALSKAFAQSEGLRSKTDKVDARMLAHFCREKRPPAWEAPHPTERALKALVLRHQALTEMQTQEKNRRETAPEVQLTSIDILLGCLSAELARIEKQIKDLTDNDPDMKQRRKLLNSIPGIGEKTAAVLLAYTGLKLKFGTGRQFAAYAGLTPVQHESGSSVMRASRMSKAGPVHLRKALYMPALSALYHTAWGKAFRKRLEGNGKRAKVIIGAMMRKLAQVAYGVLKSGKAFDASQHELLIA

SEQ ID NO: 112901 - protein, 265 aa, unidentified
MNTKTKQNVSVGVDTGKFQLDIYIRPLDVYFTVNNDEKGIKEAVKTIKKYSPDRIVIEATGRLEIPFIMACASANLPFVIANPIHVKRFAGALGQRAKTDKLDAQLIAHYGEAIQPNLSQLKPETMQAMSDLVARRNQLLVMQTMEKNRLQILPKELAMTIKPILTAFKNQIEKVESKIVKLIESCPDYQAKNDILQSMKGIGEIASASIISNLPELGYMTNKQASALVGVAPMNRESGRYKGLRKIQGGRHQVRTVLYLSLIHI

SEQ ID NO: 112902 - protein, 343 aa, unidentified
MQTTKANELYAGADLHGNNVFLSICDHDGGTVFHRRVKTNLAAVNAALDPFWDRIKVLGVESTFNWYWFVDGLREQGRNVKLGNPAKMEQYDGIKVTGDRSDAGWLAEQLRLGIFPECYIYPKETRAIRDALRRRQLFVLRRTQVILSLGGLLERYGLPSPSAAKVEKWTSADIQATGLDDWVQLQLETLLDAVRESDRLAKKIEKQVLAFVKPTEQYTRVTSLPGIGMALGMLIVLESGDFRRFPTAGDYASYCRAVKSERTSNDKKKGSNNSKNGNKYLAWAFIEAATYAARFNPRIQSWYEKKKRKSGVPKAKKALACKLAKAVWHVMNGEDFDEKLMFG

SEQ ID NO: 112903 - protein, 324 aa, unidentified
MKDSNTTGLLSNGVFWGVDVASTKLDLARHGEADVVSFENSADGIGQLVQHVRHEPLALLVVEATGGYEVPLVATLQEAGLPVVRINPRQLRAFATAVGELAKTDTIDARLIARFAHDVRPALRPLASKEQRFFASLAARRRQLVALRTAERNRRKKTPEPELHASIDAVLSVLDEQIAHLDHQLAELIAADPQQRQRDRILQSVAGVATVTSHVLLADLPELGQLEHKQIAKLVGVAPLNRDSGKFRGRRTIVAGRRSVRTALYMASITATRFNPQIRPFYERLRQAGKPFKVAITACMRKLLTILNALIRDNNTWRKNTMNT

SEQ ID NO: 112904 - protein, 346 aa, unidentified
MKLIRIGVDLAKNVYQLHGVDKSEKGVWQRRLKRANWVKVLVEKAEPGCEIGMEACSGAHHWARLLQDKGYKVKLMAPQFVKPYVKSNKNDARDAEAICEAMSRPSMRYVSIKTIDQQDIQAIHRIRSELNTHRTAKANQIRGLVSEYGLVAPKQMNALRRAIPSWLEDAENGLSSLFRRLLQGLWNDLKTLDQRVSELGREIDRVAESDEDAKRLQQLRGVGPITATALVASVGNGEHFSRGRQMSASLGLTPKQHSSGDKDRLLGISKRGDSYLRSLLIHGARSVVHHAKHKEDRLSQWVTSLQARSHTNVAAVALANKTVRMAWAMLRHGTDYQPGRVTVNIR

SEQ ID NO: 112905 - protein, 402 aa, unidentified
MNAVGIDVSKGKSTVAVLRPFGEVVASPFDVAHTGSDLKALANFIKKLPGETKVVMEATGNYYEPIARYLHEQNIFVSVVNPVLISDFGGNTLRKPKTDKKDALKIASYALSYWVDLKKYVPQEDLRKSLKLLNRQYQQASKLKTMMNNNLISLLDLTFPGINKLFTSPSRESDGHEKWVDFVLAFPHCDMISKLTIKFFSRKYKKWCNSNSYHFTEAACKKIYEYSKECISSVSSKESTAFAVIQAARMLNSATENCHVIQLEMNRVAAQLPEYSTVMSMYGVGKAMGPQLMAEIGDPRRFHSRKAITAYFGYDSENNDSGQKVSISNSMTKKGASALRRTLFIIMQVLLQNKPIDNPVYDFLIKKQSEGKHYYSYMNAAANKFLRIYYAKVKEVLTAAET

SEQ ID NO: 112906 - protein, 356 aa, unidentified
MAIAIGIDVHKKTSTFFAYGEDGEPLEEFNKRFKRVASNRDGYTEVLVWLGNTDCDFLMENSTKTHDVYWILQGLGYKNLYVAHSVDLKRITKSSKKTDQFDAEKLATYMRVKQQNIDQFRTCYICTPEDMRIRRLCRIAKQELFDMGRIRRRIRSHLLLTGREWMGGLNTKWECEALMNEDDPGLRHLGRQLNECRLRRDAAEEAVVKAIKGNEKMFPIYEKLKEMPNFGDITAAYLAAVIVDIDRFENPKKLAAYLGIVPRMRDSGETENHCGLTRSGDPAARWLLIQATFRLVNSSAPDSQLKAFFAEKNGGSIEERKEADTSGLLKRPALVATANKLIHIIFALLTHPDRHW

SEQ ID NO: 112907 - protein, 380 aa, unidentified
MCGDDRPAINARAAGIDIGAREIWVAVAPELCDEPIRVFPTFTEDLERLAEWLQSLDITTAAMESTGVYWIPLYEILEKRKLQPCLVNARHMKNVPGRRTDWHDCQWLQYLHSVGLLRAAFRPEDQVCAARAIMRHRGELVQMSAEHIHHMQKSLTQMNVQLHHVINDITGTTGLAIVDAILGGERDPEKLAALRHYRIQADESTIRKSLKGNWRPEHLFTLRQSREFYRYYQKQIEQCDRELETLLGEFEARVDPGDRPLPPDRKKRRKRNGRNGAGGAQGGDLRTELYKLYGVDVLQIPGVERMGTSLFTEIGRDLTRFPTAGHFVSWLGLCPDNDQSGRKYWRAARHVNHRAGQLFRMAAYPLHRSLTPLGSVKDFV

SEQ ID NO: 112908 - protein, 360 aa, unidentified
MTSMATTAVFVTGGVDTHGDTHHAAVLDYMGRQLGDREFPTSPAGYRALLQWVSGHGVVDRVGVEGTGTYGVGLARHLREAGVHVVEVDRPDRRARRAQGKSDPLDAYSAARAALSGRASVVPKVRDGKVEAIRAIRVARSSAVKARTQATNQLKALIVTGSPGFRQQLRHLSTPLIITHCARLRPSPDLGDPEQATKTALRRLARRHQQLTEEITEADRELHQLVRDVAPALLDLPGVGPEVAGQVLISIGDNADRLKSEAAFAHLCGAAPVPASSGRTHRHRLNRGGDRSANNALYVVVLGRMRHDARTRAYVERRTHEGLAKPEIIRCLKRYVAREIYNTLNLATPTRNPEQLLARP

SEQ ID NO: 112909 - protein, 338 aa, unidentified
MELKRIAIDTSKHVFTIHGIDVNDRPVLRQELRRGRVETFIAKLPPTDVVLEACAGSHHWGRIFERLGHRVSLIPPQYVKPFVKRGKNDRNDAEAISEAASRPTMRFVPVKGVEDQAAMLVVKHRQMLVAQRTQAINALRGHASEFGIVVAKGGQHVATLLTLLDENAAIPVVARAMFGEIGQHIADLDDKIAAWDKQLLEQHKANPVSRLLAEIPGVGPITAITMALTVNPADFGSARHFAAWLGLTPREHSTGGKRRLGRISKAGNERLRQLLVVGATAVIRYARPGSKSASGWLLQLLDRKPPKVAAVALANKMARIIWAMMAHGEAYRRQPKAV

SEQ ID NO: 112910 - protein, 388 aa, unidentified
MSKPFDLSKSLAVLDPDSTLIVVIEMSQSSWLVAARAPGLARDPLKKLPPDPEQLFKLIDRWREESRRAGRVVRRVCVAFEAGRDGFWLARLLRQHDIEAYVIHPTSIPVKRDHRRAKTDRLDTELLMRAFLGWLRGEADHCSMAAIPTLAEEDAKRPTRERESRVNARSRLVNRMKGALARLGIRGFNPKLRKAAEKLEELRTGAGEPLPPNTLAELRRDMAQLRFVADQIKQIEKAREARLEKAPREGAHPMVLMLASIKGVGLETAEMLVAEVLSRKLRDRRAVARYGGLTGSPDESGSRSREKGLARSGNARVRRGMIQLAWRFLMFQKESALAKWFEARTANGPRGVRKTMIVALARKLLIDLWRFVEDGTVLVGVELFDSRA

SEQ ID NO: 112911 - protein, 308 aa, unidentified
MPHYVIGVDVAKDWIDIHSLPARTDRRLATSPASLKRFARSLPEDTLVVFEASGGYDRPLAEALETAGVAYARVNPRHAREFARATGRLAKTDRVDARVLAQMGEALKLAPSQPLSPARHRLAALIARREALVTMIAQEKNRLGQARDAFLRREIKSHLAVLARRKALIEKEIAAAIAAEEELAALERRLCSVPGIGPVIAATLIAKLPELGTLDRRRIASLAGLAPHASESGQHRGKRRCWGGRAEVRRALYWAAFIASRCNDEFRAARDKLEAAGKPVKAAITALARKLLVQLNAIVRDGRDYAVK

SEQ ID NO: 112912 - protein, 408 aa, unidentified
MNTLYVGIDVSSKSNVAYLMLPNGDRHSNFSVANSQEGSVQLVKRIHSALTSHSLDTVLIGLEATSVYGDNLVYFLREDTTLAPFNRKIHVLNPKQVKKFHDAYNDLPKNDYVDSFVIADCLRFGRINKEVYLGDYRYKALQNLTRARYFAVQNLTKEKQRFINVLFKKYSTLTQEKVFSNTFSTTALAVYDEFESAEALANMDLHELTAFIIEKGKNRFPDPDTVAKAIQKAARSSYRLPKTVNDSVNQVLSISITSMKALESQIKEFDKTIKSQMELLPNVLISVPGIGPVYSAGIMAEIGDINRFDNQAALAKYAGLAWKQHQSGGFEAETTRLIPSGNRFLKYYLCEAAFSLVRCDREYSNFYHLKYKEVNRCQHKRALALTARKFVRLVFRLLKDNRLYCPAK

SEQ ID NO: 112913 - protein, 460 aa, unidentified
MKGKSRRRSAQRVQREQRLLEKIHLDAAGIDIGSESHWVAVPEDRDDPPVREFKSFTHELLALADWLATCGIETVAMESTGVYWIPLYEILEERGIEVLLVNARHVKGVPGRKTDILDCQWLQQLHTFGLLRGSFRPDAPIAALRSLVRHRDQLVEAAAAYVQRMQKTLVLMNLQLHNVISDVTGTTGIAILRDIVAGQTDPAGLAHHRHPRCKATEAEIAASLTGHYRDEHLFVLRQALEIYDLYQEKLRACDTEIETRIHALEASCDPVEGQPPASRAKRGANEPGFDLRSPLFTLCGGVDLTQLPGIGAYSALKLISEIGLDMSRWPSEKHFASWLTVSPQNQISGGKLLRTRTQPSANRAAKILRMAAMSLGRSDHALAAFYRRLGARVGKTKAIIATARKLALLVYRMLRYKIHYHEPSAADYDRQQRTRILRGLRKRAASLGFELVDTRTGLVT

SEQ ID NO: 112914 - protein, 421 aa, unidentified
MADDAPRWFVGVDWASETHQVCLLDADGRILGERAFAHGGAGLAEMAEWLLATTRAVAAVIAVAIEVPHGPVVETLLERGFAVHAVNPKQLDRFRDRFTVAGAKDDRRDAHVLADALRTDRHCFRVLSLADPLAIELRAWSRMAEDLQQERNRLANRVREQLWRYYPQALELGEDVAAAWFLELWSLAPTPAKGARLQEGRVAHLLKTHRIRRIGPGEVLRVLRQAPLAVAPGTAEAAVAHIRTLVPRLRLVNRQLRDAHRRLDTLCAALAGDGAGKAAEPGNVGEQRDATILRSMPGVGRIVLATLLAEAWEPLRRRDDHALRALCGVAPVTKRSGKRCVVVMRQACHVRLRTAVYPWARTATQRDELSRRRYAELRQRGHSHGRALRTVGDRLLAVACAMLTHGTLFEPSRHAAAPRAA

SEQ ID NO: 112915 - protein, 353 aa, unidentified
MIVLGADMHKSSHTIAAVAAASGELLGDKTVRVGDRGFAAALDWARGLQDERVWALEDCRHVSGAFERFLLGHGERVVRVATRLMAGERRGGRDRGKSDLIDAMAVGRAALREGVDRLPVAELAGVELDIRLLVDHRERLVRMRTALYNDLLWHLHDLWPEQTFPACALLSKKWTARIARRLARAEQTARVRIARDELRHLRELSDTINLLEAEIADLVAQVAPQLLAEPGFGPLTAGKLIGEIAGAHRFSSDAKLARAAGIAPIPVSSGNTNRHRLDRGGNRQINTAIHRVAITRLRCHPETKAYIERKRGEGKTNREALRCLKRHLARRIWHLLQPPPPVLNNSPNINLLT

SEQ ID NO: 112916 - protein, 402 aa, unidentified
MNSVGIDISKGRSMVAAMRPFGEVVISSFEVHHTDSELSELAKLLKSLDGETRVVMEATGNYHAPVAKLLHDAGLYVSVVNAKLVHVYGNNDLRRVKTDRKDAVKLANYGLDRWLTLPRYVPEEDTRLLLKNCYRQYRQYSKVQTVLKNNLISLLDTVFPNVNRLFSSPIRGDGSEKWVDFVAEFWHCRCVSEKSEKAFTNKYQRWCKTHGYNFSEAKAHTIHAEASGHIGIMPKSETTKLLVEQAVVQLRATSAALIALKREMLTLAAQLPEYPVVMGMFGVGPTLGPQLIAEIGDVRRFYSKKALVAYAGLDAPPNDSGDVTGRHKSMSKIGASSLRRTLFLVMGIYLQNAPLDEPVYQFMDRKRAEGKPFRVYMMASANKFLRIYYATVKAYLESLEQV

SEQ ID NO: 112917 - protein, 408 aa, unidentified
MTQKDPQPKRFIGLDVHKHYLIAIGVDEDLNQVLDPQRVKLSYLEKWISRTLRKEDAIVLEMTTNTWQLYDDLLPHVGSVTVVHPPHVALITRAQVMTDKIAASILARLHAKGLLVGIWVPPKEVQELRALIAHRNKMTRLATQAKNRLHAILHRGHIQPPEGNLFHEDQRDWWLGLELSPAKQTSLLCDLDALDFAQQQVARIETVLKGLAAEDQRVPQLVQLPGISLINALTILGAIGDIARFPSPKKLVGYAGLGGRVHDSGQTSRRGRITKAGRRDLRTAMVQAAQTAANTHPHWKAELARLQPHLGRNKAIVAIARKLLVSVWYVLTNEESDRFAEPELVARKLMQYAYVLGKANRPADQSTAQYVRHHLDRLGLGADLTAIPWGAKKKPRPLPPSTLLQNSK

SEQ ID NO: 112918 - protein, 322 aa, unidentified
METEAKYVGVDVSKARLDVGLWPGGESFSVGNDAQGVEQLLLRMLQLRPCAVIIEASGGLESLLVGELCEAQVAVAVVNPRQPREFARSLGQLAKTDRLDARMLAQFGHSAHRSGRLTLTQLQPAAEAELKALVRRRRQLLGMLVAETNRRQRASKVVKKSIVATIRSLKRTLAELEQQLRETVKHSPAQKAKAAILEQVPGVGPQLARSLIAEVPELGQLGRRQIAALIGVAPYAHESGKFKGRRMIWGGRAAVRSTLYMAMLSATRYNPLLAPFYRRLLDRGKSKKLAYIACARKLLVILNAMFRDHTTWNPMLDFQHSR

SEQ ID NO: 112919 - protein, 368 aa, unidentified
MNSVKFIGMDVHKKTITIAIAEEGSRESARVYGTINNDFDALDKFCRKMLSTSNQLNFVYEAGPCGYSIYRHLTQKGFDCIVAAPSMIPRKNGDRIKNDHRDAKSLARLHRSAELTAVYVPDAQDEAMRDLCRAREDAVIATRKAKQRLNAFLLRHAIIYSGKTNWSKAHFNWLADIAMPHCAQQIALQEYIDAVHENLNRVQRLTEQIQQMVPDWRLAPIVNALQSARGVSLIVATTMLSEIGDLGRFQNPRQLMAYLGLVPSERSSGCTIKRGAITKTGNKHARKALIEAAWAYRMQPRVSRALKKRQENLTDPVRQIAWKAQLRLCARYRKLMAAGKSNKLAVTAIARELSAFLWAIAKQQQPIT

SEQ ID NO: 112920 - protein, 362 aa, unidentified
MQYIAFDAHKHYTLASVEREDGRLVREQQIPHERGALQAFLQGCDPESPVAVETTGNWYWIVDEIEGAGCLPRLVHARKAKLMMGMINKTDKLDARGLHRLQRAGTLPAVWIPPSALRDQRDLPRTRMVLVRQRTRLKNRIHAALAKYGVSRSDVSDLFGRQGTRWLQEHLGQLPPQTAYAAQRVLEQIETLDRQVAQLEQRMSELFTPTAQLELLRSLPGVGFILGVVILLELGDVRRFPRSAQLAAYSGTTPRVHASGGRTRYGPLRPDVNRYLKWAFVEAANIICRRRGRAPDRHVCQLYARIARRRGHQTAIGAVARHLAEATYWILTKEQPYREPQSRPPQGPAAGIVHGGVSAPMP

SEQ ID NO: 112921 - protein, 320 aa, unidentified
MTSTGMSAALFTGIDVSQARLDVGLWPDGKSFHDSNDAEGRSRLAKRLAALKPKLVVLESTGRLEVPFALELGEHGVPYRIVNPRQVREFARAMGTLAKTDRIDALMLARYAESSQLAPKPLPEASRRELRALVMRRLQLIEAKIAEENRLKGETVPRVLKSLKASIAWLQKQIAQLDDELKRTIQSNPDFAAPDVIFQSAPGVGPNTSNMLIACVPELGTLTREQAAALIGVAPFNSDSGKTRGKRFCWGGRAEVRSVLYMAALVGIRHNPILRALYARLRAKGKAAKVALVACMRKLLTILNAMMRDNKPWRQTATVA

SEQ ID NO: 112922 - protein, 322 aa, unidentified
MDKVKGIDISKETFDVSWKENGKIKPAIFPNNKKGFEQFVKILKAGDHCVMEASGPYYLALAMFLHDRGVLVSVANPLSVRRFCQMQLVRTKTDKKDAAMIAMYGEMVQPELWNPEETHIMEMRDILTTLEGYEKQATMLRNQLESERYLPASSKKAKQSKDKMLRTIEDEIKKLNEELQSIAKEHYSETLDKLQTIPGIGPKTSIMLIILTNNFEHFDDARKLSAYIGLCPRIYQSGTSVNGKGHICKMGNARARKLLYLCTWTAQKSNAQCKDLKERLELKGKPAKVIKVAMANKLLRMAFAVAKKKTDYDKNIGLKTCF

SEQ ID NO: 112923 - protein, 365 aa, unidentified
MENPFKQCVGIDIAKETFTTCLCQQDLEGDIRLSQVVEFKNSKSGFNQLMKWSKKITEPGIPVVFIMEATGNHYENLAHHLHGLQQQVSVLLPNKVIHYAKSLNVKTKTDAVDARVIAQLGVERKLRKWEPPRPVFKKLKELTRQYTDLQREKTVFLNRLDSAKSGYQPQRFVIESNKAIIHALKQQLKKCEGEIEKLVRSDKWLWSKMEKVLTLKGVGLISVAIVVAETHGFEFVQNIRQLTSYAGFDVVRRESGTSVMGRSKISKKGNSRIRAALFFPALVAVQYNKDLSMIYYRIQDGKPSKMVGITAIQRKILILIYTLWRKDEEYVENYKINLKCTAGRDMTPLPAQDELQPNRTKLSFV

SEQ ID NO: 112924 - protein, 373 aa, unidentified
MPKYSTAFGMDVHLRSTTVCALDADTGEAVTRRFPGNPWGEIAGWMDGFPGPSLAAYESGYLGFAPQRELAGLGVECVVAAVSKIPRSAADSASKNDRNDAARMAKAILAHDISPVWVPSPEVEGIRDLAGAYDGATARLATAKQRLLAFLARRGFVYGGTTPAGNPRKYWTYDFLRWLDKVRPEDDGGVRALAALRNEVEAAAEARADLLSEYRAAVDASPIAAEVAALQSIKGCAFALAAAFSAEVGDFTRFRSGRQVTAYFGLAPSQRSSGDSVRLGGVSGAGNALVRKLAVEGSWCYAAARHQPKLMPRDTGVPLEIRMHGRKGSERLLRRREEMLARGMPAAKANAATAAELVRWLWALGMMCREAGE

SEQ ID NO: 112925 - protein, 432 aa, unidentified
MKNDNRKYLSVGIDVGADFSLMAIALPSQELLGKSYRIFHNSKRSLDGAIDRIYSVMEQYDLPARIFMESTGIYHFPVYHKMREAGLDAYVLNPLVTHASKDINVRNIHNDKFDAQKIALLGLRPDLKTSIVPSDDVAAMKAILREYYAMKKETSMYICRLKDQFRQVFPQFIPVFSKVNGVAAMAVLYEYLTPDSILAAGADELERFMKTVISKGPLHIRKKAEALVEAARDAQNFGHGNTGVFYLIRHYIEMIRLLDAQTKQILTQVKVLLKEQKNSQMAKQVRLLQSIPGIGFLSAVTLVCEIGDFSAFKRPKQLFAYFGLDPAVRQSGNFSGADLKMSKRGSPYARRCIYVLAIQSVSLRVDGTAKNPVLRSFYEEKCKSKSKMTALGAVMHKVCNIIFAVLRDERPFVLITPEEHRTAYFSASVKAA

SEQ ID NO: 112926 - protein, 332 aa, unidentified
MHMLAIDLGKQSFHIYGISDDGEVVSRKVGRAKLVDAVSRLRPQLVAMEACASSHHWGRTFEALGHDVRLIHPRFVKPFVKGSKNDAVDAEAIFEAATRPTMRFVPLKSVEQQDLQALHRTRDRLVVQRTALINHTRGLLAEYGIVMPAGASRFRLQIDRMIETAELSDLAKLLFRQLVEEYRDLDARVSALDDMLVKICRTDERCKRLTTLPGVGPIVATSLVAAIDDGRHFKSGRALSAWIGLVPRQYTTGGKPRLGGIGSRANHYLRRQLIHGARSALLRISKHEDRRSNWAQDLLSRAGHNKTLVAMANKTARMAWAILRSGESYKIA

SEQ ID NO: 112927 - protein, 373 aa, unidentified
MSKSSVAYRSFVGVDLHKTVVSLVAVDARGEQIARLTIATKCVDKITGWLRSLPDPVWMAVEACPFVEWFIDRFRWCVFQMDIADATELKRLRGKRRKTDTNDALDIAERLADGRCPLGFIADEELMQLRKLGRHWRQLSHLLSRTKHAMRSMLHAANLAGPKVLDAASGHRWFLAEQRLFKPVQQQTFADFLDTLSLVERQRERLRRDITLANHLETFAEITDLLKTVPGIDEIWACIIAAEIGPFDRFPNADALEFWAGMTADLQESAGRRQTGNITKAGSRTLRWALCKAAITLCFSDAKQETTRQRLIKRTGGIKPKANVAMGRRLLRILFAMVRDKKSYHNARPVARNLAANRARMAKQARKAGKEAA

SEQ ID NO: 112928 - protein, 424 aa, unidentified
MKVTFQTCCGVDVHKSFLVATIIKTTGGMEPSYQKRRFSTFNNSILEFKKWLLENECLYVCMESTGKYWIPVFNLLEDKINVTIANPKWVKAVKGNKDDTKDSKWIGDLFRLGLVRGSYIPCKKIRILREFTRYRYKLVSCRSSEKNRYQNALTVCNVALDSVVSDVFGKSSTSIIDYLLEQSGTSIDHEMIASKLLKRLKAKEDAVIESIEGYQMTDSQKYRMHLVRAHMDYITAAINDVDSEIESLISSDPDYQNAAELLYTIPGVKHDSAITIISEIGIDMSQFCTSKRLCCWAGLTPGSNESAGKKKSVRITRAGVYLKPALVQCAHAAVKSNKSPYYKKKYESLVKRRGKKRAIIAIARMILTAIFQMLTTGETWNPCDLYKIDMPEALLEKQKQKAIKQAQKLLIREGLLPPTEPIAS

SEQ ID NO: 112929 - protein, 359 aa, unidentified
MRVQSNKKDFKGQNIFVGIDVHLKQWTVTVLTESGYKKKFSQPSCPKSLFDHLSKNYPGGIYKAVYESGFSGYSSCYELRKYGIDCQIVHAADVPTSQKEKVTKSDVVDSEKLARSLRNGELDEYFIYIPSSDSLDDRSLLRVRKTIQKESGRYRSQIKHLLYCNGISYPDRFQNQRTHWSRKFVEWLRNDVRLLSPTRTSLDWLLDEYLHLRQSLLAINRKLRELSQTARYKKRYECLISIPGIGCITAMTLLVEIIDIKRFSSQKKFRAYLGLVPVMQKSDETVIVGEKTFRGNKHLGPQVIEASWIAIRHDAELAAAYTRHCHRGLKAQEAIIRIAADLAARIYAVLKQEKKYECR

SEQ ID NO: 112930 - protein, 343 aa, unidentified
MDHFAGLDVSVKETSICIVDDTGRIVWEVKVASEPEALLQVLGNPIYRFKRIGLEAGPLSQWLFSALAEAGLPVICVETRHMRAVLQAQINKTDRNDARGMAQMMRAGLYRPVHVKTLRSQKLRMLLTHRKLLQSKAIAIDNDLRGTLRNFGLKVGVVGTVKFEARIKELVENLPDLAVLVEPLLMVRRVLREQFAILHRRLLAIVRDDEVCRRLMTVPGVGPVVALTYRATVDVPARFRTSKAVGAVFGLTPSRYQSGEINRPGAISKCGDEMMRMMLYEAAQIMLVRTAKWSWLKAWAMKIARHRGMKKAIVALARRLAVIMHRIWVDGTEFRWTREAAVA

SEQ ID NO: 112931 - protein, 347 aa, unidentified
MKILSLDLGKYKTVGCDYEGETGRHRFRGSATAPAALAQVVKEVKPDRVVIEVCNIAGWVSDLLRGMGVEVQVANTSDDAWRWRKVKKKNDRSDALKLAQLSAVNQLREVHIPTIDVRQWRALIAFRQQLVKRRGKMKNHIRDLLMTEGQILPRGAKCWTQIGVARLEAMARPLSEVGINELWRGQLDMELRQLREVAQEIAVAEEKLNAIAAADPRVALLRTIPGVGPRLSEAIVALLDRPERFQKAREVSAYIGMVPKQFDSGESERAGRITRHGSRLVRSLLVEVAWAGLRYNPWVRQTYQRISGGKKSRKKIAIVAVGRRLLVRCWAMLRDGTSWRPPAPQTA

SEQ ID NO: 112932 - protein, 367 aa, unidentified
MKQVTTVVGIDAHKKDLFVAMLVGPQATPVSWTVPNEPQAIRRLVRKLERDAPGPVRVFYEAGPCGYALQRQVTTPRVSCEVVAPALIPRKPGERVKTNRRDARKLAELGRAGLLTVVQPPTPEDEAVRDLARARDDAREDLQRCRHRLGKLLLRRGLHYAGRNWTRAHRAWIATLEWPHAAERAVVDDYLLAIDHTEARVVALDAQLSEIAQTEPYREPVGWLRCFRGIDTLTAMLILAELHDVRRFASAPALMAYLGLVPGEDSSGEKHRRGRITRTGNALVRRLLVEVAWHYQHRPGIGVALARRRTGQPARVIAIADKAQQRLCRRFRKLAAEHKPAPKIAVAIARELAGFVWAALHPPVSAT

SEQ ID NO: 112933 - protein, 368 aa, unidentified
MLTIGLDVHQRFFAVCILDVNGERVKELQVRGRWPKLIEQLKQLAEPFAICYEASCGYGHVYDQLTPIARVLVAHPGQLRLIFRSKKKNDRVDARKLATLLYLDQVPTVHVPRVDVRSWRSFIEFRRRLVDKRTRVKNSLRALLRGHGIAAAGGKRLWTKKGRAWLGEVELPTSQMVVQRDLLLDELEHLSKNVSRVERELNARARSEAGVCLLRTIPGVGPRTAEAVAAYIDDATRFARSKQVGSYFGLVPSQDQTFPRNRLGHITREGPATVRKLLVEAAWQGIRRSARIQAHFAQVRGDDPQRKKIALIATAHWLVRVMYTMLRTGETWRPEPQRPTSGTEGTLATEGGGEVEGERAAADQREVA

SEQ ID NO: 112934 - protein, 394 aa, unidentified
MKLVGIDVGKNSHHFCVMDKETGEFNVTPSSFSNNKEGFDFLINSLKPYSKKSILLGMEDTGHYHVALLKFLLSNGYTVALINPKTTDLTRKMEGGITKNDKLDTITICDVLDTPERKKQYRITKVDRFDLYEQRQLTRHHHNLKEELNIYCNRLQKSIDLVFPEFNTLFGSKYGVVYMNLLKTFGSAEAIASTDIRTIRKCFEIKGRGGRISLTAEKLKECAKNSIGISSEVETIQIKHLVSQIMLIKEQIAEIDKKIEEFSIKNNSPILSIPGISHFSGTSILAELGDIGNYSKPSRIIKFAGVAPYHYESSQYNAQHTAITKKGSKYLRKTLYQVILPVINNNPVFKKYYRLKISQGKGHRCAKGHCIRKLLRVIYHLLETGQSFDPALLR

SEQ ID NO: 112935 - protein, 388 aa, unidentified
MSKPFDLSKSLTALDPDSTLIVVIEMSQSSWLVAARAPGLARDPLKKLPPDPEQLFKLIDRWREESRRAGRVVRRVCVAFEAGRDGFWLARLLRQHDIEAYVIHPTSIPVKRDHRRAKTDRLDTELLMRAFLGWLRGEADHCSMAAIPTLAEEDAKRPTRERESRVNARSRLVNRMKGALARLGIRGFNPKLRKAAEKLEELRTGAGEPLPPNTLAELRRDMAQLRFVADQIKQIEKAREARLEKAPREGAHPMVLMLASIKGVGLETAEMLVAEVLSRKLRDRRAVARYGGLTGSPDESGSRSREKGLARSGNARVRRGMIQLAWRFLMFQKESALAKWFEARTANGPRGVRKTMIVALARKLLIDLWRFVEDGTVPVGVELFDSRA

SEQ ID NO: 112936 - protein, 405 aa, unidentified
MAKRSHEVCVINESGDCVLQMPVSNNTSGFDRLIKAIDRLTEPAEIIFCLEATGHYWMPLFCHLTDIGYQVRVVNPIQSDALRNLYIRKSKTDRKDSFILADLVRLGRASGSWMPSEITLRLQTLSRMRFEFVTQVGGLKQRVLGILDRIFPEYASCFSDVFIRTSRELLKLYPNPSELAEIDLTELSSFLAQHSRGRLGMERAEKIRALASGTFGINLAMDAFTLQLRLLLDQIEFISDQIKLIEESISEIMEELKPQNAQSELPPGCKHVLETVPGIGTVLAAAIIGEVGDINRFPNARALVAFAGLDATVKASGQFEGTRNRISKRGSPVLRNSLWLAAVSARRHIPEMKVYFETKLSQGKHVNVATGAVARKLVHVIYTLWKEQRLYDSGYNWSPPGSNQK

SEQ ID NO: 112937 - protein, 315 aa, unidentified
MEAASWVGIDVSKARLDVALGMEGELFEAANDQRGIAALIARLSRLALARVVVEATGGLETALVAELSAAGLPVVVVNPRQVRDFARATGQLAKTDALDARLLARFAERVQPPLRALPTAAERELKALVARRRDLVEMLTAERNRLSSAPKVLHREIAAHIRWLEARLKQRDRDLDRQLRGSPLWQEKEDLLRGVPGVGPVLSATLLADLPELGRLDRREVAKLAGVAPLNHDSGRLRGLRTVWGGRAPVRAALYMATLSAVRFNPVLKVFYQRLRSAGKPPKLALTAAMRKLLVILNAMLKHHTPWSPPCPAAH

SEQ ID NO: 112938 - protein, 414 aa, unidentified
MEVIHPRCAGIDISKKDAKVCVRVQGRGSRSTVSTVTTWGAMTGQILDLKEHLIKEQVGLVVMEATSDYWRPFYYLLEDEGLNVILVNARDARNVPGRKTDVSDAAWLADLGAHGLVRASFVPPPPIRELRDLTRARTVITRERTREIQRLEKLLEDACIKLSSVASDITGVSGRLMLQALIEGQEDPAALADLAQRRMRSKIPELTDALTGRFSSHHRYMAELYLHRIDAHTADIEDLSARIEEAMAPFRFARELLISIPGFSTTIAEIFIAETGADMTVFPTAGHLASWAGTSPGSNESAGRVKSTKTRPGNRYLKGALGIAALSAARSKNTYFSAKYSRLAARRGPMKALVAVEHAMLTAAWHMLTTGELYKDAGADYFRLQAPAKTKARAIGQLEALGYQVTLAPLQPTG

SEQ ID NO: 112939 - protein, 424 aa, unidentified
MAGVVIGIDPHKGSHTAVALDVHEKQLGRLRVRASSRQVDGLLEWASGWPRRRWAIEGARGLGQLLAQQLIASGERVLDVPPKLAARVRLLDSGQINKNDPNDARSVAVAALRAHELPELAAEDHAMVMRVWARRYHDLARLRTQVVCRLHAVVCELVPGGVRKYLRASQATDVLDRIVADSPVAQAKLELARELVADLERIDAQRREAKGRTARAVAATRTSINDVYGVGPIVAGTVLGYVRDIRRFPTRDRFASYNGTAPIEVSSGDRKIYRLSRRGNRQLNHAIHMAAISQIRHHDSEGRAYYEKKIAEGMTGKTALRALKRKISDALYARMIDDARRLAAKDPGGHTGNDSASSAAGSHPETPALRKSHSRATANSKTGTGQRPLRLRPAPDRRRTSRRAAGVQVEPRPGPHRGRGQDRP

SEQ ID NO: 112940 - protein, 428 aa, unidentified
MEVAGEEPLFAERAAGIDIAKAGVEAAVRVPGPGGRRMQEVRSFKVTRRGLEELAGWLEGHGVTRAGMESTSDYWKPVFFFLERAGFECLLYNSRAVKAQPGRPKTDKADAAWLAKITENGWVRSSFVPPAQIRVLREYTRYRRRVIQARTAQMNRTEKLLESGHVKLSSVISKLHGVSGRAMMNALAAGERDPKVLAQLARGTMRRKITEPGEALDCTFFTPALARLLARMLKLTDELTAEIEGPGTEIAELCAPFEPEIARLDEVDGIARRTAEDVIAEIGTDMTVFPTAGHLVSWARLCPQVRESAGRRKGRNATGDGNAYLSAAISEAVIGSLGTNCFTAARYKKLIRRMPKKKALVAAGNSVLTIIWHLLADPEATYADLGGDYYELRDPARQKRSYIRGLERLGYHVTINTINPDTGELTAA

SEQ ID NO: 112941 - protein, 429 aa, unidentified
MYIKPLDSKITYENKLNLAFDVGKDKLDVYTEFDNQSIQDSFFNKTLIIEQKLSDFQEMAISSGYDGLQIIAEPTGIYHNKLFRSARRMGHKTAIVNPESVHKFKVIESNDAGKTDAKDCRVIFLLAKYGKTLIDRDIQNEYNILRHLHTQLVDLEKAYVSIRCKIYNLLKELFCDYSLSNSFIYTKSGRQLVKRFNANPYKIVNYGYTKFHSRMRKYVPGIFNSTIQKLWQDAKTSVRYLLNPEYILVMETHLNYFWNEFLTIEKMKEEIKNNMLKSYDQLQLSDSNLPFPVKGLVTKISLAKLLAETGPLSDFKSINQLMRYAGLNIRECRSGQYQGKNKISKKGRANLRRILGYIVFPLVKKNAFYGSRYHLKKDNGMSGNKAMVAIMRKFLKMIFGWYNSNEPFDIDRIFLDENNYKKLKESVKV

SEQ ID NO: 112942 - protein, 409 aa, unidentified
MRVMHERCAGLDVHQKTVVACVLTGAAGSEAKQEKRTFTTVTSDLLKLGEWLRECEVTHVAMESSGVYWKPVWAVLEDQFDLTLANAAHIKNVPGRKTDQKDAAWIAELLRHGLMEKSFVPPVAIQDLRELTRYRAQVTGERSAVGNRIRKLLESANIKLGSVASDVMGVSGQRMLDALVAGESDAARLAELALGQLRKKHAQLEVALDGRVREHHRRLLRLQLANWRFLDRLTEELDVEIDRELGPVRQAAELVETIPGISALTAWNVVAEIGADMSQFPTAAHLSSWAGLCPGNHESAGKHYSGKTRSGNIWLKRALCQAAWAASHTRHTYFAAQFRRLAAKRGKKRAIIAVAHSLLVVIYTMLKQAKGYLELGADYFEKLHADDFKRYLVRKLEAQGYKVTLEPAA

SEQ ID NO: 112943 - protein, 367 aa, unidentified
MEKSSKVFVGMDVHKESIDITLAEQGGEVRRLGQIGGDRGSLLKMVRKQQSKGGERVFVYEAGPCGFWIYRELAALGERCMVVSPALVPRRAGDHVKTDRRDSERLASLARAGELQAIHVPDIRDEAIRDLVRGRDDAVIAQRRVRQQLKALLLRNDIRYVGRTSWTGAHRRWLSELKLPEPAQQIVFEEYVDAIAVAAGRIERLTRAIQTEVLTWRFAPVVGSLQAMRGIQFVHAVTLIAELGDLTRFASARALMGYLGLVPREDSSGEHRRQGSITKAGNSYARRALVEAAWAYRHPARVTRIIATRQTGLPKAACDIAWRAQLRLSAKYRRLNARHLHHNKIVVALARELSGFIWAIGQCVKPK

SEQ ID NO: 112944 - protein, 355 aa, unidentified
MSQEKYIGMDVHAATISAAVKNAEGKLLMECVLETKAATILEFIQGLRGTLALTFEEGTMATWLHDLLQPHVSRLVVCDPRKNALMRDGNQNDRVDARNLAELLRTNQVKPVYHEKHGTRALKELGRSYWTLTQDSTRVMNRIKSVYRSWAIPCAGTSVYSRRHRGDWLAKLVEPGVRMRAQHLYEQLDSLQPVRQAARRELLRESGKHAAVKLLRQIPAIGPIRSALLVAWLQTPHRFRTKRQLWAYSGFAVKTYDSGEFRFVRGKLQRNRERITVRGLNHNHNHDLKNLFKGTATSAIQRPGPLQDFYAALVEKGMRPSMARLTLARKIAAIVLTMWKKGVSFDPKQLQRPAA

SEQ ID NO: 112945 - protein, 390 aa, unidentified
MILVGIDVAKDKHDCCITNTDGEMLFDIFTITNNSEGFDILYERIRSVAPDLSKVKVGLEATGHYNYNILSYLLDKHLTAYVINPLHTNFYRKGLSLRKTKTDRIDSRTIALMLLTDLSLKPYSVSSYHRENLKSLTRYRFSRVQERSRQKSSISRLVTILFPELSQLVPCIHISSIYTMLEELPGASYVASVHLTRLTNILSKASKGRFGREMAITFREAARTSIGAKIPAKSLELRHTIADVRVIESEIREMETEIQKLMDEETTTITSVPGIGTQMGAIILAEIGDFSRFDSPDKILAFAGMSPSTYQSGKMISSYAHMEKRGSRYLRFALFNVTKHVCNYDPGFAAYLAKKRAEGKHYNVAISHAAKRLVRMLYAMETNGTLYEAA

SEQ ID NO: 112946 - protein, 343 aa, unidentified
MEYSAIDLHTRRSQIRIVREDGTIVLDRRIETSRAALDEVFGDRPPMRIVIESSTESEWVAQRLEQRGHDVIVADPNYAAMYGTRSRRVKTDRRDAAALAEACRTGVYRRAHRVSAPARQLRQQMRVRQHLVDCRRRTINLVRALVRQDGRRLASGSAERVVARLDQLALAAPLAAAIVPLRTSLVQVTALLAAVEQAVEARAADAPTQRLMTAPGVGPVVALTFQAVLDDPQRFGGSAARASAFVGLVPSEDSSAERQHKGHITKTGPRDLRALLVQASWVIWRGRSQAGAALRTWAQTLAVRRGRRIAIVALARRLTRMLYAMWRDQRPYHPPRRAAAMAA

SEQ ID NO: 112947 - protein, 364 aa, unidentified
MDNLSTSLRRIQPQSYDMFLGMDVDMRSIVLTQMDHLGSEKSVSMPYDSQVLLSYVGNNLASKRIAFVYEAGPTGFGLYDDISAAGYACLVVSPSAVPTARGKRVRTNRLDSRKLAVQLRGGSLEGIRVPSEAYRHLREYVTLRKMHITESAKCKQRIKALFLRHSMEFPGSTPGGYWSRELMLRLREYECAAALHLKLVSLLNCLEFSRGQALLAQMEMRAFMDSNKDIGESVRYAMSVPGVGWIVATYAIARIGDWRELVNSNEMASFFGLVQTEDSTGERSDRGSMTKAGDPVMRSRSVKAAWTAIRKDGELGRFYKRVYSTHAKDKASRIAIVAVARKLATRLHCVLKERREYQCEVLAG

SEQ ID NO: 112948 - protein, 374 aa, unidentified
MKKSIKIFVGMDVHKESIDITLAEAGGEVRRWGQIGGDRAALAKAVRKLEARGGELHFVYEAGPCGFWIERWVRARGHECWVVSPSAVPQKSGERIKTDRRDSEKLARLRRAGELVPIYVPAEIDEAIRDLVRTRDDAIIAQRKARQQLKALLLRNEIRYVGKSSWTAAHRRWLADLKLPQPAQQIAFEEYLDAVEVASTRAERLTRAIETSTEGWRLAPVVAALQVLRGVQFVHAVTLVCELGDFVRFACPRQLMAYLGLVPSENSTGERRRQGAITKTGNHFARRALIEAAWAYQHPARVTPIIARRHSGLPKRARDIAWRAQLRLCARFRRLCARKLNKNKVVVAIARELSGFVWAIARGVTITRDTSSVD

SEQ ID NO: 112949 - protein, 412 aa, unidentified
MRRVIGIDIHRTFGEVVIWDNGELRHAGRVDMTRTALEGLGKRLRATDEVVIEATGNSMAVSRLLSPCVARVVIANPLQVKAIAYSHVKTDKIDAGTLASLHAAGYLPEIWTPDAVTERKRRLVARRYQVVRHRTRIKNEVHSILYAHLIPKCPHADLFSKRGREWLTRQPLPDDERMAVDRHVRELDRLAEDLALLDREIAQVAIDDPAVRRLITITGVNLTVAAGIVAAIGDIGRFKSPQKLVSYFGLNPRVRQSGLGVAHHGRISKVGRSHARAMLVEAAWATAKSPGPLHAFFVRIRARRGHQIAAVAVARKLTVLCWHLLTKGEDYLWARPALVANKTRAMELQAGQPQQKGNRRGATYAYNIKALRDQEMRVAEQAERSYEHFVGRWKPRRPKDQARGRLNSARQE

SEQ ID NO: 112950 - protein, 432 aa, unidentified
MNPLSVSPEPPPVAAWVGLDWADQQHVICLYEVATGQSTVSRLEQKPEALQDWLSQLRQRFGGAPVAIVLEQARGAVIYALLSADFVRLYPVNPQSLASYRKAYAPSGAKSDPADAVLLMEMVRNSPERFRPWKPDDADTRSLQLLTENRRQLVNQRTAFTNQLTGLLKSYYPQALELAGELDSLQACNFLQKWPTLEALQQARPAQIRKLYLDYGKPRPESLEKRLEQIRRARPLTTDPAAVLSGTMMVRALIELIRPLLATLERFDQQIAALFRKHPDRLLFESFPGAGAVLAPRLVAAFGTDRDRFQSAQQIQQLSGIAPVTEQSGKQRWVHWRWACSKFLRQSFHEFADHSRKWCGWAKALYQRLRRSGKGHHAAVRVLAFKWIRILFHCWKTRTAYDEQIYLKSLEKRNPTLWAEAQALPSRKKKAA

SEQ ID NO: 112951 - protein, 368 aa, unidentified
MSKSITFVGLDVHKNSIAVALADAGRNAEVRNYGIIGGGLDDLDRLVKKLGATGKELHFVYEAGPCGYEIFRSLTEMGFDCAVCSPAHVPKSPAERIKTDRRDAMMLARLHRAGELTYVFVPRPDDEAMRDLTRAREDAVKAQRVARQQLGGMLLRLGYKYPGKNWSLQHFRWLADQKMPLPAQQVVFQEYIHAIKETTERVGRLTSQIETLIPEWRMAPVVMALHALRGVSLIVASTTVAEIGDLARFENPKKLMAFLGLVPSEHSSGEKRRQGKITKTGNGHVRKVLVEAAQSYCHPARVTRFLLKRQEGIAQEIRDIAWKCQIRLCARFRRLMATGKNRNTVVTAIARELAAFMWAIAKQTPIAA

SEQ ID NO: 112952 - protein, 315 aa, unidentified
MVEQVVVGIDVSKAKLDVALLPGGEQFTVSNDRHGIGELLRRVSPLAPSRVVLEATGKLEQLAVSELAAAGLPVVVINPAQVRHYAKARGKWAKTDPIDARLIAEFARDLEPELRPLPDAETQALAALCQRRNQLLEMEQMEKSRLQRAPGANQKSIKAMLRFVRRQVEQVEKQIEHSIRHSPLWQAKRELLESMPAIGKVNSSTLLARLPELGQFTRQKICALVGVAPYNDDSGQWHGRRHIAGGRGGVRQVLYMATLSAVRCNPALRDYYQRLLGRGVEPKAALIAVLRKMLTILNAMVRDNTPWRPPCPLPA

SEQ ID NO: 112953 - protein, 444 aa, unidentified
MLRFVGCDVHKRTAVFTILLQDGTVFATYTVPVTREALAAFAERQLAAEDRLAMEATTNTWAVAGVLRPFVKEIVIGNPLKVRAIAEAKIKTDKVDSRVLAELLRCSYLPVVWQPDEETQRLRRLTHRRAALVSDRTRLKNRLHSILHHTLVPLPEYELFSKRGITWLRQVPLAQEEALARESDLRLLELTELEIAELDQLLVREAWQDEKVRLVMSIPGIDYTVAQTCLAAIGEISRFPNAKKLSAYLGLNPSTRQSGPHCYHGPITKQGNAHARWLLVQAAQHLAQYRGPLGQTMRRIVKRKNRNVAVVACARKLAVLLWHVLSSGEPFRYAEPRTLQAKYSRLRIRATGRRRRGGVAKGTPRSPQYGHGRTRAVPSLPQVLAENGLPRVAPLSKGETGMLDRQKLDTFYRELQTPSRIEANTANPQVEEREEDPKSQLTQS

SEQ ID NO: 112954 - protein, 332 aa, unidentified
MEQVIRIGLDTSKHVFQVHGVDGSERAVLRRQLSRGQVETFFAGLPPTVIGLEACGASHHWARVLGELGHAVRLVPPQYVKAYVKRGKNDRIDAEAICEAMSRPSMRFVPVKSADEQAAAMLLSVRDLLVKQRTMLVNAIRGHAAEFGVIGAKGVARVVDVLERARESVPRLAWDLLAVLAGQLEVLEIQLGKIEQQLRTWHRENERSQRLATIPGIGPIGAMTMVLRVPDPTVFRSGRHFSSWIGLTPREHSTAGKQRLGKVSREGDEALRRLLVVGATSVIKLAQRGRGPAWLLALLKRRPAKVVAVALANKMARIAWAMMVSGEVYRAR

SEQ ID NO: 112955 - protein, 494 aa, unidentified
MKQLQKNERSFTMKKRNIYQNRSQELLSLFEEAGNSAKVMCVPMDYAKKDHVVMFCNGYGDILRKPFSVKNSPDGVKYLVDQATRSCRRRGIKKDHVFFGGEDANSYAENFVNTLRSKGWVVAGVNAHDAKEQRANLQASTDRLDLMGIATMLLNCRANCCPAQSGIYRNLRTLVRHRRKLVVMSTEVKNRIHGVVDRLFPGFLNEGKTGIVPFTSSSLYLMEDRFSPKQIRRRKREKLIEILKRFGTSKAEETADRLQQYAAQVLHTPADYVGTLQLSLAQHVKHLRCLQESVNQLEKEIAVNLAQTQGAFLTSVRGIGIVLAAGATAEIGDPNEQKPLNILVSYSGIIPRVKQTGGADGKTYTGKVAKRCNRILKDYVVKSALHIGLHGPEDLMADYKRRDASGQHADFSIGRRYLRMAMCLMRTSQIYLPHRLRKAEAKMEERAGYYLTTWPYLRCKWKKLGALNAAFGKNRPLGLWRQIVQELYDIKLKL

SEQ ID NO: 112956 - protein, 407 aa, unidentified
MEVVHPTCAGLDVHQHTVVACARVGAGSAVTRDVRTFGTTTQELWALSDWLTAHGCTHVAMESTGVYWKPVWHVLEGSVELVLANAMHIRNIPGRKSDVNDATWIAELLAHGLLRGSFVPPAPIQELRDLTRTRKQLVREITQHTLRIQKTLETANLKLTGVLTDILGVSGRAILQALVAGETNPDRLAELARGRLKASRADLVAALHGRVTAHHRFLLQLHLAQIDALEGAVRAVEARLGDALAPFRAAVDRLITMPGVSETVARVLVAEIGVDMTRFPTAGHLISWAGLCPRLDESAGKRRSTRTRPRNPWLKTTLVQGAWAAARKKDGYLRAQFLRLKSRRGPKKAIIAVAASMLTAAYYMLKDGADYRDLGADHFDRRDKAKLAQRLLARLHDLGFNVELRAA

SEQ ID NO: 112957 - protein, 310 aa, unidentified
MTNLCGVDVSKAWLDVWIETAGHRRFANSAGGVAELGTYCRAHDVELVVMEASGGIERAAFLGLWQAGQPCALANARSVRQFAQAMGYLEKTDRIDAMMIARFAQAKRMVATPPPSADQQQLTALATRLRQVTGDLGVQKQRLHSAREPAMRDSLRQAIAFFTAQADDLAARIAALIGQDPLWEALDRSFRQIKGVADRTIAYLLAELPEIGTLSNRAVTKLVGLAPLAHDSGQHRGRRSIRGGRAGLRSILFLVADIARRFDQSLTDFRQRLLAKGLSKMEVRIALARKLLVRLNAKARDTRAALTTNP

SEQ ID NO: 112958 - protein, 371 aa, unidentified
MKEFTKFIGMDVHKATIAVSVAEGNGGELRYVGEFPNTSEAIVKLLKQLRKNDAQLSFCYEAGPCGYGIHRQLTELGWDCMVVAPSLIPKKPGDRVKTDRRDSMSLARLLRAGELTAVWVPDDAQEALRDLTRAREDMKHLQRQAKQRLLAFLLRYGKTYAGKSNWTQAHFRWLEEQKFGQPVQQIVFQEYVEVVKLLSKRVDGIDKTIEGAASESVFWQMIEGLMALRGVSLLTATTIVAEIGDLRRFVAAPQLMAYLGLVPSESSSGPTKSRGGITKTGNGHVRRVLVEAAWTYRFPARKTAHLQRRAERTSDAVQEIAWNAQKRLCGRYKLMGDKGKLKVQACTAVARELAGFIWAIGQALPQPAAKA

SEQ ID NO: 112959 - protein, 423 aa, unidentified
MEHPRIYAGVDTHSDTHTLALIDEYGRPLATQTFTADPTGYERLAAMIGDPDACLGIGVEGTNSYGAALTRRLVEAGYNVYEVLRPKRAVRRRDGKSDPVDALAAARSVLAGDGTSVPKSADGWVEALRALNAERAQLVTAMTALSNSATGLLTTAPEHIRERYRGLRTPIRMRRLAVCRPSGNMVEQGMLVALKAAGKAWKALKEQADLLEKNMRLILEEHARPLLDIYCASTVTAATLAIVAGDNPERIRSEAAFAKLCGACPIPASSGKTNRHRLNKGGNRQGNSALHHIAIVRMRYHQPTRDYVDRKTGEGKGKMEIIRCLKRFIAREAYRALVSIRRGRTPLNKPPAERGRRLRELRVAHGITQQQIGDALGVHSSRISEIERGTRNLPELERRAALWIQTITTPNQPTQHTETFDNV

SEQ ID NO: 112960 - protein, 391 aa, unidentified
MICVGIDVAKDKHDCCIVSSEGEVLQDVFTIPNTMTGFTALFQRICSASDASGKIKVGLEATGHYSYNLLGFLLDKGLTTFVINPLHTHLYRKSLSLRKTKTDKVDARTIASMLMSDVNLKSYTDTAYHNEELKSLSRYRFDKVKERAQLKQSISRLITILFPELEKLVSTLHMTSVYALLSQFPSAHQIATSSLNHLKSLLNNASKGRYDCKKAIEIRDAARCSIGSLMPAKSLELRHTINLIRELDAQIVEIETEIKLIMDELQSPILTIPGISYRMGAMILAEVGDFSRFDSPDKILAYAGLSPSTYQSGQLTSSYSHMEKRGSRYLRYAIFNAAKFVCHWDDTFAAYLAKKRAEGKHYNVAISHAAKKLVRLMYALEKNRLPYKPAT

SEQ ID NO: 112961 - protein, 345 aa, unidentified
MQESFYVGLDLGSSQCYQTVINSDGALRLARSIPTGEHHLRAAFTNLQGAVRVHLEASELSNWVASIIQPLVAEVIVSHPRSLAWIGKDSQKDDKIDARKLAELLRLGRVHQVFRQTDDARRTFKYLVTHYEQLSREQARCKAKIKARLRTLGIIRKDSRLFSISGQTALLDEIESVAIKQMIAQSFAVLNQMLESLAEAKVAMIESANQFREVKLLQTAPGVGIITACRFVAYLQTPHRFSNKRKLWRFCRLGVTRRESNGKRLAHPRLDSAGVGSLKDVSRKVFEAARRTKTDNSFKQFYEMSLLNTKNAVHARLSTQRKILATLRAMWMSNQPFRNDLTEIG

SEQ ID NO: 112962 - protein, 422 aa, unidentified
MSISKLALDASSQDYMNKKSVTYPVLKTLNGGVFMYLIGIDISKYKHDCFIATEAGIPIKAFSFDNDRLGFDLFLETLTSLDQSQEIRIGLESTGHYGSNLKQFITASGYTYLEFNPYLTHMFSKALSLRKTKTDKVDAKTISSMLGSVDYKTLHTRFYHINELKQLVRYRHVQMMNRSKALIEITNILDRIFPEFKPFFNERLSGTAIFILKKFKSRERISKLSNKDYESIKSYSKGKISYVRVQKLKSLALSSVGYETKSDLLLLKLAIKHYEDLSDTLECVDEEIISLMRDIPQTLTSIPGVNLISAAIIIAELGDFKNFTNPAQVISFTGLDTSVNQSGTMETRGHLVKRGSGLLRMTLWQITFSSLRLNPKLYDYYLKKRAEGKHHKVALVHCARKMTRTIYYLGVNQLTFDHSLFK

SEQ ID NO: 112963 - protein, 349 aa, unidentified
MELDTIGIDLGKTVFHLVGLNRAGEVVVRRKFSRLQLLRFTANLRVRLVGMEACGGSHFLGRSLREQGHEVRLMPAQYVKPYVKTNKNDYIDAEAIAEAVGRANMRFVPIKSDEQLDMQSLHRVRDRWVARRTSVINQMRGLLLERGITFRKGRRHAEASLPAILEDADNRLSGLLRMLLAQLHGELRQLQSQIDEADALIAKAAHEQEACQRLMAIPGIGPLTATAVVASIGNGAEFRKGRSFAAWLGLVPKQESTGGKQKLLSISKRGNHYLRRLLVSGAHAVLQCRDKQSAGLSAWLGQLASRVHTNVAAVALANKMARVAWAVLAKSEAYRPPLLLISTEALACN

SEQ ID NO: 112964 - protein, 466 aa, unidentified
MKIFYMGIDVSKGYADFMIIAPNKLPVINSFQLDDTFEGHQALYGILRGFLAVHSGSKILTGLESTGGYENNWYKSLADFQGSLNIQTARLNPLGVMHNSKADLKKNTTDKISARNIAEYLISHPDKVVYQQSDPLFSLRKQWGFVNMLSKQCTQLLNQLNNLIYTANPEILKYCSNKVSDWVLKLLIKYPSADKLKTARFRTVSKIPYLTENKARKLIRDAKRSVASATDSTTNRLIAATARQILHLKGNIAKQTKLMINECTAPEIDLLKSFPGISDSSAIGLFIEIQTVERFHSAKKLASFFGIHPVYKTSGDGASGFKMSKMGRKQPRRTLYMVALASIQCNPLIKELYEYHQEQGKHKMAAIGICMHKILRIIYGMLKHNKPFDPQIDRANRCRNTESINKKPVENPRRRFQDYDSMAPVTRRQRKKRLERGKSHGADYAKSGINDLVPVGNIITKIIEQV

SEQ ID NO: 112965 - protein, 423 aa, unidentified
MMKLKYSICCGLDVHKNVIVATIVTTNKDGISEYLQKSFSTINSDIQRFHNWLIENNCYHVCMESTGKYWIPIFNYLENDIDVCLTHPKYVKAIKGKKTDKKDSKWIADLYKFDLVRCSFIPPKDFRQLRELSRYRFKLVCMKSSEKNRIQNCMTISNVGIASVLSDPFGKTATEIISYLLEHTADSMDEKAVRKLIKKGAKSKSDEIIEAIKGYTIETDQAKKLELARGHLEYLDDMITQTEVELYVRIKPYYEFVEFVSTMPGMTELSSTIVLAETGVDMDIFDDAKHLCSWCGLSPANNESAGKKKSVRIAKAGDYLKPMMVQCALAAIKSKKQPYFAIKYGRIKKRRGHKKAIIAIARMMMVCIYHMVSEKKPFTPTDYEELMNPQNHVERVVLNENNVFAYLESLGYDSSKLVKRNDN

SEQ ID NO: 112966 - protein, 370 aa, unidentified
MKKRSICEQSPKRGVKTRGEQRSDTIGMDLGDKTSRYCVLDEQGEVIQEGSVATTKKGMLQVFGARKRCRIAMEVGTHSPWVSRLLSGLGHEVIVANARQVKLISQSSRKDDKLDARTLARLARIDPELLRPIRHRGEKAQHDLLAIRVRAALVEARTSLVNAARGFSKAAGERLPQCDADNLGTEKMEGLPEGLRERLKPLLEMVEALTEQIKESDGNIEQIARKDYPETELLRQVSGVGPLIALTFVLTVEDPARFAQSRDVGCYVGLRPKRSESGESQPQLRITKEGDRYLRKLLVQGAHYILGHRGPDTDLKRWGVKLSARGGKNAKKRAIVAVARKLGILLHRLWVCGEVYEPLRNHPAPAQVAA

SEQ ID NO: 112967 - protein, 376 aa, unidentified
MSKVRFIGLDVHADTIAVAVAEPDGDVRSMGVIPNQAESIRKLVNKLAPVEALRVCYEAGPTGYVVYWQLTALGVKCEVVAPTLVPTKAGVRVKTDRRDAEKLARCYRAGDLTAVWVPDAAHEALRDLVRCREAAKKDQLRARHRLGKFLLRRGRRPPATMHAWTQTHLAWVKTVHFAHAAQETTLLDYLHEVEHVAERIERLERAIDEAVKTAPTRMRVVIEALQAMRGIALVSAVTIVAEVGELSRFAKPRQLMGYSGAVSSEDSSGPRIRRGAITKTGNAHLRRVVIEAAWAYRYRPAVGAALRKRQAPVSAEVTAIAWKAQHRLHARYRHLLAKGKCKQEVVTAVGRELLGFIWAIGVKVEAGERTGPSAAA

SEQ ID NO: 112968 - protein, 450 aa, unidentified
MRMQPEEIPDDDHELVIERVCAIDVAKASGKVCVRTPHPNRPDRRTSRVWDVSATSRAVTELAEHLIGEGIERVTVESTSDYWRIWFYVLEAAGLDVQLVNAREVKNVPGRPKTDKLDAVWLAKLTEKGMLRPSFVPPVEVRQLRDYTRLRVDLTRERTRYWQRMEKLLEDALIKVSSVVSRLDSMSVRDMLEALIAGERDPRRLAELARGKMRPKRAALIEALTGRFDDHHAELARLLLSQIDALSSHIDTLTRRIDELLAILTDPTRGPDGGYRIGDEGAAAFVNGLQAAERLAEITGIGPVSAPVILAEIGTDMTRFPTAAHLVSWAKLSPRTIQSGATQRGGKTGKGNPYLKGVLGEAAAVAARTDTFLGERYRRIVKRRGKLKALVAVARSILVVVWNLLADPTARFHDLGADYHTRRADTDRRLRNHLAQLAALGYRVTVEPAA

SEQ ID NO: 112969 - protein, 389 aa, unidentified
MLFDHPSDGPAAIRTHIGAIFVSLELSRSNWLVTSLSPGKGEKMSKHGVTAGDVAGLMKLFAGFKRKAAIRTGQNYPIITIQEAGLDGFWLHRVLQQERIESHVVDPASIAMPRRRRRAKTDRLDGETLLRALLAYKRGEPRVCAMVVAPSPEEEDRRRLCRERATLIAERITHVNRIKGLLFSQGISDYAPLRRDRQLRLETLRTGDGRELPPHVRAQIGRELERIELLLEQIKAVEAERDVLLAAARKPASEQAAPDAVTMLLALKGMGANFAAVLWSEAFYRQFANRRQVAAYAGLAATPWQSGGIRHEQGVSKAGNPRLRTTMIQVAWLWTRHQPQSALTRWFKERSPQGRKRAIVALARKLLVALWKYVTQGVVIEGAVMKPAT

SEQ ID NO: 112970 - protein, 342 aa, unidentified
MAYYAGLDVSVKTTAVCIVDSDGKVVKERSLATEPESLADWLAKTGLTFERVGHEAGPMSAWLHEGLARKGLAVVCVEARHMQTALAAMRNKTDRNDARGIAQMMRTGWFRNVHIKSHAAQELRLLLVARRTMIDNRRNIENAIRGTLKVFGIKVGRVSRLKFCDRVSERVAGRPAIAETIAAMLAARDALMGQYHILHRRLRQAAREDAVCRLLMSAPGVGPVVAVTYRAGVDTPERFAKSSTVGAHFGITPKRYASGETDRQGGISKCGDGMVRTALYEAANAVLTRSKRSSSLKAWGLAIARRSGMAKAKVAVARKLAVILHRMWADGKDFNWGGEVNA

SEQ ID NO: 112971 - protein, 452 aa, unidentified
MAKVAKRKQTSKGLRLEVVNPNAAGIDISPKEMQVCVPSDRDGECNRTFGVYTEDLHYIAEWLKACCIDTVAMESTGIYWLPVFRILKESRFDVILVNASDVKNFSGRKTDASDAEWLMMLHSYGLLKPCFQPENIVRTMRNLVRHRDNLIRSASREVLHLQKAMEQMNLKLDNVFSDILGKSGQSVIKAILNGERDPKVLSDLADPRCRTSKEEIEKSLQATRDDEHLFEMRQSDSLYQFYQQLITECDAKINEIAMQYSATVDAPKTELLRSGKYNAKKNRIGFDVEKVAFELWGVNVMRIPGMSRGALLRLVGELGADFKTKFADVKHFVSWANLVPNNKISGGALLSSKVPKKKNPVGMIFRQAANTLKVAKNPLGDYFRHMRAKGGHLQAMVATGKKLASIFYCMVQRKVEYNEKVYCNHRKQELQNKVAYLHKRLQRMESELANCG

SEQ ID NO: 112972 - protein, 320 aa, unidentified
MQTPSVALNIGADVGKDEIVMACAERSFAPRKIDNRRAALLAFLKGLPARSRIGLESTGSYHELLAELAHKLGFVVYVLNPKDTRHYAKAMGLRGKTDRVDAELIARMLAHEHEKLHPWIPPTPEQRQINRLLKRRAKVSRIRAALTQSFKGLKGFSGELKALRQRLDKLLARIDAEVKALIETSVERKQDYARLRKITGVGAVVGSSVLNTLERVPLGSADAFIAFTGLDPRPDDSGQHRGRRRLSKRGPSELRRLLYLAAMAAAKTKTWNPLYEHYRAKGLSTTAALVILARRIARTAWSIYTHKTDFDPKRLTKALT

SEQ ID NO: 112973 - protein, 450 aa, unidentified
MSKRGRSKEKAELRRINPRAAGIDIGSASHWVAVDPSLSQQPVREFAAYTSDLQALADWLVEHEIQTVAMEATGVYWIALFEVLRERGLEVCLVDARATKQVAGRKSDISDCQWIQELHSYGLLKQAFVPEAQIATLRSYVRQRDRWVADAGRAIQHMQQALELMNVKLTEVVSDITGTTGMAIIDSILAGERDAGRLSELRDRRCSRSQEEIARALLGSWREEHLFALAQARDYYRYLGERIAACDARIATAMAACASPEGQNSEPPKLGKRDTSAHPFGFDAQGHCYRMAGVDLTAIAGVGANTVLTVLSETGTDMSAWRSERAFGSWLGVAPNPRKSGGRVVRSTTKPSAQRAATAFRLAARSLSNSKSALGAFYRRLRARIGAPKAITATAYKIAKLFYRMLKTKRPYEDVGQAAYDERFRARRIRSLQRMAIELGFNLVPAEGGA

SEQ ID NO: 112974 - protein, 343 aa, unidentified
MGTYYYIGLDIHKRTISYCIKAIDGSLIGQGKIEADRKSLDEWAKGLPGPWVGAMEATIFTGWVYDFLKPHAVALKVAHPEMLKAITAAKKKNDRADAEKIADLLRVNLLPECHMLSEEIRELRRVLRYRNHIVRTAVKMQNKISGLLMEVGVSYSKRRIHGKKYFHEILERVEEIPPSVKELLKLSRSGYEMFRTFQKRLVETLRTNNLIHDRVQRLMTIPGVCEITALTWVLEIGDPGRFASIRQTVSYCGLCSAQRESAGKEQRGPISKKRNKHLQTMLIEAANLAPHWNEQLAIVHERELKKGNRNRATLAVARRLVAYMLAVDKKQADFKLPAEIQAA

SEQ ID NO: 112975 - protein, 345 aa, unidentified
MITIGIDPHKRSLTAAALDSHSRLLGQLRLAATSQAGRQLLGWAVSNGWSERRWAVEGASGLGRGIAQQLVAAGEPVVDVPAKLAARARLLSTSSARKSDLADACSVAAAALHHRRLRPVVLEDQTVVLGLLSDRRDDLVAERTRTLSRLHVLLADLQPGGAARELSAARAAALLRRVHPITIVDVERKRIAHQLLADVRRLDRQVKIASQAIRQAIRDHGTTLTQVYGVGPVLAAKLVGHAGDITRFPDRDHFASYTGTAPVEASSGDVRRHRLNRGGNRQLNTALHLIAVCQIRDPSPGQVYYRRKLDQAKTPEEARRSLKRHLANVVYRHLVADHRHRTRGC

SEQ ID NO: 112976 - protein, 435 aa, unidentified
MDEVTDEPLYRDRVCGIDIGKAGMAATIRVPSEKNPARRAAETRSFGTTRREVLALADWLRSWQVPAVVMEASGDYWKGPFYRLEAEGFECVLADARQVKHLPGRPKHDQGDSRWLAACFERGAVTSCFVATPEFRVIRLHTRYRRDLTEERTREKQRAEKLLESAAIKLSSVVTDLHGVTGRDIMDHLIAGETSPKVLAQLARARARRKITELEEALEGAEFFTAEHAALLAAMLGRIDQLNAQIAELTQVIERLLAPHEEQLQQAESMPGWGRRAAQDTLAETGPDMNRFPTGAHLASWAGRTPLDNQSGKRKGKARSKKGNRYLAAITGETAVAAGKTATREGARYRRLSRRRGKAKAQVALGNTQLTVYHALLSRPGTRYEDLGPDYYERQRDTRRQIAHHVGKLGALGFEVTLCRIPGPDPAGPASTPAA

SEQ ID NO: 112977 - protein, 402 aa, unidentified
MNAVGIDVSKGKSMVAIMRPFGEIVSAPFEIKHTASDIHSLVELINSVEGESRIVMEHTGRYYEVLAHQLSEANLFVSAINPKLIKDFDNDSLRKVKSDKADAVKIARYALDKWQNLKQYSVMDELRNQLKTMNRQFSFYMKHKTAMKNNLIGILDQTYPGVNTYFDSPARSDGSQKWVDFASTYWHVDCVRKMSPKAFISHYQNWCKRKKYNFSQSKAEEIYGKAKELVPVLPKDDITKLIIRQAAEQLNSASATVESLRTLMDETASKLPEYPVVMAMKGVGSSLGPQLMAEIGDVSRFTHKGALTAFAGVDPGVNESGSYEQKSVPTSKRGSSNLRKTLFQVMDVLIKTHPQDDPVYQFLDKKRAQGKPYYVYMTAGTNKFLRIYYGRVKEYLASLPES

SEQ ID NO: 112978 - protein, 423 aa, unidentified
MLSPRAEKETVMESYKIAGVDVHKKMLAVVVTDAAREGEVCFVRNRFGTMGSDLRELREWLASQQVREVVMESTAQYWRPVWLELEPHFKLHLAQAQSNRAPKGRKRDFQDAERLARRHLAGELILSFVPEPEQRLWRTLTRTKNQLTRDRVRMQNQMESLLEEARIKLTSCVSDSLGLSSRRMLRALAAGATDAAELAQLAEPELQAPPEQLREALSAAPGMELTHRRILKLLLERVELIERQRGELEQILATTLKPYEDAVTRLAEVPGFGVNSAQQVIAEVGPAAATFSSPEELASWMGACPGREESAEVSTSNRCPKGNRPLRRVLTQVAHAAIKNQGNVFHAFYRRLVVRKGHPVALWAVVHRLCRLTWKILHQGVSYEERGRVANPKAVQQRKKRLVRALQALGFQVQLTSLQPATV

SEQ ID NO: 112979 - protein, 357 aa, unidentified
MDKDSTIFVGLDVHKDSIAIAAADPGREAPRFVGTVGPKLAELLKALDRLGDATQLRLAYEAGPTGYALARSLAARGYACEVIAVAKIPRRPGDRIKTDRRDALMLARYLRSGELTAVAIPDARDEAIRDLSRAREDAVRARHKARQQLKAMLLRHGHRYSGKTAWTAAHERTLAQITFDYPAQNLAFAEYRWAVRDTTDRVERLTQALRQQVEDWRFAPVVRAIMALRGIDFVAAAIIISELGDLARFEHPKQLMSFLGLVPSEASTGDSRVQGKITKTGNSHVRRILIESAWAYRYPARMSRDLVVRNQGLPQSIQAIAWKAQSRLCHRYRRFTIRGVHQNKTCVAIARQAAPAV

SEQ ID NO: 112980 - protein, 427 aa, unidentified
MPYKVAGIDVHKRMLHVVVSDVQVDGEYDFTRRVFGSLPEALRSLAAWLVEQQVEEVVMESTAQYWKPVWGTLERYWKLICQTRERALATSGTLHLALALSNRGRRGRKKDFRDAERLVKRLVAHELTLSFVPDVAQRLWRTVVRTKYQLTRNRVQLHNRLEALLEEAHIKLSSLVSDLLGASARRMLEAIVGGETNRETLAALADRGLRATQQQLQDALGVCQELNPVYRRLIKMVLDEVASIDKRIDQLNQEMASLLRPHEDQVKRLAEVPGLGVDSAQQIIAEVGATAATFPSEKHLSSWVGACPGDEESAEVNHSRRSPQGNRHMRRILNQAANAAAKHKGSIFQILYGRYVPRLGHNQTIGIIAHKLCRLVWKILHRGIRYEERGPEVSKVSKQKRTRKMIRQLRRLGYRIEPSPSQSAITA

SEQ ID NO: 112981 - protein, 338 aa, unidentified
MKYSGIDLHSNNCVVVVSDESDRILVSRRVPNSVPSVLQALEPHREEIVGVVVEATYNWYWLVDGLQAAGYQMHLANIAAIKRYEGLKRTGDEADAAYLAHLLRVGLLAEGYICPKPLRVLRDLARKRMQLVRSRTQHILAVENIQARESGSRMNVKQVMRLDEQSVEAMPQLLPEVKLALQTNVAVIGELSQRIARLERYLHERVRLSQDFCLLKSVPGIGQTLATTIMLETGTVARFAKVGNFSSYCRCVDSERLSNGKKKGTGNAKNGNAYLAWAFIEAANFARRHCAEAKRFYERKKARTNNIVATKALAHKLARACYHMLREQKPFEVKRCFS

SEQ ID NO: 112982 - protein, 411 aa, unidentified
MEVVHGRCAGLDIAKKDAKVCVRITGAGRRKTAETVTTWGSTTNQVLALRDHLVAERVTCAVMEATGDYWKPFYYLLEDSGFELLLVNARHVKNLPGRKTDVSDATWLAQLGAHGLVRGSFVPPEPIRQLRDLTRARTAITRERGREVQRLEKLLEDAGIKLSAVASDIMGVSGRAMLEALIGGQRDPAVLADLAKRRLRSKIPALTEALTGRFTEHHAFLTRVHLDLIDRHTTAIDELTARIEVVIEPFQGFRHLILTIPGIGAINADVIVAETGADMTRFPTAGNLASWAGTCPGSNESAGRVKSTKTRPGNPYLQGALGAAAMACAQNPGTYLGARYRRIASRRGPQKANVAIQHSILTAIWHMGHTGELYNDPGADYFTNLHPDRAKNRALHQLEAMGYRVSLNRAS

SEQ ID NO: 112983 - protein, 395 aa, unidentified
MFIVGIDVAKRSHEVCMITSDGQTVQRPFSIRNNCTGYNLMLEKIRKHTNIKSQIVFAMESTAHYWLALFTRLRKDGYHVILLNPIQTSAMRDMFIRKIKTDAKDSFIIAELIRFGRYAESNVAQDRLLALKELCRNRFYLVDMAGDLKRKLIALIDRVFPEYEAQFDTIFCKSSVAVLKKYPTPQKLSNAHLDKLTELLWNSSNGHFGEWKAHELKELARNSFGVEDCDGAYSTLILLMLDQIQSLSGKADALEKEISRLFQSFDTTVTTIPGVGPIIGAVILSEVGDISRFSSADKLAAYIGVDPSVNQSGEFQAAHAHMSKRGSPYLRRCIWMASQVAVQRDPMFRAYYEKKAAEGLKYMTIIGHVTRKMTAVIFAILRDHKVYEPVLPTAA

SEQ ID NO: 112984 - protein, 384 aa, unidentified
MKKATRFVGLDVHAETIAIAVAEPGREGEVRSLGTIPNRPESVRKLVQRLGGAKSIQVCYEAGPTGYTLYWQLTAMGVDCEVVAPTLVPEKAGDRVKTDRRDAIKLARCFRAGELTKVWVPDPAHEALRDLVRAREAAKKDQLRGRHRMSKFLLRAGRRPADDVKAWSADYVRWLRGLTFEHAARQATMVDYLGELDHMAERILRLEQAIDDAVKTAPETLRAVIDGLQALRGIAKLTATTLAVEVGNFSRFDHPKQLMGYAGITPSEYSTGKSQRKGAITKTGNAHLRRVLVEAAWSYRHRPGKGQALRARQRGLPAHLNEIGWKAQHRLHRRYAALQAKGKPHTKVVTAIGRELLGFVWAIAVRVEQDHAKQQPRSAARRAA

SEQ ID NO: 112985 - protein, 433 aa, unidentified
MLKLNYMSTLFVGIDVSSKTNAVYAMDFEENKYISSSFGNNQPGADQLVNMIAECMQKHKNLDTVLIVLESTSVYSVHISNFLSASEVLMPYRPYVFCVNPKAASNYRKSYIGMEKTDPTDAYLIADFGRVGRTKKLEPWRGGQFISLKRLTRHRMHLSECITREKTYMVSNLYLKFSELQLLEGDDKPFGSLYGATSSAVLTEFLSPQEIIDMPEEDLLTFLAGKSRNRISDLSKTSELLRKAARDSYRLDKCMYEPLSISLASSFNCIHAYQKEIKLIEQAIEKCINGMNPNALLILQSIPGIGPIWASGILSEIGDITVFHSSDALAKYAGLYWPKGDSGDFTSEDNKMSKAGNPYLRCYLGEEANSVRKHIPEYACFYARKYAEVTKHQHKRALALTSRKLVRLVFGLLVKNQLYTGEKLDTEYNIESN

SEQ ID NO: 112986 - protein, 338 aa, unidentified
MQFKHFFGIDVSKNTLDLTVLDIQGNQIAYEHLTNDLKSIKKCFLGVLKRHQILMEDCLFCLEYTGIYNLPLVQWLTSLSAHIWLESGSQILKSQGIVRGKSDKVDSLRIAKYAFLNRNEVRLWKAPREIIQHLAMLMSVRSRFIKNKKQMEVPAKELNGFMKKETIRSINKHNKAPLNALKLQIDKIEKEILEVIKSDERIHQLYKIITSVDGVGLVTATQVIITTNEFINITEGRKYACYSGVVPFEHRSGTSIRGKTRVSHMANKKIKTLLHLAAISAIRVKGDIQDYYLRKVAEGKHKMSVLNAVRNKIILRIFACVTQERMFEKKINFCLEKP

SEQ ID NO: 112987 - protein, 339 aa, unidentified
MKVSTLGIDLAKNVFQLHGVGCNGQTVLKKKLTRDKFLPFLMQLEPCLIGMEACASSHHFARVLRQYGHEVKLIPPQYVKPYVKTNKTDAADAEAICEAVARPNMRFVQIKTAEQQAILVLHTERNILIRERTACANSMRAILAEFGIIMPRTLSQLYKKIPEILEEYDNELSPFVRCSVARQLEHLQGVEDQITLIEQELSRWAKTQPACQRVMKVPGVGLMTATYLVASVGNGQQFHSAKQFAAWLGLVPREFSSGGKQRLGRISKRGDRYFRYLLVHGARAVAAVIERHKDNMPWLYRLLNKKAYNVAVVAQANKTARILWSMLVHHTKYRTLSAV

SEQ ID NO: 112988 - protein, 412 aa, unidentified
MLFVGDDWAEDHHDVEIVDDQGRRLARKRLPEGLDGIIGLHALIAEFFPEEWAELGPGEAASRVKVGIETDRGQWVQALIAAGYEVFAINPMSVARYRERHSTSGAKSDAADAHVLAEIVRLDRAHHRPVAGDSELGEAIKLVARAHQSLVWDRTRQVLRLRGVLREFFPAALEAFADLDAADTLELLAVAPDPQRAARVSKSRIAAALRRANRRNVEEKADAIQSVLRAPALRQPAQIQAAFAAIVTSQVRLITVLNAEIVQLGEVVASYFGRHRDAEVYASQPGLGVILGARVLAEFGDDRTRFTDAKARKNYAGTSPITRASGRKKLVLARYARNTRLGDAVQQWAFGSLKGSPGARAYYDALRARNIGHQAALRQLANRLVGILHGCLKTGTVYDETTAWAHHLTRAA

SEQ ID NO: 112989 - protein, 344 aa, unidentified
MDHFAGLDVSVKETSVCILDDAGRIVKEVKVASEPLALLKVLGNPTYCFKRIGLEAGPLSQWLFSALAEAELPVICVETRHMQAVLKAQINKTDRNDARGIAQMMRVGMYRPVHVKTLRSQKLRMLLTHRKLLQSKAIAIENDLRATLRNFGLKVGMVGTMRFEARILELVETIPDLAVLVEPLLVVRRALREQIVILHRRLLAIVRDDEVCRRLMTTPGVGPVVALTYRATVDVPARFRKSKSVGAVFGLTCSRYQSGEIDWSGRISRCGDEMMRVMLYEAAQSMLHSKKWSWLKAWAMQIARRRGMKKAIVALARRLAVIMHRIWVDGTEFRWTREPATAAA

SEQ ID NO: 112990 - protein, 385 aa, unidentified
MTSQRIACKFIPRDYDVFAGLDVDKRSMSVVFADHQGALRTLRMAHNATPLLNYVRKHYPGQRVAFAYEAGPTGFGLHDELVTEDYTCVVVAPSKVPRAPGERVKTNRLDSRKLAESLRGGQLHSIHVPSGVYRNLRHLVQMRDTHVRQLTSSKLRIKSLLLFEGIAFPEEHEKWTARAMRELQTLPCSETVRFKLDDLLDTLHFHFQAAARATKQIRQYCLQEPELQQSIEVLLSLPGIGWIVGSHLVARLGNPQEIKNGRQIAGFLGIVSSEHSTGDKQNRGEITRSGDSRLRNKLIQSAWTAIKRDPELRAFYRRIYQRHPKKVAARKAIVAVARKLTNRIYVVLKEQRPYVIRPDSSIAPLTVEETVGPRERLDAAQNDQS

SEQ ID NO: 112991 - protein, 341 aa, unidentified
MTQITTIGLDLAKRVFQVHGVNAAGKVVLRRQLTRRQVVPFFAKLPGCLIGMEACGTAHHWGRTLQALGHDARLIPPAYAKAYVRRNKTDPADAEAICEAVGRPWMRFVPIKSEAEQAMASVHRIRERLIGQRTMVQNMLRGQMAEFGIVVAKGAWHVKELLAELGDPGPRPSCLPEPLRQALLGLGQLLAELDRQIAALDSQILTWHKASQRSRDLATIPGFGPILSSAMTVRVARPERFAGGRDLAAWIGVVPKQASSGDTLRLGRISKQGDVYLRRLLVSGAQSVLNSKRAKSDPWIRRLLATKPRLVVAVALANKMARIAWAVMVRQTGFRPVPATA

SEQ ID NO: 112992 - protein, 342 aa, unidentified
MQITTIGLDIAKNVFQVHGIDAAEKVVVRKQLRRSKVIAFFEALPPCLVGMEACASAHYWARELRKLGHKVRLMPAKDVKAYVKRNKNDAADAEAICEAVRRPTMRFVQVKSAEQQGGLMLHRTRDLLMRQRTQVINALRAHLAELGITAAQGREGLKELLKIIASDADERLPADAHASLVVLAAELQAMQTLIGLIEKRIVTQHRENKASKRLRTIPGIGIIGATAIADTVTDPKAFRSGRDFAAWIGLVPRQDSTGGKQKLGPISKQGDRYLRRILVVGAHSVLRRAKLNPQKHPWLTQLLARRPFKVVAVALANKMARMAWALLAKGGAYRAPALAATA

SEQ ID NO: 112993 - protein, 401 aa, unidentified
MNSVGIDISKGRSTIAVMRPFGEVVISPFEVRHTDSELSELSELARQLKILDGETRVVMEATGNYHTPVAKLLHGAGLYVSVVNAKLVHSYGNNDLRRVKTDKKDAVKLANYGLDRWLTLPRYITRLLLKNCYRQYRQYSKVQTVLKNNLISLLDTVFPNANRLFSSPVRGDGSEKWVDFVAEFWHCRCVSGKSERAFTNKYQRWCRKHGYNFSEAKAHTIHAEASGHIGVMPKSETTKLLVEQAVAQLRATSAALTALKREMLTLAAQLPEYSVVMGMFGVGPTLGPQLMAEIGDVRRFYSKKALVAYAGLDAPPNDSGDVTGRHKSMSKIGASSLRRTLFLVMSVYLQNAPLDEPVYQFMDKKRAEGKPYRVYMMASANKFLRIYYATVKAYLEALDQS

SEQ ID NO: 112994 - protein, 348 aa, unidentified
MMLIGCDYHPSWQQICWLDTATGETGEKKLEHASGEAERFYRQQPAPVLIGMESTGNCQWFVELAATLGHDLWIGDAAKIRASDVRAQKHDRRDAELILKLLLEGRFPRIWTPSGEEKDLRQLLMHRYKLVMLRARVKNELQHLAMNQGITKKRKLWSKAGEKVLRELPLAPWAGQRRKDLFRIREMLNGQIDLLDQAVVEIAEKNEKARLLMTQPGVGPITSLAFVLTMGDVSRFQRGKQVASYLGLIPREYSSGGHQRFGSISKQGNRFIRMLLVEAAQGAVRCDPGFRNEYVHRCHRKPKGVAKVAAARKLAIRLYWMLRTNTGYPEVVRVESSSRVALVVRHGG

SEQ ID NO: 112995 - protein, 368 aa, unidentified
MKKIAYVGIDYHMNVVAIAVIIEGEKEFYDTIRLKNTDTLIAKYMQKLSHQFTINACYEASSSGYCFQRKMRAWGYHCDVIAPSLVPKKPGSRRKNDFRDARELAQHYANGLLTIVHPPSEQDEALRALIRCRQSLKEAEKRAKNQINSLLLSQGLHWQKSKWTLRHRQWLATLHLPHTYLQQVLDEHRALLHYLEARVQHFDRQIEALAQSDPYVESVKKLCTIKGIRTLAAMILIAEITDFRRFASPRALMAFLGLIPAEHSSGDKQTGCAITKTGNKRCRTQLIEAVLHYVKKPTTRGRLKSALSQVDAATATIALTCMQRLHKRYWALVMKGKEPKVARTAIARELAGFIWALMNQQPAPATIV

SEQ ID NO: 112996 - protein, 458 aa, unidentified
MRTIGIELAVASAHKAIVIDEQGHYVTRLLTVSARAGDLDNLLSRARQGATSPELQAVMEPTGMAWFPIATYLLRKEVTVYLVSGQQVKDFRRFLKKHAKSDRVDARILAKLPQVNPDGIHRLRIPDAPTLACQRGCREMSRLSKQITAISNRLGAIDGFAWPGLRDLVFPDHLSLAARWFRQHWYAPQQVLAAGATTIRQEWLDSKADPADSGDWAMPLVELAHQVVLLYGTDALAVDYAGLQAEICRQQASLAALEDQHHTVRLKTVHPLYRQIHPSRNLETIRGVGQDSAAVYASLIGDPKRFASTELFRGWTGMVPNSKQSGGSESKGLHITKAGPNLIKKYAYLDADVARQWDPQIAAIYYDQMVHKGKHHVQAVCTCATHLLDRVFAVLRDDRPYECRDVDGAVVDSAEARRIVLQQYTVPADVRKRTTKGTRRATADRRAERAQVRGSSPQ

SEQ ID NO: 112997 - protein, 381 aa, unidentified
MTKPYNLSKPLVALDHDSTLVCVIEMSGSSWLVAATVPGVDRRPLQKLPVNPTRLLEQVERWRKEATRAGRTITRTVVAYESGRDGFWLARLLQGHGIEAHVIHASSVAVSREQRRAKTDRLDTEMLMRALLGWLRREPGHCRMVAIPTVAAEDARRPGRERDGLVAERTRLTNTIKAELALWGIQGFKPGLRKAAEHLEALRTLEGEPLPPNTLARLHRLLKRRSLLSEQITAIERSAAQAVERDPTGSNALILLLIKGLETAQMLVHEVLSRNLRDRRAVARYAGLTGTPDESGSKRREKGISKAGNPRVRRGLIQLAWRFLLFQPDAALVRWYRERTAGGTGAIRKTMIVALARKLLIALWSYASARVMPEGVVLKEA

SEQ ID NO: 112998 - protein, 318 aa, unidentified
MNSHHKTESTCPVKYVPLDVSKRRLDYGLEPGRTAAVANTREGIAMLIKRLVVYPQARVVCESTGGYERALLAALGQARIAVSRVHPGRVRAFARAEGLKAKTDKIDVELLRRYAVAMQPRVEVPPSPEVEVLRDLMDHRRQLDEQRVLFSNRRDTAGSTLLGLIEPQLAHLEQSLKEVEARIREHIQGQESLRTKCTRLQQLQGCGPVLAATLLAYLPELGILEDKQISGLVGVAPHPHDSGETVRPRHAHGGRIAVRNVLYMAAVSASQHNPVLSAFYQRLLAEGKPAKVCLVAVMRKMIVVLNRLLKDPNFTLGR

SEQ ID NO: 112999 - protein, 323 aa, unidentified
MNKGIEYFGIDISHLVFDVTDSDGNHYEFKNNGAGFKKFTKLLNHNSHCVMEATGYYHYKLAYHLLESGIKVSVENPLAVKRFIQMKLSKIKTDKSDSKLICEYAEQVELKLWQGNSKNEIECLQMVRSLSVYTKQSTMLKNKLHSEAVLGNPSRVVVSSLKRSLNHLEKEIKNLEDKLLVLVKQVHQDLLTRLGTIPGIGRKTAIMLVVLTGGFERFNSASELCSYAGLTPVIRQSGSSVNGRPRISKIGNQKLRNLLFMCSFNACKYNKACRDLYERIVAKGKSKKLALIAVCNKLLKQAFAIAKSGLIYDDTYRSTLVKI

SEQ ID NO: 113000 - protein, 338 aa, unidentified
MFNYYVAVDWAIANMAIARMTEKSDDIKVIDVPSSIKEMQIYLKNLKGTICLTFEETSTSQWLYTELKEYVDKLVVCDPYRNKLLSEGPKNDKIDAKKLVMLLRAGLLKEVFHSSDKFIELRKIVSGYEDTIKAGVRLKNQRSSMFRSVNKDHKKETELIIDADKFVLGGVDMQIKYYEAEKLRYKNEFARLKKAHPEIKRLCDIPGIADISAVKLVARIVDANRFPNRNSFLSYCGLIKLEKMSGGKSYGKKTPRFCRPLKAVFKTAALAAIDGDNECGDYCKYLIETKKYSDRNARHALSRRIATITYGVMKGNIKYDALKRRNNIERNKMDTSKT

SEQ ID NO: 113001 - protein, 298 aa, unidentified
MFQKCRWILCLIKRLDHSASNDVDGFDVIIAELKQHSIALVLMEATGGLEAAVACSLQTQGFDVAVINPRQARDFARSMGYLAKTDRVDAAMLAQLAEVINRHPERARFIRNLPNAEREMLNTMVVHRRQLITMLTAERNRLYPSHPQSRKSISTIIGVLQDELKCINKSMEVHISTHFKTLAEILGGVKGIGAATIATLLAEVPELGHLSRREISALIGLAPFNRDSGNMRGRRTIFGGRANVRSALYMATIVATGHNPVIKQFYNRLVESGKAKKSRTGSLYAQTPDNPECDDKEK

SEQ ID NO: 113002 - protein, 366 aa, unidentified
MQENSTMQASGSDNFKGPQVTIGLDLGDRSSNYCVLNAAGDILLEDKLPTTSLAMKQLFGRMLRSRIAMETSTHSPWVSRLLTDLGHEVIVAHAQKVGLIVKSRKKDDRLDARTLARLARIDPELLSPVQHRSAEAQIHLTEIRARAELVRARTALVNSARGLAKSYGERLRKCGTQQVGRELAMGLSAELRAALDPLMREIESLNEHIKEYDRRIEKMAKDTYPEVKLLKQVKGVGDLIALGYFLTIEDPHRFKKSRDVGCFLGLQPGRRNSGESEPQMHITKEGDRYLRTLLVQGAHYILGPFGEDCDLRRWGQKLAERGGKKAKRRAVVAVARKLAVLLHRLWVSGEVYEPLRNSQKVARAAA

SEQ ID NO: 113003 - protein, 335 aa, unidentified
MYLGLDVSKNTLDCCLNKDGFFYACKISNNEKGFQKLKAWLDGHGCDETLHCCCEATGNYYEAAAEYLAAHYKMSVENPRKIKAYAVSELKRSKNDKQDAKTIAEFCEEKSRKLKTWKPKNQTEKELQSITRYIARLKQQKASETVKRQTASDNIKDLIDETIDYLGRKIKEAEGRLKTYINQNQELKQKTNNLTTIPGVGIQTASIIMAALSGNNNFKTAKQFTAYLGLDPAEYKSGTSVKGKDRISKVGDCITRAALFSPALVAYRIGTFPRLVANMRQNGKHIMQILTAIMRKLAVVAYTLHKTNTTFEKTKAYKDSTESRLKSPQIETMPK

SEQ ID NO: 113004 - protein, 387 aa, unidentified
MVVIGVDPHKLTHTASALAAGSNEVIASLQIDASLVGYRSLLRWAKAFPQRRWAVENARGLGRHLAQWLLARGEVVQDVPCTATARVRELSRGGRRKNDVIDAAAAASVAALAGEANPVVAEDLTTVLAMLDERRDNVVTQRTRLLNQLHALLRDLLPGGAKTDLSAAAAAAVLANVRPVGPVETARKQLCRDVVAEIRGCDKSVQELTERITVVLAEHGTRLVEVTGIGPVIAARLLGRTRGAARFPTASAFANYAGVAPVEVASAERKRHRLPRGGDRQLNLALHLIAVTQIRMRASTGRAYYDKKIGEGKTHNEAMRCLKRRLADHVWRIMLADERRAGTGPGGQAGATTKSGAAGPTPTASTSERSLPGPATRNPTTTANPAA

SEQ ID NO: 113005 - protein, 411 aa, unidentified
MEAIIERSCGLDVHQAKVVACLLVGRADERPRKQIKTFGTLTRDLLELREWLLSEGCSHVAMESTGIYWTPVYAVLEGTFELVVGNAHRIKNVPGRKTDVKDSEWIADLLRHGLIAKSFVPPKPIRELRDLVRYRRKLVQSRSAERNRLLKLLETANIKLSSVASNVFGASGMLMLKALVEGNSTPAQMAQLAKHLLRRKLVKLELALDGRVEEHHRFLLRMQLERLEQVDAQIQRADERIDLQLEPYREQRELLAQVPGIERVVAAEVIAEIGTDMSVFKSDAHLASWAGVCPGNNESAGRNRSGRHRSGNVHLTTTLVEAAQSAIRKKKSYFRDKFGRLKARRGYKRALLAIARKILNAVYNMLVTGADYCELGETYLDRLDQKQTARHLVRRLERLGYAVQLKPIGTA

SEQ ID NO: 113006 - protein, 333 aa, unidentified
MENIALIGIDLGKNSFHIHCQDHRGKAVYRKKFTRPKLIEFLATCPATTIAMEACGGSHFMARKLEELGHFPKLISPQFVRPFVKSNKNDFVDAEAICEAASRPSMRFVQPRTESQQAMRALHRVRESLVQDKVKTTNQMHAFLLEFGISVPRGAAVISRLSTLLEDSSLPLYLSQLLLKLQQHYHYLVEQIKDLESQLKRKLDEDEVGQRLLSIPCVGTLTASTISTEIGDGKQYASSRDFAAATGLVPRQYSTGGRTTLLGISKRGNKKIRTLLVQCAGIHTKLEHQSGKLADWVRELLCRKSNFVVTCALANKLARIAWALTARQQTYEA

SEQ ID NO: 113007 - protein, 374 aa, unidentified
MSKVIMIGCDLHDKTMLLKIALGRQEAETCSVKNTAAGRAKMIRALKQRAAAAGGARILFAYEASGQGFGLHDELTDAGIECHVLAPTRIARSQRAASQKTDEKDAQQLVELLRAHVLAGNELPTVWIPDPTTRDDRELVRMRLDVAEKMTMIKSQIQSLLKRNHIRRGEAAGKGWTRLFRSWLQCTLCESAASPLGANARLALASLIRQLRSLEEEERRLDEGVNGLAGAARYAAAVEEMTSLCGVGVLTALVFLTELGDLSRFANRRQLAAYLGLAPRSFESGNANDRKGHITRQGSSRVRKMLCQATWARVRWDKQEQQAYGRVVAKNPKKKKIAVVASMRRLAVRMWHRGRAVPPGQPSRSMRLMAHAAG

SEQ ID NO: 113008 - protein, 373 aa, unidentified
MKYTKFVGLDVHKDSIAVAIAKEGREAAESVGTIINSPDAIAKLVRKLGSAENLYFCYEAGPCGYGIYRQLTAAGSTCMVAAPSLIPRKPGERVKTDRRDAKKLAQLLRSGELTPVWVPDEKQEALRDLVRAREDTQEDIIRKRNQISKFLLRLEKRPVHGVKAWTIKYWQWLNSLDFKQAAQGIVLKEYIHALEEAEARKKRLEEEITELVKYSEQAPVIAALQALRGVGLITAATVVTEAGDLSRFDSPKQLMSYVGLVPSESSSGGSRYQGRITKSGNAHIRRVIVESGWHYRRQPAIGAGLKKRQEGQSKEIKAISWQAQHRLNLKFRRLSGRGKPSQTAAVAVARELLGFMWAIAQEIRQKNNLKKIS

SEQ ID NO: 113009 - protein, 335 aa, unidentified
MEYFAGLDVSMAETQVCVMGRNGAVIHKAKVPSTPADIAAELAQLPTCRRIVFETGRMAPMLYHGLRQLGLPVICVESRQAYQALKLLATHKTDHNDARGLAHLARTGFFKPVHVKSLPAHAVRSLIIARKKLVGQRVTLENQIRGLAVVLGVRLPRALSSTFIRQALQASEGIPGLSAAMQGLVAARTAVLAAIVAIDGDIRRMVRASDACRRLMSIPGVGQLTALAFTAAVDDPKRFRRSRDIGAYLGLVPRRHQSGEIDYTGSISKCGDRRVRTLLYEAANVMLTRYKGALKEWAFAVAKRSTMRKARIALARRLAIIMHAMLRNGTEFKAA

SEQ ID NO: 113010 - protein, 406 aa, unidentified
MNYLGIDVSKSTSRYVLLDNDGEKSTKAFTLDNNQQAFTQLLDRLKELNLQPDNLLIGIEATSIWWENIYCFMTEQKFKVIVLNPHQTNKFREALRIKAKTDDIDAYVIAGLLRSGEYAASYIPEETIQILREIVKLRHQLVTNRQNFERQAQALLGLLFPEYEKTAIKNPFGVASLAILKAYPTAKHLAEAKSKNIEKIVRHIKGNNLNITEIKNLLETAQNSIYSGRAKDARGMNLNILLTHVETLLHSIAQLDKRMEDILSPQNPDDAMSFPGANLLSIPGVGPKTLAAILSVVGADGSAYPDGKSFIGYIGFFPQIYESGETRHDNIISNRGPNYIRRALYISAVACLKHNAEFKSLYDRKVSQGKTAKQALIYVAKKLAHLCLSMLKSGEFYNPSRVFMPA

SEQ ID NO: 113011 - protein, 449 aa, unidentified
MSKVSGLTRGDVRRNVRKARLREMVPVSNAVLGIDLGEKKQAMVLADRDGRVLWRRSPQVRVHELGQFLDTAAVRAARDGLAGVTVACEPTGARWMAVQELAGQREMPFVCVQPLVSHVAREQQDLTGDKTDEGDCGLIGRLAWELHCYVPEQISPAWAELRAAGRDRAVQITRATAAKQLIRDQLALTVPGLLDVHSDPLESATWLACLETIMDPRHGGELAAVTAMGRESFAAAAAARLAWWDGRRLGPTAAKMFAALAGPVPVPRMLRAVRRRIAGALEDLKYARTRRARTEAEMITMLGELGIDYERVCQIPGLTPAGLAAILAETGDLHRYESSSSVVKHAGMSPARNQSADFHGKTRMSHRGRPALRLAAWRATWAVLRHCDVLAAKHAALTSRGEDRLADAQARVACAASLLRWIYALIVHATSWDPRIAAGELSHDHAIAA

SEQ ID NO: 113012 - protein, 343 aa, unidentified
MKYIGLDLHKRNIFATVLDGDGKILSRATIRSKKEDISYYLKSQGSGETLSIAMEASYNWLYYYRILEGITDNIVVAHPLKTKIIGESRVKTDKIDSEALAYMLKADMLPRVYIPTRISMENKLLLRSRISLVRLRTSIKNKIHAIIDRNRDSYLSLEGKSDIFCKTGMAALRDIKICNPDYMILTSYLDLIDDINKKIKDIEDEIDKRVAPDSDMELLKSIPGVGRFISFLLKSEIDSVDRFSSKEKFASYAGLTPSVHQSGNKSYTGKITKQGNKFIRWALTEAAQVAIVHSEYFRYYYSKAKAKKGTNSAIVAIARRIAEIVYVILKEKRLYIEKPIIYS

SEQ ID NO: 113013 - protein, 379 aa, unidentified
MEVFIKNCAGLDVHSETIVACVLKGRHENEVYQETETFPTLTKDLFRLLKGLESHEVTHIAMESTGVYWKPVFNILEDFFDITLANAQRIKNVPGRKTDVSDAEWIAKLLRHGLIEKSFVPPVEIRELRDLTRLRKKWIGHLTSEKNRIQKVLESSNVKLSTVISDVFGASGRKLLKRLIKQGYVDEADVEKNIHGRLAPKKQLITDSLFGTLNEHQIFLIRQSWRHIEYLESLVLEIEKRINQLLQNYHEELQLLITILGIKKDTAAVIIAEIGVNMNQFPTSQHLASWAGVSPGNHESAGKRKSTRSIKGNPCIKSAMCEAARAVSRSRNRWLANKYWSLAARRGKKKALVAISHRMLRIIYSMLLNKETYKEPQLV

SEQ ID NO: 113014 - protein, 360 aa, unidentified
MQASTVDTPTAGHCGTIFVAIELSQKTWLVTLHSPDRDRISRRTLEGGDDAGLLALLEGVRTRVAGKLGTAPKVVTCYEAGYDGFWLHRLLEAAGITNFVFDAASIAVEQRARRAKTDRIDGELLLRTLMAHSRGEPRVVRIVRVPSMEQEDARRVSRERDRLVTEQTAHTNRIKALLRLMGMAVSNPRRSDWLSWLAQQRDRQSRPVPPHLMFEVAREHARLMLVREQLAALEQAPTAAVAAAPAPMAERRNLLLRLKGLGAVFAATLTNEVFYKDFHNRREVASYCGLTPSPWRSGGIDREQGSARQATPVPASRRSNSPGCGCGISRTARSAGGLPRALPTRVNGPGASPSLPWRAS

SEQ ID NO: 113015 - protein, 339 aa, unidentified
MDGAYEGKQIVGIDLHRRRSVLVRMTEGGEKLETIRITNDPEYLRAVMARAGEAPEVVLEACYGWYWAADTLTELGASVHLAHPLGVKGFAYRRVKNDERDAADLADLLRMGRLPEAWIAPPPCRELRELVRHRAKLVGLRTNLKCQVSAVLAGAGVQALPSDLFGVGGRALLEHVTLAAAMRAKVNSALRLIDAIDFEIDTFTHLVTTRLRADPGWIAVQTIPGVGPILGAVFVAEIGDISRFRRPAQLTSWAGLTPKHRESDSKVHRGRITKQGSKLVRWAAIEAVQRIGPQTRLGAFRDQVAERRGRNQAKVAAARELLECVFYGLRDHHIRRLAA

SEQ ID NO: 113016 - protein, 420 aa, unidentified
MSPRSEQPFTAYVGIDWADTKHDICVQAAGDTRREFGCIAHQVAAIDEWANALHRRFGGPVAVAVELAKGPIVAALQKYDFLVLFPINPTTLAKYREAFQPSGAKDDPADAELALDLLLHHPERFSALRPQSAAMRSLVSLVERRRQLVGDQNRLTNRLCDTLKQYYPQVLEWFDDRGTVLFCDFLERWPTLRSVRQARTATLEVFFHAHHCRSSRRISARIESIRGATALTDDLAVIGPCRLHVLALVTQLRAVLAAIVQFDREIAAVARTLPDYALFESLPGAGAQLAPRLLAAFGEQRERFRSAEEVQRYAGIAPVTERSGKKRWVHWRLKCPKFLRQTFVEWAAQTVNRSFWAGAYYRQQRAKGSSHQAAVRALAFKWIRILYRCWQTGTRYDESVYLNALRKRGSPLLGNLNLSG

SEQ ID NO: 113017 - protein, 396 aa, unidentified
MFYLGIDIGKSKHVASMIGDDGKVVFKAFSFANTTEGGESLLTKLSVHEATPENMEIGLEATGHYWLAAYSYLHEKGFKIHVINPIQTDGWRKGVEIRRRKTDTIDSMLIADLVRYGDFIESCLPNEDLISLKQLTRFRSWLVDSIADLKRKVICVLDQVFPEYENVFSDVFGVTSKEILLKFSSPSELEGLSVDDLAEILAAFSRKRHGRLTAEKLSVAATRSFGVTFCRDSFTFQLRVLIEQMKHIESQVKDTESEIEAIMDGLDSPITSIPGIGKVTGAVILGEIGNIERFTDPAKLVAFAGIDATVRQSGEFEGSYNSMSKRGSPYLRRALYQSALTAAVGRNPDPILSAFYTKKRSQGKHHGTCIGAVCRKLCYIIYAILKENRKYIVRNP

SEQ ID NO: 113018 - protein, 370 aa, unidentified
MGEYSGAFVGFDTSKTKHAVAIAEGGRGGEVRFLGEIASSPARVERLVGKLASRYDKLHFCYEAGPTGYGLYRQIRELGHDCAVVAPSLIPKRPGERIKTNRRDAVTLARLLRAGELTAVWVPDAVHEAVRDLVRARAAAAQDLRGKRQQLLSFLLRHGRIFSGRQHWTLAHRRWLAEQSFAHPAQQVVFQDAVEAIAEALARLQRLEQQLVAIVPSWSMAPVVEAYQAMRGASFLVAVTFAAEIGDVRRFDNPRQLMAFLGLVPGERSTGETIRRAGLTLAGNRHARRVLVEAAWSYRHPARVSPTLRARLEGLPKPVRDTAWKAQVRLCARYRRLSAAGKKLPVVIAAIAREMAAFLWAIARHVAPAV

SEQ ID NO: 113019 - protein, 320 aa, unidentified
MTILTSSTVIGIDVAKAEIVAYREDLNSTQVIDNTREAIGRWLKTLPAQSSIALEATSIYHLDTAELAHGMGHRVYIVDAYRVAHYRESIGQRAKTDPCDARLLARYLTSEQQRLRIWSPPPHAYKLLKSLLKKRAELIKARVSITLSWSGEPLLKDILDQQMEAFKQSERAIQKLMREVSQEAGIAENIKRCKAIEGIGELTAMGLATAFMRGHFVNGDAFIAFLGLDLRPKDSGKKHSPRYLSKKGDGELRRLAHTAAMAACRSPTWKPYYESYLARGLARTQALVILARKLCRVAFALMKKQSEYRPNLTVQGSPAT

SEQ ID NO: 113020 - protein, 318 aa, unidentified
MNMKTNQNINVGVDTGKYQLDIYISPLDIYFTVENNEKGIKEAVKTIKKHNPDRIVIEATGRLEMPFIIACAEANLPFTIANPVHVKRFAGALGQRAKTDKLDAQLIAHYSEAIQPKLSKLKPDTMQAMSDLVTRRNQLLNMQTMEKNRAQIMPKALLMTIKPVLTLFKNQIIKIEDKIVKLIESCPEYQAKNMILQSMKGIGKIAAASLISNLPELGYINSKQASALIGVAPINRDSGRYKGQRKIQGGRPQVRTVLYMAMMSAMQSNPVFKATYQRLLAAGKPKKVAIIACIRKMIVILNSMLRDGVMWEAPKVIN

SEQ ID NO: 113021 - protein, 355 aa, unidentified
MDSRKYIGMDVHQASISIAVRDANGKLVMESVIETKAATILECIRGIRGNLWVGFEEGTSAAWLYDLLKPHVAQVIVCDPRKNALLKTGNKNDRVDARKLSDLLRAGLLTPVYHGESGVRTLRELARSYLTVTKDLTRVMNRLKALYRSWAIPCAGEKVYSPRHRSAWLEKLSEVGVRRRAEQLYQQLDMLLQIRREARRELLRESRKHPAQELLRQIPRLGPIRVALVIALVQTPHRFRTKRQLWAYCGLALQTRSSAEYRFTGGQRQHSQKLPALRGLNINHNHDLKNLFKSVATNVSTSTGPLGDFYRSLLVKGMKPAMARLTLARKMAAIVLTIWKKGERFDPGELKRQAA

SEQ ID NO: 113022 - protein, 354 aa, unidentified
MPIQNSTKFPDYQKVYIGLDVHLKQWNVSVIQGGVRRKSFQQPPNAEALSHYLQRNYPGMEYYSAYEAGVCGTSVHYALMSVGISNIIFNAADISQTHKERVRKTDAVDAAKIARSLANGELSCIHIPPQWRVADRNLLRLRSTQIQDIKRLKSRIRHYLHTNGIRVPSEFGTRHWTKAFFSWLTATAESLSNTTGEALTSMVGTLSVLLKEHGRLNRRLIELMRTDPYASDFSLLRSIPGVGNVTALTILLECGDLSDFSSAESFCAFVGLVPDIDRSDTHEGQCGITRRRHRVLRYMLTECAWRAISKDAYLSELHTRYTRRMPPVKSIVKIANKLAKIIYWCPVNVFTRLF

SEQ ID NO: 113023 - protein, 463 aa, unidentified
MAKKNTTSRKSKSKARKSVLERINPNAAGIDIGANFHLVAIPEDRAEENIRKFGPFTSDLHRLADWLTEHHIETVVMESTGVYWIPVFQILEERGFEVKLVNAAHVKNLPGRKSDVSDCQWLQQLHTFGLLNGSFRPKDEVCILRTFLRLRDTLVKDCSSHVLRMQKALTEMNVQIHRVLSDITGYTGMAIIRAILTGERNALTLAQMKHPQVKASTEQIVKALEGDYRTEHLFALQTAVELYDVYQLKITGCENKIEQQLEQFESKLDFEQVLEQSGALKVRSAKVRLELQRQAYLTSVCGVDLTRLPGLSTLAVEVIISETGLDMNCWKSEKHFCSWLKVCPDNRISGGKVLSSKSRKTKNRAAGMFRLAAQGAMQSKTAIGAFIRRIRARLGAPTAINAGANKLARLFYRMLKFGAAYVEQGQTYYEERYKDRLLHNLSKRAKEFGFQLTPFEPATVSVS

SEQ ID NO: 113024 - protein, 440 aa, unidentified
MKVLAVLDPRAAFVDVGSERMHVSVAGGTPVVFGTVTTQLHALRDWLLSQDVHAVAMEATGVYWMPLYGVLEEAGLEVSMVNGKQIKSLPGRKTDMADCQWGSTLHAYGLLRAGFVPPADIRRLQDYMRLRGDHITLAASHVQHMQQALERMNVKVHDTIASLTGVSGMAMVRAILQGERDPDRLLALCDQQIQRNKPERVKESLRGTWAPEHLFALRQAVQSWDHYQAQIAECDGAIAALLPTPNDGNRPTSGKRRSSPGVNAPDIDGLHQILRSMCHGHDLTQLPAHTQYSVLQLISETGTQLSKWPTAKHFTSWSGLAPGSAQSGKRRGKVKCRRNRVGRLFCVMARSLARSKNIALGAFYRRLSARRGGLVANIALARKLAELFWRVMVHGLDYVEEGLVRYEEKVLRSKHQALLRLAHQLGRELVPLPDGHAATS

SEQ ID NO: 113025 - protein, 352 aa, unidentified
MNYIAFDSHKRYTLASVEAMSGSPPREARIEHERGAIRAFLEGFEPGSPVAIETMGNWYWIVDEIEAAGMQPRLVHALKAKLMMGQINKTDKLDARGMNRLQRTGALPTVWIPPGPVRDQRELPRTRMTLTGERTRLKNRILATLAKYGLTLEGPSDAFGAKGRTAISRALAQLPEHTRYAEERMLEQLDKVVEQIGLLERRMHETFDKTPELESVMSLPGIGFILGTVIVTEVGDIHRFPTAGHYASYAGVTPRVHSSGGKTRFGRLRSDVNHYLKWAYVEAGNTVSMLRRRWPEKHACQLYERVRARKGHQTAVGAVGRHLAEATFWMLTRNEPYREPAKREKAVSSTKG

SEQ ID NO: 113026 - protein, 343 aa, unidentified
MKHIGLDVDSTTTHISVFSERGREILHTKIATREADLVAFMRGVAGPKRVTMEESQMADFVTRAIEPHVTKVIRCLPQHNRLISESENKYDRADARALAELLFLNKLKEVHHAPWEYRQLREGVRAYWTASRDLSRNKSQLKAFYLFNGVHCTGEKVYASRYRQAFTKQAEKRSANLQILAQLYLQLDFCRTRKAAHIKILKELVQPFQQDERHLKTYPGVGLIGACSLVAYLENGWRLKNKRKLWQYCGVGVRRHESGGKGHRKASRQGNRYLKNAVMTAAATIANRRMADNTLTRMWRAGITAGIPGDRMKRNMARKVAVLVQRSLRFKEEYHDDRVTTTT

SEQ ID NO: 113027 - protein, 349 aa, unidentified
MKAYCGIDLADKRSAVCIVDAAGERCLERTVKTEEGALRRLLEDAGRRWGRMRVVVEASPLAEWAAGVVEGSGHEVEVIDARAARGVVRTKKKTDARDAYTLAQLVRGGWYRRVHRKSAESRVGRSVLRGREALVRAYRGVGSTIRGLLKAHGIRLGKVSRGRFAERVREVVEREVPELAEVMEGLLAVWTEAVVRAEAVEREVALRTGEDEVCRRLRTVPGVGVLVSAAFRATVDDPHRFRRGEEVADYLGLTPRVYQSGQTRYRGRISKEGDGLMRWLLVEAATVLLARGRDCALKRWGQALAERKGKAKARVAVARKLAVLLWRLWVREEVFRPWPRGGEEMAAVA

SEQ ID NO: 113028 - protein, 428 aa, unidentified
MDQVNRNRLEEFRQLRKEVRHSEEYLIVGIDIAKDRHHAFFGTATGKTLLRRLVFSNDHEGFRKLLDYAEALRVQHGLKKVVYGMEPTANYHKPLGEYLINLGRTVVLVSGVTVARNRESLDGRWDKHDGKDSANVADLISQGKCLYYEHPSAELRGLRGLLSLKRRLKKQEHGYRVRIRNHLIAQYFPEMDRGYERLGAEGLSIVRWCLPASQITELDVDPFIERVTSRRITMEKRRRLEEVWEKAGESIGCDAVPGVDHEAKVMVEGLRQIREMIKETEQKIKELCEQFPEYHYILTIPGFGPDVSAKVLGAIGDADRFQNGKQVLKMGGLDLSADRSGKDSDRAIPEISKRGKGDLRYALYQAALVASLQNRDVMIYYTNKIRGREREKGIHIKMRVKLAAKMLLIAWTLMKKKEAFDPTYLNAE

SEQ ID NO: 113029 - protein, 412 aa, unidentified
MTAKDQFAAHVGLDWADKKHDVCVQFKNGDRIFHVIEHTPEALDIWLNELHQRVKGRIAIAVELKKGPVVYALQKYPFVTVFPIHALSLARYRQAFWPSGAKDDPQDAKLALDLMLRYPHKIKAIEADNPDIRLLQQLVEQRRLLVEDKRRFVNRLINTLKQYYPQPLEWFSQRDSSLFCELIIRWPSLQQLKRARSDTVRHFMNAKGGPAVAYTEQRVASIASAIPLTTDKTVIEANALMATALASQIKLAGDLIRTYDERIESLFDTLPDAELFKSLPGMGPCMGPRMLAALGDNRDRFNSAEEIQNYAGIAPVTERSGQKSWVHWRWQCAKFVRQTFVEWTAKTVNSSYWARLYYQGQREKGKSHQSAIRALAFKWIRIIYRCWKTKTRYDEAKYLLALEARKSPLLKP

SEQ ID NO: 113030 - protein, 354 aa, unidentified
MKKSSRMSVIHPHAAGVDIGAEFHVVAVPPDADAAPVRTFQRFTGDLHRMSGWLKTCHITTIAMESTGVYWLPAFEIPEAAGFNVILVNARDAKNVPGRKTDVNDAQWLQKLHSFGLLRASFRPEHDISVLRSYLRQRERLTEYRAAHIQHMQKALMQMNVQLHHAVSDITGVTGLSIVRAIVSGERAPSVLIQYRDVRCKKTPEVLQQALTGNWQPEHLFAPEQSVAFFDFYQEKIRECDDQIETSLLQLSTGTEEPEGVLPSARHRTKQPNQLSFDVRPLLWKITGADLTQIHGFGPYLALKFVAECGTDMNRWPDASHFTSWLCLSPGNKISGGKYCLRKHGVHPVELLLH

SEQ ID NO: 113031 - protein, 332 aa, unidentified
MKFLETIGIDVSKSWIDARMHLALLERRFDNTIAGYKKLISWVEKNLLIPKESILFAFEHTGLYSYGLSSFLSSGGYHFILIPGLELHRSMGIVRGKDDHIDATRIALFAYRRRDEIIPYQMPARIIDHLRHLLSLRDRLVVQRAGYQASLKENAHFLQKNQDPDFFQIHEKMIHYLSKQIDKIDLKLATTIQQDQNMNHLFEMICSIKGVGPQTAYYMIVLTHGFILFSEWRKFASYAGTAPFPYQSGSSIRGKTKVNHMANKKIKSLLHSCALSAMLYNPEMKAYYNRRSESGKSKMSTLNIIRNKILARIFAVATRGTPYVDTHKYAAA

SEQ ID NO: 113032 - protein, 355 aa, unidentified
MNQEKYIGMDVHQATISVAVMDSSGKLIMECILETKAATILEFIAGLRGTLSVTFEEGTSAAWLHDLLKPHVSHLVVCDPRRNALLKDGSKSDRIDARKLAELLHSNKLHAVYHGEHGLRTLKELGRSYLTITKDLTRVMSRIKALYRSWAIPCSGATVYAPRHRAEWLAKILEPGVRLRAERLYQQLDLLQPVRQEARRDLLGESHKHHAVKLLRQIPSIGPIRAALLVALLQTPHRFRTKRQLWAYSGFAVETHDSGEYRFVRGKLVRNRERITVRGLNHNHNHDLKNLFKGAALSASTRPGPLCDFYVALVEKGMRPTMARLTLARKMAAITLTIWKKGVEFDGKQLDRQAA

SEQ ID NO: 113033 - protein, 366 aa, unidentified
MARYVGLDAHSKNCVFVIQDQDGQRIGEGSVPTSVEGFLQLQARYQLPPGTPVALESGTMAFFVARRLMQLGLDPVVIDAHEVRSKALRPNQKSDRRDALELCEGLRRGSYRSRVHVPPEAIERLRETLGRRRHFVRVKTMQVNAVKRLLRSAGLRQLARSLQGASGWDKLLKSVAAEPSLHAFCAAHHAVWLCSHEQVARLERSLQEQQRPFQREVDRLQTIPGVGPIVALTALAVFSDVQRFPTAKHAASYAGLVASTFDSGGRIQHGHITRRGSSELRSMLCEAAHHAWRRTNPLHPYFSSLCIRRGYKMAVVAVAHRLCRIIYSMLRHHADFDLARLGVEQGRFERTTVHHYRRASRTVVTA

SEQ ID NO: 113034 - protein, 337 aa, unidentified
MQITTLGIDISKTVFQLHGVDAQGNVRLTKRVSRGKLLSVMADLPPCRVGLEACGGAHYWARELTQRGHEVKMMAPQHVKPYVHGNKTDRRDAQAICEAASRPYVKAVPVSSMLQQDIQTLHRVRQQCLKSRTALVNQLRGLLAEYGIVISKGIHQVRKRVRGILAEPDNGLSELCRDVLQDVYQRVIELDTKMTAYNARVVRLCQQIEPCQRLSQVSGVGPLTATAFYAAVGNGQTFDNGRHVSAWLGLVPKQHSSGERTVLLSIHKRGDPYLRTLLIHGARSVVYRAAGKSDARSQWIQRLQARRNTNVAVVALANKTTRILWAMLAKGTTYQAA

SEQ ID NO: 113035 - protein, 487 aa, unidentified
MRSVFPKACPAIQKIFEEASAKKIMIVPIDYAKRTHTAMACNGQGTPWRAPFSVENNPAGVAFLRQAIEKLRRKHGVAPEHVLVAGEDSCTFTFNFIHALCIQGLTVIGLNARDAKIERSTLVASTDKIDLQGVVSLILKRQGRLINAEPTRPSSIRQLTHHRTSLVSAQTASKLRIHALADQLLPGFLDPQQSIISPFSEASLWLMSERFSPAGIRSRRLDTLESKLRDFHTEKPLEAAEALKRLAQSVLPPPAGLCEALQYNLAREVEIYAAINLGLNRMTTEIAKQIAPTSAALLTTIPAIAIPSAAGFYAELADPNRQRGTKRMTSYAGIVAALKQTGGPEKEARTRRRKRRANQDLKNHLYMLVRQIKLNGHPEFKEDYARREEAGQDVRFTMARRMLRIILFMLNNNAFFLPPSLLDNPSPHQLRDYYQKGWKGILIKWRNAGAIKEAFAPNAPLEQWRVMINELYGLNLSKSSPQHRKET

SEQ ID NO: 113036 - protein, 311 aa, unidentified
MYYIGIDVSKKDLSVFDGKDLKFINQEGLTSFKKYLKKKYNLSEVAIIFEPTGVYSLYLKEFCAENSIKAYIVNPKKSHNFTRALGRRSKTDKIDARILYQFHKLIDLKDIKVPKVDQQAKALSGYLVSYEFALKQRISLSHHLDSLRDKRLIALIRKDLKRAKKLEDRIFNDIKEYLDKNQNLKEDYQRLSTIPGIGEKAAIALLTLFKTYQGTNRAQITALAGLDPVRRESGTSVKGKVRISKNGKRVYRKILYLPTLCATVHHQKIRVFYQRLLANHKPKKLAIIASMRKILLIAHAMYRDKTEYITV

SEQ ID NO: 113037 - protein, 374 aa, unidentified
MTPATNTVHVAIELSNTVWLVGTRLPGAEKPRMHRLAAGDVTELLRLLAELRSRAAARLGQPAAVACCFEAGRDGFWLHRFLLAHDVTSHVIEPTSILVNRRARRAKTDRLDAEGMLRILAAYLDGDWQVCSMVRVPSPAEEDAKRPHREREQLVQERTRYENRRLTLLATQGIRRRPSLRTWERDLAGLRTGDGRPLPKLLSRELDRLRRRLVLTMELIRELDAEREETLEATADEPACQKIAVLRRIRGVGENFSAVLVREVLYRPFANRKQLASYVGLTPTPFQSGSIDRDRRIGRAGNPRARTTLVQLAWLWLRYQPGSALAAWFRGRVGTLAGRTRRIAIVAMARKLLIALWRYVETGQVPDGVVLNAA

SEQ ID NO: 113038 - protein, 387 aa, unidentified
MQYPSDTSRCLAALDQDTTLIAVIEMSLSAWLVASVVPGIERQPLKKLAADEHALLKLLHRWRCEAAKAGHKITRIAVAFEAGRDGFWLARWLRAHGIEAHVIHSSSVAVPREHRRAKTDRLDTEMLKRAFLGWLRGERDHCKTVAIPTLAEEDAKRPNREREGLVGEAGRLVNRMKAVFVRLGIRGFNPKLKKAAERLDALHTPEGELIPPNTVAALRRDMERLRLVREQIRQIEAARQERLQSAPGEGAHAMVRLLASVRGIGIETADMLVQEVLSRELRDRRAAARYSGLTGSPDESGRRRRREKGLAKAGNPRVRRGMIQLAWRFLMFQKNSSLAQWFHLRTQNAPRTRKTMIVALARKLLIALWRFVREGVVPEGLLLRPVG

SEQ ID NO: 113039 - protein, 470 aa, unidentified
MTHNRRRSPGKPRVSPTVLDRINPNVAGIDCGAAEHFVAVPPDRDGTPVQAFQTFTGDLVRLAEWLTACRVQSVAMEATGVYWIPIYEILEARGFEVLLVNARHLKNVPGRKSDVSDCEWIRELHSVGLLRGSFRPPDALVALRAYLRHRQTLIESAGTYVQRMQKALIQMNLQLPVVISDITGVTGLRILRDIVAGQRDPAQLAQHRDHRCRASKAEVMAALSGHYRPEHLFVLQQNLELFDACQARLAACDLAIELHVHTLVADVVPPDAPLPAPRVTRKPRENEPRFEIRTPLHHLTGGIDLTQIDGITPYTALKLISEIGTDMTRWPSDKHFTSWLTLAPKNKISGGRLLSSRTQPSANRAAAILRMTVMSLGRTDTALGAFYRRLAARIGKPQAITAAARKLAILVYRALKGQLIYRDVGAAIYDIQQRTRLLRRLRRQAASLGFELVNRAPGELLPGNAAQSAP

SEQ ID NO: 113040 - protein, 313 aa, unidentified
MIVPLRCVGIDVCKPYLDIFDEAVGTPERIANAPQAIAQLVARWRCDVLVVFEATGVYDLDLREALRRSGIRFARINPARARDFARASGQLAKTDPIDARTLAAFGRAMQPATEQAVTPAQSALARLAKRRDQLVAMRAQEKNRRSEAEDRAMAERISRLIEVLDDEIVEIEAEISALIKAEPVLAEQAQLMRSVPGVGPVACMQLIAQMPELGHLGPKEVAALAGLAPFNRDSGAYRGKRKIGGGRKRVRDALYMAALNAVRRADRFKIFYNRLRQAGKPAKLALIAVARKLLTILNAMMRDRKTYTVAPST

SEQ ID NO: 113041 - protein, 414 aa, unidentified
MGSEKPAPTRFVGLDVHKFYLIAVFLDAELNELCPPQRVQLDHLQAWITGTLQPTDAVALEMTTNTWEIHDALLPQVHSVTVVHPPHVALITRAQVITDKIAARCLARLLAKGLLVGIWVPPQAERDRRALVAQRAKMVRLSTQAKNRLHSLLHRHAIPLPEKGNAFAPELRQWWMGLPLTALEKGRVACDLDTLTFARAQIGALEKLMVNVAAADDRVPLLIQLPGIALVNALAILAAIGDISRFKEERHLVGYAGLGARIHDSGLTTRTGRITKSGRRDLRAAMVEAAQTAANTHPRWKAELARLEPRLGRNKAIVAIARKLLVGVWHVLTKQVADRHAEPARVARKLTQYAYRLGQANRPLGQTAGAWVRTHLDRLGIGRELDAVPWGPGRKVPLPPSTLPAPAQEGCAVA

SEQ ID NO: 113042 - protein, 337 aa, unidentified
MPTLTIGLDIAKNVFQVYGVDRSGRPAIQRKLRRADVLKFFSKVESSLIGIEACHGSHFWARELTKLGHTVRLLPTQYVKPFVVGGKNDANDASAICAAVSRPGIHPVPIKSAEQQSLQSVHRMRERLVHERTAKSNQIRSMFAEEGFIFPIGIVQLRQGIMALVGDADAHITILLRRLGSMYLEQLAALQRWIDELASEIADIFKRNESCQRLATVPGIGPLVATALFSGVGDPLQFKNGRQFAAWLGLTPKQRSSGGKSKLGGITKHGDTYLRTLLVQGARAVMRFVGRRDDRHSCWIKAVMQRRHVSVAAIALANKTARIAWAILASNDSFKLA

SEQ ID NO: 113043 - protein, 391 aa, unidentified
MIYIGIDVAKDKHDCFITNSDSEVLFKAFTIANNLDGFNDLYQKIESVMDDVTKVKVGLEATGHYSYNLLGYLIDKGLPTYVINPLHTNLYRKSLSLRQTKTDKVDARTIASMLMSDVNLKSYSDTFYHNEELKSLTRYRFDKVKERAKLKTSVSRLVCILFPELEKLVPTLHMASVYALLSEFPSAKHVATAHLTRLTNLLSESTKGRYGKDTAITFRDSARASIGSNMPAKSLELKHTIKLIQELDSEIDEIENEIKIIMDEINSPILSIPGINYRMGAMIIAEIGDFNRFDSPDKILAYAGFSPSTYQSGQLDGAYAHMEKRGSRYLRYALYNATKYVCHWDPTFAAYLAKKRAEGKHYNVAISHAVKKLVRVIYHLEKTKQQYIKAA

SEQ ID NO: 113044 - protein, 349 aa, unidentified
MAMTIVESTGLITGGVDTHLDVHVAAVVDANGGVLGVESFVTTPDGYRELHDWLVGFGAVARVGVEGTGAYGAGLARHLRGRGVVVIEVDRPNRQERRRNGKSDELDAIEAARAALSGRASGIAKSADGDVEAIRALLVARRSGRNVRVKYMNQIRHLGFTAPDELRERFRAVPADQLAVTAAALRPTVGSDTVVYATKLAIATLGRRVLALDADGKRLDDALEVLVRRRAPRLLEVHGVGTHTAAILLVAAGDNPHRLKNEAAFAHLCGVAPLPASSGKTQKRFRLNPGGNRQANHALWRVVFTRMSGDERTRTYVARRLAEGRTTREIMRALKRYVARELYPHLVAG

SEQ ID NO: 113045 - protein, 433 aa, unidentified
MLKINYMSTLFVGIDVSSKTNAVYAMDFEENKYISSSFGNNQPGADQLVTMIAECMHKHKNLDTVLIVLESTSVYSVHISSFLSTSEVLMPYKPYVFCVNPKATSNYRKSYIGMEKTDPTDAYLIADFGRVGRTKKLEPWRGGQFIALKRLTRHRMHLSECITREKTYMVSNLYLKFSELQLLEGDDKPFGSLYGAASSAVLTEFLSPQEIIDMPEEDLLTFLAQKSRNRISDLSKTSELLRKAARDSYRLGKCMYEPLNISLASSFNCIHAYQKEIKLIEQAIEKCINGMNPNALLILQSIPGIGPVWASGILSEIGDITAFHSSDALAKYAGLYWPKGDSGDFTSEDNKMSKAGNPYLRYYLGEAANSVRKHIPEYADFYARKYAEVTKHQHKRALALTSRKFVRLVFGLLVKNQLYTGEKLDAEYNIESN

SEQ ID NO: 113046 - protein, 341 aa, unidentified
MPIVTIGIDLAKNVLAIHGVDEAGKAMLIKPRVPRDQLVALIAQLPACLIGMEACSGAHHWARVFQQHGHTVKLMAPNLVAPYRMSGKRGKNDAADAAAICEAVTRPSMRFVPLKDEHQQATLCLHRTRQGFVEERTATYNRLRGLLSEFGVVLPQSPEKLRRHITEHLDTLPGWAKHSISDLLDHAGNIEDRLIEYDRAIAGIAREDARSRRLMQLRGIGPTTASALLASIGAGHDFRNGRQVAAWIGLTPGQYSSGGKARLGSITKAGDAYLRGLLVNGARAVIASLGEKQDRFSRWVRTLVERRGYWRAAIAIAAKNARLAWASLKYGDDFKLEPVAD

SEQ ID NO: 113047 - protein, 368 aa, unidentified
MKQTAYVGIDYHISKLTVAVMLEGEKDFHSTVHLANKTKMITKYLDKLAEQFQLKICYEASGSGYHFQRLLCSRGYHCDVIAPSLIPQKAGDRRKNDFRDARELARNYASGQLTVVHPPTQYEEAVRNVVRCRLDFKEKQKRTKQQINGLLIAQGHHWPKSKWTRQHRQWIAQCTFAEPLVQQVLQEYLAHLEYLESSTARLDQQIAAIAASETYAPSVKKLCALKGLKTLSAMILIAEITDFRRFANPRALMGFLGLIPSEDSSGDKRRYGSITKAGNRRCRTQLIESVRHYIKQPRMSRQMKADCAQVDPLSASIVHKCMHRLHKRYWTLTMRGKTRNVALVAIAREFAGFIWALMTQQGAVAQAA

SEQ ID NO: 113048 - protein, 415 aa, unidentified
MKKHSNSPKKSESRSKRAKLRGPVQQDTKEVLAELVGKLREKLDPKVGAASAGEEHQQGRPRPNLDRLTVGVDLGDQWSQYCILGLEGETLAEGQLRTTKQDVSEFFEALNAARVVLEVGTHSAWVREVIHSYGHEVLVANPRLMEGSKRRKRKNDRIDANKLARLGRVDPQSLHPMQHRSAEVRQDLVMLRARDALVAARTELINATRGLVKSMGTRLPKCSSPSFAQKVEEAVPAEIREALLPLVRMTAELSDCIKGYDEKIEKLASEKYGHTALLRQVKGVGPITALAYVLTLENPERFVKSRDVGPYLGLVPKQEDSGESQPQLGISKAGDTMVRRLLVGSAQYILGPFGPDTDLRRYGLRLCERGGKNAKKRAAIAVARKLAVLLHRLCASGEVYEPLRPALSTPITAAA

SEQ ID NO: 113049 - protein, 408 aa, unidentified
MKALHRRCAGLDVHQQEIVACRRIVGGRKVQTEVGRFPTTTRGLLELADWLEDGKVTHVAMEATGVYWKPVWHVLHGRFTLILANAAHIRNVPGRKSDVNDATWIAELLAHGLIRASFVPPQPIQELRDLTRTRKELTREIVRHTQRIHAVLEEANIKLASVITDIVGFSGRRMLKAIVAGETDARRLAELGSSRLAAPREALVAALDGRIRDHHRFLIDQHLKTIEQIETTIGEFDARIEAALAPFRDAVERLKGVPGISRTAAQIVIAEIGVDMSQFPSADHLISWAGLCPRLDESAGKRRSTRVRKGATWLKPVLVQSALAAGRKKNSSFKTRYHALKGRVGPKKAAVAVAANLLRVVYHMIKDGTCYQDLGEGYRRPHNPARAAANLANRIRALGYQVDISRAA

SEQ ID NO: 113050 - protein, 298 aa, unidentified
MAVRPFGDALEIPNREDGIADLVKRLRSLEPTLVVMEATAGYETPVAVALYRVGIPVVISNPRLIRSFARATGRLAKTDLIDAGVIAHFAEVIRPEPRRMDDPDEARLGQLVTRRKQLLRMIVMEKNRVSKGPMEMRKDIQKHLDWLAKELERIDKALSDFIQKSPIWRAKDEILQSVPGIGKVGSHALMSDLPELGKLNRKQIAALVGVAPLNRDSGNYKGRRSIWGGRAQIRTVLFMVAVVASRCNPVIREFYQRLCNAGKPKKVALTACIRRLLAILNAMMRNGTRWGEFKPAVT

SEQ ID NO: 113051 - protein, 338 aa, unidentified
MHKQSLQEQVWCGIDVSAAELAVAVLDGAGIQQRTFANRRAQHRALIRWLQQRGAPVRVCLEATGMYSLDLAWALAAAQGIEVAVLNPKLVCRFAETLRRSKTDPADAQVLAEYARRMPFLAWTPPPPAALRLRAITRHLAALVKQHTAVGNQLHAAQASALVPACVRQDLRRTQRGLERSAQRMRREALSLLRQDPQLARRRALLETIPGIGETSALYLMAELMLLPPGLGVRQWVAHSGLDPCHHQSGSSVRSPSRISRRGNRYLRQALYMPALVAVRHDPYLGGFYRALLERHKKKLQALVAVARKILHAIYGMFRHDCSYDGSRLFSHPALSPP

SEQ ID NO: 113052 - protein, 413 aa, unidentified
MDVFCGIDWAEDHHDIALAGRDGQLLARRRIGDDAAGLAQLVELLAAHGDSAEDPIPVAIETPRGLLTACLRATGRAVYPINPMAVARYRDRHSVAGRKSDHGDAVVLANILRTDAHAHRPLPADTELAQAIAVLARAQQDAVWARTAAQNKLRSHLREYYPAFLGAFADARGGITRPEARALLAAAPAPAAGAALTLSQLRSLLKKAGRRRGIDAEATRLRQALRTQQMRQLPLVEDAMGRQALALLRQLDAACASADDLEQATIESFNQHPDAGIITSFPGLGPIAGARVLAETGDDRSRFADAKGLKAYAGAAPITRASGKTTAVLHRRVKNQRLAAAGYVWAFAALTASPGARAHYDRRRADGDRHAAAQRNLFGRLLGCLHHCLATRQHYDENTAFPTPVTATQATAA

SEQ ID NO: 113053 - protein, 455 aa, unidentified
MPASPHEVEVIDSDDEERVLGIAAAIDVAKASGMVCVRSPHPSIEGRRMSRVWEIDSMTNTILALGDDLVAMGVERVVLESTSDYWRPFFYVLEAAGLSVWLINARDVKQVPGRPKTDKLDAVWLAKLNERGMLRPSFVPPREIRVLRDYTRLRTELVEERSRHAQRLEKLLEDALIKLSSVASDLLGVSSRHMIEALIAGERDPEILADLALKRLQAKRPALIQALTGRFDDHHADLARVLLDQIDACTDKIDRLTGRIEQLVAELPDPPADHHDGGVVDAVPVGRDPQARRLTPVERLDEIPGIAPRAAQIIIAEIGLDMSRFPTPDHLVSWAKLAPQTVQSGPRTKVGKTGKGNRYLKGILGEVAITASKGDTFLGERYRRLVRRRGKQRALVAVARSILVIIWHLLNDPDARYIDLGSDYLARHVDPARKARDLVRQLHALGLDVTVVPAA

SEQ ID NO: 113054 - protein, 343 aa, unidentified
MGILGGLDIHRRQITFDYLDERSGETRHGRIAPADRMLLRGWLQKLLADAGKPAAFAVEGCTGWRFVVEELQRAGVEAHLAEPADTSAARGPKRRAKTDRADARLLRELLADGRLPESWIPPAQVLEMRARLQLFRDLREQHTAWVQRVHAILLHHGVPAVTGGLLGADNRRRLEVGEGLSPAGREAVAAALRILDALDAELDPLRKQITAFAARQPGCRALQADYGIGPITATALWTELGDSRRFSASRKAVRHTGLDITVHSSDGKRSAAHLSRQGSPLLRWALFEAAQCAARPGSPDHAYYRRVAERVGGNRAALSVARKMVRRAHHTLRALGDQALAPV

SEQ ID NO: 113055 - protein, 338 aa, unidentified
MIVIGVDVHKQSVTAVAVDDAGRTLDERTVPVGSDELVGWASMLGAERLWAIEDCRLLTPWLERQLLGLGEELVRVSPKLTVPERRAGRTRGKSDPIDALAVARAALREPDLPRPQPGERVHREIKLLVDHRDDLVDERRRTQQRLRWHLHELDPTLVVPLRRLDRATQLERVGRWLARREQDVQVRIARELVARCRSLTKAIDELNQELEQRAAAVAPALLELPGCGAITAAKLLAEIGPISRFKTDAQLARHSGVAPLEASSGKNQRHRLDRGGNRQLNAALYRIAITQSRYHPAARAYLERKQAEGKTRREAIRCLKRLLARTVFNTLKASPALT

SEQ ID NO: 113056 - protein, 344 aa, unidentified
MTQYVGLDVSLKMTALCVVDHDGAWLAEGKVASEPGALAAWLAVHAPEACRIGLETGPLSVWLWNELKERGLPVHVIDARHAKAGLALQTSKTDRNDARGLAQIMRTGWFREVRVKSKAAHLLRALLASRGMLVATRRDLENQIRGLLKTFGLVLGTARHGRFEVRLRDLLTAEPGLSRLIDPLLEARRAIIEQIEHYDRQLLTIARHHPAVARLMTVPGVGPVTAIAFAATIDDPTRFRRSRQIGAYLGLTPRRYQSGEVDRRGHISKAGDGLTRMLLFEAANALLTRSRKPCALKAWAEAIAARCGRKKAKVALARRLAVLLHRLWCDQTTFHPDIVQPVAA

SEQ ID NO: 113057 - protein, 332 aa, unidentified
MEEITTVGIDLAKNVFSVHAVGSRGEVVLRRTLSRAKLSELIAQLPPCLIGMEGCSGAHEWARRFAASGHTVKLMAAKFVMPYRKSGKNDGNDAEAICEAVARPNMRFVPVKSLEQQSDLTLHRVRQGFVEERTATLNRLRGLLTEFGHVLPLRASEVHRRVPQLLGKLPTRVAACARDLLEHAARLQAKTLEYEHEIKIHVRSNALACRAQTRLGIGPITASALVATVGNGHDFKNGRQFAAWLGLVPRQYSTGGRTRLGHITKRGDPYLRTLLVMGARAVLQRAASLTDPLSRWALAVRERRGYHRACIAIAAKNARVAWALLAKEPVAA

SEQ ID NO: 113058 - protein, 382 aa, unidentified
MTAVGTDVSKGKSMAAALRPMGEVALLPQEFLHTEVGLEQMAYAIIALGEDTRVIMEATGRYHEPVAAALHEYGFYVCVLNPLFIKQSGGGSIRKVKTDKADAMKIAKYGLDNWVDLREYTPMDTVRQQLMLRSRKYNLSMKTEVALQNNLISMTDKTFPGVNELFSSPERADGHQKWVDFVMTFYHCDCICRVSENAFAERYQKWCKRKGYHFSAEKAQDVYLGSCGHFTTLPKNDNTKLLITTAAQQLLAGKMTLAALRTEMTRLAKQLPEYDIVRAMYGVGETTAVQLMAESGDVRRLPRRSASVGSAGVDPAVDQSGKHSAKSVPTTKRGSPHLRKTLYQIVCTYLKKSPVDEPVYQFLDKKRSEGKPYYVYMTAAQN

SEQ ID NO: 113059 - protein, 427 aa, unidentified
MKVVGRAIGLDVHLDFCEVAIVEAGELRSAGRIETTPERLELFAASLGPEDRVALEVTGNAWEIARILEPHVAKVIVVSPADTGIRQARAKTDRLDARTLARLLAAGELDAVWTPDEWTRVMRRRLSRREQLVRSRSRAKNEIHAVLMRRLKGRPPVSDLFGVKGRRWLRELEFPVEESETVDGCLRHIEFLDREIAEVERLIATQALDSAEIRRLMTVPGVNVIAAATFMAAIGDIRRFRTQRQLVGYLGLDPKVRQSGIAPAKSGRISKQGSASARWALVEAAWSVVRQPGPLHAFYQRLRVRRGSQIATVAAARKLACLFWCLLTRGEDYAHQQPSLTAKKLRLLEIRAGAPTQKGTPTGVWATRQAMREGERRLAEQAEASYTRMVRDWQAASPSAKVGASVTPGRASQKPSKGKVARQTTSP

SEQ ID NO: 113060 - protein, 459 aa, unidentified
MQTEVPCFIPAALSALQQYGTSPLWDFMNEPDAGVISPQISMQDMTHKDMRNCLYINRKAGANTMFIVGIDIAKRSHEAIIIAEDGQVVRKAFSFRNNCTGYNLLLEQVRRLTLVKSQIVFAMESTAHYWLALYARLLKDGYAVMVLNPIQSHSLRELYIRKAKTDARDSLIIADLVRFGRCKASNVPQDKILALRELCRSRAYLVDMAADLKRKLIALLDRIFPEYESLFESVFSKASIAVLSKYSTPQKAKNAHLGKLTDILMESSNGHFGEWKAHQLKEAACSSFGIDDSGGVYSTLLGMFLEQILSLTAQADSLEKQISVFFQEFNNPLTSIPGVGTVLAATILSEIGDITRFSSADKLLAYAGLDPSVKQSGEFKSNQNRMSKRGSPYLRRAIWLASTVAVHRDPMFQTYYEKKISEGLHYMNVIGHVSRKMTAVIFAVLRDGQPYQPILQSAG

SEQ ID NO: 113061 - protein, 374 aa, unidentified
MSSCEDITFVGLDAHVRNINVAVILPGSSEIDAQWQMTHDERSLRRLAKKLLAMAPGAVQVVYEAGPCGYALKRHLEALGLCCEVVAPSLIPVKPGERVKTDRRDARKLASLFKAGLLTVVHPPNEAEEALRDLMRAREDAQKDLLSARHRLGKMLLRYGLQFLETKNWTRKHRAWLQGLRFEQPRAQQVFDNYLLAIEQVEERLKRLEAQIEEAAQEEAYAERVGWLCCLRGINTVTAMTILAELHGFQRFAHPRELMAYLGLVTSEYSSGGHTKRGSITKAGNSHVRRVLVEAAWNYRHRPAVSAQLRQRREGQPAAVLAIADRAQQRLYQRYYRLKEGHRKPHNVVVVAIARELVGFIWAVLHHRDVAQAA

SEQ ID NO: 113062 - protein, 430 aa, unidentified
MEQIPQQPIVKAELEPEFAAFVAIDWADQKHYWSLKVAGQQALQRGSLDNTPEAVEVWIMELHLRFAGRPLAVALEQRRGALAVMLSKYAHVHLYPVHPTTLAKFREAWYPSRSKSDPVDADLLLEILTAHRSRLRRLDPDTVEMRLMQTLVENRRKLVDERTALSNRLTDLLKLYFPQILGWFDEVISVVVSDLLEQWPSLQELQHAKPAKLEKFLREHHCLEIPERLNQIRQAIPATYDRALMDSAPVLVTAWVRQIAVLRDSIRQLEKRIAELAAHQEDWPIFQSLPGAGAALAPRLMAALGTQRDRYASASELHCFSGIAPVKEASGNTQWVHFRWACPKFLRQTFHEWAACSIAQCEWAKAYYQQQKARGKKHHAAVRALAFKWMRILYRCWKDRQPYREEIYLASLAKRRTALVAALAQAVQMS

SEQ ID NO: 113063 - protein, 346 aa, unidentified
MNQIIRIGMDTSKHIFQLHGVDAAEQPVLRKRLRRKQVLAFFAKLRPTVIGMEACGASHYWARELGRLGHEVRLIAPQHVKPYVTRNKNDGRDAEGTCEAMSRPTMRFVPVKTAEQQAALMLAGIREQLITRRTPLSNTIRGYAAEFGVTAAKGLDKIEPLLAQIAQDEDLPALARELFATEGREYARLQAELKPIEARLMAWHRANACSRRLAQIPGVGPIGATALVMKTPDPRAFASGRHFAAWLGLTPKDHSTAGKTRLGKITRAGDEVLRRLLVAGATAVIQQVRNGRGRPSPWLLALLKRKPPKLAAVALANKIARIAWKLMTTGESYDGARMPGASALAA

SEQ ID NO: 113064 - protein, 366 aa, unidentified
MKYVGIDLHKKTISVCVVDKERKVLQRKKFLCVDVAGIKAWFGQLGAFQFVVEATATYEWLVQLLEASADAWVLCNPGKMRVIAESTKKTDKLDAQTLAEFLALGMIPKAYRPNTRQREHRKLVRYRTQCQQRVSRLKCQIRYLAATYNADHRQLFQAEQLQELQQRKDLTEADRFLLTQRLLDYEQALERLKTAKKELKSFTEKGTPAEQKQREILRTAPGVGEVISEVVLAELGSADRFTSLKDATAYGGLVPGRRESDNKTKDLGITKKGSRLLRWAMVEAAWLAVANSPRWRGVFEALKKRRQPKRAIIAVARRLLAVLVSMLKSGTKYRSSLAELQEREVKAELRKKKRQAAQAAKEAALA

SEQ ID NO: 113065 - protein, 355 aa, unidentified
MKILAIDMGWSNSVSCLFDTDSGEVQYKALITGKEPFARLLKEINPEQVVIEAGPMAGWVRDLCEQMKLKLLVLNTNDEPWRWRNVKKKTDRKDAFKLTQVAALRQGSAVHVPEHAVRQWRQLIYYRQTLVDEMVAIKNRLRAVLLQEDLHLPSGQKAWESASWQKLNEMAKELEECAKDDLWRGLVKLELRRLEELAAHLGAVEKKLDGLAKEDERIKRLKQVPGVGTRTAELVVALIDDPRRFGRGRKLSSYAGLSPRKHQSGKMDRDGHISRCGNGLLRKLLVQAAWSGKRNSLRMSRIYERVRKNTPKRTKQAIVAVARHLLVWLWAMLRDGSSWQVGHQPAPPKELSAVT

SEQ ID NO: 113066 - protein, 345 aa, unidentified
MPIVGGLDIHRKQITFDYLDTATGEVRRGQIAPADRAHLRAWLARFAGRDDAAFALEGCTGWRYVAEELAAAGVTAHVAEPADTAFARGRKRHAKTDRTDSRHLRVLLEQGRLPECWIPPAQILECRALLEAYHDLRREHTAWIERIHAVFFHQGAPRLGEGALRTDRGLAALRQAAAIHLSPAGQLQVATALDMLAAIEARMEVLRQQLLHAARHLAGARALQARLYGVGPLAGLAMTCWLGGAGRFSSSRKAVRFAGLDVTVYSSDGKRSPGHLSRQGPEILRWVAYEAGKTHGRASAPGHDYYAAVKDRTDGKIAALSQARKLIRQACHILAELGDDALTAA

SEQ ID NO: 113067 - protein, 415 aa, unidentified
MSEERWYAGVDWASESHHVFLTDGNGRKIGEKIFKHSGEGLAEMAAWLLTASGAGSPSQIYVAIEVPHGPVVETLIERGFMVHAINPKQMDRFRDRFTLAGAKDDSRDAEVMGSALRTDLRCFRVLAALDPTIIELREWSRIASDLGTERNRLTNRLREQLWRYYPAMLELEGDLGAEWLLDLWELVPTPGKAARIREGTVAKLLKRNRIRRFDAAQVLDVLRKPQMQVAAGTAEAASAHIKTLIARIRLLNGQIKEAHRQLDALTTKLIPAECTQTGQAKQHDVEILASLPGVGRVVLATLLAEAWDALLRRDYAALRSLTGVAPVTKRSGKSWIVIRRQACHARLANVMYHWARVAVQYDPKSKAKYAALRGRGHSHGRALRSVADRLLNVACAMLKNGALFNPSLEAQKSPC

SEQ ID NO: 113068 - protein, 350 aa, unidentified
MSNNKNVVTFGIDLAKSLFHVCGLDASGKPVVSKKLRRTQIVTFFANQSPCIVAMEACAGAHWLGRKLNGLGFQVRILPAQYVKPFVQNQKNDANDALAIAEASQRPSVRPVPIKTQSQLHLQALHRVRDRLVNQRTRLINQMRGFLLEEGIILRTGVGNFKSQLPVVLSDPSEEISPAMTALINELWDELLGLEKRLKSINSQIETWASQDQAARRLQSVPGIGALSATAIIAAIGNAAQFNKARDFSAWLGLVPRQHSTGGKTTLGGISKSGNPYIRRLLIHGARSCMLHLNREKDRLGAWITDLERRMPFNKVVVALANKLARIAWVILTRPAATYEQMQPTRQANY

SEQ ID NO: 113069 - protein, 405 aa, unidentified
MAEPPNIQRWIGLDIHKAYFVAVGVDAKKQTVFGPHKIPNDQLEIWIAKHLQPSDAIVIEMTTNTYLFYDALVPHVSSVIAVHPPNVRLVTGVKVKTDNKAALALAQLHAAGLLTGVWIPPVEVRELRAVIAQRTKMVRMATQAKNRLSSLLIRLQRERPAQPFKPEQRSWWEALPLAPIEKSVLRSNLDTLEFAEKQIKAIEEVLRQEAARDERVPLLTQLPGIAMLNALTILAAIGPIDRFEDAKHLVGYAGLGASVHDSGQMHATGHITKAGRRDLRYAMVEAANVAVCHHPFWKKEFARLEFRLGRSKAIVAIARHLLVAVWHILNSETVDRHADVTSVAASMLQLAYQIKKRNLPKGVSGRAFAREQLDRLGIGQDLAAVPAGKKKLNLPPSRLLLPEKE

SEQ ID NO: 113070 - protein, 552 aa, unidentified
MRGKARATLEAGVIAPPLNGERIPRKISRFEPLNLIERSALAVGRSVAALPFGASRSRRLPAGEIGSGRRHTHCLVTPLARCSRWGGLSFVDDRAHAGWQVQSNVICFKSMKSLPVLDPKAAAIDVGSEKLHVSIAGDVPKVFGTFTGDLENLRAYFKEQQVRSVAMEATGVYWLYLYEVLEGAGLEVIVVNGRHVQNVPGRKTDMADCQWLATLHAHGLLRGGFVPPAEIRRLQDYQRLREDHIRGAASQVQKMQQALERMNVKFHDVISDLTGVSGLKVVGAILRGERDSAKLLELCDQQIQKKKSAAVVESLRGCWKEEHLFALRQALELWEFFQQKIAQCDRELEKLLHQLVPPSSNDSADGGTSKLARAKVPGKNAPVIAKFQQLLARICGGRDATQLPGLSAYLVLQLISEVGTDMSRWPTEKHFVSWLGLGGARKQSGKRKGQIKAHRNRAGRIFCRASAALAQSVDKALGGFYRRLRGRIGGLAANVALARKLAQLFYRLLRYGAEYVERGLKVYEAKVLETEARLLRKLAGKQGFILVSATAK

SEQ ID NO: 113071 - protein, 341 aa, unidentified
MKKFIRIGVDLAKNYFQIHALASEGGPAVTRKLKRSKMLEFFSQIEPCLVGMETCGSAHYWARELKAMGHEVLLMPPAYTKPYVKRGKNDAVDAEAICEAVSRPGMRFVPIKSAQDQATLMLHKTRELLVKQRTMSVNALRGHLFEFGLIAAKGIGRVDELLDLAEKDATLPNAARSVVKVLAQHLEGLDKSIDDLEDDIAGAHAQSEMSRLLDEVPGVGKIIASSIAASVPDASVFKSGRDFAAWLGITPRQNSSGGKQTLGAITKQGNRYIRKLLVLAATSLLRVMGKRKGSLRDWVVALLAKKPARLVTVALANKLARIIWAIMKTGESFRTEMFAKA

SEQ ID NO: 113072 - protein, 344 aa, unidentified
MEYFAGLDVAMKETAICVVDAEGKTVIEGKALSEPDAIADFLHPFRDKLRRVGHEAGALSPWLQRGLIERDLKVVCLETIHVRSVLKAQRNKTDKNDARGLAQMMRTGWFREVHVKSDESYRLRLLLTHRRNLKRKFLDLENAIRHSLKVFGIKLHLTGRGHFEDAVREQVADDPLLSGLCDAMLRARAALWVEYLKLHKLLVHFSSRDPVCLRFMGIPGVGPVTALAFKTAIDDPTRFKRARIVGAHFGLTPKRYQSGDSIDRPGAISKRGDKEVRSVLYEAAKSMLTRYKGWSSLKAWGMRIAQRSGHKKAVAAVARKLAVIMYAMWRDDTSYQFSTTAATA

SEQ ID NO: 113073 - protein, 413 aa, unidentified
MLKIIYPICCGIDVHKTFIIACIASTNDKGITSYKSKRFSTFTKGLRELSDWLYSHSCTEICMESTGKYWIPVYNILEATCKITLAHPKYVKAIRGKKTDKKDAKWIADLFKHDLVVASFMPPLPIRQLRDLMRYRFKLTNFCSSEKNRMQNCLTVSNIQLASVMSDTFGKSSMKIIDYLLEHPHEKDFDFVPLLHSSMLHKVEPIRLALDGMITQEQQQKMNIILQHYDELKACKSNLESVILSLSEPYTTERFLVSTVPGIKNPFSAITILSEIGVDMSVFPTAKHLCSWAGVTPQNNESAGKKHSVRISRAGVYIKPLLVQCANAIVKSDKHPEIKGRYLSIKKRRGHKRAIIAIARMLLTAIYHILKKREPYNAELYKKADIIPHTRQITVEQAILIAQRHGYSVLIDG

SEQ ID NO: 113074 - protein, 320 aa, unidentified
MMAQNNLVVVGIDVAKDKVDACIRSLPSGRTFPNSSAGRRQLTSWLCKHQVTKAVMEASGGYERNWAKALRQAGIEVRIVDPKRVRSFARSAGRLAKNDTIDAAMIAWFAETFGEVSGQAYDVVREQLSQLVNARQGLLDLQTNLQNRDEHAEVDAVQKMHGRLLKRIALEVASLEAVIAALIKATPHFAELAEIIESVPGLGRTTSAGLIAAMPELGQVSNKVAPALLGVAPYDDDSGRRRGERHIKGGRRRVRNLFYMACLGASTRHNPVLKTFYRRLIAKGKKPKVALVACMRKLIVILNTMIARRQKWDASLCVSG

SEQ ID NO: 113075 - protein, 400 aa, unidentified
MLSIGIDVSKGKSTVCGMKPGGEIVYTPFEIQHTREGMSELVSLLRSSGEEVRAVLESTGSYHCPVVAALLENGIFVSVVNSLRMKRFCSQSIRKVKTDRIDAMQIALYGLAYWQELQPARLPEDTYRELQLLARQYYQMTSMLIKAKVDFNAICDQVLPGMQELMNDHAGRHKLSDFVLRYRHTTHILEMGETCFQKDYCKWAEKKGYRNCERMAVLISATAQNGIPVLPNAPSTQIVITEAIRVLHTVEASRDAILTQMQALAKTLPEYSLVREMPCIGDTLAPRLIAEIGDVRRFHSKRALIAYAGIDAPPYQSGKFCANNRHISKRGNRYLRKTGYEVMQSYVMHKPANDPIFTFIEKKRGEGKSGKLAMVAGLNKFLRVYYGKVTELYRSLPTIE

SEQ ID NO: 113076 - protein, 443 aa, unidentified
MESIYVGIDVSKGYADIKIIDKNQETVVSSFRLSDTAKGREELGARLLSLLPESAANIYCGVESTGGYENNWYRHLRSISPRIYVTRINPKCVKSNGEAELVRTTTDAVSAQMIATYMVRFEGNSHYFNSDTVVDERFYEGRKLNRYVEQLNKQKTVFNNQLEKVLYEYMPSVINLSRNGVPKWVLNVLHKHSSPKKLVKMGTKRLGRLHGVGEERASKLLSGIKKGVLQCPETASRLIAKLSNKILSLEGEIKEERKYLENTYGDLPGIELLTSIVGIGTQSAVELILEIEDITRFSTAKQLCSYFGLHPVFKQSGDGVFKNRMSKKGRSTVRRVLYMCCLTSIKYSPMMKALYARQKANGKNHYQSIGVLMHKMLRVIFGVLNSQKAYSEAIDEQIRSKAETARKETVTKQDEFELELEATAPISRRKAQKIKKQADVPIE

SEQ ID NO: 113077 - protein, 385 aa, unidentified
MPGNAFIPREYDIFAGLDVDRKSISVTFTSHQGFLRSLRMPYRVDHLVHYVGKHFANQRVVFAYEAGPTGYGLYDGLVAHAYPCLIAAPAMIPRAPGQRVKTNRLDSRALAENLRGGQLRSLHVPSPVYRELRHLTQLRDTVVSQAVATKQRIKSLLLFEGLAFPPAAAGHQWSLQVKAQLRTLPCAPPVRFKLDQLLATLAFAEQQVLQTTREIRRFCRTEPELARCIQYLMTVSGIGWITASQLLARIGDWRELKNIRQLGAFVGVVPTEHSTGEGPQRGAITRTGDARLRAKLIQAAWAAIRHDAELRPCFRAVCQRHPPDRGPRIAIVAVARKLTVRIAVVLRQQRPFVLRDPVPSVPLTQEETVPQGTTRRLAEPGAAAP

SEQ ID NO: 113078 - protein, 411 aa, unidentified
MDPVLYVGIDASLGNHVVCAMAADGRVVARTTVPNDQAGAEQLVAWLHHHAAPYARLAVGVEATSVYHVPLMEWLAQTPDLQRWQPTWYVLNPKVVQKFGETYVDRGKTDRADAALIADVVRFGRVPPWTPPDPRYAALQVLTRHRRQLTQLITQEKNRALVQLFCIWGPYAQTDEPFFSNVFGVASQTVLERYTPDTLATTPLADLAAEIAAAGRQRLKAPDDIAQTLHRLARRAFRLHPDEQDARRQSLVMHLDTIRALEHQQQALDKVIARDMQAFRQTLTTIPGIGPVYGAGLLAEIGPIERFPSENALAKYAGLTWRPHQSGHFDADIRPLTRTGNVYLRYYFIEAAERVRVRDPQFKAFYEKKYREATHHAHKRALVLTARKLVGVVYGMLTRGQIYDERKLMPH

SEQ ID NO: 113079 - protein, 343 aa, unidentified
MQTVTTIGLDIAKSVFQVHGVDAGGQVIIRRQLKRRYVLAFFQKLSPCLIGIEACASSHHWSRELQALGHTVRLMPPAYVKPYVKRQKNDATDAEAICEAVTRANMRFVPTKTPEQQSGLVLHRTRHLFIRQQTSVINAIRAHLAEFGIVAPVGRQGVEELLNVVADPNDKRVPEIARACLSAFGAQLRRIKEQILEFDRMITAWHRSNEISTRLDEAPGVGPVLATAVVATVADPKVFRSGRNFSAWIGLVPKQHSSGGKDRLGSISKQGDRYLRGLFVAGALAVIRYAKIHGTKHRPWLTALLGRRPTKVAAIALANKIARMVWAMMVKGERYKEPVALAA

SEQ ID NO: 113080 - protein, 387 aa, unidentified
MGVIIGMDPHKRSATIEVVDEHANVLAVGRYGTDKAGYGEMLKAGRRFQDRVWAIEGCNGVGKHIAHRLVADSETVMDVPAKLSAQVRVFATGNGRKTDPVDAHSVALAAVRSPNLVKVEVHPDLVALGLLADRRDELGRARTQTINRIHRLLLELLPGGAKKFLSAAQARALIATTRPRDIAGKTRRKLVAELITELEGIDRKIKACKKEIKTLVAAQGSTLLQLHGIGPSSAARLLADVGSIHRFASRDHFASWNGTAPLDASSGQQQRHRLSRAGNRRINRALHIMAVVQLRNPTEGRAYYDARKAAGKTSMEGMRCLKRRLSNIVYRQMLHDQDRTQATGPGGHSGTTLQSSVTDLTPDIGSSDKPLPGPATPQPRTAIPAAS

SEQ ID NO: 113081 - protein, 343 aa, unidentified
MKIMRIGVDLAKNVIQVHGVDRTEKPVWRRRLSREKWLNVLLEKVEPGCEIGMEACAGAHHWARRLQEHGLTVKMIAAQFVKPYVKSNKNDANDAEAVCEAMSRPTMRFVSVKSVEQQDIQAVHRVRTGLVEQRTAKANQIRGLVGEYGLVAPKQLSHLRAALPGWLEDAENGLSERFRRLLNALWGDLVELDTRVGELDDEVAAIAKSDPVAQRLQQLRGVGPITATALVAAVGSAEQFAKGRDMAVSLGLTPKQHSTGGKDRLLGISKRGDPYLRSLLVHGARSMIRAAKGKDDRLSQWVTSLAARSHPNVAAVAMANKTARIAWAMIRNGTNYQPERAAS

SEQ ID NO: 113082 - protein, 463 aa, unidentified
MSTIQSFRAKRVKRSTVRVRPVERPDAAGIDLGATVHFVAVPPERDPKPVRSFATDTAALHLLADWLVACGIKTVAMEATGVYWIPLFQILEARGLEVVLANARHVKNVPARKTDVQDCQWLQYLHSVGLLQASFRPPAAVCAIRSLVRQRDNLVRTGCEHILRLQKALDEMNVLLHRAVSDITGETGQAILDAIVAGERDPAALARLRDRRCKKSESEIAAALRGDWQPEHLFVLRQSLEAWRYHRKLAAECDAQIQLLIQELTPIAPEPPAAATPATPPQSPPETSAGGADEPLRRLLLAKFGTDLTAVDGVATGTALIWLSEVGPALDKFPSAAHFASWLGLCPDNRVSGGRKLATATRPVANRLATALRMAAVSLSRSECALGLWYRRLRAKLGPAPAVTATAHKIARILYAMIKLRRPFDPAKLGNPALQRSRHERSLRRQAASLGFALQPLLPDAVS

SEQ ID NO: 113083 - protein, 346 aa, unidentified
MLYAGLDLSRQRLDVHVLDEEGRTVDVTAVHPDADALRTLANRVLRHGQEVSAAIESMTGSRFVHDQLELAGWDVAIADAVKAKGIAPLAAKTDKIDAHVLAELARRNLVPEIWLPDPAVRAERERARFRLHLVRHRSALKCRIHATLMTFGHNIPVSDLFGTSGRRLLAGLALTEPWATTLATSLAMVDELDERIDECGRELARLGADHPYIPLLLTVPGVGPLLAYTIASEIGDIGRFASPKKLAGYTRLCPLVRQSGNRDFRGPLAKNGPKYLRWALVEAATHAARDPRYRERYERNKKRLGRGRGAKVARIDIARQLAEAIWHVLTKNEPFAPASPAILLVA

SEQ ID NO: 113084 - protein, 334 aa, unidentified
MTFELLAIDLGKSSFHLHSIASDGAILSRKISRSKLAETVKAINPRMVAMEACASAHHWGRQFQHDGREVLLINPRFVKPFVRGSKNDAVDAAAIYEAATRPTMRFVPVKSTAQQDLQSLHRVRERLIVQRTSLINHARGLLAEYGIVLPQGPWRFAAQAPSAVENAPLSDLGRELFLELLDQLTDVNDRVARLDRKISEICREREDCHRLCELPGVGPIIATALVASVEDGRHFKSGRELAAWIGLVPRQYTTGGKPRLGGIGRRANHYLRRQMIHGARAVISRLASHEDRRSQWLKELVARRGFNKAIVALANKTARVAWALLTRQERYAAK

SEQ ID NO: 113085 - protein, 370 aa, unidentified
MKKNSTQPQSPKRATSRKAGPITIGMDLGDKTGRYCVLGGNGERLSEGSVATTKKAMTQKFSGMGRCRVVMEVGTHSPWLSRLLTSLGFEVIVANARQVKLISASSRKNDRMDAYLLARLARVDPQLLRPIRHRSEQAQGDLMTIRIRAALVEARTSLVNAARGFAKALGERLPACDTDSMGVEKMEALPEQLRERFRPLLEQVVSLTKKIQESDTTIEQIARTRYPETELLRQVSGVGTLIALTFVLTVEDRDRFQKSRDVGCYVGLRPKQSESGQSRPQLRITKEGDPYLRKLLVQGAHCILSRRGPDTDLKRWGLKLAERGGKNAKKRAIVAVARKLAVLLHRLWMGGEVYEPLRNSQPTRSKKKVA

SEQ ID NO: 113086 - protein, 408 aa, unidentified
MNPLYVGIDVSSKNNVIYLMLPNGDKHSSFSLANSHDGSTQLVKRIFTAMTSNNIDSVLIGLEATSVYGDNLVYFLKEDTTLASFDRKIHVLNPKQVNKFKESYNDLPKNDYVDAFVIADCLRFGRINKEVYMDDYRYKALQNLTRARYFAVTNLTKEKQRFINVLFKKYSTMTQEKVFSDTFSTTALAVYEKFESAETLAKMDLQELTAFIMEKGKNCFPDPDAVAKALQKAARSSYRLPKTVNDSVNQVLAISITSIRALESQIKAFDKAITKQMELLPNVLISIPGIGPVLSAGIMAEIGDINRFQNQAALAKYAGLAWQQHQSGDFEAQTTRMIHSGNRFLKYYLCEAAFSLVRCDKEYNRFYHIKYKEVNRFQHKRALALTARKFVRLVFALLKDNRLYRPAE

SEQ ID NO: 113087 - protein, 343 aa, unidentified
MEIIRIGLDLAKSVFEVCGVDMRDHVVLRKTLRREAVPQFFAELPPCLIGMEACSSSHYWAKVLTDLGHQVRLIAPQFVTPYVKSNKNDRNDAEAICEAISRPSMRFVPPKSSEQLEIQAVHRIRQRLVSSRTRLCEPDTRPAGGTWRCHWPRHLATSPSVIANRGGADRNLGDLIQELASDIHQELAALDERISSYDRRIRNLFRTNEMCQRIGKIEGIGPITATALVAAVGDQSCFENGRQFAAWLGLVPKQRSSGGKSRLFGISKRGDRYLRTLLIHGARAVLGKAGGKQDARSVWINRMRERRHPNVVAVALANKNARIVWSILSKNEDYRGPETPQAA

SEQ ID NO: 113088 - protein, 310 aa, unidentified
MQDTIGIDISKDTLDIHRRSDGRHARFGNDRAGLAALRRWIGKTPVRVVYEATGRYHRDMEGALDAAGHALIKVNPGRARRFAQAAGYGAKTDRVDAAMLARMGAVLELEATPVRSESMHEIRELHIARLGLIKDRTACRNRLQAARNKVVLAQLRARLRQVERQIEQIDAELARLVAEDPVLAHRFGILLSIPAIGPVAAIAMLVEMPELGTMDGKEAASLAGLAPITRESGRWKGQSRIGGGRRGLRRALYMPALVATRHNRQLGQTYQALCSAGKPAKVALTAVMRKLLILANALIRDDRKWAETAP

SEQ ID NO: 113089 - protein, 365 aa, unidentified
MLRRLNSAATLIQRTTMEAPRGDMYYIGLDVHKKTISYCVKDASGRVQQEGKVGSTRRELDCWMKTLPRPWTAAMEATIFSGWIYDHLLPHATQIKVAHPLMLRAIAAAKKKNDRIDAGKIADCLRCDFLPECHMMPAEIRDRRRTLRYRHLLVRQMVQMKNRVSGLLMETGVEYNKQRLHKVSYFRELLSTNAEVHPSLRPLLKLSRETIERCQKTEYALVSSLQRDPVLADRIKRLRTVPGVGPITALTWALEIGDVSRFRTIKQAISYCGLCGDERSSADKAMRMPLSKQRNKHIQRTLVEAAKLAPRQSHELAAIYDREKQKGNGNRATLAVARKMVAYLLAVDRQQRDFGPAKQRSTAAA

SEQ ID NO: 113090 - protein, 384 aa, unidentified
MEDYDGRQVVGMDLHRRRSVLVRMTEDGRRLGAVRITNSPAELRREIARAGKGPRVVLEATYGWYWAADVLAAAGAEVHLAHPLGVKAFTYRRVKNDVRDSADLADLLRMGRLPEAWIAPHEVRELRELTRYRAKLVRLRTSCKDQVHGVLAKLGIPVTCSDIFGTAGSAWLDGLRLPQPYAGKVTSLRHLAGEFTAEIDMLGEVIADLLAGHRGYQVIQQLPGIGPVLAAVIAAEIGDITRFKNPAQLCSWAGLTPRHRESDTKVARGHVSKQGSRLLRWALIEAIQRIPKDSVIGAVKDGIITRRGKEARNIAKVAAARRLLTLVFYGMRDHQIRCLARPAGGLRPHRPRQHDRAAGPPAGREVAGPFCPAAATWRRGRPRD

SEQ ID NO: 113091 - protein, 403 aa, unidentified
MKDDTSRFGGVDWALDAHAVAIVDGSGAVVDEFVVDHSGPGLDELCRRLSKHQVTRVAIERPDGPVVEGLLGAGFSVVVVSSRSVKALRERYGTAGNKSDRSDAYVLADCLRTDGHRWRDLAPDSPATVTLREHVRARKDLVETRVALANQLRAHLQVVFPGAVGLFADIDSPISLRFLERFPSAARAQWLSEKRLGAWMTANAYCGRKSPAELYRRLREAPAGSAGDGEIRGAVVLALVEVLKAVRAQIDELTARMAEQLQTHPDAVIFTSLPRVKVVRAATLLAEIGDCRDRFPDPESLASLAGVAPSTRASGRLRVVTFRWSSDKKLRDALCDFAGDSWRGNAWAASRYRQLRDAGKSHPHATRILARSWAHIIWRCWQDGVPYDPALHGGHQRLATEAA

SEQ ID NO: 113092 - protein, 333 aa, unidentified
MKVEKVAGIDVAAKTLALAIRAGEQTGKVRELENTASGHQAVIKALTSAGVQRVCLEATGVYHLDLALALDAAGVSLMVVNPTAAKRFAQALMTRSKSDAVDAGVLAQFAQSMPFQPWQPPAAPVLEVRACARRLAALVKARTQAKNQLHAASQTISTPEIVLADLRLSIAQCDDHIAQLRAGACALIDADAQLREVFTLLNSVKGIAAASAIQIMGEILVLPADMQAKQWVAQAGLDPRHATSGTSVNHKPHLSKAGNRYLRLALYMPALSAARHEKHVNGYYRHLIEDRGLKPIQAVCAVMRKLLHAIHAMLKARQPFNGSRFYALVETPA

SEQ ID NO: 113093 - protein, 311 aa, unidentified
MYYIGIDVSKKDLSVFDGKDLKFINQEGLTSFKKYLKKKYHLSEIVIIFEPTGVYSLYLKEFCAENSIKAYILNPKQSHNFARSLGKRSKTDKIDARTLYNFHKLIDVKEIKVPKIDQQAKTLASYLVSYEFALKQRVSLSHHLESLRDKGLIALLKKEQKRAKKLEDRIFDDIKEYLDNNQNLKEDYQRLSTIPGIGEKAAIALLTLFKTYQGTSRAQITALAGLDPIRRESGTSVKGKVKISKNGKGIYRKILYLPTLCATVHNQKIKIFYQRLLANHKPKKLAVIASMRKILLIAHAMYQDKTEYITV

SEQ ID NO: 113094 - protein, 405 aa, unidentified
MMVCGVDPSRSGFAVSFVEGLEEINYREYRNTMVGYETFMEDLNECEEIPKVCIEGYGDFARQLVLYLKSKGVSVYEVNPRMSRQLKDSISIHKTDHIDAYTCAVSYMIRRQEELEVDGALEGLKNLTRLYSKISRATVSFKNQMKSALNQGLGCIYKDMFEELNILSLTFYSQYGSIREIKESSEEDLHKTMCMAGSCRYKGLHGQKKAAKIKELVKDIDTSITSSFTEIQSSVIKGYALTLITMIEQKEKIKKQIEEYINKEYPDYKEYFEEMRGVTALNMAVIISEGGLTRTFKDEGHFASYCGQAPRQYQSTSMKKFISSPNYNRYMANTIHFMACQNVLKNGMFYEDYIEAKKHYSRKLRALKKIKRHLCRILFYKLMTYRLHLISVKNIKSKKVKACVA

SEQ ID NO: 113095 - protein, 406 aa, unidentified
MATFAGIDWGGAAHAVCAINGHGQRVAYFEVKHDASGLTELIRRLHKLAAAKALRIAIERPSGLLVDALLNAGFAVVPIHPNVVKASRARYRAAGGKCDRGDAYLLADLLRTDGHRFRTLTPECDQLRALRALVRTRDDLVTERVRLANQLRALLESFWPGAARIFPDIDTPIALAFLEHYPTPASAAHLGQKRLGSFLAAQGYSGHTSPTVLLERLRGAAPGQIGSTEAQVKGELVSSLTQVLSALIGQLSALKKRIEHYVATLPDGQILMSFPRIGQLNAAQILSELGSVRERFPSEAQLAAEAGASPVTHQSGKSRAVIFRWACNHRLRAAITCWADNSRRSCAWAAQIYQRARARGARHPHAIRILARAWIRVLWRAWHDHTPYDPAKHRAAQPWLIVPSGG

SEQ ID NO: 113096 - protein, 319 aa, unidentified
MAQNDVVVVGIDVAKDKVDVCIRSSGARQSVPSTTQGRRKLVAWLRKHQVGKAVMEASGGYERVWAKVLREAGIEVRIVDPKRVRSFALSAGRLAKNDAIDAEMIAWFAETFSDAPSQTYDAAREELQVLVKARLDLIDSRIRLVGQSEHAAPGLAQKTHARILKSLASEIAKLEVAICAKIRSTPDFAERAEIIESVPGFAETSAANLVAGMPELGQVSNEIAAALIGVAPYDDDSGKRRGERHIKGGRRWVRNAIYMPCVGAATLNNPVLKAYYRRLLAKGKEPKVAVIACMRKLIVILNTMIARRQKWDPSRYSLN

SEQ ID NO: 113097 - protein, 342 aa, unidentified
MEQIRTVGLDIAKSVFQVHGVDGDGEVVVRRRLKRARVLPFFASLEPCRIGIEACATAHFWARELGALGHDVKLMPPAYVKPYVKRQKNDAADAEAICEAVNRPTMRFVPAKTVEQQSVMVLHRTRELLMGQRIRLSNAIRGHMAEYGLVAPVGRNGLQKLIEVIGDETDERVPAEARLCLKMLVAQLHLVNFQVLGNDRQIRTSARATDVGRRLMEIPGIGPVIASALVASVPDPHAFRCGRNLSAWIGLVPRQNSSGGKERLGGITKQGNRYLRKMLVIGAMAVIRHAQRNGTRRPWLVQLMARRTTKIAAVALANKTARMVWAIMTSGERYREPVVRAV

SEQ ID NO: 113098 - protein, 379 aa, unidentified
MVEYLPESGRGRPIDLRYTETVGQRGRHAPISNKARTVVRVNQTRMMQGRAKRERKPVTKEAIYVGVDVARDTLDVADSGSRETRQFPNDHEGIPLAIRYIASLQPAGVILEATGKLEMPLAAALQAECLPVVIINPRQVRDFARATGALAKTDAIDARILALFGLRIRPEVRPLPDKPAREMGSLLTRRRQLMEMLVAERNRLSRADEDVQPGIRAHIKWLKEALSDINTDLERRIRSSPAWCEKDDLLRSVPGIGKVVSTTLLIELPELGQLNRRKIAALVGVAPLNRDSGTMRGKRTVWGGRAKLRATLYMAALVATKFNPIIAAFYRRLLDAGKVKKVALVACMRKLLTMVNAMMRAGTVWNPEPINQHVVMEAI

SEQ ID NO: 113099 - protein, 288 aa, unidentified
MDEATTAFVGLDAHAQSTAIAVAELGREAPRFLGTVGPRLAELKKALTKLGEPSKLEIVYEAGPCGYALARELTGAGYRCEVVAPSKVPRRVGERVKTDRRDALMLASLARAGELTPVSVPDERDEAMRDLSRARVDAVRARQKARQQLKALLLRQGRRYTGKSSWTAAHERYLASLSFAHSAQQIAFVEYQQAVSESHSRVQRLGEALSEELAHWRMKPLVQALMSLRGVDQLVGTTLVAELGDFRRFTHPRQLMGYLGLVPSEHSSGERRCVGPLPRQVIPMRGAY

SEQ ID NO: 113100 - protein, 335 aa, unidentified
MQLYGIDLSMEKFDANFIDAKGNEKNKEVKNKVVSISKFLSSVAEDGILCAEHTGAYGDLLVSLCNQADIPIALVPGYTIKHSLGLLKGKSDPLDARRIREYGERFTDKLVFSEYDKESIVELKQLHTLRSQLVKARKILLTSDKGRCHLPMQSVSVHNHLQPVLSGLDTEITTVEEEIEALIKADEDLNENYELVTSIKGIGPVIATDLLIKTGNFKNIDTARKAASYAGVCPFPNTSGKMVGKSKTSPFADKKLKSLLYMGAKSAVKHNKEYQLYYQKKQIEGKPHYLIMNNISNKMLRTVYSVVKNKTPYSQDHICLDPRERNINSSTKKVA

SEQ ID NO: 113101 - protein, 343 aa, unidentified
MKLSRVGVDLAKNVYQLHGVDRHGKTMLKRRLKRHQWLKVLLDKTEPDCVIGMEACAGAHHWGRELQALGYTVKLIPPQFVKPYVKSNKSDAKDAEAICEAMSRPNMRFVTVKRVEQQDIQATHRIRAELITQRTAKANQIRGLVAEYGLVAPKHLSSLRAAIPCWLEDAENGLTGDFRALLQGVWRDLLLLDDRVGEMDKLIKRLADSNEDCVRLQQLRGIGPMIATALIASVGDARQYHKGRQMAAAIGITPKQHSSGDKHRLLGISKRGDVYLRTLMIHGARAVVARATHKDDRLSRWVTNIANKKHPNVAAVALANKTARMAWAMLRNETDYDPDYAIS

SEQ ID NO: 113102 - protein, 374 aa, unidentified
MSDHSEAFVGFDTSKLRHAVAIAEGGRTGEVRFLGEIENTEAATTKLVKKLASRHRRLTFCYEAGPTGYGLHRLIESLGHACMVVAPSLIPKKPGERVKTNRRDALALAKLLRAGELTAVGVPDERHEAMRDLVRAREAAVDDLKSKRQQVLSLLLRLGLRYDGKRTWTRLHWNWLANQKIAHREQRIAFEEMLQAVREAQERVARLDQAIRAAVPDWSLSETVTALMALRGLDLVSATIFLAEIGDLSRFASARDLMGYLGLVPSEHSTGDRIKRSGITKAGNARARRILIECSWSYRHPPRLGKEKLARVVAAPKAVQEVAWKAQARLCARYRALTRRGKRPTVVVTAIARELSGFIWAVSRAASAPAAQTF

SEQ ID NO: 113103 - protein, 328 aa, unidentified
MTNAREPTAQSLQFVGVDMAQQAFEWAVHGVPGTHSVPNDKAGFETFLEALKKLRIGLIVMEATGGLERPLAGFLLRHDLPVAVVNPRAAREFARSMGHLAKTDAIDALALAHLAQTLAAKADQSGVAFRPPTAEVEQLQLLMTRRAQLMSMRTAEKNRLVSAGRVLHKSITIVIKTLDKEIARLERDIDAHLERHFKEQARRFQDVKGLGPMTCAVMLAFMPELGTVKSARAAKLAGLAPLNRDSGKERGKRHIWGGRSAVRSALYMAMLSAVRFNPVIKTFHDRLIAAGKPRKVVLTACSHKMLRILNAMARTGQPWDESLHATTP

SEQ ID NO: 113104 - protein, 351 aa, unidentified
MVTIAKGPPRLIVGVDSHKNTHQAAVLDANGALLGNECFAVSSSGYLELEAWLSNLGEIDRVGMECTGSYAAGLTRFLRERGVEVLEVNSTHRAVRARRGKDDPIDAEMAARKVLSGEAHATAKDTTGDIEAIRLLKVARESAIKSRTAALLQIRDVLITAPAQLREHIECAGGARHRVNRAASLRPDADHLGQPLQAAKLSLRQLARRVKFFDAEIAEVDTHLRLLVANCAPALLACVGIGTQHAAQLLITAGQNIGRIPNEAAFARLCGVAPIPVSSGHTHRMRLHRGGDRRANMTLHLIVVARLRMDKRTQAYMERRRAEGLSKKDIIRCLKRFVAREVYNALKLDLL

SEQ ID NO: 113105 - protein, 411 aa, unidentified
MKRVIGMDIHRTFAEVVFWEDGRLRWHGRVDMTRTGLEGFGRSLTKEDEVVVEATGNAMAVVRVLGPYVARVIVANPLQVKAIAHARIKTDKIDAGVLASLRAADFLPEVWVPDAGTERLRRLVARRNQVVRHRTRVKNEVHGILAAHLVPPCPHADPFNGPGRAWLDRQVLPDDERAAIARHLRELDRLGEDLAVLDRDIGETVVENPEVKRLLTIAGVNVTVAAGLVAAIGDIHRFSSPQKLVSYFGLNPGVRQSGLGLAQHGRISKIGRAHARAMLVEAAWAAAKAPGPLHAFFVRIRARRGHQVAAVATARKMAVLVWHLLTKKADYLWARPALVAQKLRSLELQAGRPMKKGNKQGPAYAYNVKELRDREKALAEQAERAYEQLVAGWRDRPGRRRTGAASAAGPS

SEQ ID NO: 113106 - protein, 408 aa, unidentified
MEVLYARCAGLDVHKRQVVACVRVATGGTMRYAVRTFATTAAGLLELHDWVTSEGCTHAVLESTGVYWKPVWHVLEDAVTLVLANATAVRNLPGRKSDVSDAQWLADLLAHGLVRGSFVPPAPIQALRELTRTRKQLVREVTAHSQRIEKVLESADLKLAAVLHPLLGVSGRAMVDALAAGQTDPERLADLAHPRLRTPRAELVAALQGHLRAHHRVLLRQHLRVIATLEATIRAIEEEIGAALAPFRTAVAHLVTMPGVSETAAHIIIAEIGTDMTRFPTVGHLLSWAGLCPRLDESAGKRRSTRIRKGAPWLKPVLIQGAWAAVRVQDSYLRAQFLRLKTRRGPMKAIVAVAASMLTASYYMLRDDRDYRDLGGDYFQRLDHGRLVSRLTRRLQHLGYEVSLRPAA

SEQ ID NO: 113107 - protein, 363 aa, unidentified
MKIMVGIDLHSNNALCGLMDESGRRMIHKQLPCDLAAILQMLKPYQKRIATIAVESTYNWYWLVDGLEDHGYHVVLANPARMQPYSGKKHTDDVSDAYFLAELLRLNLLPTGHLYDRKTRPVRDLLRRRLLLVRQRTTLILSFKSLNERTLGQRVPLARVKTMSPEDAQARFSEPADQLLVGEQITLMDHHTDSITKLEQHILGVVGEWSTYQRLQELPGIGKILGLTIALETGDAKRFADSGNFASYCRCVKSLRQSNHKKKGENNRKCGNKYLAWAFVEAAHFACRYDDQCRRFYDRKKQQTNPVIATKSLACKLAKAAWHVMKEDVPYNAARVFGPGKLKDFGETGREPAKGSGHPSQQD

SEQ ID NO: 113108 - protein, 350 aa, unidentified
MVMIGIDAHKQTFTAVAVDEVGRQLGQRTLKSTSDGCFALVRWASRWPDRCFAVEDCRHLTRRLESDLLAAGETLVRVHTGLMAGERRGGRERGKSDPIDALAVARVALREPDLPVARLDGPARELRLLGDHRYNLVKERTRWHNRLRWHLHELDPELHVRPRGLRADCQLDRVAAALDRLDGLVAELARDMVERCRDLNRQIRDLEARIRPLVRELGPSLLAVPGCGVLSAAKILGETAGVDRFPSAARFARFNGTAPVPVWSSNTERFRLNRGGNRQVNYALHMIAVTQLRGIGPGKAYVAKRIASGNSKTEAVRLLRRRISDVVYQAMRRDLAARAPASRELESVAA

SEQ ID NO: 113109 - protein, 340 aa, unidentified
MKRYIGVDLHRRVFTCCVRLENGRQFLSEWRLQQLPEFVKKLHATDEVAVEVTSNTRLFHDAVTSHVARVAVVDPHQFRVISQSVKKTDPNDARNLALYLAKGLLPEVRMKEKEQAQVASLTQTRDRLVKLRTALKNKVNNLLSARGIELKKEELSGEKGLTRVLAMDVEELTHFELQVLVDQIRSLNHSIAELEKVIDREGKKLQGHGNLTSIKGIGTLGASILLSVIGDVRDFPDEGRLASYFGIVPRIHNSNETERSGHITKRGSKLGRTALVQCALIAKRYSPYLGNYYERIRSRRGTGRAIIALARKLLGIIYHTLKNNWVFEDFPHFVLREATA

SEQ ID NO: 113110 - protein, 566 aa, unidentified
MWRSGKEGKAGGGKTGEGEVCSHSTTGYGGTMLWGGKPKTRMGRGWASCGPAEFSYGLRARCHIWLPHGPTRLRFEREEVVVTQAQNTGSLARPKTSGSRPSHPKEDCMPRFVGLDLGRKSFQVAIVDEHGHLLENTKLPLGQPELLHFARTKLLPTDQLALEATSNTWAVVDLLSPFVARVVVSNPLRTKAIAAAKIKTDKIDARTLAELLRSNFLPEVFQPDPTTRALRERIHHRAGLVGQRTAIKNRIHALLAKRLIPVPTSDLFGKKGLAWLNAAELDPLARDVLNTELRLLAALDAEIAQEDAFLAHYAWKNPQVRLLMTLPGVSLVVAVALLAAWGDVTRFPSAAKAAAYLGLVPSTYQTGTSCYHGPITKQGASRARWLLVQAAQHLDRHPGPLGHFFRRLCRRKNRNVAVVAAARKLACIAWHMLRAGEPYRYAQPGATQNKLAALRVAATGARRPRGVPKGSPRPQRLSSGTPHRTVPSLPAVLESEGLPKARTLEELPPGELRTLKRTHTLAHARAIQSPTTKPRTPQPKHKLNAKTHPPETPPQPTETKKLPPAT

SEQ ID NO: 113111 - protein, 315 aa, unidentified
MEQPPLMPSFVGIDVAKDRLDVHLRPTAETFAVARDGKGLEALVAALRGWDVALVVLEATGGFEVTVAAAIAGAGLPLAVVNPRQVRDFARATGRLAKTDALDAEAIARFAEAIRPEPRPLASEDAQTLGELVARRRQLVDMIGMEKNRARQARTRRVQRSLEATLKLLEAQLAALDRDIDGAVRGSPAWRAADDLLTSVPGIGDVTARTLIAELPELGQLDRRRIAALVSVAPINRDSGQWRGHRAIAGGRAGVRNTLFMATLSAIRWNPVIRDHYARLVDAGRPKKLAIIACLQHLLTILNAILRTKKPWQNA

SEQ ID NO: 113112 - protein, 357 aa, unidentified
MRYLGCDVHRDYTTVSVVSENGEVVSTSRCANNEEGLRALCERFPRERFSAVLEAGLNWGVVYDLLEGLEEVDRVVLAHPPKVKAIASAKIKTDKIDSKILARLLRADLIPEVWVPPRDVRVLKSIVRYRAFVVKVRTMVKNRIHDLLRKAHVEAPEAKDLFGRYGREWLEAMELRDEREDELLGYHLKVYDFLTDVEKGLRRWIEREMKENEELELLKTVPGIGEVFGAILVLKIGKIDRFPDPAHFHSYSGLVPSTHVSGSTQYHGRLIKGNKWLRWAFIEGAHTSVKISPCFREHYTRVKRRAGSQAASVSAARKLATVVYRVLKGREPYREMNKKSRLPSVRSSQGNPGSLQE

SEQ ID NO: 113113 - protein, 398 aa, unidentified
MDLPVYYELETNNGNRDYRIQIGGHYMNYNTVYVGMDVHKESFTLCSCRYEDEKASHYQRTPASYKNVLRYLAFLRTIYGEDTRFVCGYEAGCLGYSLYHQLENFNVECVILAPTTMLEQRSKRRIKTDKRDAEIIARSLAQHNYSPVHIPTETDNQTKEFIRMRDDHKAELKKIKQQILSFCLRQGYQYDGSGNWTAKHVKWLRSLKPAGLYKEILDEYLLTYTILTDKLNRLDQRIEELASKEEYKESVSKLTCFLGIKIHTALSVIVEVGDFQRFVSARKFAGYLGLVPGQHSSGDDRNGLGITKAGNTHVRRLLVESAQSYTRGKIGYKSRVLRSRQAGNSPQVINYADRANERLRRRYYKMVLKDGKKYNIAKTAIARELACFIWGMMTDNIY

SEQ ID NO: 113114 - protein, 371 aa, unidentified
MNDTIFVGMDVHKATISIAVADGARGGEVRQLGNFLNRADHVDKLVQRLSKTDGRRLRFCYEAGPCGYGLHRQITDLGHECVVVAPSLIPMKAGDRIKTDRRDAVMLAKLHRAGELTAVWVPDAAHEAMRDLIRARATAVRVLGKARQHLQGFLLRHGRVYAGKKGWTLPYRRWLTTVRFDHPAQQVVLQDYIHSVHDEEDRIARLTKQIEDLVPTWSMAPIVEAFQAMRGVAFVAAVTVAAEVGDFTRFDNPRQVMAYLGLTPSEHSSGTAIRRGGITKAGNALARRVLIEGAWTYRMQARVSRKLHDRLEGLPQIVRDIAWKAQVRLCARYRRLAATGKPKVVVTTAIAREMAGFLWAIARQTQIGSAA

SEQ ID NO: 113115 - protein, 422 aa, unidentified
MRITMTEKIDSTFIQIIHPVCCGLDVHKDKISACLLTVGKNGEEVHELREFGTFTEELYDMEKWLVDNKCPVVAMESTGVYWRPIHNVIENSMQVLLVNARHIKNVPGRKTDLSDSKWLAGLLRHGLLKGSFIPPDHIREIRELARLIKVYTESAADYKRRIHKLFITSNIKIDSVVSDLFGKTGRNLMDLLCKKSDITIEDIEANAKGSLKSKAKELHASIQGFFKEHHRFQLIGMLKTILTFEDQIAQLNKRVTHLTQEHEDLLNRLDAIPGIDKKSAQAIIGEVGITLEEFACVAAFASWAGLCPGNNESAGKRKSGRSPVRNHPLKTLLVQIAWAAIKTKGSYYKAKYYKLKAKRGAKKAIVAIAHRIGKAIYNIIKNGDTYRDLGEDFLTGSEKQRAIYNLKKKADLLGFDVVPCPA

SEQ ID NO: 113116 - protein, 392 aa, unidentified
MYIIGIDIGKNHHEASIVSPEGKQIGHSLRFATTHKGADSLMSFIFNNIGNSSCIFGMEATGHYWYPIYSFLKARGYTIYVINPIQSDSLRKMYIRQTKNDSIDSFLIAEVIRFGQFTTTSMADENILAMRQLCRYRDSVISSRTEIKLRISTIMEQIFPEYEKQFSSLWLSTSMGILEKYLTPENIENAPIDELFEIIKDKSHNKLTMKKAISIREAAADTFGIKIAQDSFSFQLKQLIDRMNFLDKQIEALDCQILEYYEKFDCYLHTIPGIGMIAAATILAEIGDINRFKSSSALVAFAGIDPTVRQSGEFSSTHNHMSKRGSPYLRHAIFLAATTCSFHNSPLNAYYKKKREQGKHHLTATGAVARKLTTVIYAVLRDGKPYEPKSFC

SEQ ID NO: 113117 - protein, 391 aa, unidentified
MTYFIGIDIAKFKHDCFIMDHNGEVIRNSFTFKNDAIGFNELLSVLNQLQPEQEKRIGFEATGHYAMNLKIFLEEHNYSFMEINPILINEFSKASTLRRTKTDKKDAQLISKFLSTKEYKPYPSKSYHIKNLKSLTRSRESLVKDRSKLLVHMTNVLDLVFPEYKPFFKKSLTSSTCLYILEEYTTPSKISRMTIDSYNKMKSKLRNTISYARFLQLKHLAKNTIGTEDDILIFQLYTYLDLYKMYVEKINEIDKKIKLEMEEINTHITSIPGIGPISAAAIYSELNGVHCFESPSQIQAFAGIEPSTNDSGEHSYRGHMVKRGSPYLRQVLMNVAESSLIHNPKIYEYYRKKRDEGKHHRVALSHVAKKLVRIIFYLEKHNQDFCIEYMR

SEQ ID NO: 113118 - protein, 430 aa, unidentified
MVVSGSAGRAIGLDVHRDFCEVAICESGRVRSAGRIETAPEVLELFARSLGPEDRVALEVTGGAWEIARILEPHVRRVVVVSPDDTGIRQARAKTDRLDARTLARLLWTGELDAVWMPDERCRLMRRRLARREQLVRSRSRAKNEIHAVLMRRLKGKPPFSDLFGVKGRRWLGELELPVEEAETVASALRHIEFLDQEIAAVERLIAREALVWADARRLLTVPGVNVICAASFLAAIGDIRRFRTSRQLVAYLGLDPKVRQSGEQPAKSGRISKRGSASARWALVEAAWSVVRQPGPLHAFYERIRARRGHGKAVVASARKLAILFWCLLARGEDYAHQQPSLTAKKLRLLEITAGAPTLKGKRTGLWATRQRMRQAERELAQQAEASYKRTVSDWQSARPAKGGRERDTGARIVKSLKRGQAARQTTSS

SEQ ID NO: 113119 - protein, 341 aa, unidentified
MEAARYIGIDLHRDRFTCCVRLEDGRQYWSTWALEQLPRFVKKLRPTDQVAVEMTGNTRLFHQAVAPHVARVVVVDTNQFRLISRSVKKTDPRDAALLALYLAKGLLPQVRMKDKAHAQLASLTQTRDTLVKLRTSLKNKVNNLLSAHGLNLAREALSSEKQLEQVLALPFDELVQFELRVIVEQIRSLNRSIAQLEKRIAEEGRKLPGHRNLTSIKGVGTITSAILLSVIGDVNDFPDESRLASYLGIVPRVSNSNQTERSGRIHKRGNKLARTALVQSALIAANYNSYLRSFYQRVKARRGAGKAIIALARKFLGLIYRTLKNQWVFEDFPNFVVAQRS

SEQ ID NO: 113120 - protein, 377 aa, unidentified
MKRIKFVGLDVHAETIAVAVAELDGEVRSIGVIPNRCESVRKLVKKLGPVEELRFCYEAGPTGYVLYWQLTALHAKCEVVAPTLVPVRAGDRVKTDRRDALKLARSYRAGELTAVWVPDAAHEALRDLVRAREAAKRDQLRARNRLTKFLLRHGKRPPEGVNPWTLNYMNWVRKDVHFEPLAQQATLLDYLHEVEHMAARVTRLEQAIEEAVQLAPHQMREVIEALQALRGIAKVSAVTIVAELGELSRFGEARQLMAYSGTVSREHSSGESCKRGGITKTGNVHLRRIVVEAAWAYRHAPAVTACLRKRQERVSEEVKEIAWKAQHRLHGRYRKLTARGKNTGKVITAVGRELLGFIWAIGVKVEAEQRKALGQAA

SEQ ID NO: 113121 - protein, 401 aa, unidentified
MKRLSGGIDMGSESHHITILDEEDNFLYNQKVSHQLNEFAESIKLFRKIEKQEGGKISFALEGKNGYSAPLDRILLYQGFTLYNVDNLKLKRFREAFAGEWRDDERDSLMLSKMLKLKDYINSERERVFIKIEKPSLITEGLKLLSRHQQTLINEKIRLINRLGKKLLEVCPQILKLGKLKNKKIIAVLAKYPDFSKYKKITLKSLLKIKGIGKIKAPFLVKRLNNIEYMPGLTDIYKTIILSYAKRISELQKEIEDIDKKLDEIGEKDKEVKHLKTLPGVATKLASRLIGEMGDINRFPSEKQLAIYCGIACVDNNSGKVTKAKAVYKANKICKQALITMAGGSIRLSLQCRAYYLKKRTEGKSHNHALRCLARQMIKVIHRMLTEDRDYIVRKELRKVA

SEQ ID NO: 113122 - protein, 367 aa, unidentified
MSSIVYGGLDVHKDTIAFCIINTGSGEILEDKLPNDPDRLAKAVRNWKKLGELHLCYEASGAGFVIKRLMDKLGVHCEVIAPSLIPKAPGDRVKTDKRDARKLANLYRAGLLKSVRVPDPEEETVRTLVRLHDQVTKDMTRVKNRVTKYLGSLGHYFRNGDTWTQKHQAWLKGVPLDEIQRMIVDTHLKQLAEFGNQRKIIDQKIAELAQSERYQEGVARLVCFRGIDVYSAMLLLTEIGDAQRFGRAPHLMSYFGLVPREVSSGGTHHRGKITKAGSSRARWVLTEAAWCQIRKPGSSMRAMKVRESQPAEVVAIAEKAEKRLHSKFWSVALRKDRRTAAIAVAREMTGFIWAILRVEIRAEKAAA

SEQ ID NO: 113123 - protein, 484 aa, unidentified
MGSPRWLRRWDEAAGADATDSGIATEGEPKVEAAVGCRGPRLCQGQARSARRKRPLTEPAGPGCEAITQPPGEAAAAAAASRSLKKADLSLRDITPSPPTRSLTQTKGGQERSAVRSVALDFGVRQITLCEVKEQKVIERATVRSIGALEKYLGPNTLPATVAIEACREAWSLHDRLGQWGHQVVLVDTTRVRQLGIGQHGRKTDRIDAERLAMALERGSIPRAHVLAPHRRQLRLQLEVRRALVETRAQYITTIRDLIRAHGEQLRGARSEKFLEVLKQAPLSEPTRALMAPLSQTIAVLDEQITQSEAKLLGLCQQEPVIELLTTVPGVSLITAAAFVSVIDQARRFDDAHQVESYLGLVPSENSSGGKRRVGSITKEGNTYLRALLVQASWGILRGRGDDPLTLWGQIVADRRGKRVAVVALARRLSGVLWAMWRDQTVYEPARVGRPSAQGLERQAQSVKFQAQMMAQAARKVRRQYGAP

SEQ ID NO: 113124 - protein, 349 aa, unidentified
MTEAYDDREVVGMDLHRRRSVLVRMTSDGQRLETARITNCPAELRRQIARAGAHPRVVLEATYGWYWAADTLTAAGAEVHLAHPLGVKGFAYRRVKNDVRDAADLADLLRMGRLPEAWVAPHRVREMRELTRYRVKLVRLRTSCKDQVHAILAKLGVTVTCSDIFGVWGSTWLDGLDLPQPYAGKMTSLRKICAALGDEIAVLETAIAGLLDSDQGYQAVRALPGIGPVLGAVIVAEIGDITRFPRPAELCSWAGLTPRHRESDTKVSRGRITKQGSRNLRWALIEAIQHVPAGHPLRQRKDDIITRRGDQARNIAKVAMARQLLTWIFYAMRDGQVRSLTAATARQAA

SEQ ID NO: 113125 - protein, 326 aa, unidentified
MAKQKQTQEVSFEEVVERGCGLDVHKKEIVATVSGTGIESETRTFQSTTRSLTELKEWLLALGVTHVAMESTGVYWKPVMNILEPGGFTIMVVNARHIKYVPGHKTDKKDSAWICKLLRAGLLKGSFVPGRNQRDLRDLTRYRRKLVQQQSAEHNRMIRIFEDANLKLSSVFSNIRGKMCTRVIDAVIAGETDPQKLAALCTHRRLKASKEEIALAVEGCFTEHHKFMIRAIRTSISNIEAEIDHLDKEIERRMQPFEAQIQQLCEIPGIDVTSVNELLAEIGVDMEVFPTAEHLTSWAGLAPGDNESAGKKKTHTPTTATKPQKR

SEQ ID NO: 113126 - protein, 417 aa, unidentified
MSVEQHHSGRREATATAAKLTAGIDWSSTHHAIALVDEHGGQVQRLDVEHTAAGLRRLVHCLQQAAVTGVGIERGDGPLVDVLLEAGLTVFVIAPNQVRNLRRRYGSAGNKDDAFDAYVLADTVRTDRLRLRPLTPDSPATVTLRMSVRARQDFVAARVAMANQLRAHLQHVLPGAIGLFSHLDSAVSLAFLTRFPTQDRADWLSPRRLENWLRTQRYCNPRRADVLHAHLVAAARGATGPEAEARAGVTAALVAGLSCLRQQIAALDEDIAQQLARHPDAVVFTSLPKAGVVRAARLLAEMGDARGRFPTPESLACLAGATPSTRQSGKVKVVAFRWAVDKQLRGAVMDFAGDSHHANTWAADLYQRARAKNHSHSHATRILARAWLHVIWRCWQDGVAYDPARHRALQALEKSAA

SEQ ID NO: 113127 - protein, 337 aa, unidentified
MSIIRIGLDTAKHVFQVHGVDEAEQPVVRRRLGRKEVEQFFAARPATRIGLEACGAAHHWARILSGLGHEVVLLPPQYIKPYVKRGKNDALDAEAICEAMSRPSMRFVPIKSADQQAALMMLKTRDLLVKQRTMLINAMRGHAAEFGVVAAKGVSKVSELLQLAHAEAAGVPALALEMLRLIASQLDALELRLKTIEARLMAWHRQSPVSQCLATQPGIGPIGAVSFALKVTDPKAFRSGRHFAAWLGLTPKENATGGRSRPGRISRQGDESLRRLLVLGATTVIQFAKPGRASPWLMDLLARRPRKLAAVALANKMARILWAMMVSGELYRRQQPA

SEQ ID NO: 113128 - protein, 411 aa, unidentified
MCKEIEGFPLTKIRKGVYTMFYLGIDIAKVNHVASLIGEDGSVVVKAIKFTNSNEGLQKLIDSISEYDQSQIYCAMEATGTYWLSLFSALTDKNFNVSVFNPYQIKSFRGAYSNRKQKNDVIDSIIIAEFLRFNGIEQTCLPNDDLLALKNLTRYRSNLVDNISKAKIQIKGILNKVFPEYSDVFSDTFGNASKQILLNCPTPSEVANFNTRKLANLLKKASRGRHGTDTVRKVKELAKNSFGIKFTGDACSFEIKQLVSQIIFLENQVDELNLKIKELYSKLDSHLESIPGIGKAIAPVILAEIGDINNFSTSSKLTAFAGIDPSENQSGNKKSTDEKTSKRGSPYLRHAIYQAAFIASNNDPVMHDYYVKKRAEGKHHYVALAGVERKLLGIIFHVLKENRDYRPSKFS

SEQ ID NO: 113129 - protein, 460 aa, unidentified
MEKEKRSRKTKAIPALQTIQPEVAGVDVGSKEHWVCGPALASGQPNVRVFGTTTDQLKELVAWLRAQGVKSVAMESTGIYWIPLYELLESHGIDAVLANARQLHNVPGRKTDFADCQWIQLLHSCGLLRGSFRPGPNITAMRAIHRHLANLVEQRAHYVQWMQKALDQMNVQVHRAVTDLTGTTGMAIIRAIVAGERDPARLSALRDPRCGKSAEEIARYLTGTWRDEHLFSLASTLELYDAIDKLICTCESHLLDSVQALQPDERKDAALPPHPNPNKERFLRSHGAQPVRTALWRFAGVDLTRIDGISLGSAKIILTEIGPDLSAFPSEHHFVSWLRLCPRTPISGGKPLKKGRNGMGANRVANTLRMAASSLQRGKSALGASYRRIARKKGALVAVFATARRLAQLVYRMLRYGQDYTDIGEAKYQSLFDARRLAGLTEAARSLGYSLTKEPSPALT

SEQ ID NO: 113130 - protein, 333 aa, unidentified
MVMAAIDIGKTLLQTASLDEESGLTSEARLTADRPSLHAWVDGFQGRLETVAIEATTGWKWIARELRGRGVEVRLLDPGEAAARKGRKRRAKTDRLDARFLLSLIATGMAPEAWLPPQEIQELRALTRTRKALVDERTAMAERVQALLFHEGWPCQRGRLLTRTGRSWVAALELEPAIRLLLDVLLGVIDDLDRRLEPLERELAQRVKRDRRLQALQRIYGVGPIVACHLLAEIGDARRFSRSRQVVRLSGLDPVVLESGATKRRGRLAKAGPPLLRWALVEAAKHASRNQSPDHERWLRISKRRGSKIADITVARTIAGRAYRILRDLDAAA

SEQ ID NO: 113131 - protein, 346 aa, unidentified
MLHAGLDLSRRKVDVCLISDEGELVDEWASPPDADGLRGLAARAAMHGSAVRGVVESMNGARFVHDRLEESGWDVLIADAQKVKGLAPLACKTDKIDARVLAALSCRDLVPEIWLPDPAVRRERELARFRLHLVRHRTTLKNRIHATLITFGHPCPVSDLFGYAGRELLDRLAIPDPWRRNVDVSLRLIDDLELQIAQLTVQLKRQGADHRYIPLLVTAPGFGWINAFTVASEIGDIDRFASPAKLCGYTGLCPRVKQSGASDRRGPLSKHGPRYLRWALFEAAMNACKHPLYKERYQHTKRRLGRQRGPKVAQIELSRKLTEAIWHMLTRNQPFAPAGATFRLAA

SEQ ID NO: 113132 - protein, 340 aa, unidentified
MDISVLGIDLGKNSCSVVGLDAAGKVVVRRRMRRETVITYAASLPACVMAMEACCGAHHMGRALARQGHAVRLMSPEYVRPYVKAQKNDDRDAEAIAEAATRPTMRFVELKTEEQLDMQTLHRVRDRLVGDRTSLMNQIRSLLLERGYIVPQGRAKLAARLSEMLDGEPVLGARIHRLISDMRLRWIALDERIADLDAEFTEAARSDERTRRLLTVPGIGALNATALVAAVGDARTFGRGRDLAAWLGLVPRQATTGGKPRLLGITKRGSRYLRKNLIQGARSSLPTMSKSDTRLGAWLRGLLSRSHPNTVVVALAAKMARIVWALLRHERTYEPVAQAA

SEQ ID NO: 113133 - protein, 413 aa, unidentified
MGYKVAGIDIHKQVLMVVVMLMQAGGLVEKLERRRFGTTTPELEKLAAWLVALGVQEAVMESTAQYWKPVWGELEGKIPTLQLAQAFSNLARRGRKNDFRDAERLVRRLVAEELVLSFVPPPEQRNLRTLTRMQVHLTHDRGRLHNQVECLLEEMRIKLSSVLSDLFGISGRRILGAIAKGESDPLKLAALAEQRLKSTPQQLLAALTGKVLPMHQRLLGLYLERLNLLDAQIAELQRLTAEALQPRQEAVQRLAEVPGFGADSAQQMIAEVGPEAATFPSAGEMASWVGTCPGQNQSAEDNHSSRSAKGNRYARRLRTEAANAAVKTKGSHWQVVFRRLLPRLGYQQAVWAVAHRLCRLVWKILHDKVRYVEQGVNRDPKARANRARTLARALRQLGYSVQLAPLTPTPAQT

SEQ ID NO: 113134 - protein, 342 aa, unidentified
MNISMIGLDIAKSAFQVHGVDESERVVLRRKLRRGQVLEFFGRLAPCVVGLEACSTSHHWARALTGLGHEVRLIAPSYVKAYVKRGKNDAVDAAAICEAAGRPSMHFVPVKSAAQQAELTVHRARELLVKQRTMLINALRSQMAEFGVVSPQGRTGLKGLLEILHDQQETRLPEGAQTALLELAGTIAALASRIAALDKAIAKSVRKNPIARRLMTIPTVGPITASAVAATVGDPAAFRNGRHFAAWLGLVAKQHSTGGKHRLGRISKMGDRYLRKLLVLGATSKLRTVATGKTPLDAWARRLIENKPKRLVTVALANKTARILWAVMAGNDVYRPERAAAL

SEQ ID NO: 113135 - protein, 365 aa, unidentified
MQKISTMQASGKNIFEGQLTIGLDLGDRSSAYCVLNEAGEIVLEHKLATTPEAIKQVFGSLPRCRIAMETGTHSPWVSRLLTALGHEVIVGHAQKVRLITKSRRKDDRLDARTLARLARIDPELLSPVKHRSAQSQLHLTEIRARAVLVSARTALVNAARGLVKSYGERLRKCGTQQFCRETTSGLSTGLREALEPLLREVESLNERIQEYDRRIEKMAKQTYPETALLKQVKGVGDLIATAYVLTIEDPHRFRKSRDAGCFVGLQPARRNSGESEPQMRISKEGDEYLRTLLVQGAHYILGPFGKDSDLRRWGQKLSARGGKNAKKRAVVAVARKLAVLLHRLWVSGEVYEPLRNSQKAMSAAA

SEQ ID NO: 113136 - protein, 412 aa, unidentified
MKKYVLAVDVGKGKSKIGLFGVNTQTMRVETILKPKDYAHSESELGCLLTRIGDLPVGDIGVMMESTYVYQSPLVVFFRRHGFTEISVINPLKIKKSCGDIQKVKTDKIDCRRIARFYFFSEWTVPIEISEEHREARELSRYIDSMLKEKASLTCRLRQHLCMVFPEIESIAEEKSPITSDGFLNLFESGMHPETLKKKTVPGIVTLMAGKGKRHQAYTDYAVKIKEAAKHSLYTAKEDGVEVTIIIPDIVRRLKGLIRKIGELEEKLASMTEKNDIFAVLESFDGIGRKLASHLTAEIWETVSYATPQKLIASIGINPSRSQSGETIDRYGKIVKAGNRYIRHWLFEAISSILRQRPRGHGDIRISDYYNKKHSDEKLHHYAATIACCNKLVRQLYYRSRDLTKTKELIIK

SEQ ID NO: 113137 - protein, 355 aa, unidentified
MLNTKYIGMDIHKETISIAVISAGGKSVMECVVETKASTILQFIHGLRGDLHVTFEEGTWAAWLYDLLKPHVTEVLVCDPRKNALLKRGSKSDKIDARKLAELLRLKHLKPVYHGEHGVRTLKELARSYLTITQDLTRVRNRLKALYRSWAIPCSGTQVYTLRHRSEWLGKITEAGVRRRAEHFYQQFDALRPLRQEVRRDLLTEGQKHKAWKLLRHIPGIGAIRATLLIALIQTPHRFRTKRQLWNYSGLGLETHDSAQYCVVEGQVQRSKKPLMLRGLNQNHNHDLKAIFKGAALEASSGAGPFHDFYEALLTKGRKPSMARLTLARKIAAIALIVWKKEVSFDAKHLKQQAA

SEQ ID NO: 113138 - protein, 366 aa, unidentified
MQKISTMQASGSDISKRQQITIGLDLGDRASCYCVLDTTGDILQEDKVPTTPQAMRQLFGRMLPSRIAMETGTHSPWVSRLLTELGHEVIVAHAQKVRLIVKSRRKDDRLDARTLARLARIDPQLLSPVEHRSAKAQLHLTEIRARAGLVSARTALVNATRGLVKSYGERLRKCGTQQIRRETVSGLSPRLREALEPLLREVESLNERIQEYDRRIEKMAQETYPETVLLKQVQGVGDLIATTYVLTIEDPHRFRKSRDAGCFVGLQPGRRNSGQSEPQMHISKEGDEYLRTLLVQGAHYILGPFGEDSDLRRWGQKLAARGGKNAKKRAVVAVARKLAVLLHRLWVNGEVYEPLHNSKKEVRAVA

SEQ ID NO: 113139 - protein, 384 aa, unidentified
MNKHNILFIGLDTHKVFVEVAYIEDQRGAKSVHLGKQPTTKLAITKLARQFESKYPDATLHFVYEAGPCGYWIYRLLTSLGHCCYVVAPSLIPKKPGDKVKTDKRDAMMLAKLLKSEDLTPIYVPEPEDEAVRDLSRAREVAMKDLKDAKYQLKAMLLRNDINCKVKDNWSAPHLRWLTALVLPHPAQQIVLQECIQIITERTQRVERLVNELTHQVQSWRYYPVVKAVQAMLGVRLLVATGVVAELGDLNRFDHPRKLMSYVGLVSSEHSSGGKRKLGGITKCGNGRARRLLIEGAHSYRYNANISTEIQKRQEGLPKAITDIAWQAQLRLCRRYQRLSHKGKHYNVIITAIAREMIAYIWAISREVVLTPVNPKLRLSRVPA

SEQ ID NO: 113140 - protein, 368 aa, unidentified
MKHSIIFVGLDVHKDSINIALADDGRNGDVRSYGAVSDLDALNKVIRKFRCSGVEYRFVYEAGPCGYEIYRHLTTQGFHCSVIAPSMTPKRSGDRIKTDRRDAVTLARLYRAGELTPVYVPREDDEAMRDLIRGRDDAVNATRKARQRLSAFVLRHGFRYAGRYAWTGAHLRWLADIKMLHPAQQIILQEYIHSVEENSERVNRLTEQILKLLPAWRMAPVVAALQSLRGVAPIVASTMVVELGDMRRFENPRQLMAYLGLVPSENSSGQTTKRGGITKTGNGHARRALIEAAQAYSFPARVSRDLRKRQDGLPHKIREISWKAQVRLCGRFRKLLARGKNRNRTVTAIARELSGFIWAIAKEVPLTT

SEQ ID NO: 113141 - protein, 337 aa, unidentified
MNEFNFFAGIDISKKTFDVALLHAGNPAVIKHACFKQNIDGFHQFITWLAEGNLPVSEVLFCMEHTGLYISGLVEFLASLEANLWIEMPLRIKRTIGLQRGGDDRVAAINIAQYAYRYQDTARLWKPMDTAIEQLRNLVAQRDRLILAFNQLKVPVNELEECGSARQAKDLKRLQRPAITGIEKSLKAVEARIDEMVAGDTHMNKTIQQVTSVKGVGKQTAVALYVYTKGFSVFANAKQLACYCGVVPFTKSSGTSVRYKSQVSPYANRKLKKLLHLCAMSALRFDKGLSEYYKRKTAEGKNKMSVINAIRNKLLLRIFAVVRDGRNYVENYVQPGE

SEQ ID NO: 113142 - protein, 393 aa, unidentified
MYFVGIDISKYKHDCFIATEAGEVIKDTFTFDNNRTGFDQFFSILDGLGPKNKIKIGLEATGHYMNNLMKHLSVKGYSFILLNPIIVSRFRHSETLRRTKTDKVDAKLIAQVIASKDFSSYPLQAYHFPDLKTLTRLRDRLIKQRSLYLVMLTNQLDLSFPEFKEFFDGNLKSKTAQFILTKYGISSRIANMNSQSFELLRKVSYGKFSYAKFANLKELAKNTIGCSSEIDEMLFTLTINLYQLLDKAITEVESKITEIMEKLDSPTASIPGIGTISAATIIAEYGDVSRFANDGQMLAYAGLDSGRYQSGTSDFPGRMVKHGSGYLRQALMNVAETCMMHVPSFYDYYLKKRNEGKSHRVALSHIARKLVRLIYKLETSHAHFDLSVFNSQH

SEQ ID NO: 113143 - protein, 408 aa, unidentified
MMLHRKMQHLYVGCDVHKHQHTAVIIDCFSEKLGELTFPNKKNDFTKLISFVKRHTPQGITPVFALEDVLGNGRELAIFLLERNYKVKYVNPSLSQSERKNQASINKSDSIDSQCVANVLLNKLDALPDAVPNDLHWALNELVTKRNTLVKNNVVLKNQIHTYLSHHYPNYKNFFFSLDSKTALEFFKAFPSPSKLNGITIQKLTAFLSEKSHHNCSEKKARQILDYVEKDGDTTNEFQDLRDFIVTSSIKQINDNTAIIASIEDNMKKLIPQFGYKLESMKGINTVTAAGIIAEIGDISRFPNADTLAAYAGISPMRYSTGQTNKNFSNKLGNRNLYQIFFQIAVSLLSDPKGKPTNAYFYDYYKKKLSCGKTKKQSIKCIMRKLVNIIFKMMRDKSEYREPVIPME

SEQ ID NO: 113144 - protein, 337 aa, unidentified
MPCQSTSKNTLIQHPASPAEKVRTYVGIDVGASWLDVCIRPENGAEDHSFRVANDPSGCKKIGRALKKVTVACVVCEATGKLERLIVRCLGQQGLPVAVLNPAQSVNFRKACGKIAKTDKLDAALLARFGQVMQPVSRPLPDEQVLALRELVVRRRQLVTSHTAESNRSLRTESLLAKRQIMVLLRLLDRQIKELDKALQAQIAAFPEFRAKVDLLLSIPGIGPVVALTLVAELPELGAIQDGALSALVGLAPMNNDSGQRLRRAKCKGGRKSVRTVLYLAAMAARRFNKPIAAFYERLVARGKPKLVALNAAMRKLLLIANHIMASGKPWVELPSA

SEQ ID NO: 113145 - protein, 360 aa, unidentified
MFCERTSVGLDVHARSVVAAAIDGRSGEVFRARLTPSHAEVIEWVGKLPGPCAVVYEAGPTGFGLARALSAAGLRCQVAASSKLLRPAGDRVKTDARDALNLARLLRLDEVVPVRIPSAAEEAARDLVRTREAARADLMRARHRLSKLLLRHGIVYYDGKAWTERHDRWLHHQRFDAAPTQSAFEDVYEAVVLATARRARLDEKITALAADSEFSPLTRRLACLRGISTLTGFALAVEIGDWDRFTGASIGAYLGLVPSEYSSGTSRTQGAITKTGNTHVRRLLVEAAWHHRSTYRPGPVLRHRWDQAPAAARARAHAGNQRLHARWVGLNLRRKAAVIANVAVARELAGWCWSLAVLPD

SEQ ID NO: 113146 - protein, 326 aa, unidentified
MMILGIDIAQEKFDLALYQGKELVASGQFANNAAGFKKLSKWLNNKAAGQVKACLEATGRYGDALALYLYQAGHQVSLVNPARIKKYGQSQLQRNKTDKLDARVIADFCRTQEPGLWRPPAPEKRELQEMVRRLSALIKEQTREHNRLTAGLQSQVVKESITANLEFLAAQIAKLEQQIQQHIEQHPGLKRDKELLTSIKGIGAKTAAIILAELPEVDHFDHAGQAVAYGGLNPEQHDSGSSVHKRSKLTKTGNQNLKTALYFPALSAIRHNPIVKALARRLEEKGKEKMVIIGAAMRKLLQLAYGVLKSGQPFDPDYATKIQAAI

SEQ ID NO: 113147 - protein, 412 aa, unidentified
MEVVYSRCCGLDVHKKSISACVVIREHGKVQKVERRFGTFTRELEEMAEWLTELEVTHVVMEATGVYWKPVWNVLEGRFDLMLVNPEHIKALSGKKFDRRDASHLADLLQHGLLQGSFIPSAEIRQLRDLTRNRARTVQEAARIKSRVQKILEEANVKLGSVATDVLGVSGRLILNGLVAGEQDAAKLADLAVGVLRKKRDQLAQALSGKVNDHHRLMLRKLLGALKEREAEIADDEADIRKQIEPFGKAVLAWTQIPGIDEITAWSLVAEMGPDMAPFETAEQAASWSCVCPGNHESAGKQRDGRTRKGNPWLRSAICEAAWGASRTKKSYFHAQYARICARRGPKRALMAVAHSMIVVGFYLIKYDLEFKDLGADFFDRRNREHTTRRAVKRLTALGYKVHLEEAVNVPS

SEQ ID NO: 113148 - protein, 374 aa, unidentified
MTITANESPTTVSEVILGIDTHKDVHVAVALNQLGRRLGELNVPTTTKGYEKLLRWAEGFGPVCCAGVEGTGSYGAGLARRLKAAGISVMEVERPKRRHLRRKGKSDPIDAEAAARVVMADDTAGEPKSGDGQVEMIRTLRSVRQSAVKARTQAANQLQALLVTAPESLRHRLRELTTRELVDTCGRFRPGAGPNEVHTATKFSLRSVARRYQLLSEEIAELDEQLDRLVAKAAPELTALPGIGTDHTATLLSVAGDNPQRLKSEASFASLCGVSPIEASSGRVVRHRLNRGGDRDANRSLHLICVVRMRHDQRTREYVARRTAEGKSKPEIMRCLKRYIAREIYRLLASRSAASPPTASVSQAAYPRKLAAQP

SEQ ID NO: 113149 - protein, 393 aa, unidentified
MFFVGIDIAKRSHEACAINQDGAFVVKPLKFTNDFKGFNKLLDALNAVSDDLSVFDFGMEATGHYWLNLYCKLLDHGAVVHVINPVQSDALRGLYIRPHKNDSKDAFIIAELLRFGRYAQTSLSDPNLMALRELTRQRTYLVDCTSDVKRKVIALTDKVFPEYEQLFTDMFGSASLQLLETYSTPDALANIDTDDLARFLSAASHGRFGHDKAQQIQSFARNTFGSFLFADSAGFAIKQFLEQIRLLERQVQELESYIAEYLAKFNSALTTINGIGTTLAAVFVAEIGDVSRFHAPDKLAAFAGIEPRMNQSGEFTGTQNHMSKRGSPYLRRAFYQAAIACNMHNPALHAIYEKKRAQGKHHNVALSAVARKLVNIIFAVMKSNKPYEMIMPS

SEQ ID NO: 113150 - protein, 311 aa, unidentified
MTDDTIGIDISKDTLHVHRLSDGATFQFSNCKSGFLDLTRWLAKTRIARIVYEPTGVYHRDFEMALGSRFPMVKVNPLQARRFAQARGVRAKTDQVDARMLAVMGSSFALSPQPLISQKQRELKELQLLRLALIKDRTRHTNRSKSLLLAISKRQAKMRLSLLKRQLEEIDAKIQQLLSKRHQTMRAREILCSIPGLSKVSAAALLIEMPELGTLTNKQTASLAGLAPMVRQSGQWSGKAFIQGGRKNLRDALYMPALVAARHNPDLKAKYDAFVTAGKPKKVALSALMRKLIILANTLIKQDRIWVEKEP

SEQ ID NO: 113151 - protein, 348 aa, unidentified
MVVIGVDSHKRTHTVVAADGTGRKLAEKTVAATSAGHLELVRWAGRFADHSWALEDCRHLSRRLSTDLLVAGEAVVRVPPKLMAGARRSGREPGKSDPIDALAVARAALREDLPMATLDGPDRDVRLLVDHREDLVAERTRAQNRLRWHLHELDPGSEPVARSLDRTVVLDGLVRDLADAPGTVGRLARELVGRIRDLTRSINELEREITRLVADLAPSLLALTGCGPLTAAKLIGETAGVGRFRSKAAFARHNGSAPLPVWSSNTERHRLSRTGNRQLNVALHRIAITQLQREGPGKTYLEHRRANGDTKTEAIRALRRRISDEVFRRMRHDEAARATSPTGLAAAA

SEQ ID NO: 113152 - protein, 348 aa, unidentified
MALTIVEAARAVTGGVDTHLDVNVAAALDDIGGLLGVEEFATDAGGHRALVSWLCSFGTVVLVGVEGTGSYGVGLARALRAAGIEVVEVDRPNRQARRRQGKSDPLDAVEAARAALSGRARGAAKTRDGDVEAIRALMVAKRSCRSTRTATLNQLRHLGFCAPDEVRQRFFGLSTLRLAEEAAALRPREGTDVVAFATKTAMRTLGRRVAVLDREKADLDELLEVLVASAAPELFALYGVGVHTAATLLVTAGDNPGRLRSEAAWAHLCGVAPLEASSGKVVRRRLNRGGDRQANAALWRIAMVRMSSEPRTQAYVARRVDEGRSKPEILRMLKRYIAREVYRHLPRG

SEQ ID NO: 113153 - protein, 438 aa, unidentified
MLNTHQNKPMQNLNTTTNFAATIGLDWADKKHDLWIHPAEGDKAQHLQLEQTPQALHEWVAQLRKRFDNRTVAMAVETSRGPVISALLAYDFMVLFPVNPKALKDYRAAFAVSGAKDDRTDAQLLEEFLRLHRDKLRALAPDTELTRKLGGLVENRRHLVDERTRLINQLHSTLKTYYPLTETLLKDQFNTPLAAEFLTRWPDLPSLQQAAAKTLRAFFYKHNCRSAKAIEARLTSIAIAKALTTDEAILAPARMLVSALASLLKPLHQAIAQLEGVIEQALDQHPDAAIFRSFPGAGPALTPRLLVAFGTQRDRFQSAQEVAQFYGLAPVVIQSGNSKVTHIRRRCPKFGRQTFHENANCALRQETWARCYYDQQRQRHQDKHHQACRALAFKLIRIYFACWRDRKTYVTQTYERALQTNGSPLHKKLNPTTQTNCE

SEQ ID NO: 113154 - protein, 388 aa, unidentified
MIYVGIDIAKLNHFAAAISSDGEILIEPFKFSNNYDGFYLLLSHLAPLDQNSIIIGLESTAHYGDNLVRFLISKGFKVCVLNPIQTSFMRKNNVRKTKTDKVDTFVIAKTLMMQDSLRFMALEDLDYIELKELGRFRQKLVKQRTRLKIQLTSYVDQAFPELQYFFKSGLHQNSVYAVLKEAPTPNAIASMHLTHLAHTLEVASHGHFGKDKARELRVLAQKSVGVNDSSLSIQITHTIEQIELLDSQLFSTELEMANLVTCLHSVIMTIPGIGVVNGGMILGEIGDIHRFSNPKKLLAFAGLDPTVYQSGNFQAHRTRMSKRGSKVLRYALMNAAHNVVKNNATFKAYYDAKRAEGRTHYNALGHCAGKLVRVIWKMLTDEVAFNLE

SEQ ID NO: 113155 - protein, 461 aa, unidentified
MAKRKKKSSMHIPPLDTLQQLNLNAAGLDIGAEEIYACVPADRDEQSVRVFGTFTVDLHALADWLEACGIDTVAMESTGVYWIPVYEILEARGFELCLVNARHLRNVPGRKTDILDCQWIQQLHTYGLLRASFRPPEEICALRALARHRRNLVRYRAAHIQHMQKALQLMNIKLTQVVSDITGVTGLSIIRAIVAGQRDPRVLARLRNPQCAKSEEEIAKALQGNYKTEHLFVLKQGLAQYDFYHQQIQECDTEMEGRYAAWLPSDAGDPASPPPKPKRGKPRKNQAHFDLATSLYRMVGVDLTAVDGLDALSVQDIITEIGVNVNPWPTVKHFASWLSVSPYNDKSGGKVLRRGTKKTQNRASTAFRLAAQSLSRSDSALGAFYRRMRAKHGPAKANTATAHKLARIVYHMLKYREAYVDPGEDYYQQRYRERTIRNLKRKAAKLGMELVPADAQASLVS

SEQ ID NO: 113156 - protein, 404 aa, unidentified
MGKIYVGIDWADDHHDIYVTDDSAAALDSFSIAHSHEGMQKLISRVDKCCADRELVLVAIESHQGLLIYALLEAGYLVYPINPKAMDRYRDRYRMSSSKSDPKDAMVLANILRTDLHLYKPLPKEMAVDARLRQLTRSHKSLGQQKTKLLNQLTIQLKSYYPVALRLFSRLDHKITMAFLERFPTPEKASAASLEELRRFFCEQGYSHRWRITSIYESVQQPSLRVPIELETIHQTIVLSLIPVLRALAVEIEKLAGTIGEEFKHSQAHDVFSSLPTGELTAARINGELGSDGARYPSREYLQTAAGTAPVTRRSGKTVVVLFRWQCNKHLRAALQDLARDSVKRCPWAREYFMGQMRLGHKPSRAYRALANRWAGIIWKMLQTGQRFDQSRLDKHWAKMVTTS

SEQ ID NO: 113157 - protein, 421 aa, unidentified
MKQEAHEECAAFIGLDWADSKHDVCLQAAGSAKREYFILTHTPEAIDAWVSTLRTRFNGHPIAVCLELNKGPMVSAWRKYDFLVLFPINPLTLARYREAFTPSRAKDAPTDAALQLALLLTHRDKLPPLKPQSPAMRALAPLVAHRRRVVNDRVRITKRLTSTLKNYFPHVLPWFQDKDTAVFCDFLSRWPTLKAAQLARRSTLETFFRDHHVRSADIIGKRLQAIKTATPLTSDAGVIAPHVLFVQTLVSQLRVTLDAIETFDHAIAQRAQSHPDFPLFQALPGAGPVFAPRLLVAFGEQRARYASAAALQPYAGIAPVTERRGKKSWVHWRLQWPQCVRHTFVEWAAESIRHSFWAQLYYQQQRDKGKAHQAAVRALAFKWIRILYRCWQERTPYDEATSLQALTRRGSSLLQNLAKVS

SEQ ID NO: 113158 - protein, 345 aa, unidentified
MEKKLNVLGIDIAKQVFHLVGRNEQGTILLRKRLYRAQVMAFIAQLPPTLIGMEACGGAHYWARRFREHGHAVRLMAPQFVTPYRKANKNAMRDAEAIAEAIAEAMTRPTMRFVPVKSVAQQDLQALHRVRERLMKARTALINETRGLLHDYGIIVPQGAATFRKHVLEKLTTEAAKLTPHSLELFRQLLEELAALESRVAPYDAQLAQVAQMHPVCQRLMTIPGLGELTATALVAAVNDATQFQNGRQFAAWLGLVPRQHSTGGKARLLGISKHGDSYLRKLLVHGARSCLRWVGRKRDRRSQWGQSLMERRGWNKAAVALANKHARVAWALMGTEQVYRVAEA

SEQ ID NO: 113159 - protein, 320 aa, unidentified
MMAQNDLVVVGIDVAKDKVDACIRRFTLRQTFPNTAQGHRKLVAWLRKYQVGKAVMEASGGYEREWRNVLHNAGIEVRIVDPRRVRSFAQSAGRLAKNDPIDAEMIAWFAETFSQAPGQIPDAAREELAALAKARKALVDVKVRLQAQDEHAAPEPARKAYARVLKSLAAEIDKLEAAISAKVKATPEFAERAEIIESVPGLAQATSAILIAGMPELGQLSDEVAAALIGVAPYDDDSGKRRGERYIKGGRRWVRNAIYMPCLGAATQYNPVLKAFYQRLLAKGKEPKVALVACMRKLIIILNTMLARRQKWNPGRHAMA

SEQ ID NO: 113160 - protein, 403 aa, unidentified
MEVTKEHLDIHQFLIVGIDVHKDNHALVAANGFNQIFFEKEISNQYSDFQQIVDQIQLIARKENLRPLIALEDSYGYGQALARFFFSKGLEVKTVNPVLTRRERGYMTHPEKSDISDAKGVVKATILEGIGRLPTFRITSESEFSKDLRILVYDRDFLIKEQTRLKNQLHRLLHQSYSGYYDKIFKDPFSKKALKLWQEFPSLLELKRTKKRIVKPDWLKKTNTLTLLSISNLQENQIKRKVRRLLQIREELKEMDQDLEQLLSNSNQYLETLPGCARILAAGTLAEVKDVSRFNSKDAFAKYAGLSPRPWESGKKKRNKKSLSGNRRLNRIIHQIALSQIGNRGYQPAKDYFQKKIAEGKSKKQALRCLKRQISDVIYPVRSLLNSSLKLKLFSNFYNFWSF

SEQ ID NO: 113161 - protein, 390 aa, unidentified
MIYVGIDVAKDKHDCCILGSDGEVLFSPFTIQNTLQGFDELYEKIWSLTYDLTEIKVGLEATGHYHLNLLRSLLDNGLPSFVINPLHTNLYRKGQSLRKTKTDKVDAASIAMMLLTDKTLKSYSDSSYHNEELKSLTRYRFDKVQERARLKTSVSRLVNILFPELEKLVPSLHMASVYTLLSEFPGASFISAAHLTRLKHLLHDASKGRYGRDMAVSIRDAATSSIGSVLPAKSLELKHTLHLIEVLTEEIDEIEDAINSIMDSIASPITTIPGLKNRMGAMILAEIGDFSRFDSPDQILAYAGLSPTTYQSGQLTSSYAHMEKRGSRYLRYALFNATRYACIWDPTFKAYLAKKRAEGKHYYVAISHACKKLVRVIYRMQLTGESYRTA

SEQ ID NO: 113162 - protein, 386 aa, unidentified
MHDSTDLPVPERTGIRGDSATLFVSLELSRSTWVATSLAPGSKKMSKHTLVGGDGRKLLDLLARLKTRAEQRIAAPVKVVAIHEVGLDGFWIHRLLEANGAESHVVDPASIAVPRRHRRAKTDAIDGETLLRTLMAWQRGEPRVCAMTVPPSPSEEDCRRVSRERATLLRERIQHTNRIRGLLFGQGITNYNPLHKNRRECLEELRTGDGRSLPTHVKAEILREIDRLELVLRQISEVEAERDEMLWPVEASSPAALLMRLKGIGAEFATVLYVEGLFRHFENRRQLAAYAGLAPSPWKSGSIDHEQGISKAGNPRLRTTMVELAWMWVRYQPDSALSCWFRQRVGSERGRIRRISIVALARKLLIALSRYINHGEIPAGAVVKPD

SEQ ID NO: 113163 - protein, 429 aa, unidentified
MRAESAPGARGPVFCGVDTHADSHWLCVLDWRGRRVLSRRLPADAAGYEALAGAIAAAGEPACVAMEGTSSYGAGLTRHLASLGMPVREALSPAGMQRRRPGQGKCDESDAERAARAAMSGSKLGTPKSQDGWVDGVRCMLAARSGAVKARTSAINTARSLLTTAPEGLRSRFRGMAGPRLMEELPSVRAEGALGAALGALADLWAAARDAALDMERAIEASLEENCPALLAMYGCGPVSAAKLAVAAGDNPGRLRSEASFAAICGACPIPASSGKTVRHRLNRGGDRQANSALHEIARQRVMRDPETAEYAERARGRGKSDREVMRCLKRYVAREAYRALMHPHEIRRPADASGLVAARRTARVSQVRAASILGTSEKYISMLERGQRELKPIRRAYEAWVEAGLPLDWDRQAFEAERKMDSKKHLAK

SEQ ID NO: 113164 - protein, 310 aa, unidentified
MRFYNNSHPYYCGIDLHARLLYVCIIDSKGEVVAHKKIGASKDDLLLILEPYIGNVIVGVECMHCWYWVSDWCAELGIDFILGHALYMKAIHGGKTKNDKVDSFKIATLLRGGNFPIAYDYPSEMRAARDLLRRRMKIVRHGAMLKGHVVNTNSQYNLPATALNLKNISARQKLREQYQDPIVQRNIDLDMALLDCYAKELAQVEWFIEKQAKNHNPVYLELLKTVPGIGKILSLTILYEIGDISRFESVQKFASYSRLVKCKAESAGKTYGTNGNKIGNAHLKWAFSEAAVLYLRGNDKARNYLNRLQK

SEQ ID NO: 113165 - protein, 355 aa, unidentified
MSNCAARQIVGGVDTHKDSHVAAVIDVAGRLLGTRGFPTTAAGYNSLLAWIQSFGTLLRIGVEGTSSYGAGLTRSLRAAAVAVVEVNRPNRQLRRQRGKSDAVDAEAAARAALAQDSVRLPKSQDGAGEMLRLVRLQRRSAIVARTQAANQLHAVIASAPESIRHELRDRSITQLVEVLHHQRRRRSDNELENMTRVILRGLAQRWSPLDKEICMLDAHLKRLVEQCAPALLARPGIGPEVASALLVAAGDNPERLHHERSFAALCGVAPLDASSGRQQRHRLNRGGNRDANRALWVIAFVRWRMDPATKIYAARRMAEGRSKLEILRCLKRYIAREVFKLLQPLCLEGRSLTPT

SEQ ID NO: 113166 - protein, 408 aa, unidentified
MKRYYMGVDWGDRLHQVYVGDQEGKKVREIKVPETVEGLAELGRWLDEKRAEGFELWAAIEKPAGRIVDFLLDHGVEVYPVNPKAVDRVRDRYRMSGSKSDAFDAYVLAEFLRTDQAHLRVLRPSSEKAQELKMLCRDQRRVGRHKTRLLHQLTTTLKEYYVRPLEAFEDIETEVALDFLTRYPTPAHLEVLKRKAFKRFATKQHHLSQQRCEQLWEKLNQPQLKVPDHVVRAKAQLVEVLIDQLRAAIKSVKTYNHKVESFFASSPAAQIAKTLPGGKSGTLVAAIWAELGDAHSRWESFRHLQAEAGAVPVTKASGKSRVVQFRFACNKHLRYAMYWFSFVSLNHSEWAKLYYRQQRSHGHTHPEALRALGAKWLKIIFVMWRDHKPYDEKFHLANIALQKIRQAA

SEQ ID NO: 113167 - protein, 315 aa, unidentified
MQTVLNLGVDIGKDAVMVACADASFAPRSVPNRRVALLAWLRSLPSGSRIALEATGRYHELLAHLAHQQGMQVFVLNPRDLRHYARAVGMRGKTDRVDAELIARFIAREHAKLHAHVPASPAQRALERLLKRRAKLVTIQGALRLTLRGVPGLGSQAKALLTQLRALLDKIDSQLETLSRQQPQHQALRERLQTILGVGPLVSTALASTLQRIPFRNGDAVVAHTGLDPRPADSGRKIGRRRLSKRGPSELRRLLFNAAMSAAKTKLWRPIYEHYRNKGLSSTAALVVIARKIARIAWSLFKNQTVFDPTRLARA

SEQ ID NO: 113168 - protein, 362 aa, unidentified
MEYFAGLDVSIDETAICVVSDSGDVVLETSVATDPAAIAAALASYSGRLRRAGHEAGALSPWLHPELLAIGVPAVCLETRHVRAAMSAQRNKTDAADALGIAHIMRTGWFRQAHIKSEGSYRIRLLLVQRRNLKRKFLDLENTVRHSLKAFGIRLGKVGRGGFEEAVRDAVAGDEMTAGMMESMLRARAALWAEYLVLNKLVVQIAMRDELCRRFMAIPGVGPVTALSFSTAIDDPKRFRRSRDVAAYFGLTSKRWQSGTSIDVQGRISKAGDPDVRRALYEAASAMLTRFKGRDTIKSWGLSLAKTKCHAKARVAVARKLAVVMHAMWCDGTDYVGDPNATTRDVAAWTAAKAQRLSYAKS

SEQ ID NO: 113169 - protein, 435 aa, unidentified
MQPTLLGNTAPTPRHGAQSQFTPPQAALVAIDIAKNRHEVLIDPGAGMRRRRLSVLNNRAEHDRLVATLRDLGRPVIVGFEPTGNYHRVLAHRLISAGFETRLISSMALARTREALHNGWDKNDPKDAQVILHMLRIGATTVYSDPGYGRLNDLQELSKTHDMVSRAKTELWHRLLTHYLPLYFPEAERFHGNSRSDWFLALLEQFPTPASITVLSKEAFIEAAWDLVGRKVSKTRLLADIYETARSSTALPVRLDSPAIAMFRMVLAEGRSLLRQPDQIEAQAEALLLDDPDSARLRQLPGIGPIIALTILAEAGNLRRFGHHRQFLKFCGFDLATHQSGTFRGQTKLSKFGNARLRRSFWLAAQVAIRQRDNSFREHYGRYVAKDPENKHLRRKALTAVAAKMARVAHAIVRSGADYRPFFEQPVPSGRTSLC

SEQ ID NO: 113170 - protein, 345 aa, unidentified
MQTITTVGLDIAKSVFQVHGVDAQGKVIVRRQLKRRYVLAFFQKLPPCLIGIEACASSHYWSRELQALGHTVRLMPPAYVKPYLKRQKNDSADAEAICEAVTRTNMRFVPTKTVEQQSCLMLHRTRHLFIRQQTAVINAIRAHFAEFGIVAPVGRTGVEELLKVASDGNDKRLPDVARVCIAALGAQLQMLKARILEFDRLIMAWHRSNQVSKRLDELPGVGPALATALVASVADPKAFRSGRDFSAWIGLVPKQNSSGGKNKLGGISKRGDRYLRSLFVAGALAVIRYAKKRGSKNRPWLAALLARKPTKVAAIALANKIARMAWAMMAKGERYKQPAALAAVW

SEQ ID NO: 113171 - protein, 400 aa, unidentified
MNPELRVAVDVGCTRHRVAVGLSEGKLLEEFDINHDAAGLSEFFERVGRHERQWGRPVAVAMEGYNGYARPLDERVLLHGYRLFNVNNMKLARFKEIFPGPAKSDPVDARKMLEMFSLKDKLPLAREALQEVAPVAEVNLQLKALTRRRKQLVNERMRVSSRLQTDLQAVCPGLLDVTGEADNLWFLNFLTCRADLTKLRTVREPSLLALQGVGKAYAGKIRHWQKQATFSETVAWVGPMIIEDAKRMLELRKNIGALQAQIDALAEHSEIARRIDTIPGFGRVCAPELAGEIGSLQRFRGESSLALYVGMAPLDDKSGTRSGSKPPRHVNVRAKAAMMIAAAQNAATVPESKAFYDKKRAQGKTHNQALRALGRNLVRVMWSMFKHGRNYQLESPSKRA

SEQ ID NO: 113172 - protein, 350 aa, unidentified
MLIIGCDYHPAFQQIAFVDTDTGELQERRLQHREEAEKFYRDLAAQEMKVRVGMEASGHARWFERRLGELQIELWIGDAAEIRTKRVRKQKTDRQDAQLILKLMLKDDFPQIWVASWENRDLRQLLWHRHRMVQARTRIMNQLQAVALNEGLGCKKRLWREAGREQLEAFRLAPWASRRRQDLLELLDRLNPTIADLTQTIEREVEKCPEAQRLRTHPGVGPLTALAFVLIIGRADRFQCGKQIASYLGLVPLEESSGNRRRLGHITKQGNSLLRFLMVEAAQVTVRSIPEWRSKYFHLAMRRGRKIAKVAMARKLAVRLYWMWRQGWDYEQLKKFGPHAGQPENRDGVQ

SEQ ID NO: 113173 - protein, 344 aa, unidentified
MDHFAGLDVSVKETSVCIVDDTGKIVREVKVASEPDALLAVLTNPAYHFKRIGLEAGPLSQWLYSALAESGLPVICVETRHMQAVLKAQINKTDRNDARGIAQMMRVGLYRPVHVKTLRSQKLRMLLTHRKLLQSKAIAIENDLRATLRNFGLKVGMVGTVKFEARIKELVENLPDLAVLVDPLLIVRRALREQIVILHRRLLTIVRDDEVCQRLMTTPGVGPVVALTYRATVDVPARFRKSKAVGAVFGLTCSKYQSGEVDRNGSISRCGDEMMRVMLYEAAQSMLRSKKWSWLKAWAMQIARRRGMKKAIVALARRLAVIMHRIWVDGTEFRWTREQTAAAA

SEQ ID NO: 113174 - protein, 364 aa, unidentified
MFQNTSVGLDVHARSVVAHGVNRETGEVFGHYFGKDHGDEDVVAWVAGLPGPVAACYEAGPTGFGLARAFADAGITCLVAAPSKLLPLPGDRVKTDARDAAHLATLLAAGAVTQVRVPSVDQEALRDLVRAREDVREDLMRVRHRISKLLLRHGVVYDGKTTWNQAHLDWLAHQRFDQEPAQISFDDCLAAVTQATARRTHLDARLEELLPDSGYAPVVAALSCLRGISTLTGFGLAVEIGDWTRFTGSTIGAYLGLVPSEHSSGQSRSLGGITKTGNQHARRLLIEAAWHHRAEYRPGASLRLRKQWEHVDPLVQARADQANRRLHRQWAKFDARKKRPVTANAAIARELSGFCWSLAMMANR

SEQ ID NO: 113175 - protein, 358 aa, unidentified
MSHYRVGCDAHKHHSQFAVLDQDGQLRQQSRVDHEPGAIHAFLENLPEGTPVALETVGNWYWIADEIEAAGCLPLLTHAAKAKVMMGNVNKTDKLDAKGLAKLLHLHSLPTVWLPPGEIRDERELHRARMALSKLRASLKNRIHATLAKYGIASTEHSDIFAGAGKVWLQATLGRLPPETSRCVAQGIEVLDGLQLQINQLEERIRGRIALTPSIQLLKTLPGVGDILGIVIDREIGSIDRFTTAGQFTSYAGLVPTVHASGGKTRFGHMRKRSNQYLKWAFIEAANVIVRHRHYPAWKTKYVCQVYDQVCQRKGHAIAVGAVARHLAEGAFWILKRQQPYRPPANRQASPKQVRGRA

SEQ ID NO: 113176 - protein, 345 aa, unidentified
MRYYAGLDVSVKETAICIVDETGKICRELKVTSHPDDLVSTLNNRAYKLVRIGLEAGPLSQWLFSGLAEAGLPAVCIETRHTKAFLKAQVNKTDRNDARGIAQMMRVNLFRPVHVKTLTSQKRRALLTARKLLQEKAIALENDIRGLLRNFGLKVGIIGTIGFDARIRELIDGTPDLGEIISPLLAAREKLRAEFAKLHRKVLDLVRDDNTCRRLMTIPGVGPVTSLAFVSTIDVPARFKNSRAVGPALGLTPVLNQSGESHRVGRVSLCGDGMMRALLYEAAQVMLSRVKKWSWLKAWAMNIARRRGRSKAIVALARRLAVIMHRMWSDGSEFQWTRDNEAIPV

SEQ ID NO: 113177 - protein, 367 aa, unidentified
MKKVSTAGVKAIRNFSQPKLTIGLDLGDRSSWYCLLDEVGEVLREQKLGTTPKAMREVFEGMPRSRIALETGMHSPWVSRLLAGLGHKVIVAHARSVRLIGESRKKDDRLDARTLARLARIDPQLLCPVKHRSAKAQADLTVIRARAGLVRARTALVNTARGLAKSYGERLRGCNVRNMNPEKAEGLSPELQRALEPLLAGIESLSAEIRECNERIEKLAQESYPQVALLKQIKGVGTLIAMTFLLTLEDPHRFRKSRDVGCYLGLQPGRRNSGQSEPQMHISKEGDPYLRTLLVQGAQHILGPFGVDSDLRRWGLKLAERGGKSGKKRAIIATARKLAVLLHHLWVSGEVYEPLHNSNRTMMAAAA

SEQ ID NO: 113178 - protein, 352 aa, unidentified
MAKNDFDELMSIGIDIGKDTFHIVGFDLSGQRVLRKQIKRLALAATFEKLPRCIVGMEACLSAHFVSRTLREMGFEPRIIPAIYVKPFNKGQKNDYNDAEAIAEAALRPNLQTVSEKSQDQLDLQALHRVRSRLVSRRTATINQIRAFLIEQGITVRKGLRALKNSFEAILEERKDEISPRMRSILIGLYGDWMWMDDRIDKVSAEIEQISRTEENCVNVMTVPGIGPMISTAMVAAIGEGEAFDRGRDFAAWVGLVPRQYSTGGRTVLGRISKRGSRYLRMLFVQAAKIIMMRPHRWPDFSFGDWLARACERMHRNKAAVALANKLARMAWSILRHKTAFDAPRDEVAIGV

SEQ ID NO: 113179 - protein, 338 aa, unidentified
MTLYCGIDLHSNNSMISVIDDNDRLISEKRLDNDLNTISHHLLPYQNDMTGVVVESTYNWYWLVDGLIDKGYPVHLANTLAIQQYNGIKYTNDATDARFLAHLLRLNILPTGYIYPKAQRHVRDVLRRRLLLVKQHTAQLLSLQSLIGRHTGQRLTSHQVKQLTTDSLVRYFDDAASLFSARHALLLQQQLKAQIEEIEAFVLSTCQRSEHYARITSTPGIGKILGMTILLETGPIERFAQVGHFSSYARCVPSDKISNGKSKGKGNTKNGNRYLAMAFIEAAHYACIWNPVIKRYYQRKCKKVPLMVAKKAVANKLTRACYHMLKDGTTFDVARAFG

SEQ ID NO: 113180 - protein, 351 aa, unidentified
MPRQSTPSAVATIGIDIGKNTFHLVGLDQRGAIVLQLKSSREQLERRLANLPRCLIGMEACSGSHHIGRQLEALGHDVRLIPAQYVKPFLKGHKNDYRDAEAIAEAVQRPTMTFVTIKTPAQMDLLALHRVRSRLVGLRTGVINQIRGFLIERGITVRQRPAPLRKALSDMLNSTSPTLSPRMVRLIADLSEDWRRLDDRIAIVSAEIEALVEEDGACQRLMTVPGIGPIISSAVVAAIGDGAGFKQGRDFGAWLGLVPRQESTGDRTILGKISKRGNKYLRTLFVQAAHVILARRPSAARRGLWPWIEQASKRLHRNMLAIALANKLARIAWAVLARGREYRPMIMPHTA

SEQ ID NO: 113181 - protein, 410 aa, unidentified
MEIVQERCAGLDVHKKTVVACVITPEHKEVRTFGTMTRELMGMADWFSSLGVTHVAMESTGVYWRAVFNLLEGRDFELLVANPRYMRAVPGRKTDVKDAEWIADLLRHGLLRASFVPDRSQRELRDLVRYRKVIGQERARMVVRIEKVLESANIKLTSVASHVLSMSSRAMLDELIAGNRDTEAMAELARSNLRSKRAQLKEALVGNFGPHQKFMLESHLRLIDQLDHEIETLNQQIEERMRPFQVQIDLLDQIPGIGRRGAEQILAEIGVDMSRFRSASHLASWARICPGMNESGGKRRNAAIGAGNLWVRSTLVEVALASVRSGRREPNFFSARYHRLAARRGGKRAAIAVAHSVLLAIYRMLKDGAHFEDLGPTHLDAKRRQAIAMRSVKRLEELGFKVTIEEPAAA

SEQ ID NO: 113182 - protein, 388 aa, unidentified
MPAAETPVAYLGIDVGKSSHSACALDAGGDVAFRAELANRPDDIDRLLERAGSGALVVVDQKRNIGALVLARAHAHGNPCAYLPGYAEKQARGMFPGTAKTDAIDAEVIARTALGVPRALRPAPEEPEGAASLRILSSQREFASSARTRAKNRLRATLLEADPALEGAVDPSSRWQVSMLAEFGGAAGCSAAGWRRFSNAARRAGAPAAGARRLWEALLASSRSGRRLPAGEDVAVRMLAREIASLDADIEELDSLVADSLAGDEVYECLLTVPGIGPKTAAALVTSIDISAFRGHDELASYCGVAPSDRRSGSSIRSTSPQHGGNRQLKNLLIFSCNSLIGTDNRFGRYYGECRARGMRHSKALKAVARKRLKVIYAIMRDAVPYAS

SEQ ID NO: 113183 - protein, 344 aa, unidentified
MDHYAGIDVSLECSSVCVVDASGKVVREAKVVSEPEALIGWFGSLGFELARIGLEAGPLSQWLYAAMKQAGLAVELLETRHVSDAFKAMPVKSDRNDARKIAQLMRLGWFRPVHCKSITAQEIRAMLTARKLVQSKLLDFENSLRGILRGFGLKVGKTTRTNFAGRIEELVKGHPNLQTIGQALLRARAVLLAEFNGFEKRVRAMSRLHDKARLLMSAPAVGPIVSLTFACAIDDPSRFTSSKQAGPHFGLTPKKYQSGETDYTGRISKHGDASVREALYEAAHIMLTKPIKGCSELKSWAMRIARRAGTNKAKVALARKLAVIMLRMLKDNVPFNPAAKAATA

SEQ ID NO: 113184 - protein, 347 aa, unidentified
MYPFYLGIDLHLKQSYVVLINTEGAVIDKCQIRNQELGRYLKERVPTETYAVMEATRNWPYFYDLLEGHVDRVELAHAKGVRSIATAAVKTDQIDATVLANLARLNFLPIAYAAPKEIRDLRQHLRYREWLVDERRRVKNRVHAILAGYNLVSPVTDLFGRAGREWLAGVQETKLRLTAVVVMEKMMEMIGQLDEQIKELAREMPVPEVLEPKIEVLRSMPGVGRLLAATILAEIGSIQRFSSPKALCSWAGMTPRVHQSGAVLRHGRITKEGSRYLRSAMVCAAITAIRVSPRWSGVYERIARRSGWRSAKVAVGRKMLNVIYYMLKRGEHYQEGYEQQRRLNQGA

SEQ ID NO: 113185 - protein, 493 aa, unidentified
MATRRATTDTQTQPRSAYRRRKARARAKAARAHEAEERRVEGLPVTQAHAAGIDVGSRSHWVCVGAGAGDPAAVREVPAHTAGLHQRLDYLRQHHVTTVALESTGVYWIPLYELLESNGFEVLLVDPSYTKQVKGRPKTDRLDCQWIYRLHSVGLLAAAFRPDEKTCQLRSYLRQRANVIRYAGQHIQHMEKALEQMNLKLREVISDITGVTGQAILRAILKGTRDPQKLARLRNQKCKATEAEIAQALHGSYRDEHLFALRQAYEAWQFYQKQLDQVEEQIQQQLARMKQDRALPPLKPRPRTSGRKPNQPRFDVRTALYYVVGIDLTEIEGIAELTALTIISEIGPDVSKFATVKHFCSWLGLCPQLKKTGGRVKSSRTRPGVNRAAVAFRLAANSLYASKGALGAFLRRQKGRLGAPQAVTATAHKLARIVYLALKHGLAYVRQSQQEYEAKVREQQIKGVQRRARQLGLEVIEKQPSTSTAAQTAAVPC

SEQ ID NO: 113186 - protein, 355 aa, unidentified
MESTKFVGMDVHKDAITIAVMNSAGKVIMESIIETKAVTILQFIQGLRGDLHVTFEEGTWATWLYDLLKPHVTKVVVCNPRKSALLTDGSKGDKIDARKLAELLRGGYLKPVYHGDHGLRTLKELSRSYLTISKDLTRVMNRIKALYRGWAIPCGGTQVYALCHRSVWLSKIPEAGVRRRAEHFYEQLDALQGLRKQVRRDLLAESRKHNATKLLRQIPSIGPIRAAELVALIQTPHRFRTKRQLWNYSGLGLETHDSAQYRYVDGQLQRSRKPQQLRGLNQDHNHDLKKIFKGAATMASISAGPFHGFYEALLAKGAKPTMARLTLARKIAAVTLIVWKKGVNFDAKHLKQQAA

SEQ ID NO: 113187 - protein, 371 aa, unidentified
MIRSWTDSRRDWKPVAASVVGPRMSLVLRSFLPHPNSCLGTSPYQQGRDTKMAQRSFCGIDVAKDRLDVMVLPEELCWSVANDAAGWAELVAKLRGLRIAASGIEASGGYERGVVRALLAAGMSVRQINPFKLRQFAKACGVLAKNDRLDARMIALFVATLPTRSAQRYAPVERLAELVTARRQLSDDKVAAENASRLFEDAALRRLYGGRIARLAADIALLDKRLAEILAGDAMLARRYALLVSMPGVGPVLAVTLLALLPELGQMNRKQVAALVGVAPYDFDSGRLRGMRCIWGGRAPVRRVLYMAALIGCRCNPQLRAFHDRLAAAGKKVKVILVAVMRKIITILNAMLRDNVPWVDHSIGQHILPAA

SEQ ID NO: 113188 - protein, 343 aa, unidentified
MQTITTIGFDIAKSIFQVHCVDAEGKVILRRQLKRRYVLAFFEKLPACLVGIEACASAHHWSRELQVLGHTVRLMPPAYVKPYVKRHKNDATDAEAICEAVTRPNMRFVATKTPEQQSCLTLHRTRHLFIRQQTAVINAIRAHLAEFGIVAPVGRHGVEQLLGIAADINDKRLPEVARGCVAALGAQLRMLKEQILQFDRMITAWHRSSEASRRLDDIPGVGPALATALVASIADPKAFRSGRDFSAWIGLVPKQNSSGGKDRLGNISKRGDRYLRSLFTTGALAVIRYAKIHGTGHRPWLTALLARRPTKVAAIALANKIARMAWAMMAKSERYKEPAALAA

SEQ ID NO: 113189 - protein, 375 aa, unidentified
MYVGIDAHKRDCHATVLNERGETLSTSRFPSTLGALTRWAQGLPSGSMLALEASTVAKRIYWHLKGLGLDVRMAHPLEVRRRAGTKKKTDAIDSFVLADLLRMNRLPEAYVPSPELNERRQLLRYRIDLGKKARLVKNQIHALLVRNGISFELTDVFGVSGRGRMAAMKLPRSQHYLLNGLLAQLDLLGHQVEKIEGELAELGSKDPAVQKLMTLPGVDFYSAQVILEEIGDITRFPSEKQLSSYAGLVPRVAQSGTTLRMGPIHQQGPKALRWILTTCAHTAVRSPGKFQRLYRRWEKRLGKGKAIVAVAHRTIEVIFALLSRGERYSEERAELTGRKLVRMKRLARPLPKRGGMDRLPTLALAATEVLRGVRG

SEQ ID NO: 113190 - protein, 387 aa, unidentified
MGEREFAHGGTGLTELRDWLLEKTKAASRQIAVAIETPHGPVVEMLLEHGFVVFAINPKQLDRFRDRFTVAGAKDDRRDAQVLAGSLRTDRQAFRRLASNNPTVIELREWSRIADELQQERTRLANRVRQQLWRYYPQAAELTDDVADDWFLALWQEVPTPDRAAKAAEKTITAILKHHRIRRLDAATVLKTLRKTPLFVAPGTAEAACAHIRSLAARLGLINHQVKEAQQSLDRLCIKLEEEESPSGQSFEQCDVMILRSWPGIGRIVLATLLAEATEALHRRDYHALRALAGVAPVTRRSGKQRFVIRRLACNGRLQLAVYHWSRVAIQHDAAARRRYDALRQRGHGHARALRSVGDRLLYALCTTLKRQTPYDAGYNNAQMMKG

SEQ ID NO: 113191 - protein, 339 aa, unidentified
MKNTKYFIGLDVHKKKTTYVVKDRIGNIVLEGETATLYSELYDQLEPYLKSSIIGLESCTSYYTLYQNFLKNNYNIKVANTIQLRQLIAKNDKLDAKRLAEMLRLGAFPTSYIPDEEVQRLRSLLQVRHSLMEEKVRCNNRIQAFLDRNGIVMPDQEAFGKKWRQKLLQYIGSGEVSLELRYEYDHFVYLENKSEHLGQEISGYTTKHWKKEYKLIQSITGFGPVLSCYVIAHIIPISRFSSNRKLRRYAGVVPAFHESGGKRSKGHIPKTSSRKHLRWALIQAANAAGRTNTKLGRYYRKKKKQKNNAGIAHVAVASSMIDIIYKVLTTNKPYNPKIC

SEQ ID NO: 113192 - protein, 360 aa, unidentified
MRIQRTSVGLDVHARSVVACAIDEDTGEVLRHRFGYDPAAVVEWVRSLPQPAAVTYEAGPTGFALARLFTASGIECVVAAPSKLQRPVGDRVKTDARDAMHLARLLRLGEIVAVAVPSIEQETARDLVRAREDNRGELMAARHRLSKLLLRHGIIYDGKQAWTGAHDAWLRRQRFDHAGLQAAFDADYEAVQQVRARKDRLDAIIEQMATTSDYAPVVRRLGCLRGISTLTGFGLAVEIGNWERFTGSSIGAFVGLVPSEHSSGQSRSQGSITKTGNTHARRLLVEAAWHHRKAYRPGAVMQARWAAAPSLAASRGDDGNRRLHHKWQHFTARKKRPTIANVAIARELAGWCWSLAVMPD

SEQ ID NO: 113193 - protein, 320 aa, unidentified
MTQLASFVGIDVAKGKLDWCIRAATCGTTPNTPAGCAKLAGELKRWGVKVAVMEASGGYEQTIALALRQKGLLARIVDPKRVRDFARAAGRRAKNDPIDADTIAWFAETFNLEPGSPPDRDREQLAALVGERQDLVEMRTQCLNRAEHKRPALCQNLRKDVLKHINRAIAKLEAAIAALIAQNQLLAERAHLLDSVPCLGPQSIAALLAWLPELGQISNLQIAALLGVAPYADDSGQQVGVRHIAGGRRQLRNILYMAVLGGATQHNPVLKAYYMRLLAKGKLRKVALVACLRKLIVILNVMVARQQHWNPPAQPAAPCP

SEQ ID NO: 113194 - protein, 410 aa, unidentified
MQVVYERCCGLDVHKKTVVACVLVTETGGQMQRHIRTFSTMTAGLLALADWLESMSVTVVALESTGVYWRPVFNLLEEGRTIILVNAQHMKAVPGRKTDVKDAEWLADLLRHGLLKASFIPPAPIRELRDLTRYRKTLVQERAQDVNRIQKVLEMANVKLSSVATDVLGKSGRDMLQAIIEGTTDAQVLANLARGLLRKKLPQLQEALDGRVQTHHRILLQHLLAHVAFLEQALEQLQQEIEQRLLPFQEGIRLLMSIPGIAELSAAGILAEIGTAMSRFPSAKHLASWAGVCPGNKQSGGKRLSGKMRKGNVTLRALLAEVVWVISHTKDNYLSAQYHRLARRIGKNKAAMAVAHSVLVIIYHVLRTGEPYRDLGADYFQKQDAKRLAQRSLRQLEALGYEVTLTPKVA

SEQ ID NO: 113195 - protein, 410 aa, unidentified
MEVIVERAAALDVHKAQVTACVRMPADTGGRTQEVAEFATTVRGLLTLHDWLSAHHVTEVAMEATGVYWKPVWAILEEDFELLLVNARHVKQVPGRKTDVSDAAWLCQLLEAGLLKASFVPPKPIRALRNLTRYRKAQIRERQREANRLHKVLEDTGIKLDCVASDILGVSGRAMLEALVAGTTDPEVLADLARGRLRAKLPALREALEGRFNAQHALLVGAILAHLDFLDEQIERLSEAIREALAPFAAAVELLCSIPGVQQRTAENVLAEIGLDMSRFPFAGHLASWAGQCPGNHESAGKRRSGRTRKGSKWLNEALTEAAIAAVRTNGSYLQALYRRLRPRIGHSRALGAVKHSMICACWHMLSSGELYRDPGGDYFLSRDPERQTKRLVRQLEALGHAVMLQEPAA

SEQ ID NO: 113196 - protein, 349 aa, unidentified
MKYYAGLDVSQQTTSICIVDEEGKTVAERKVASCPEAISEALEPFAVTRAGLETGPLSVWLWNGLKERGVPIVCMDARHANAALKMMPAKTDRSDAIGLAQIVRTGWCKSVHVKSTASHEARALLATRSQFVRTRCDLENQIRGVLRTFGILFGKRVGGFAKRAEEIIDGELDASPTIQAVVEALMRARANILEQIRHLEAKVRLIARQNKVVRRLMSVPGVGVITALGFAATIDDPTRFKRSSSAGAYLGLTPRIYASGETMRSGRVSKRGDDFLRRSLYEAANALLTRIPRFSALKSWGLRIARRGSYRKARVAVARKLAVILHAMWISGEPFRWSSQEPGDLASLQ

SEQ ID NO: 113197 - protein, 358 aa, unidentified
MMKVTTIGIDLAKDVFGLHGVDGEGRVVFKKRLVRNRLLEFLSKLPRCLVGMEACSSAHYWARKIEQLGHRVRLMNPRFVKPYRKSDKNDANDAEAICEAVTRPSMRFVAIKSAAQHEVQALHRVREQLLKSRTALVNQARGLLAEHGIVAPQGIARARRLLLEILADPQRHGLSGLFRETLQEVAERLRFLDERVSAYDDRIERVFKQDERCRRLAKIEGVGPLVATAVVAAVGNAREFKSGRELSAWLGLVPRQHSSGNRSQLLGISKRGDRYLRAILIHGARAALRRADHKRDQRSRWAMRIKLARGYNKAAVAFANKNARIIWALLTRGENYRPPATSVASAGAARIILAQVQA

SEQ ID NO: 113198 - protein, 407 aa, unidentified
MQLSVLHKRVIGLDVHQAQITACALIEQADGTTRIEHRQFGAFARDRRELAHWAAALRPDEVVMESTGIYWKSPYAALEAVGIAAKVVNARHVKNVPGRKTDVGDAQWLATLSRAGLLNASFVPPANLRELRLISRERQKLVSQLARDKNRVHKILTDGGIRLNVVVSDIHGKSARAMIKALLAGAQPQQVLKLASRRLKASHQQLLDALQGNLTESHRFVLDELLEQIEHIEARITRFEARLLAALGPQHDILALLQTLPGVDLIGAAMLLVEIGTDMSVFGSPERLSSWVGICPGNNESAGKRKCGKMRKGNPYVRRLLCEFAHAASKTTSVFKSKFQALLLRRGYKRAIVAIGHKLVRTIFFMLNRREYYRDSAVNYEELAVRRNAPRWIKSLTRFGFIAPVSA

SEQ ID NO: 113199 - protein, 340 aa, unidentified
MKLYGAIDLHSTNNVTVVIDEEDKIVYQKRLPNDLALILMELSVYQSELQGIVVESTYNWYWLVDGLMEQGYKVHLANTAAIQQYEGLKYTDDHSDARWLAHLLRLGVLPEGHIYPRAERPVRDLLRKRSQMVRQRTTNLLSIQNLLTRNTGSSMKASRVKGLDVQQVDELLPNEDLALAVKANLAVLSSADEQVELLEQTVTQRVKLRPQFSFLKTVPGIGEILALTIMLETGDIRRFLSVGNYASYCRCVGSQKISNGKKKGQGNTKNGNKYLAWAFVEAAHFAIQYNSRIKSFDQRKKAKSKAVVAIKAVAHKLCRACYYIMRDQVPFNINKAFGQK

SEQ ID NO: 113200 - protein, 417 aa, unidentified
MFLRGARRTPVLFVGDDWAEDHHDVEVVNDDGRRLAAKRFPEGVSGLAGLHALIADHLPDDADPADVVIGIETDRGPWVQALIAAGYTVYAVNPLQAARYRERHGTSGSKSDPGDAHVLAELVRLDRAHHRPVAGDSDTAEHVKVLARTHQSMIWSRQRQSNMLRSMLREFYPAALVAFGDDLTGRDALAVLAVAPSPEQGRRLTTARVVTVLRKAGRKRNHQVIAEQIVAALRTEQLAARPAVVGAYAASAAALVAVLAALSLQIDLLAEQVAAGFGRHPDVEIYLSQPGLGEILGARVLAEFGDDPKRYVDARARKNYSGMAPVTRTSGKSRVVLARHTRNKRLADALYQQAFSAISNSPGARAFYDAHRARNNTHHQALRALGNRLVGILDGCLRHHMKYDETIAWPDHNAATA

SEQ ID NO: 113201 - protein, 424 aa, unidentified
MKVTYQTCCGVDVHKSFLVATIVKTNGGIEPSYQKKRFSTFNNSILEFKQWLLDNDCHDVCMESTGKYWVPAFNLLEDEINVVIANPKWVKAVKGNKDDTKDSKWIGDLFRLGLVKGSYIPCKKVRILREYSRYRYKLVSCRSSEKNRYQNALTVCNVALDSVVSDIFGKSSSSIIDYLLEQSGTSINHEEIASKLLRSLKSKEDAVIESIEGYQMTDAQKYRMRLVRAHMDYITAEINDVDKMIEKMISSNPDFENAVQFLCTIPGVKRDSAITIISEIGTDMSQFSSSKRLCCWAGLTPGSNESAGKKKSVRITRAGVYLKPALVQCAHAAVKSDKSPYYKKKYESLVKRRGKKRAIIAIARMILTAIYQMLSTGEQWNPSDLYKIDMPVALVEKQKAKAIKQAKKLLQREGLLPPDKSLAS

SEQ ID NO: 113202 - protein, 346 aa, unidentified
MLYAGSNLSRKRVDVCLLDEHGTRLETTAAPPDADGLRGLAARLAGRGQPIRAAIESMNGARFVRDELEQLGGDVSLADAQKVKGLAPLAAKTDRIDAYVLAELARRDLVPVIWLPTPGVRAERERARFRLHLVRHRAALKARIHASLIAHGLSCPVSDLFGLRGRELLDHLALPEPWAATTAASLRLIEHLDDEIAACEAELRRLGAAHPYVPLLMSAPGIAWVLAYTIASEIGEIERFASPKKFAGSTGLCPRVYQSGASDRRGPLAKNGPEHLRWALVEAAVHAARHPCHAAHYQQTRKRLGRQRGAKVARVEVARKLSEAIWYMLTRSQPFAPAGPALPLVA

SEQ ID NO: 113203 - protein, 349 aa, unidentified
MRADKKRGKKKGCKMNSIIAGIDLGDRESLATVLSPIGDVADRFSFSMNEEGYAFFASRVPKDARIAFESTIMAYPISRALRTHGYNDITVAHPKTLTWIVRSKKKNDRVDSLKIAKLHMAGMLPESHLLSRDEQIVRDLLVQRVKLGVEIGRLKNSLIGYLKREDIYNSLPKTKDNFSVRRRRAIHSLRFDDKRDLILRTMMDRLEFLERQCIPLEDSVRENARVSDDVRLLMSITGVDYYLASLLSSFIGDVERFPSDDHLASFFGIVPTSRDSADVKRRGKMTKDGSSIARWALSVMVDTVMQHNAPIREHYQSVKKRTGSGKLAHVSTMRKLTRMLYHMLKTKQH

SEQ ID NO: 113204 - protein, 335 aa, unidentified
MKHYAGLDLSMESTQVCLVDENGRKLLSEKVESSPEAISTILERYGPIERAVIETGRMSPAICLGLRELGVPVVCIDARQAHQSLKAMKANKTDPHDAAGLAQLARTGFYKEVHVKSPAAHGVRSVITARSHLVEARVRLNNTIRGLCATFGYRPGAGQGKAFLERIMQAVNIPGLGDAIASLLSVRTELVEQIKEMDRRLRVIASQSQACEILMTIPGVGVQASAAFAAAVDEAGRFRQSRNAGAYFGLVPRRHQSGELDWTGRITKQGDGAVRKLLYEAANSILTRSRETFALKTWAMKIAKRRGLKKARVALARRLAVIMHAMLRDGTLFQA

SEQ ID NO: 113205 - protein, 352 aa, unidentified
MDYFAGLDVSLEMTSICIVDADGAVLKEAKVATEPDDLVAFFAQCGMAMKRIGLEAGAPSQWLYGGMAEAGLPVVCIETRHVKAALSAMPNKTDRNDARGIANIMRTGWFRAVHVKTQTAQELRFLLVARQTLVRKLMDIELAIRGMLRSFGLKMGVVSKRNFEARVLELAGDRAMLMRALNPMLTARRALAVEYTNLQKVAMDFARDDDVCRRLMTVPGVGPIVALTYRATIDVPSRFRRSKSVGAHLGLTPRAYQSGEVDWNGRVSKSGDAMARAALYEAAHILLIRVKRWSSLKAWGMRLVKNRGHKRAVTALARRMAVLMHRIWVEGTTFLWKTGDGQAIAPKPVPAV

SEQ ID NO: 113206 - protein, 353 aa, unidentified
MKRDQYMGLDVHQATTVVCVLNAEGKIVLETVVATEARALIRLVSSFSGPLHVSFEETTQSAWLNEVIRSFVSEVVVCDPRRAQRLREGSKGDKQDARQLAELLRQGLLRGVYHGHHRTRTLKQLVRSYQTLSGDVQRTMLRIKALYREIGISTSGRGVYQLGQRDQWLARLEEPGRRQRAQWLYAQLHHLQPLRREAKRMMVAESRKHPASAVLETIPQLGAVRVAVLIATIDTPFRFRTRHQLWSYCGLAVVTHMSAEYEIQEGRPVRRRKPIATRGLNRNCNHRMKEIFIGAATGGSHREPYRSYLEGLEKRGIRREMARLTLARKIVAITLKIWKKGEPFDPKKLNSAT

SEQ ID NO: 113207 - protein, 405 aa, unidentified
MSYRIAGIDVHKKMLAVVVSDVEIESEYQFERRMFGSNPEQLRSLAAWLIEQEAEEVVMESTAQYWKPVWGALERYWKPIREKREGARRRSGTLHLAQAQSNRGRRGRKRDFPDAERLVKRLVARELILSFVPDVEQRLWRTVTHKKYQLRCDRVRLQNQLESLLEEAHIKFNPAALAALADGRLRATPEQLCDALGACAELNAVYRRLLKMALEELRLIDEQIGELDKEMASLLSQHQDAVERLAEVPGLGVDSAQQIIAEVGSTAATFPSEKCLSSWVGACPGDDESAGVNYSHRSPKGNRHMRRLLNQAANAAARTKGSIFEIVYRRSIPRLGHNQAIGAIAHRQCRLIWLILHQGARYEERGPAVTKQSRQKRTARIIRQLRSLGYRIEPPNPQPSQAQAQ

SEQ ID NO: 113208 - protein, 384 aa, unidentified
MNKHSMIFIGLDTHKEFHEVGYCEEQRGASPVHYGRIPSSKVSVKKLIRQFESKYPGATIHVVYEAGPCGYWIYRLITSLGHCCYVVAPSLIPKKPGERIKTDRRDALKLVRSLKSEDLTPIYVPEPEDEAVRDLSRAREAAMKDLKEAKYQLKALLLRNNIRYEGTANWSKKHLRWLTELILPHPTQQIVLQEQLQTIEERIRRLERLDNELTHHVHQWRYYPVVKAIQAMRGVRLLVAVGVVAELGDLHRFDHPRKLMAYLGLVPSEQSSGGKRHLGAITKAGNGRARRLLIEGAHSYRYPANVSTELQLRQEGLPKDIVDIAWKAQLRLCKRYQRMSNKGKHYNLIITAIAREMSAYIWAIAKEVVLTPVNPKLRLSRVPA

SEQ ID NO: 113209 - protein, 347 aa, unidentified
MNFYNNLHPYYCGIDLHARVLYVCIIDQAGQTRVHKEIPAKPDPLKILLEPYLGNIVVGVECMHCWYWVSDFCEDLGVDFILGHALYMKAIHGGKAKNDRIDSFKIANLIRGGNFPLAYTYPKEMRATRDLLRRRTKLVRHGAHLKAHVSNTTSQYNLPTHKVNLKNVGAREQLKTAFPDRVVQRNIDLDMSVLDCYAKELSKIECFLEQQAKRHNPVHWHLLKSISGIGRILALTIIYEIGHIDRFESVQKFASYARLVKCKAESAGKSYGTQGNKIGNAHLKWAFSEAAVLYLRGNEKAQKYLLRLQRRMSKAKALSVLAHKLGRCVYFMLKNGTVFDEKQFLKG

SEQ ID NO: 113210 - protein, 464 aa, unidentified
MEKKKTRGARDRRKSPPLLERVNRNAAGIDCGSAEHYVAVPPDRDPMRVRSFRTFTTDLHHLADWLVACGITTVALEATGVFWIPIYDILHERGLEVLLVNARHFRNVAGRKSDVSDAEWLQELHSVGLLRGSFRPAAEITTLRAYLRHRDTLVQSASTMVNRMQKALVQMNLHLHVVIADITGTTGLRILRDIVRGVTEPAVLAKHRDTRCRASEADIAAALTGYYRPEHVFALRQHLESFDTYQAQMQACDTEVEVLLKALTAAKPSTTPPEPRPGAVRKARRNEPRFEVRLPLYQLAGVDLTGIDGIGPYSALRLLSEIGTDMTRWPTERHFTSWLTLAPRNRISGGRLLGSTTAPSANRAAAILRMASVAVGKTQTALGAFYRRLAYRVGKPKAVTATARKLAVLVYRHLKGEIAYHDIGAAAYEARQRERSVKALTRRARNLGFALVDTATGEVLGGVS

SEQ ID NO: 113211 - protein, 343 aa, unidentified
MSEVSIIGLDIAKNVFHAHGADSSGRALFSRKIGRGKLLEFFAGHQRCTVALEACGGAHHWGRELTRLGYEVKLIPPAYVKPFVKRNKNDAADAEAICEAAQRPSMRFVAIKSEEQQASGLVFRTRDLLVRQRTQLINAIRGHLTEYGWVAPKGPSHVAMLGDLLEEEMGSSLPEAARAMFRTMLDLLEELNEKIGELDKEITRRAREDAVARRLMTIPGVGPITATALAALAPPAETFTKGRDFAAWLGLAPRQMSTGGKQKLGSISKMGERTLRRLLIIGCSAVVLQASKRGAPKGSWLEQMMARKPRMLVTVALANKTARIIWAVLVKEEDYRAPVAAAA

SEQ ID NO: 113212 - protein, 313 aa, unidentified
MKEEKTFIGIDVSKEKLDVGVRPQVDFMTFANTEDGISLLTDFVQSKQPELIVLEATGGLEMAALRSLVVAKLPAVCVNPRQVRDFAKAMGVLAKTDKIDAHVIARFADSVRPEIRPLKTEETEILDAFNTRRSQIIIMLTAEKNRLTTASKWTKKDIERSIKGLEKALAKINREVENLIKKSPHWRHMDKILQSVPGVGPVMSLTILADLPEIGTMNRRQIAALVGVAPLNRDSGKYKGRRAIWGGRARIRSVLYMCVISGICHNPKIKAFYNRLINSGKKHKVAITACMRKLMIILNTMIKNGTCWNESGC

SEQ ID NO: 113213 - protein, 343 aa, unidentified
MEKVYVGLDLGSSSFQQAAINQDGVTIMNRSYPTSEANLLTAFANLRGEIHVHLEAGELAPWAAAIIAPLVKRVVCSHPKDNAWIAKDGDKCDRVDAYKLAELLRLNRFKQVHYAPDQPRRHFKQLVQHYDELTAHQARWKTKLKARLRMQGVIVTGERLFSRSGRTAVLARIESRDVRTAIKQLYEVLDQGVAAQEQARLLILRAAQAFPEIKLLRTVPGVGPIGACRFSAYIHTPQRFSSKRKLWKYSRLSVSHRSSNGKPLRRPKLDYSSGCGRLKDVSRKAFDVAQRLRTDNGFKRTYQRALETTHDKTHARLTVQRKILSTMRAIWISRTPYRDELSR

SEQ ID NO: 113214 - protein, 362 aa, unidentified
MTAASIVAHSYPFVVGVDTHARNHVYAIIDSSNGALLDTQSFPVTMAGISRAISWVGRRTEGNADTLWVIEGAATYGAILAGTVAAHGFPVTEAPRMSTKQNRGVGKTDSLDAHRMAMASLPLPVDKLRHPRLNEGIRQGLRILVTARSSMAKDRTRSVNALNAMVRSNGLGIDARKKLTGGQIAEVSRWREREEELSMRIARSEAVRLAKHILDLDQQLAANEQQLDELVRVSEAAPLLDETGFKAITVAKCFVAWSHEGRVRNEAAFACLAGVNPIPASSGNTTRHRLNRGGDRSLNSALHMAAITRMTYDDETRIYVEKRRAEGKSDREIRRCVKRYLTRRIFKIFSVSTMTDEVPVAA

SEQ ID NO: 113215 - protein, 404 aa, unidentified
MIFVGVDWAEDHHDICVMNQDGAVLGKRRVPDSVAGIGELHELVAEHAEDDEAVAVGIEIDRGLVVTSLVAAGYQVFAINPMASSRYRDRHGTSGAKSDPGDAKVLADLVRTDRHNHRPLAGDTELIEGVKLLARVHQSAIWGRQRQLNALRSALREYYPAALVAFGTDLSHGDATQVLALASTPELGRTLSRSKIASALRRGGRIRNLERRTDEIQGALRAEYLQAPPTIAGAYGTITRSALRLIETYTAEIASLETALSEHFEQHPNAKVVHSLPGMGTVLGARVLGEFGDDRTRFATAKCRKNYAGTSPITKASGHSRVVLARFARNRRLSDACDQWAFCSLTRSPGARRYYDELRARGKTHRQALRQLANRLVGLLHGCLEEGVPYDETIAWREANQPAA

SEQ ID NO: 113216 - protein, 310 aa, unidentified
MIIAPGFIGIDVSKHHLDVFESSSGRTDRVDNTEEGLAPLVARWKDSGVFVLFEATGHYDARLRRVLSAAGIGFARVNPARARDFARAAGILVKTDRIDARVLAAMAQTLSPARAGERDREREALAIAHKRRDQLVHMRQQERTRRSECSDPAIVADIEAHLDWLDQQIALWDAKIRDQLTHSEPLDQAARLLRSIPGIGPVAAATLIALMPELGSLQPKKIAALAGLAPFNVDSGQFRGIRRIRAGRKRVRDALYMAAVAAARSHDRFKTIYRRLRNAGKPAKVALIAVARKLLVTANAILRDKVVFQA

SEQ ID NO: 113217 - protein, 317 aa, unidentified
MNNTEIQTPVNVGVDVGKANLDIALHPSGQFYTIPNTEAHIRRFVRILKNYAIERIVVESSGRYEQALVQACDQAGLPIIIVNPISVRRYAQAIGVLAKTDRIDAQVIAQYAATLKPEPKPIPDKTSQKIKDLLVRRSQLLEMSTMEKNRLQILPKSLHRSIKSMLRMLQNQIETVTRQIEQEVAKVDQWRTKMEIMTSVPGVGKVLAYTFLSELPELGSLNRKEIAALVGVAPINRDSGKLNGKRRIRGGRHRVRTVMFMAMLSSIQCNPVFKRFYERLKAQGKIPKVALIACMRKMIVVLNTMIKNQESWRGEMA

SEQ ID NO: 113218 - protein, 359 aa, unidentified
MSTMPDTEVFVTLGIDTHKYTHLAVALDHLGRWLGQLEIATTTAGFAELYAWASELGTIDIVGIEGTGAYGAGLCRWLVDRGVAVVEVDRPDRRKRRNAGKSDPIDAEAAARKVLSGEATVTPKSGGGNVEMIRVLRIARRSAVISRSQVGNQLQAMTVTAPPALRSQLEGRTTRARVAIAAKFRPGDEPDTVLAATRYAMKKLAQRYQALDTEIKELDRQLTRLVTATAPKLVARRGIGVHTTATLLVTAGDNPERLRSEGAFARLTGTAPIPASSGQTNRFRLSRGGDRQANAALHLIAVNRLVSDPRSKAYVKKRTGGTKADLDTLRRLKRYTAREVYPLLLEALHTTEPGLIQAA

SEQ ID NO: 113219 - protein, 317 aa, unidentified
MSNPESFVGIDVAKDWLDVAWLAGQTLHIDHTDEAIAGLLEQLLSQPPTLVVMESTGGLETAVASALAAAGLAVAVINPRQVRDYAKACGRLAKTDRIDALILAAFAAAIRPQVRELPDEHTRALGDLLARRRQLVEMRVQEKLRLQRASNVQRASLREHIVWLDERIGRLDIDLTHALRSSPAWRDKDDLLKPIPGVGSLTRATMLALLPELGTLSRRQIAALVGVAPFNRDSGQHQGGRVIWGGRAQVRRTLYMAAVAAMRCNPVIRSFYQHLRSQGKPAKVALTACMRKLLVTMNAMLKHHSAWSNRLDTQHSC

SEQ ID NO: 113220 - protein, 412 aa, unidentified
MKRIRDRVAGLDIHRDTVVACCRVVDPDGSVHASKQSFSTTRKGLSELAGFLSDASVETVAMEATGIYWRAPYYALEGLFDELWLCNAAHVKNVPGRKTDLSDAEWLADVAAHGMVRPSFVPPPEIRELRELTRYRKTQADARSREIQRLEKALQDAGLKITSVASSVWSMSSREMIEALISGVSDPAVLAQMAKGRMRTKLGELEEALAGHFGAHHAILCRQIIDHIDFLDGSIAALTEEITSRLVPFEAAVAIVTSIPGIARTTAEVIVAETGADMSRFPTPGQLCAWAGVAPASYESAGKRRPAGTRHGSQWLRRALIEAARAGVRTKGSYYSAQYSRIARRRGPNKAAVAVANSMLFTIWHLLSNGQLFEDPGAAYFERRHDPAVEAKRLARRIEALGFDVNLIQKAA

SEQ ID NO: 113221 - protein, 382 aa, unidentified
MKKAITGARRFVGLDVHAETIAAAMAEKDEAVRDLGTIPNREESVRKLVKKLNEGGAWRACYEAGPTGYTLYWQLTKLGIPCEVIAPTLVPIKAGDRVKTDRRDARRLASSFRAGELTAVWVPDAAHEALRDLVRAREAAKQDQLRARHRLGKYLLRHGKRPPTSMRSWKQNYLEWVKREVRFDQPPQQTTLEDYLNEVEHCAVRIERLEKGIDEAVEQAPESMRELIHALQALRGVARVGAVTIVAELGTLTRFEHPRQLMGYSGAVSRERSSGGTTRRGRITKTGNAHLRRVIVEAAWSQRYKPVLSLLMRKRQEGLSAEVQEIASKARQRLHSRYVHLLYKGKTKQEVVTAVAREMLGFIWAIGVSVERARAQRAKGAA

SEQ ID NO: 113222 - protein, 411 aa, unidentified
MHPKMKHIYVGVDTHKKTHTAAIINCFAEKLGEITIENRPSEFEGFLKDIKVFTKKGITPIFGLEDTASSGRELASFLLANKKTVKQVAASLTWSERNNQPITHKTDSYDALCIARVLLNKFDELPNADPKDIYWTLGMLVGRRNAVVKANTALKNQIHASIVHHYPSYKKFFTVFDCKTALEFWERYPSPAILNGVTVEELSQFLREQSSGFFGATKAEEILDLITSDGNTQTEYQPARDFLVTSCVKEVKHNNQEIKKIETAIKSLMHELGYKLETMIGIDLVTAASFISEIGDSERFSSSDKLAKYSGIAPIDYSSGEKERILKNSQGNRALYQLFHDLAARNVNQGRTKDKPFNDIFCGYYQKKLSQGKTRHQAIVCVMRRMVNIIYGMMKHKTAYVHPHLPKQTAG

SEQ ID NO: 113223 - protein, 359 aa, unidentified
MSKNNGTRKAFEGKDFFLGIDVSKKNWVTGINEGKMLLKYQSMEPNPEKLYTYMEHNYPGGRYHTVYEAGFCGFWAHRELTRVGFNSIVVHAADVATTDKERDRKTDAIDARKLAQELADGKLKSIYIPSEEAERIRAMARLGRKTCAKEQTRWKNRMTSHLDYYGVQTPKHSSRWPKWYIEWLEELELDNGPFRETVEFMLEEYKQFQERTTEFKRKLKKRCADYFGEDLMDYLTSLPGIGWETAITLLTELIDIERFPTFDHIDSYAGIVPSCHRTGNNQKDKGLTKRRNRYLRYILIESSWVAVRKDPELYAAYYRHVSKMKPQEAIIRIAKKLLKRIYCVWKERRPYEYRSPSPN

SEQ ID NO: 113224 - protein, 353 aa, unidentified
METPIKQTAGIDCGMQELVVSFGILTGDGTFICKLTKVFANTAKGFQQLLQWINEVSSKETAVLYAMEATGVYYEKLAYYLVANDCHVSIVLPNKINAFAKTCTSKKQDDQQASKVLCEFGCVKHVDEWQPPHPLFAALKQLTREKHQLQQELVIIKNQLHAEQTKAITASASIKRMKARCRLIEKQIAEVEKEIIDTLNDDAAIKEKINKICTIPGVGLSTAVTVIAETNGFNLIRNARQLVSYAGLDVVQKQSGISVKGRAHISKKGNPHLRHCLHLPSFVAVKYNLPMQQLHHRIVEKQAIKMKAYVAVQRKMLMLIYTLWKKNEAYNPSIKFLEQPVEAALTELDYICS

SEQ ID NO: 113225 - protein, 412 aa, unidentified
MDVVYQRCAGIDIGKRTAKVCVRVQGRGSQPTVSTVTSWSSMMPQILKLRAKLVNEGVQRVVMESTSDYWRPFFYVLAEELDVILVRASDVKAIPGRKSDVCDAEWLADLAAHGLVRASFVPPQQQRQLRDLTRARSRLLADRAREVQRLEKELEDACIKLAAVVTDLQGVSARLMLQALIEARDDPAAMADLAIGRMRTKIDQLTEALTGRFNDHHRFMVTFRLKRIDAATADLAELDARIDALIVDAGFDPARDLLLSIPGLGPHSADELLAEIGPDMSVFDAPEQLAAWAGVAPGSHESAGKRKNAPARRGNRYVKRALGIAAKSAARKKTGFLAARFRRLAARRGYQKALVATEHSIIIAIWHMLSTGEYYHDLGGDHYHRLIPARIIRRKIAELEAAGYTVTHQVAA

SEQ ID NO: 113226 - protein, 340 aa, unidentified
MQLYAGIDLHSSNNYMAVIDVDGKRVFRKKMSNEPRSILSGLEDFKERMVGVVVESTYNWYWLVDLLSEAGYHVHLANPSAIQKYSGLKHADDKHDAFWLAEMLRLKILPEGYIYPKDERPIRDLLRKRGHLVKLRTSLILSLQNIVARNLSVRINVNDIKKLRENAVAPLLESNGDLALTGVISKETIDFLTRKIRSIESIVEQKVKLKDEYGLLLTLPGIGKILALTIMLETGPISRFPKVGNYVSYCRKVNPKWTSNDKAKGKGNKKNGNKYLAWAFSEAAELARRYDTQCRSWYNRKMQKTNFMVAHQALAHKLARAAYCIMKKEVAFTPEKLFAL

SEQ ID NO: 113227 - protein, 407 aa, unidentified
MEVVYSRCAGLDVHKKLIVACVRLIDGGRIVRQKERFGTTTAELMRLSAWMTAHKVTHAAMESTGVYWKPVWHVLERDVQLILANAQHVKAIPGRKSDMSDAEWLAELLAHGLIRGSFVPPEGTQELRELTRTRKQMSRTLAKQALRIQKVLEDANVKLSSVVSDILGKASRAILEAIIAGETAPDRLAQLKGQLKATPHGLEAALRGRVTENHRFLLRLHLDQVDSIQRAIESIDRRLEQRLEPFRERVDRLMDIPGVSTVIARVIVAEVGIDMTRFPTHHHLISWAGLCPRLDESAGKSRSRHIRKGNPWLKVDLTQAAMAARRAKNSYLRAQFNRLATRRGVKKAVVAVAASILTSAYFILRDGVSYRDLGPDYLDRRDPGKLARRLAKRIEALGFAVELRPAA

SEQ ID NO: 113228 - protein, 368 aa, unidentified
MDRKSSKLFVGMDVHKESIDLATGEALGEVRHYGPIGGDLGSLARVVRKLESQGRELVFVYEAGPCGFGIYRWLRSRGHECWVVAPSMTPRQASDRIKTDRRDCLKLCRLARAGELSPVYVPDAADEAMRDLVRSREDAVVMQRQARQRLAALLLRNDVRYNGKTAWTPAHRRWIAELKLPHAAQHIAFEEYVQAVDEAGQRVERLTQAIEAQSCDWRWAPVAQALQAFRGIRAIHGTRILAELGDLRRFARPRALMGYLGMVPSENSSGERRRQGSITKAGNSSARRALVEAAWAYRYSARVSVGIARRQSDLPKPITDLAWKAQLRLCARFRKLCARGLHRNKVVVAVARELAGFVWALGQQVAPR

SEQ ID NO: 113229 - protein, 349 aa, unidentified
MEHVAIDLGRPNSVMCQLNDERKKSFRRFALNRSNLDRFFGGRPGCRVLIESSTEAEWVARHLESLGHEVVVADPNYAPMYGERNRRVKTDRRDADVLFEACRLGIYREAHRRSQEQRDVTALLRVRDSLVRTRTRWINLARALLRREGLRVRSGHAESFVDRVEELELIPELRAEVRPVLELLGPVNEQLVAVDKQVVELKKQDEQVRRLQTAPAIGTVTSAAFMALIDDVGRFPRAHAVESYVGLVPSEWSSSEKKLRGRITKAGDTRVRWLLVEAGWTIMRSRRPECQPLRSWAEGIAARRGRKVAAVALARRLAGILYAMLRDGTDYDPTRLQQGSRRRTRPAAA

SEQ ID NO: 113230 - protein, 379 aa, unidentified
MLDTEGIGVFLGVDVGKTAHHGHGLTPAGKKVFDKPMPNSEPKLRAVFDKLKTKFGTVLVIVDQPASIGALPLTVARDAGCEVAYLPGLAMRRIADLYPGEAKTDAKDAAVIADAARTMPHTLRSLELTDENTAELTVLTGFDQDLAAEATRTSNRIRGLPTQFHPSLERVLGPRLDHPAVTWLLERHGSPAALRKAGRRRLVELIRPKAPRMAARLIDDVFNALDEQTVVVPGTSTLDIVIPSLAASLTAVHEQRRALEAQISTLLEAHPLHPVLTSMPGVGVRTAAVLLVTVGDGTGFPSAAHLASYAGLAPTTRSSGTSIHGEHAPRGGNRQLKRAMFLSAFACMNADPASRTYYDRQRARGKTHTQALLRLTLAA

SEQ ID NO: 113231 - protein, 410 aa, unidentified
MLFIGDDWAEAHHDIEIEDDAGTVLARRRLAEGLAGVTALHELVAKHLDPSGEPDQVQVGIETERGPWVQALLAAGYVVYPINPMQVARYRERHSTSGAKSDPGDAHLLAEIVRVDRAHHRPVAGDSEIAEHVKVAARAHQTMIWSRVRQVNALRSLLREYYPAALAAFGTDLASSDALAVLAAAPTPEQGRRLSQTRIETLLRRGGRQRNLAVTATRIKTALGSEQLSARSGVVPAYAASASALIAVLTVMVNQTEVLAGQVEQGFGQHPDVEIYRSQPGLGTILGARVLAEFGDDHGRYADVRSRKNYSGMSPITKASGTKRVVLARYARNRRLGDALFLQAYSALQSSPGARAFYDRQRARGATHYQALRALANRLVGILHGCLRHHTRYDEHRAWHTANQELITAA

SEQ ID NO: 113232 - protein, 427 aa, unidentified
MSERKSLELRVSVDVGCRRHSVAVGLSDGQVLEEFEIRHRREGFQEFFSRIEKHQKAQGCKVAVAMEGYNGYARPLDSLVRQRGYRLYNINNLKLARFKEIFPGAAKKDRIDARKGLELFQLRDHLPLAKDVLQEVTGTPKENEILKRLTRRRRRLVNERVRVVNNLQADLQAVCPGLLEITTEASNQWFLHFVISGDTILQLARLRKSTLLKIPAVGRKYASLIQQWQKRAHFSEEAQWVSEMIQEDARRCLELDERIKTLETKIKEVAKSSKIANTLLSIPGFGAVCTSELAGEIGTVERFSKEGSLALYLGMSMLDNSSGKYQGTKQPKHVNTRAKAAMMTAIDRHRKYVPQSQKYYEKKRAEGKSHNQAIRALGRHLCRIIYQMLKEQRAYRVRSEKGDTQGRVDSRSCVKTKIRRPKISANS

SEQ ID NO: 113233 - protein, 413 aa, unidentified
MITQPIGAGGTDVASQLARAWIGVDVGKTHHWVCAVDESGDRLLSLKVLNDEAEITRVIAAVSELAAERTWAIDIVGTPSALLVALLGAAGQPVRYASGRVVAAMSAAYVGEGKTDAKDAYVIAETARVRTALSVVDTDTDLVRTLGVLTGHRADLVADRVRMINRMRDLLTSVFPALEREFEFASCKGALVLLTGYATPEAIRRMGEARLSRWLRQRRVRRYADVAARAVRAAQTQQTVLAGQDVTASIVAELAGTILAQHERLKCLDQQIQDTFTQHPQAEVIESVPGFGPVLGASLLVAAGDLAAFPTAGHLAAAAGLVPVPNDSGRRAGNLHKPRRYSRPLRHAFYLSAQTSMMRAGPNRDYYLKKRQQGRTHSQAVIALARRRIDVLWALLRDNRTWTATPPARAQAA

SEQ ID NO: 113234 - protein, 352 aa, unidentified
MIIIGVDFHPEFQQIASVDTDTGEFQEKRLAHREEAETFYRALAGQKVRVGMEASGHARWFERLVAELQFELWIGDAAEIRTKRVRKQKTDRQDAQLILRLLLEDRFPQIWVPSWENRDLRQLLWHRHRMVQARTRIMNQLQAVALNEGLRCKKRLWRERGRQQLESFRLAPWASRRRRDLLELMDRLNPTITELTQAIEQEVEKCPEAQRLMTHPGVGALTALAFVLIIGKAERFGCGKQVASYLGLVPLEESSGNRRRLGHITKQGSSMLRFLLVEAAQVTVRSVPEWRSKYLHLMMRRGRKTAKVAMARRLAVRLYWMWRQGWDYQQWNKFGSHAGQPGNRDAVQQNTE

SEQ ID NO: 113235 - protein, 353 aa, unidentified
MTNTQYIGMDVHKESISIAVRNDVGKIVMECVIETKANVILDFIHGLRGELQVTFEEGTWATWLYDLLKPQVTKLVVCDPRKNSRQGNKNDRIDARELSDRLYMNKLSSVYHGSAGIRTLKELARSYLTISKDLARVMTRVKAIYRSWGIPCAGKQVYAPRHRAEWLAKITEVGVFRRAEFYYQQLDALRSLRHQVRRELLAESKTHKASKLLCQIPSIGPIRAALLIALIQTPHRFRTKRPLWKYSGFAIETHSSADYRKVQGQLERTKKQVSVRGLNRDCNHDLKNLLKSAATIASVKPGPFQEFYAALVAKGMRPEMARLTLARKIATIVLIVWKKGVSFDAKYLKPQTA

SEQ ID NO: 113236 - protein, 438 aa, unidentified
MSNKVIFNLDELFISVGIDVGADFSWMSIALPNQQFVGKPYKILHNSIDSLTTAVSKIKEAEELYSLESRIFLESTGIYHYPLFCYLRDKGFNCSVINPIITKNSTNINIRKVHNDRFDSKKAALVGLKPDLKVSLMPSDLALNCRNLCREYYDLIDNRSAYVNKLQGELRMAFPQYLGIFSKVTINTSLTLLETYTSPSAFLEADKQEIIDIIKSTARFGLTYAQNKYNAIIQAATDANQFGYIIDSNIKRIRLYISFIRKYDEEINDILESLHKLVDSNEDTKFVKQVHLIETFKGAGFLSAVSIMGEIGDFSAFSKPKQLFAYFGLDPSVKQSGKFEGTKVQMSKRGSAIARRVIHTLTLQSISISRNREAKNPVLREYYLKKCDSKPKLVAMGAVSHKVCNMIFAILRDNKPFKIIAPQEHIKQYNSAKCDIAA

SEQ ID NO: 113237 - protein, 343 aa, unidentified
MQVVRIGLDLAKYVFEVHGVDGQGNAVIRKTLRRGSVSTFFANLPPCLVGMEASNGAHYWARLLTELGHKVRLISPQFVAPYVKSNKNDRNDAEAICEAVGRPTMRFVPPKSPEQLAIQALHRIRQRLVQSRTRLVNQIRGILAEHGIVIARDIWRLRRALAEITGHATDDLNTLVRVLILEAQAELMELDRRIASCDRRIRELYRTSELCQRLGEIEGIGPVTATALVAAVGDRSCFKNGRQFAAWLGLVPKQRSSGGRHRLFGISKRGDRYLRTLMIHGARAALGKAGGKQDPRSRWLASLRQRRHPNIAAVALANKNARIVWAMLASNVSYEPARSVQAA

SEQ ID NO: 113238 - protein, 346 aa, unidentified
MSIASIAILGIDLGKTSCSMVGVDERGTVVLRRSLRRQTLIDYVAKLPSCVIGMEACCGAHHLGRLFAASGHEVRLMSPEYVLPYVKAQKNDDRDAEGIAEAASRPTMRFVELKTQDQLDIQTLHRARSRLVAERTNLINQLRAVLFERGVSFPVGRRKLEQGIDDLVTDGDNTLSSRMSRLIAEMRAEWKQLDTKIEMLNGEFVEMAGSDAAMRRLTTIPGIGVLNATALVAAVGDGSSFSKARDLGAWLGLVPRQHTTGGKPRLLGISKRGNTYLRTLLIHGARAALPSLSKGDTPLGRWLQGMIERGVHRNAIVVALANKLARIAWAALRRDMPFQRNYPVAI

SEQ ID NO: 113239 - protein, 418 aa, unidentified
MLWTGGEEIVSIIAVINRTMDLPMRKPRPRNRSQRKPNDLSRSLAVLDMDRTLIAVIEMSASTWLVAGIVPGVERQPLKKLEPDEHALLALLQRWRGEAERSGRTITSIAVAYEAGRDGFWLARWLLSRGIEAHVIHASSVAVSREHRRAKTDRLDTQMLKRAFLGWLRGERDHCKMAAIPTLAQEDARRPGRERESLAGEASRIVNRLKSALARLGVRKFNPKLKKASERLTDLRTPEGEPIPPNTLDEMKRDMERRQLICAQIRKIEQERLKHLARAPDTGPHAMVRLLARVIGVGIETADTLVQEMLSRHLRDRRAVARYGGLTGAPDSSGSINREKGLSRSGNARVRRCMIQLAWRFLRFQKDSALAQWFFHRTGNARGMRKTMIVALARKLLIALWRLVHEGVIPEGIVMRPA

SEQ ID NO: 113240 - protein, 345 aa, unidentified
MLYVGLDVHASRSSLCILNNGGQVVNRREVRGSWPKVMEAMKSIDQPFSLCYEASCGYGTLYDQIRPLATHVAVAHPGKLRLIYGGKRKNDRIDAEKLAKLLILEMVPSVHVPRVDVRNWRSLITWRQRLVDKRVAAKNQIRACLRELGIESPAGKSLWTRRSIAWMKSLDLGAAAGLKVRMSLEELETLNQKIALVEKELFKISDKHPGVALLRTIPGVGIRTAEAFCAWVDNITRFRRSRQLGAYFGLVPCQDASAQKNRLGHITRDGPAVMRKLLTEASWMAVRRCPEIKVFFERVMGGKPERKKIALVAVSHRLVRIMGAMLRSGEAYNPGRRTELLSKGS

SEQ ID NO: 113241 - protein, 480 aa, unidentified
MNTNISNRLFILVLSHFNEFSGNRASTFSIIFSRVQTADSSVSIKINGLKSNMTTENYVAYIGIDWADRKHDIALYDCASKTWQESIIQTRPQDILDWVNQLRARYGEGKIAVGMEQKRGPLLYALCQYDNLVLFPINPRTVANYRKAFQPSRAKSDPVDARLLVELMQKHPDKLERWVAGCPQTRALRQWVESRRMLVGEKVRLTNRITASLKSYFPQLLDWFEDKDTLVFCEFIEQFPSVGAAQAATPEQLTQFFRTHKVIRKSAINRRIQQIQEAGPPLTRDEAIVLPAQALTRTLIALLKVILNQLTDFNAKIADLFERLPDAQLFADLPGAGPHLAPRLLVAFGAERDRFASAQAFMSYVGIAPVKEESGKKRWVHWRWSCPIFLRQTFVEWTNQSRRFSPWAQAFYLQQKRAGKSHQKAIRALAYKWGRILWRCWQDQTAYDEEKYLAALARKKSPLIKFLGTMTTEAQTIESI

SEQ ID NO: 113242 - protein, 317 aa, unidentified
MTAWVGIDVSKETLDLAWFGEEGKKHHQVPNDGEGFRKLVRAAPEGAKFVMEATGTYYLNLALFLHEEGRHVSVVNPIRIKGHMKSELTRTKSDKADAYAIAKFGEEKRPGAWFPVSAQVAHLKQLVALDELLTKESTSLSNLMESQVCTAFMNPETIQRIKRVRRYMDLEREGIKAELEALLMGSLSHTVDLIASIPGIGRATAIKFVATVGDFRRFPDSRKLVSFLGMSPMSRQSGTSVRSKGHISRLGGTRLRGALYVCAWTAIEKNASCRAMWERMKEKKIHGKKAIVAVMGKMIRQAYSVVIHDRFYDPNFA

SEQ ID NO: 113243 - protein, 353 aa, unidentified
MKPNSQMKLDRYFRQCVGIDVSKDKFTACLFMYDMASDVGCCTESVDFPNSKTGFNQMVKWSRKEAQKGFMLTYLMEPTGSYYEPLAYHLHKIGQTLYVVLPNKARSFCEYEGIKTKTDAMDARCLALLGCKNQRLRPWQPPKAIYRELRQLTRLRASLTKMQTQIMNHIEAIDHMESVTLEVCKSYKKLLSTIQKQLEQNEQAIAAKVAQDKELEVRIKRIATAKGIRSNTVTCIVAETQGFHLITNRKQLASFAGLDVVAKQSGKDDPKHKISKKGNAYIRAALYMPALSAAHCNRQMMQSYSRICDKHPDTKMIGVTAIMRKMLLLVYTLWKSGEEYDESRDKTNVQINN

SEQ ID NO: 113244 - protein, 412 aa, unidentified
MDRLYDCCCGLDVHKQTVVACLIRPTPGVGQTKAIHTFATTTDELDALADWLAEAGCTHVAMESTGVYWKPVYNRLDGRFTILVANAQHIKAMPGRKTDVKDCEWIADLLQHGLLTASFIPDRAQRELRDLTRTRTTLIDERSRTVLRLQKVLEDANIKLSGVATDIMGVSGRAMLDALVAGTTDPALLADLAKGKLRAKRPQLERALTGRMGAHHRLLVGAHLAHIDFLDEQIDQLSQAIAERLRPFEADLERLETIPGIKRRTAEVLAAEIGLDMSHFPTAGHLASWAGMCPGNHESAGKRKTGKTRKGSKWLRRALVQAAQAATRKKGCYPTVQYRRLIVRGGPKKALVAVGHTLLVTTYYLLSRQDVYHDLSPLQLDAELRARAQQRATQQLQALGYDVTLTLKSQAA

SEQ ID NO: 113245 - protein, 339 aa, unidentified
MTDWTVAIGVDTHKEAHVAVALSRIGAQLDSCKVEATPAGYQRLLTWAAALGRPLFGVEGCGSYGAGLVRFLEVEGVRVYECERPRRGERRRGKNDHIDAALAARRIVSGEGLSLPRGGGQREQLRLLLVERRGAVRARTAAMNQLSSLVVTAPEPLRRRLATLSKQQLARKAVQLRSRSDLVADVLRRIGRRVECLSQEITEIDRSLSALVAEIAPQLLAECGVGAVCAAQLVVSSGDQHRMVTEASFAALAGTTPVEASSGKQQRHRLNRGGDRQLNWALHVIALQRIHHHTETAAYYQRLLAAGKTTREARRCVKRALARRFYHRLCESHTPALTT

SEQ ID NO: 113246 - protein, 348 aa, unidentified
MEKLIRIGMDTSKSVFQLHGVDSVEQPILRRKLRRGQVLPFFSDLPPAQVAMEACGASHYWARELQALGHEVVLIPPQYVKPYVQRGKSDAADAEAICEAASRPKLRKNFVPIKSTEQQAAQMLTKLRAQFIGRRTQLANSIRGYAAEFGLTAPKGLSRLRELLADIRADATVPDLAMELVEALAGELTRVDDQIATLDKKLMQLHRGNEMSRRLAGIPGIGPVGATLLSIKVTDAHSFKSGRNFAAWLGLTPKNHSTAGNNRPGVITRAGDEMLRSVLVAGATAVIGDLRRGGNRIWPWLKALIARKPPKLAAIALANKMARIAWKLMISDDRYRPLGGSAPMATST

SEQ ID NO: 113247 - protein, 348 aa, unidentified
MKITTVGIDLAKNVFQVHGVNEHGKIALKKQIKRDQMAAFFVNLPPCLIGMEACGGAHYWARKLQGYGHTVKLMAPQFVKPYVKTNKNDAADAEAICEAVARPNMRFVPLKNIEQQAVLSQHRVRQGFVGARTALANQIRGLLTEFGLIVPQGISHVCARVPELIEDASNELPGSFRLLIERLLGHLKELDRQVGELEEQIKTSHRNSEVSRKLEKIPGIGPITASALVATIGDAKSFDNARQLAAWVGLVPAQSSSGGKSTLLGISKRGDTYLRTLLIHGARAVLWAFRSKADQSGNPWLQKLLERRNVNVAAIALANKNARIVWALLARGREYEPEFKRQKVRATA

SEQ ID NO: 113248 - protein, 348 aa, unidentified
MHLYFVGLDVHKQVIAFCVKTAEGGIVVEGNIPATRAALDGWVRTLPGPWHGAMEATMFSHWIYQHLKPHAAKLEMGHAARMKAICAGKKKSDKVDARTIADLLRCNLFPACFVISPELGALRQQMRFRRLLVEETVMFKNKTAGLLMGAGVEYERRRLHGKRYFESLVKDNEWIGQELRPLLEFNRAQMASLQAMDRRLKGMLARHPALESRVRALCRIDGVGTVTALSWALEAATPERFPSIKHAMSYCGLTSALRESAGQQKRGPLSKQRNAHLQSVLIETAKLAPMNNEKLKEVHWKAVEKGGHRNRATLAVARKLVAYLMAADRAFFAGQREGAAAGEPVRAA

SEQ ID NO: 113249 - protein, 334 aa, unidentified
MQNITLIGIDLGKHSFHIHCQDKSGKVLLRKKFTRTKFIEFLAGCASSTVVMEACAGAHFMARRIADLGHEAKLISPQFVRPFVKSNKNDFVDAEAICEAASRPSMRFVQPRTEAQQAMRALHRVRESLVSDKVKTTNQMHAFLLEFGISMPTGVAVVKRLSTVLAENELPPYLAQLLMRLHAHYIYLVGQITELEIALEQELSRDEVGQRLQTIPGIGPITASVLSSQLGDGKQYSCSRDFAASTGLVPRQYSTGGKNTLLGISKRGDKNLRRLLVQCARSFIQRIENQSGRLADWVRALLARKHSSIVCCALANKLARIAWVITTQQTVFER

SEQ ID NO: 113250 - protein, 323 aa, unidentified
MNKYKETFGVDISKDVFDVYGSVCGHSQFKNDEQGFKLFVKTLTADSLVVMEATGYYHYRLAQFLYKNGITISVVNPLSVKRFIQMKLAKVKTDKSDAKAICNYGLSNQVPLYNALTDVQAECLQLFRLMDSYLKKRTATKNKLHGEEVLGTPSKYVYRSLKRDLKHLNKEVKGIEDRLLELVKQDQQQQLTLLTSIPGIGIKTALFLVVITDGFAKFDKASQLCSYVGITPTIRESGSSVRGRSRISKVGNKKLRNLLFLCAFNACKHNRACRALYERIVNKGKSKKLALIAVANKLLKQAFAIVKSGLPYDEDHVSVLVRG

SEQ ID NO: 113251 - protein, 326 aa, unidentified
MKNIVTGIDISKDTLDYCSLGSNDVQVKTRGVLENNSQTINKWLDGFDKTNTVFALEHTGHYGAALVDCLSRKKYAFYLINPLELKKSLGIQRGKSDIKDAYRIAEYAITNKHKLNPYQLPAENLGRLKALITARERYVKMSVQVQNSLKANEILNRTIDVKMLIKEEKKQYKSLQKSIKNIEDEMQKIIKADQELKSSYKKVTAVIGVGPVIAIKCITETANFTKFHNPRKFSCHCGLAPFPYQSGSSIRGKTRTHFLRDKSLKAILIKGAVTAVQHDPQLKTYYNRKVKDGKHHMSVINAVANKLVLRIFAVAKREEPFVKLSA

SEQ ID NO: 113252 - protein, 341 aa, unidentified
MKVSTLGIDLAKNVFQLHGVDHEGHTILRKKLTRAKFVQFVIQLEPCLIGMEACSSSHYFARLFTRYGHEVKLIPPQYVKPYVKTNKTDATDAEAICEAVTRPNMRFVQIKTEEQQAVLALHTERGILIRERIACANSLRATLAEFGITIAAGQNHLTRELPAILEDGENGLSPFVRTSIYRQSKHIRELEEQVKQVEEALASWYRTQEACQRMAKIPGVGMLTATYVVAAVGNARQFSTAKQFASWLGLTPKEHSSGGKQQLGGISKRGDGYFRYLLVHGSRALTAWVNRNGAVEKNSWLQGLLERKHYNVAVVAMAAKTARIMWSMLSHNTEYQPRQLA

SEQ ID NO: 113253 - protein, 377 aa, unidentified
MSLVMGIDQHRAQITAEWLDTETGEVSRARVRPADRAGVRRFLARFAGQQLEVALEATTGWRFLVEELRAVGAVVHLAEPAETAALRGTKRRAKSDRADARHHRELLLAGRLPESWIPPDHILDVRARVRLRHTLIEQHTEWQQRIQAVLYHHGCRQRRRLMEGDGREWLASQALSETAREQITVAMAIIDALDVQLAPLTKELCAWARRQAGCKALIDAYYGIGELCAVTVIAELGDCRRFQNSRDAVRYSGLDVTVYQSDRHRAPGHLSRQGPPALRWALYEAAQVARRPGSPDRGYYEQAAERLGGNRACLALARKLLKRCYHTLRELGDDALTPPVERPQPGPGSAAARRASSGSPRSLEPTTTNQRADVLAA

SEQ ID NO: 113254 - protein, 346 aa, unidentified
MYSIGIDAHKRYSQITIMQEDGKIINRCKVNNDRKSIKRALSPYAQDGSKAVLESGWNWGLLYDMLSDGDLEVKVAHPLKVKAIAEAKIKTDKISADILAHLLRADLIPECYVRGKSSRRIQQVLRQRMFLVRLQTMVKNKIHNLIDRQEEAREPAQSFTDLFGVKGMQFLRSTPLPLLERKLLDGQLELLEELRTRISWVESILTQLKENDEIAERLKTIPGIGEFFALLIRHEIDKIERFPTSNKLCAYAGLVPSTYSSGGKTYHGRIIKQGNKYLRWALIEAVIPAIRKDVQISSYYYLMRAKKGSNSAKIATARRLLKIVYQVWKENRFYRIKTSRTALIHT

SEQ ID NO: 113255 - protein, 374 aa, unidentified
MARKAEKEKTKDGLKLKIVNPNAAGIDIAYGEMQVCVPEDRDGENNRCFGSFTCDYEEIASWLKACGITTVAMESTGSYWVGLYFFLEEKGFDVLLANAKDVKNVSGKKTDEADAEWIMLMHSYGLLKPSFHPDAAARSIRELARHRDNMLRSASKEVQHMQKSLVLMNIKVDTVISDILGKSGKAIIEAILNGNHDPKSLVQLVDPRCKASKETIEKSLEGTWDVVHLFELKQSYDLYKYIHTQIADCEAEMDRLLGEYTDGCGTDMQGYTATKKRVAKKNAISFDAEKHAFSMWGVNAMEIPGMSLGALAVLMGELGSGFTEKFTSAKSFCKWCNLVPNNKISGGKLLSSKVPKQKNRVGHVFLAGPDDGQA

SEQ ID NO: 113256 - protein, 310 aa, unidentified
MDAIYVGIDVSQARLDVHVIPSGEAFAVARDGKGLEELIERLRAFSPQLIAVEATGGFETIVAAAVAGAGLPLVVVNPAQIRHFAQALGKRAKTDPIDAAVIAHFVEAVKPELRALPDEAQRLLAELVGRRRQIIEMMVAERQREKRAANVRVRKSILRHIRVLEKELPEIDEDIGTLVRGSPVWREKEDLLVSFPGIGNTLARTLLAEVPELGELTRREIASLVGVAPFTRQSGHWKGKSKIGGGRGSARRALYIAALVASRHNPGLRTFYRRLLAAGKPKMVALIAVARKILTTLNAMLRDKRKWQPA

SEQ ID NO: 113257 - protein, 419 aa, unidentified
MRNSNTKKLKRISEQTLLVTVDIGKVKHTGYCRFPNGTEGKPFEFFNSRNGFEELWWRVCQAKRSLNLAEVVVGFESTGPYAEPLLHFLRKRDVRLVQVNPLHTKRLKELQGNSPNKTDQKDPKVIADIIELGHALTVIIPEGTVAELRRLTQARERSIQRMSMLMSQLQDLVFLIFPEFITVMKDITIKSTQYLLKNYPRPQDIVEQGIDGLAQILKKVSRGQLGKERAEALYQAAVESIGIGEGRESIVLEIREIVFSIESIEKFVKEIEKHMSKHLKDVPYSRCILSIKGIGEITAAGLIGEMGDFKNYRTISEVIKHAGLDLFEISSGKHRGTRRISKRGRPLLRKLLFFASINVVRKGGILHKQYQHHLEKGMPKMKALVAISRKLLSIIFALVRDHSVYIAEYSKTQRLKEAA

SEQ ID NO: 113258 - protein, 477 aa, unidentified
MDRAAQPFRWSQQEELRMNPERSKSRDSGKMPTVHPNAAAIDVGATMHMAAVRADRAPEPVRSFGTFTADLHRLVDWFTECGVETVVMESTSVYWIPIFELLDARGFTVFLVNARDAKHVPGRKTDVSDAQWLQRLHSFGLLRASFRPKGHIAELRAYVRQRERLLEYAASHIQHMQKALTEMNLQLHHVVADITGATGLRIIRAILAGERDPEALASLRHYSCHSSAETIAKALTGSYRAEHLFALEQALALFDAYHEKASACDIRIEAVLKELSTHRGRGHGAVPPASRRRNRADQANALAFDVRAALFALLGKDITTIDGLGPYLSLKLIAECGDDLTSWPSAKHFTSWLGLAPSNKISGGKVLSSRTRRSGGRAAALLRLAAVTVGRTDTALGAFYRRLSSRIGKAKAVTATARKVAVLFYNAVRHGMEYVDPGASSYETRYRTRVINNLHRRAKTFGFVLQPLEPKAGAAVS

SEQ ID NO: 113259 - protein, 461 aa, unidentified
MGKGSGMSRADVRRNARRERLRGLLPRDGVVVGIDLGEDKQALAVVDHDVRVLARTTVRVPAFRLGEALDWAVAQARVKGYARVAVACEPTGARWMQVQRLCGERGLPLVCIQPLVSHIAREQQDYTPHKADEPDSVLIGRLAAELHCYVPEELDETWAHLRQLGRRRAQLVTAASASAARVRDFLSVAWPVLTGACAEPFKSVTWLAGLQVTAGRCGGDPARLCGLGVEGFTALVRSAVPAWGGKRVSGRVARAVFAALADAEGAVIWSRRGLFRRIADELGDLAYTRARLRAVEADMVAVLDELGLSRLGDIPGLTAVGAAAILAETGDPRRYDTSSSLVKHAGLSPAGNASGAFEGAARISRRGRPGLRLAAWRAVWPMLVHNPVLAAKYAALAGTAEPDEPARRGASPRRGAAAAARARRAKARVACAASLLRWIYALVVHGTSWDPAAAAGPAQAA

SEQ ID NO: 113260 - protein, 354 aa, unidentified
MVDKVTEAAVVGGVDTHKDLHVAAVVDQNNKVLGTQYFSTTRQGYRQMLAWMTSFGTLKRIGVECTGTYGSGLLRYFQNAGLEVLEVTVPDRMERRKRGKSDTIDAECAAHAAFSGIRTVTPKTRDGMIESLRVLKTCRKTAISARRVALQIIHSNIISAPDELREQLRNMTRMQLIRTLGSWRPDASEYRNVTNVYRISLKSLARRYLELHDEIADLDVMIAAIVDELAPELIKRNAIGYESASQLLITAGDNPQRLRSESGFAALCGVSQVPVSSGKTNRYRLNRGGDRALHIIAIGRLRTDAKTKEYVARRVAEGHTKMEAIRCLKRYISREVYTLLRNQNRRINSIPITA

SEQ ID NO: 113261 - protein, 352 aa, unidentified
MKVEKNNMKSNHLDSHYYDHYFAIDWSIDNVSVARMRSSSTYPKVTKLAADIKVVKEYVSYFSGSKILCIEETTGSHWLYVELKDYLDKILVCDPYRNRLLSEGAKNDKIDAIKLCQLLRAGMLKEVYHSIDQDYQLRKIVSAYEDWVKFGVRFKNQKSALYRAVGLRYKYDMIDKSNRLLSFIEMHQESAIELYEEKKKDYERLFHKLSKQYCLISYLKAISGINDIWAVTIYSKVIDAGRFKNKYKYWSYCGLVKHEKESGGKIYGRRVPRYCRKLKHIYKSAALTAIGGKNDIRSYYDHLLTLGFSPRDARNEVARYIAKVSYGILKNKNKYIPYQWRKRTGEESREIA

SEQ ID NO: 113262 - protein, 346 aa, unidentified
MMIIGCDFHPSWQQVSWLDTETGETGERKLVQASGDAERFYRQLPAPALIGMEATGNCHWLVDLLAEIGHELWVGDAAQIRASYVRQQKTDQRDAAHLLKLLVEGRFPRIWMPSSEVRDLRQLLLHRYKLVIMRARVKNELQHLCLNQGVQRKRKLWSQAGQQMLRELPLKPWAGRRRDDLLKLMAMLDQQIEPLDEAVQAEAQRDKMARLLQTQPGVGPITALAFVLTLGEVGRFPRGKQVASYLGLIPREHSSGGRQRLGAITKQGNRMLRMLLVEAAQAAVRYDPEFRKQYLHRCHQKPKAVAKVAAARKLAIRLYWMLRTQRPYPEVVHIESSPRVALVGAS

SEQ ID NO: 113263 - protein, 387 aa, unidentified
MSRNARVPVPATTLDQDSTLVVVLELSARSWLVGARVPGIGRMSRYALAPSAEALAAWLDTAKARAGTAGRMVVRVVLAYEAGRDGFWLARYLEARGVEVYVIQPSSVLVDRRARRAKTDALDVEMLMRTLLAWLRGEPGVCSMVPIPDVAEEDGRRPVRERQKLIGERLALLNEIDGLLATLGITGYRPLRQDRRARLAALRTPEGDPLATNAAARIGRILDRLELVMQQIAELEQARDAVIAKAAAASEAETMIRGLARLKGIGAELATVLVWEAYVRSFPNRKALGAYAGLTGTPFASGSTTREQGISKAGNRRLRSSLVELAWLWLRYQPDSKLAAWFRSRTGSVGSRMRKVMIVALARKLLVALWRFCRAGVLPEGAVLKAA

SEQ ID NO: 113264 - protein, 344 aa, unidentified
MTIVEERTAVTGGAGTHSEVHVAAALNPVGGLLGTREFPATAAGYASLLGWLEKFGNVALVGVEGTGSYGAGLARYLAAHGVQVVEVDRADRQERHRSGKSDPLDAVSAARAALSGRASGAPKGRDGAVEAIRSLMADGRSARHERTQAINQARALILTGPDELRARFAGLRAAALAEAVAALRPRPGDAADYSLRVALRELGRRVEFLDDQTGRLDDLIVPLVTARAPGLLSLYGVGPDTAALLLIAAGDQPERLRSEAAWAHMCAVAPIPASSGKTRRHRLNRGGNREANHALWRIVITRMSAHPATRAYVQRRTAEGLSKKEIIRCLKRYVAREVYPYLRG

SEQ ID NO: 113265 - protein, 367 aa, unidentified
MKKVSTATAKQTKNFSQSKLTIGLDLGDRSSWYCLLDEVGEVLLEQKLATTPKAMREVFGSMPRCRIALETGTHSPWVSRALSELGHEVIVAHARNVRLIGESRKKDDRLDARTLARLARIDPQLLCPVKHRSAKAQADMTVIRARAGLVRARTALINTARGLAKSYGERLRGCNPRNVNPEKAQGLSPELQAALEPLLAATEALSERIYEYSQQSAKIAKESYPQVARLEQVKGVGTLIALTFLLTLEDPHRFCKSRDVGCYVGLQPGRRNSGQSEPQMHISKEGDPYLRTLLVQGAHYILGPFGADSDLRRWGLRLAERGGKNGKKRAVIATARKLAVLLHRLWVSGEVYEPLRNSHPAAMPAAA

SEQ ID NO: 113266 - protein, 395 aa, unidentified
MKRESNTRETELRYIGLDVHKHYITVGGMNAQQEIVLRPRDVEMERFKTWAESNLRKTDEVVLEATTNTWDVYDTIARLVKRVVAAHPAEVKQIANSRVKTDNQDVVRLVRLLIADIVPSVWVPPVEVRELRATISYRWRLVKMSTAIQNRMHSLLHRHNIQAPQGKIDTGENREWWEALKLSELETMRLKQEIKTLRLVRENIVEVEKELGRLSNRERWGDQAVYLMQIPGVGIIVTMTILSAIGDIRRFESPKKLVGYAGLGAGIHDSGQKHREKGITKVGRKELRWALVEASWQAIVAIAHKLLVTIWYLLNRKEVYKQSSEEDLAYKMLTWAWHMDKPALNGMTHQQFAKYGLLRLGKGEDVMRIVRGGLPRRLASKEEVLALKPELRIPQ

SEQ ID NO: 113267 - protein, 343 aa, unidentified
MKQDISVLGIDLAKNVFQIHGADADGKRVLTKRVGRKELIELMSNFRPCVVGIEACTGAHYWARLFGSMGHTVKMMAPQFVKPYVMSNKNDRNDAKGIAEAVTRPEMKFVPIKTVEQQDVLLLHRARELCVKNRTAQSNQIRGLLAEFGVIVNKGLSEIRKLPEILDLNKDKLSVKATYIFERLYEQFKTYEEQVLLYEKDIEAHVKSEPLCKEILKIEGIGPMTASALVATIGDPKIFKNGREVSAWLGLVPKQHSSGNKIRLGGISKRGDRYVRCLLVHGARSALRSVDNKTDKRSRWAANKKATQPINKAAVALANKNARIVWAMMATGECYRQEEVHAA

SEQ ID NO: 113268 - protein, 312 aa, unidentified
MYYIGIDVSKKDLSVFDGKKDLKFINKEGLKSFKKYLKKKVNFSDLVIIFEPTGIYSFYLKEFCAENSIKAYIVNPKKSHNFTRALGKRSKTDKIDARILYQFHKLIDLKDIKIPRIDQQAKALAGYLVSYEFALKQRVALSNHLESLRDKELIALLKKDLKRAKKLEDRLFNDILEYVSKNQNLKEDYQRLLTISGVGDKAAIALLTLFKTYQGTNRAQITALFGLDPTRRESGTSVKGKVKISKNGKGIYRKILFLPTVCATVHNQKIRVFYQRLLAHHKTKKLAVIASMRKILLIAHAMYRDKTEYIAV

SEQ ID NO: 113269 - protein, 400 aa, unidentified
MLSIGIDVSKGKSTVCGMKPEGEIVYAPFEVQHTRKEMSELVSLLRGSGEEVRAVLESTGSYHCPVVAALLENGIFVSVVNSLRMKRFCSQSIRKVKTDRIDAMQIALYGLAYWQELQPARLPEDTYRELQLLARQYYQMTSILIKAKVDFNAICDQVLPGMQELMNDHAGRHKLSDFVLQYCHTTHILEMGETRFRKDYCKWAEKKGYRNCERMAAHIFATAQNGIPVLPNAPSTQIVITEAIRVLHTVEASRDAILTQMQALAKTLPEYSLVREMPCIGDTLAPRLIAEIGDVRRFHSKRALIAYAGIDAPPYQSGKFCANNRHISKRGNRYLRKTGYEVMQSYVMHKPANDPIFTFIEKKRSEGKSGKLAMVAGLNKFLRVYYGKVTELYRSLPAIE

SEQ ID NO: 113270 - protein, 422 aa, unidentified
MMKWLDAKRQIYDEELHAMNNVAGVDVSKGKSMVTVLRPFGEVVAKPFSVGHTGSELKELADYLKSLDGETRVVMEHTGRYYEPVARFLHEEGIFVSTVNPKLIKDYGNNTLRKVKTDKADARKIARYGLDNWAELRQHTLMDTIRTQLKTLNRQQGLYTKTKTMMKNNLIALLDQTYPGVNDLFDSPVREDGSQKWVDFATAFWHVDCVRNMSFAAFTERYRKWCKRNGYNFSQSRAIKIHTEAQDLIAMLPKDALTKTMVRQAADALNAVSKSLERLKAEMRSLASQLPEYPVVMAMRGVGDSLGPQLMAEIGDVTRFAHRGSITAFAGVDPGSDQSGTHEAKSPRTSKSGPPELRKALFLVMDCLLKTMPADDPVYRFMDKKRSEGKPYLVYMTAGANKFLRIYYGRVKEYLASLENAD

SEQ ID NO: 113271 - protein, 352 aa, unidentified
MKKIFIGIDFAKIKFDACIIEACGMKEFGERKIGTFTNDTAGFRQLMKWVKTHFKSIAPGEILFCGEDTGSCSQPLSRWLFGKGLDIWIENAYAIKHSSGIQRVKTDKADAAMIAEYAWRHQDKAKPFVPLSESLANLREVFLYRYKLVQQKVALTVRMKDKSSQKSKAMTFINRKTDHLVKEIDDAIEECDRMIDSIIENDPELRENYEIITSVKGVARQNGACLLIYTNNFKKFDMDSRKIACYYGVAPFGKESGTSVHSPARTSHFANKLIKSLLGQAAQSARIHNAEIKDYYQHMISKGKKHSVAMNNIKNKLLRVIVALVRKKVKYDPMTYEAYKIRWQPKATEAAC

SEQ ID NO: 113272 - protein, 436 aa, unidentified
MRGCRCSMIMGFTKPIEHFNLQRKKVITMNTLYVGIDVSSKSNVVYLMLPNGDKHSNFSVANSHEGSTLLVKKIYSALTSHSLDTVLIGLEATSVYGDNLVYFLREDATLAPFNRKIHVLNPKQVKKFHDTYNDLPKNDYVDSFVIADCLRFGRINKEVYMGEYRYKALQNLTRARFFAVQNLVKEKQRFMNVLFKKYSTMTQEKVFSDAFSTTALAVYDEFDSAEALANMDLHELTDFIIEKGKNRFPDPDAVAKAIQKAARSSYRLPKTVNDSVNQVLSISITSMKALESQIKEFDKAIIALMELLPNVLISIPGIGPVYSAGIMAEIGDINRFDNQAALAKYAGLAWKQHQSGSFEAEVTRLIPSGNRFLKYYLCEAAFSLVRCDKEYSDFYHLKYKEVNRCQHKRALALTARKFVRLVFRLLKDNRLYVPAK

SEQ ID NO: 113273 - protein, 455 aa, unidentified
MSIVSSLPSEFERININAAGIDIGAQKHYVAVPKGRDPKGRDVRHFDTFTADLYALVDWLKQCHIDTVAMESTGIYWIPLFEILEQNGFEVRLVNPRSIKHAPGRKSDVVDCQWIQQLHAYGLLTSAFRPDEQINVLRAYHRQRTMLVNHAATHIQHMQKALEQMNLKLTNVISDITGTTGMKIIRSILAGERNPEKLAKHRDPRCKKSDKEIAKSLHGNWRDEHLFALQQAVALYDFYQTQIEACDKQIRAQLCRFEDRSDGGEPPVSTGKSKGSGKRLSFDATEHLYRMTGVNLTQIVGLNTPTVLTIIAEVGLDISRWPTSKHFASWLGLCPGSKISGGKNFSSKSKPSANRAAHAFRMAAYSLHRSQTAIGAFLRRKKAQLGSPKAITATAHKIARIFYEMLKTRTEYKDLGVDHYQTRYKERMLRNLKRKAKAFGLELVNSNRDQSVMVN

SEQ ID NO: 113274 - protein, 337 aa, unidentified
MKVVRIGLDIAKTVFQVHGVDGHGKTVLKKTLSRSEVLAFFANTPVSLIGIEACAGSHYWARELIKQGHDARLMAAQFVSPYRKSGKNDANDAEAISEAVGRPNMRFVPVKSEEAQAVLTVHRARTLTVSERTALVNQVRGLLGEFGIVVGQGIAQARRLLADIGAGGRQLPILARETMGELHDRLRALDDCILAYDRKIATLAKACEPARRLMAIEGVGPVTATALVASVGNASAFKSGRQFAAWLGLTPRQNSSGGKTKLGAISKRGDVTLRTLLIHGTRSVLRLTTGKTDRKSVWAEALKERSCANVAAVALAAKNARIIWAMLSRGTEYQVAS

SEQ ID NO: 113275 - protein, 351 aa, unidentified
MQQYVGLDAHSKNSVFVMQNEEGRILGQGRVPTSAGGFREMRDLHQLTPGTPVALESGPVAFLVVDYLTELGLRPVVIDAREVRVKASRPRQKSDRRDARELCEGLRRGIYRAIVSVPPQEIRALRDAISRRRHFVKARTAQVNAVKWLLRSRGKGALARSLRTEAAWSRLLAALSDAPALQAHVHQHHAVWHCAGEQVRLLEDEIRELGRNWKKELALLDTLPGVGTIVASTALSVFFDVRRFPSAKHAASYVGIVPSTNQSGDRDHSGPIIKRGSREMRAMLCEAAQHARRRTHPFHAYFMKVFIKRGYRMAVVAVAHRLCRTLFAILRDSAPFSLEKATLGRRAALHA

SEQ ID NO: 113276 - protein, 368 aa, unidentified
MKQITTYVGVDAHKKDLFIAMLIGDQSTPVTWQLANEPNAVRRLVRKLERDAPGPVRMCYEAGPCGYALQRQATTPRVSCQVIAPALIPRKPGERIKTNRRDARKLAELLRAGLLTEVRPPTPEEEAVRDLCRARDDAREDLHRCRHRLGKLLLRRGLHYHGRNWTRAHRRWIDSLEWTHPAERPVVDDYLLAIDQLEARLIELDARLGEIAATEPYREPVGWLRCFRGIDTLTAILILAELHDFRRFHSPRALMAYLGLVPGEDSTGEKHRRGRITRTGNALVRRLLVETAWHYQHRPGVGVTLLRRRKGQPGRVIAIADKAQQRLCRRFRRLAEHHKPAPKIAVAIARELAGFLWAALQPVAKPVA

SEQ ID NO: 113277 - protein, 319 aa, unidentified
MAQNGLVVAGIDIAKDKADVSIRALSQRQTFPSTAAGRRQLISWLRKHKVTKAVMEASGGYERQWAKALRDAGIEVRIVDPKRVRSFAQSAGRLAKNDGIDSDTIGWFAEIFGEAPSQAHDAARETLQQMVNARQGLLDIRTMLSNKGEQDVPEPVQKSHARLLKTITVELAKLEAAITALVKATPHFAKRAEIIESVPGLAATTAAGLIAAMPELGEVSNEAIAALLGVAPYDDDSGKRQGQRQIKGGRRKVRNLFYMASLGAATRHNSMLKTFYHRLIAKGKKAKVALVACMRKLIVILNIMIARGEKWDAHRYAVG

SEQ ID NO: 113278 - protein, 338 aa, unidentified
MTYVGGDVHKNTSTLAYLIPSTGEVGAKRVKTTREEFEQCLAQLPEPWIVAIEATREAPSVSRWLEEMGADVRLVDPQTLSVLGKLQASKTDRKDAELIRDAMCHDYLPECYNAPDYVVERRALTRGHKVLREMATRLRNLIRIIFCQWNLDCKVSDLQGKAAREMMPTWLQQLPETVRLVAQQYWKLLCETEDSINAVDHEIEQAVAADPVAAELTDHPGLGDVIVMGLMAEMGEVRRFPGPKKLNSYAGAVPRVAQSDTFSATGHLPQRCNKRLRYWAVMAAQCVTRARADSKAKRTYERVKQRCGPNSAKIAAARDILTHVFHVWTRAQAQLHEA

SEQ ID NO: 113279 - protein, 344 aa, unidentified
MKATTIGIDLAKNVFQVHAVNEYGKTVLKKQLKRDQMTEFFANLPAALIGMEACSGAHYWARKLTGMGHDVRLMAPQFVKPYVKTNKNDAADAEAICEAVARPNMRFVPIKNIEQQAVLSWHRVRQGFISARTAQANQIRGLLSEYGIILPQGISNITKLVPDLLEDASNELPGMFRLLVDRLMDHFKELYRQVAEIDVQITAWHRQSQLSCKLEKIPGVGPVTATALVATIGDAKNFDNGRQVAAWLGLVPRQHSSGGKSNLLGISKRGDSYLRMLLIHCARAVIFAAKRKGVQEGWVHELVKRRNHNIAAVALANKIARTVWALWAHDREFRPGYTTTAVAV

SEQ ID NO: 113280 - protein, 391 aa, unidentified
MIYVGIDVAKDKHDCFITNSDSEVLFKAFTIANNLDGFNDLYQKIESVMDDVTKVKVGLEATGHYSYNLLGYLIDKGLPTYVINPLHTNLYRKSLSLRQTKTDKVDARTIASMLMSDVNLKSYSDTFYHNEELKSLTRYRFDKVKERAKLKTSVSRLVCILFPELEKLVPTLHIASVYALLSEFPSAKHVATAHLTRLTNLLSESSKGRYGKDTAITFRDAARASIGSNMPAKSLELKHTIKLIQELDSEIDEIENEIKIIMDEINSPILSIPGINYRMGAMIIAEIGDFNRFDSPDKILAYAGFSPSTYQSGQLDGAYAHMEKRGSRYLRYALYNATKYVCHWDPTFAAYLAKKRAEGKHYNVAISHAVKKLVRVIYHLEKTKQQYIKAA

SEQ ID NO: 113281 - protein, 344 aa, unidentified
MKQKYVIGIDVSKSKLDIAILNNQLELLQERVILNNSKSIRAFIKAVLNTYRITRGEVLICCENTGIYNRPLEVVCSELDVLLWVEHALKIKWATTDMRGKDDRKDALRIAQYAIRYNDKLIPYREATEVIKQLNILTKAREAILGQKTALENRLKEAKTHDVFEYQILSKSFKKVLNALVKSIKQTEEKIEQLIANAPEISQTKALITTIPGIGPQCAVNLIIATNNFTSFQSARHLACYAGVVPFKNQSGTIVKKERVSKMANKNIKKLLHLAAMASIRFDEEIKEYYQRKVSEGKNKMSVLNAVRNKLVHRIMSVVNRKQAYLSKNEYRSQKTLDFTCLIT

SEQ ID NO: 113282 - protein, 412 aa, unidentified
MPKIVFPICGGIDVHKSFVVACVASTNEQLVTTYKSKRFSTFTGDLRRLAAWLDDNHCCDVCMESTGKYWIPVWNILEPTCRLVLAHPKYVKAIKGKKTDKRDAKWIADIFKHDLLNGSFIPPEDIRQLRDLMRYLVKLTAFTTGEKNRAQNCLTVSNIKLDDVFSDVFGKAASAIIERLLENDEPFDVRPYLTKNIKASPEEIQAAVDGVMCAKQAEKLRIIRSHMDSLEVCKANLVSEILSSAEKFTPQINLVSTVPGIKALSAIGIIGEIGVDMSVFPTSRHLCSWAGLSPQNDNSAGKKKTTRISRAGVYIKPLLVQCALAAIKSKAHPEVRNRYLSLKKRRGHKKAIIAIARMLLTAIYNILKKNEPYNAELYRRSDVPPTQREVSMEQAIFILQRQGYLISAPVPT

SEQ ID NO: 113283 - protein, 358 aa, unidentified
MEKLYVGVDLHKTSCWVTVLDADGHVLESRRIGTTKPELLEFFGKVPKPAAVAVEATLNWYYFLNVIEPLGLELHLVHALKTRAIASARIKHDRLDSRVLAELLRTGFLAEAWIAPRPVREERQLLRYRVHTVQWATRAKNSIHGVLNRNGIRSPFGSPFGVKGRSFLQEVELPKTDRWEVDGQLERLDLLGTQLAALDREIRKKAKASPVARALEQVPGIGPFIASLVIAEVGDIRRFPSAKHLVSYTGLAPSLYASGEHRWGGPITKQGSSVLRWALVQAAHRAALNPRFYGFYQRQRERHGASRAAVALARKLVVIVFYRWRHALHVQEALPQVEKVRERTSAGAWSEHRPSASD

SEQ ID NO: 113284 - protein, 388 aa, unidentified
MNQEKYIGMDVHAATISVAVKNAEGKLLMECVLETKAATILEFIQGLRGTLAVTFEEGTMAAWLHDLLKPHVSRLVVCDPRKNALMRDGNQNDRADARNLAELLRTNQVHAVYHGNHGTRALKELGRSYLTLTKDGTRVMNRMKSVYRSWAIPCAGTSVYSRRHRADWLAKLGEPGVRIRAEHLYQQLDSLEPVRQAARRELLRESRKHAAVKLLRQIPAIGPIRSALLVAILQTPYRFRTKRQLWAYSGFAVQTYDSGEFRVVRGKLKRNRERITVRGLNRNHNHDLKNLLKGAAISAIERPGPLQDFYAALVERGVPAQHGPSHPGPEDCRHHVNHVEERSEFRPQTVAATSSLSISAEEPSIRRVPSASGRSVSRDARFEGSISQ

SEQ ID NO: 113285 - protein, 422 aa, unidentified
MVAQRDPPKAQKNSTGGIDLVRYHVGVDVGKDRHHVSIRDVETNTYCKTVSITNDREGFAELVSSLERLSGDKSAFLVGIEACPYGLNLSYFLMGVGFNLVEVNPFRAGQFRKAQGMKAKTDRIDARSIAAILSLGDHKPLSIPDPILDNLKELTRFRTDLVDERATMIIHLREALSILFPEYDKVFRQLDSSGSLAVLAAFPGPEHLIAAGEETVGKVLSLASPHRMGRGMARRIIGAAQDTVGVVQRQPALGIKISILAKRIESLQSTIHELDRQITTLFNSLPCKPQGFPCGRAPTLAAIVSEIGDIHRFPTLKKFLSHLGWCPQSFQTGNYHMEHPRMSHAGNKHIRRLVWMLSINAIRMVPRYREYFLHRVSEGKAKMHILVAVGRKLLSALYAILKRGVAYDPNWEENSRLAMAKH

SEQ ID NO: 113286 - protein, 331 aa, unidentified
MVAKEFFIGIDVSKGHFDYVVQYKGLKVHSGKVRNDREHIEAFISGLSSLAGYSPAAAVFGMEHTGMYSNLLLEGLREMGNDTVHENASVIRNSLGMLRGKTDELDAERIARYLYRSCEELRIWKPKMQVIERLRLLLAHRERLLNARNRLRVALSELSLFTDKELFDELHLYSDHCISAICKDLLGLESTIKKIWRSNEICALPMEQMLSVPGVGAITALSVLIKTNAFQDISDPKKFASLCGVAPFPHRSGRMVMKDRISKMGDHKLKGLLHICALSSIKNDGEFRQYFHRKKAEGKPGMVVLNAIRYKIILRMFACVNGNRLYIPKKT

SEQ ID NO: 113287 - protein, 450 aa, unidentified
MKKSKNQKTEVKKYSKNLSVINAHAAGIDIGDSEHYVAIEKGDGYEVRSFNAFTEGLKAIVAWLILEGITTVAMESTGIYFLSLYTMLEEAGIDVWLVNAKHVKNVTGRKQDDTDAIWIQKLHRCGLLQRSYQPENEQRILRTYVRQRKNLITIESDSVRRMQKALELMNIKLHIVISDILGKTGMQMVESIINGERDTEVLIKYKDARIKASNEDIKKSLQGIWSDEYLFMLKQAYDEYHFYQKQIKECEVKIEQQLLKYMATIKEGDITNVVTTKSKRKPIKNQFSFSLTSYLKEIVGVDLTRIPNIGDATSIEFISEVGYDMTKWGSLNQFSAWLNLAPNTKKTGGKIISSKMMKKKNRAGQTLKMAASGLAKNKGPLGDYYRRMRGRLGGKGATLATAHKLAKIMYTMIKNKKEYDIEKMNKSQEQYKKHRIKLLEKQLAKLKNAA

SEQ ID NO: 113288 - protein, 371 aa, unidentified
MNSILYVGMDVHKENYTLCCYSFDKDELQYKQTISSDYKMVLKYLDEVRKRYPEGIEFVCGYEAGCLGYTLYHQLTNHGVNCIILAPTTMAVAKNIRIKTDKRDAGNIAKCLAFRTYSAVHVPTAEDDSVKEYIRMRDDQKKALKIIKQQILAMVLRHGYRFSGGKNYWTIKHVTWLKSLDLGGVLQEGLTEYLITYAYLTNKIERLDKRIEELANSERYQEKVKKLSCLIGVKTHTALSVVVEIGDFKRFSKAEKLAGYLGLVPSEDSSGEKQSRGSITKAGNCHVRRLLVESAQGYTRGAVGHKSVDLKRRQSGNTPEVIAYADKANERLRKKFYRMTLKNHSNRNVAATAIARELACFMWGLMTDNIA

SEQ ID NO: 113289 - protein, 322 aa, unidentified
MLPTLGIDISKDSFHVELSINHKLRHRRFTNRKEGFAELCGWLSKHKATPVHACLEATGPYSEALALYLHEQRHTVSVVNPAQIKAFGQSELLRNKDDRPDAALIRRFCEKQCPIAWTPPPAHFRELQALTRHLENLLETRQQQLNRLETTTTKNVVKSLRKLVTHLDAEIKRTEQQIENHVDRHPDLKQQCQLLESIPGIGKRTATRLLAEIENISQYKSARQVAAYAGLTPRNNRSGTMRGQSRLSKTGNARVRKALFLPALVAKQHNPVVRNFCQRLARHGKNKMQLVGAAMRKLIHIAFGVLKSGKVFDPNHELLLNS

SEQ ID NO: 113290 - protein, 360 aa, unidentified
MGIDVSKGYADIILLNFKKELVEKSFQLDDTSAGHRVLKTKLEIFFTNNPEAIIYAALESTGGYENNWYRLLRNLGEEMAIQVARLNPIGVKHYWKAKMEKNITDKISAKNIAEYQIVHKEKIGYSKEPCFSSLRKQWKFVRMITKQKTQFYNQLESELYLANPEMLIHCRNGVPKWVLQVLKKYPTAEKLSKAKVNILSKIPYVTAMKAEVLISNAKRSVASAGDEMAANLIVCLVEQIQSQEALIKSQMDYIEAKCELPREIEILKSFIGISTYTAIGLMLEIGTVDRFEDAKHLASYFGLHPVYKESGDGRKGVHMSKQGRSEPRALLYMAAKTAAARNPQIKLRKIATMSVCFLIP

SEQ ID NO: 113291 - protein, 350 aa, unidentified
METKNTSTAKLFIGIDIHKRSWKIKTATDLFDGKKFSMKPESEELKKYVDKHYPNYEVYTAYEAGCCGYLAHRNFISYGWNSIVVNPADISKTGKSSHQKTDDLDAVQICRELKDERIQGIEIPSVEREQFRSLFRYRNNLTKKMRKIKTQIKMILLFFGIEIPQEFDNPNWSHAFRKWIKDIKFKHTTANFTIKRMLQEYEFTYKLIRETSNELRAYCRKYYKKDYNLLRSVPGIGGIVACGILAEMGDLRRFSFKQLAGYVGLCPNMHQSGDNFKTKGMSYRANRLMRSYFVEASWQVIRFDPVMQDYYRSHKGKESKKIIVKIARKLLSRTLAVIKTETPYQIGVVK

SEQ ID NO: 113292 - protein, 373 aa, unidentified
MAKAEKSINEGELRQFNCLFSLGLFAVGVDLASTVIQVCYYDPKSKQIKNRQLKRDEFYEFIKAPEFGPMQLCIEACGSCNYWSREFVKYGHSAKVVLAKDVKSFIMSSDKNDKLDARGLFKCCLTETLGRTVKPKDESQQTILNLHTVRSLLIKQLVQTQNSYRAMIYELGGVSKPQSINRLKLSGEEMLAKLQDENSDAVDNFNCIKEALTQGLDNTAQRLKVIDGYLHNFAHTNEDCKRLMTIPGIAEISATAIYAVMGDPDNFENGAQFAALAGFVPAMVGTGGREYQLSTRRSANPLLKGMIYICAVSQLAKVAKHDKERKSQLAIKLDHSDAKKKVIVAVANRLCKVAWAVTKYKKDYDPTKCGLLF

SEQ ID NO: 113293 - protein, 408 aa, unidentified
MISPILKRCCGLDAHKNSIAATLLKEGRQGKITKTVKEFGTFKEDVIKMKQWLIKEKCEAVAMESTGIFWSPIYDILHEELKVSVVNARNIKNVPGRKTDVLDSEWLAELLRCGLLKPSFIPSKELRNLRMKTRYRVAILKQYQAEKNRVTKVLEAAGIKLGNVASDIFGLSGLLILKDLLEGSKNVLEIAQSSGKRLRADTVQIAKAIDGNLDNDKKFLLNEMKNHLEWIARKLMKLNEEILVSMEPYKEEWKLIQTIPGIDSISASSVIAELGCNMEQFDNDSAHLSSWAGVCPGSNESAGKRKSSKMRKGSKQLRRVLCEIANAASKSKGTQFEYFYKSLLIRRGHKRAIMALAHKILRIIFSVLKNKKPYYEPNVNHEMLTTKRNSQRWIRALKKYGYIAPKED

SEQ ID NO: 113294 - protein, 365 aa, unidentified
MDIKGVIGVDVGKGWLDVAREGAASAERYPNEAAPIARFVRRLSASDVVVFERCGGYERTLQKALTQANVPWAVVHSARVKAFREFQGVKAKSDRIDARLLQEFGRDRLNAGKLRLGCVKDELLASLTARRRQLRRMLHGEQCRLAIAASAAIRASIERMIGMLKSELGAMEGELAAHIGRDGLLALKHRVMCEQIGIADASARALLAELPEIGTMGRKPITSLGGLASRVHKSGRTDLRRGLVRGRNLVKAILFNPARTAMRWDPDIKAFVRRLRARGKPGKVIMVAVMRKLLVRINARVRDAIETPAAANCAALRQSEPSMVGSAGGIARRQSRLAEGHRRRRRVAALTAKPDAARSRVIAMR

SEQ ID NO: 113295 - protein, 433 aa, unidentified
MKVLYERVAGIDVHKDMIKVAIRSPGEKPWTRKTEILEYRTFYGVLQAMAAELRRRGVTHVVMEASGVYTEPVYYALAEQDFTEVAVINPAHAKALKGHKTDAKDCARLAELFECGLLRGSYIPPAELKEVRDLTRYRMKTVQARTSEIQRLGKALESAGIKLGSVASSITGASATAMIEALIDGERRGGVLADLARGRMREAGKLADLSMALTGRFTGHHALLCRLHQDRIAGFDAAVAGLDERIAGKAARWQREAGLLTSVPGFGDVVAQAWLGEIGPAPHRHFATCEKLASWVTLCPGNNISARKRKHGRTGDAGTYIKPMLVQAAWNAIRVRGRLQARYNRLVRRFGGDKNPGAKKKAIIAIAHTLLKIAYQVLKSGTPYQDLGADFYTRREAPEQKQAWLERQLQKLHPGCAITITIRPPEVALAPGG

SEQ ID NO: 113296 - protein, 343 aa, unidentified
MSIVILGVDLGKNACSVVGVDAAGAVVVRKSMRRQTLVDYVAKLPACVVAMEACCGAHNLGRLFAAHGHEIRLMSPEYVRPYVKAQKNDDRDAEGIAEAASRPTMRFVELKTQEQLDIQTLHRVRSRLVAERRSLINQLRAILLERGTIFPVGRRKLELGIDALLANEDTTLSPRLRQLVGELRAEWRELDTRVEALNGEFVELARNDAAARRLTSIPGVGVLNATALIAAVGDASSFAKARDLGAWLGLVPRQHTTGGKPRLLGISKRGNTYLRTLLIHGARAALPSLARSETPLGRWLTGMIERGVHRNAIVVALANKLARIAWAALRKDATFERGYPVAA

SEQ ID NO: 113297 - protein, 347 aa, unidentified
MNYCGIDIAMKTSCLYITDSRGRKKISGEIETTYMALTHRLRPYVRQGLKIAIEAGNQTAWIYDCLIRLGAEVVVVNPAKVKLIAESRRKTDKIDAKILAELLRLDGLPEPIHMPGRPTRELRGLLVARKQLVNARTKLCNVARGMLRQEGIRSPARSLSTFKGWQRLLGHAGYECEHIAPMLSAYYKSFVSLTRSIQALDKELAQREQNDERAARLQTIPKVGRIASLTFLATVDDVKRFSSSRKLVRYSGLCPTVRSSGERTEYGSISREGRSDLRAVWIQIAHLVASDHSRSTARLRRWYQKVLRQRGKKTAVVALARKLLTIAYRLLYDQADFRSRLVSQKMA

SEQ ID NO: 113298 - protein, 345 aa, unidentified
MLADDVDHVIGVDTHASEHALCLVDAATQRTADHLTIAASRIGYRRALRLARAHAPGRRVWALEGTGCYGAGLARFLCERGEQVLEVERPRREDARGRLKSDALDAERAARFALAGRAGARPRLRAETRALRGLLIAREGAVLARTAALNELRALLLTTPPELRERLQRLPRAALVEACRRLRSAGDEERAACAFALRSLAGRVRSLHAEADTLERELARRVEALAPSLLARPGIGPVSAAALLVAWSEPGRLRSEAAFARLAGVAPIPANSGTLVRHRLDRGGDRRLNRALHTIILNRRRLDPQTQAYITRRVSEGKSEREAVRCLKRYLARSLFRHLEATPQT

SEQ ID NO: 113299 - protein, 366 aa, unidentified
MKKISTVQTFKSEIFKDQRLTIGVDLGDRWSFYCVLDEAGKIILEQKVPTTPEAMKQTFSRMPQSRIALETGTHSPWASRLLTELEHEVIVAHAQKVQLITKSNRKDDRHDARTLARLARIDPELLGPVRHRSVQAQIHLTVIRARAELVSARTALVNAARGLVKSYGERLPKCGTQQVGRELAAALSTELRDVLEPLLKEIESLNERIKEYDERMEKIAKEVYPEVSLLKQVKGVGTQIALTYVLTIEDPHRFLKSREVGCFLGLKPGRRNSGESEPQKKISKAGDRYLRTMMVQGAHYILGPFGEDSDLRRWGRKLSERGGKNAKKRAVVAVARKLAVLLHRLWVSGEVYEPLRNSQRAMQAVA

SEQ ID NO: 113300 - protein, 349 aa, unidentified
MAIYIGMDLHKKTSNFCVMTKDGEILRETKISTVKEEVEKFINSFGKQEDLKIVLEPVSQSGFYADLLESLGVEVHLAHPKRVKAIAFAKIKTDKIDAKVLADLLRSNLLPESYHSPKEYRLLKEKARSRMSLVEVRTQLKNKVHGILFRNAIVYSKTTLFTKQGRRWLDSLDLSVEYKNHLSSNLAIIDSLDGEINKMEKDFKETAIKNKSLTLLKTIPGIADITAMTILSEIGDIHRFKDPKHLHSYAGLVPRIHASGESSRYGRITKEGSKFLRYVMVETAHHQLMLKRSLVGLKWYYQRIANRKNNQTAAVATARKLLTIVWKVLTEERPYQERLPKTMQIISSI

SEQ ID NO: 113301 - protein, 373 aa, unidentified
MPKYSTAFGMDVHLRSTTVCALDADTGEAVTRRFPGNPWGEIAGWMGGFPGPSLAAYESGYPGFAPQRELAGLGVECVVAAVSKIPRSAADSASKNDRNDAARMAKAILAHDISPVWVPSPEVEGIRDLAGAYDGATARLATAKQRLLAFLAKRGFVYGGTTPAGNPRKYWTYDFLRWLDKVRPEDDGGVRALAALRNEVEAAAEARADLLSEYRAAADASPIAAEVAALQSIKGCAFALAAAFSAEVGDFTRFRSGRQVTAYFGLAPSQRSSGDSVRLGGISGAGNALVRKLAVEGSWCYAAARHQPKLMPRDTGVPLEIRMHGRKGSERLLRRREEMLARGMPAAKANAATAAELVRWLWALGMMCREGAE

SEQ ID NO: 113302 - protein, 337 aa, unidentified
MEYFAGLDVSMAETHVCVVTRNGAVIHQAKVPSTPADIAAELAQVPTCRRILFETGRMAPMLYHGLTKLGLPVVCVESRQAYQALKSLATHKTDRNDARGLAHLARTGFFKPVHVKSLPAHAVRSLIIARKKLVGQRVTLENQIRGLAVVFGVRLPRALSTAFIRQALRASEGIAGLSAAMRGLVAARTAVLGAVVAIDADIRRIVRASDACRRLMSIPGVGQLTALAFTAAIDDPGRFRRSRDIGAYLGLVPRRYQSGEVDYTGSISKCGDRRVRTLLYEAANVMLTRYKGSLKLKDWAFAIAKRSTMRKARIALARRLAIIMHAMLRHGTEFKPA

SEQ ID NO: 113303 - protein, 347 aa, unidentified
MKIIGCDFHPSFQQIAMVDLQTGEYTERRLTPEEARQFYAELKKPVLVGMEACGNTLWFERLLAGLGIELWLGDAAKIRALEVRKQKTDRRDAALLLRLLLEKRFPRVWVPTLEQRDTRQLLLHRHKLVGMRRQVKNELQHLALNQGVQQKRKLWSVAGRQRLQELPLAGWTARRRQDSLELLDELDGRIAKLDVAAQQEASKDGVAKLLQTHPGVGPITALAFSLTLGTIERFARSRQVVSYLGLNPAEHSSGGRQRLGGISKQGNPLLRSLLVEAGQSAARSVPELKRAYQRLKHKKHSGVAKVMVARKLAVRLYWMWKTQQPYAAARTQGSPSHPVVAGRRPAA

SEQ ID NO: 113304 - protein, 318 aa, unidentified
MKKAFFCGVDVSKDKIDVCFLTSIMSEKSKFETLPNNYELIKVYFDSFKNDEILVVFEATSNYHLALQRALSDLSIRYCVTNPYKSSLFLKHLSTIKTDTSDSYGLAVYARTFKSEIAPDKYNAEYLEIKSYNSTLNLLQKINTQLKNFKSSQKTLNNKVIDDVIANLIKEIAKLQAMLQKLAFDLVKKAIPETEEIIKENKGFGIDLALNLFPQLHFNRDKSEKQFISFIGLSPRIFQSGSSVHKSQKINKMGNSNIRRILFMTALCAIRFNAKFKLRYERLLANGKKKMTAIVAVMCAIVRYLKSLFPFNPEIKAI

SEQ ID NO: 113305 - protein, 330 aa, unidentified
MDRMSVGIDVSKETLVIAVDPTQARWTSDTTPAALDALVARLVALQPSIVVVEATGGYERALVAQCAGAGLPIAVVNPRQVRAFAQALGRSAKTDAIDAAVLAAFGARMTPPARVIPDAATRALAAFVVRRRQLIEMIVMERQRLAQAAPTGKITRDLRNHIRWLERRVEDVDDEIGTAIQASPVWRVHEDLLRSVPGIGPTTARTLLAELPELGRLERRTIAALVGVAPLNCDSGQHRGQRHIWGGRASVRSALYMAAMSAVRCNPVLAAFYQRLRAAGKPGKVALVATMRKLLTILNTMMKHQRSWNPKAASTPTPPSRPARAAAVLA

SEQ ID NO: 113306 - protein, 375 aa, unidentified
MEGAPMLDTTTFVGLDVHARSIKAVSLDVMTGEVRCATFGYDAGAVAEWVRSVDPKARCVYESGVTGFDLQKRLSGLGVDCAVGAVSKMIKPSADRRRKNDRNDAEFLARMLSVGNVVEVWVPDDECEAARDLTRALEDARDDLSRSKQRLSKFLLRHGLVFDERTPTGRRKGNWTRAHWSWIESIRFAERADNDVLAYYVDAVRRAAEEKARLEGLVEAEARKPRWRKRVDSLRCLKGVDTASAADLVFEAGEFSRFRNARSFAAWVGLTPSEHSSEESDRRGAITKAGNKHLRKTLVEAAWHYLTCSGRPKDLAKGQAPDRGARRHAAKGVRRLVERREALLARGVHGNKANVATARELACWVWAVGLMAEEA

SEQ ID NO: 113307 - protein, 330 aa, unidentified
MSVFVGVDIAAKTFDLVNRKGGKASKVESFSQSAQGHAKAIKRLQNLKPTLITMEATGIYYFDLAVALVQAGLPVAVINPKSFHHFAKLKLAGSKTDGVDAALLAEYGERIEPSLWTPPDEVRLALRDIGRQINRLTGTRTQAKNRLHALQAKNSTRSLLVEDEQEGIAYLDRRIERLSQAALALIAECETLSRYLTHMCAAKGVGKATALIVLAELCVLPSSLKAPQVSRFAGLDVRLTQSGSSVNRPARLSKAGNAYLRAALYMPAMSAVQHDPRVKAFYDALVSRGKKKIQALCAVMRKYLTGLWACIQTETAFDSAMLFSEEHLKA

SEQ ID NO: 113308 - protein, 343 aa, unidentified
MDHFAGLDVSVKETSLCIVDDAGRIVREVRVASEPEALLAVLTNPACHFKRIGLEAGPLSQWLFNAIAEAGLPVICVETRHMRAALKAQINKTDRNDARGIAQMMRAGLYRPVHVKTLRSQKLRMLLTHRKLLQSKAIAMENDLRATLRNFGLKVGVVGTVKFEARIKELVENLPDLVVLVEPLLIVRRVLREQIGILHRRLLAIVRNDAVCRRLMTVPGVGPVVALTYRATVDVPSRFRNSKAVGAVFGLTPSKHQSGESDRTGGISRCGDEMMRMMLYEAAHIMLVRSAKWSWLKAWAMKIARHRGLKKAIVALARRLAVIMHRIWVDGTEFRWTREVAAA

SEQ ID NO: 113309 - protein, 433 aa, unidentified
MTNNKVMFDQIVSRGCGIDVHKKVLVATIRGTGIEEETRTYDCFTQSIESFKSWLEDNKITHIAMESTGVYWKPVYNILENSFEILLVNARHIKNVSGRKTDIKDSQWIAQLLLSGLLRGSFIPPKPIRELRDLTRTRKKIVNQISAEKNRIQRILEDANIKLSCVVSDMSGAVAAKIVDAMICGENDIDELLKFHHGKMKASKEDLAASLHGFLTDHHSFLLTLTKDSIFEKEQLLARIDERIDVYLKEQEIDLDIELLQTIPGVGRASAIAIVSEIGTDMDRFPDEKHLASWAGMSPGCNESAGKKKSSRTTNGNTYLSSMLNQCAWGASRTKGTYLRSKYQRLAARRGKKRAITALGHKILIAAYFILRDKVAYKELGYEHLMHLNKTYKIKRHLKQLKELGIQVDLNDNVASISSCKTAEPLMTSLKGT

SEQ ID NO: 113310 - protein, 335 aa, unidentified
MIVIGVDVHKQELTAVAVDELGRELASWSGPPNAAVLNWAPAGERLWALEDCRHVSRGLERLLLEAGEQLLRVPPRPTAPARRRGRSRGKSDAIDALAIARAALREPGLDRPRAGEERLRELKLLVDHRDDLVAERRRAQQRLRWHLHELEPTLQVPLGALDRALWLDRLGRRLARSEQSTQVRIARELVARCRSLTRSALELERELAARTQALAPALLELPGCGPLGAAKLLCEIGPIERFRSDAQLARHAGVAPLEASSGKQRRHRLDRGGNRQLNCALHRIAVTQGRVYGPARAYLERKQSEGKSRREALRCLKRQLARTVYTTLKSEPLLT

SEQ ID NO: 113311 - protein, 357 aa, unidentified
MIAMKYYTSTTEFNCGIDLHARQMYVCVLDRTGKKLIHTNIKNNDFDFFLKLVAPYRHDLTVCAECMFGWYWLADACQAAGIPFVLAHALYLTAIHGGKNKNDRLDSEKIAHLLRTNLIPPAYVYPAAQRPLRALLRQRLLYVWHRSELLARLQSHQLAYNRPTSRQTLYNRQAWSQQLLTAEPDPVRQLALQNDLALVRHYDAQLALLEKELLKLTKQTAGRDFTLLQTTPGIGDYLGLTILHEIGDIARFPTVKDFLSYCRLVKGTVASAGKIKGLRGAKLGNPYLRWAFGEAAAIAKRDPLVIGPLAQRLEARLNNKFKANTILAIKLARAVYFMLKTKTVFDPERLVAALSKN

SEQ ID NO: 113312 - protein, 340 aa, unidentified
MQAPRHIGIDLHRNQFTCCVRLENGRSYLTEWKLEDLPRFVKKLRPADEIAVEVTGNTRLFYEAVAPSVARVVAVDPNQFKVISHSVKKTDPNDARNLALYLEKDLLPEVRMKDKTQAQLASLTQTRDTLVKLRTALKNKVNNILSAHGINLEKEALSSEKKLKEILAMRFDAMVKVELEVIIEEIRSLNQRIAKLEKTIADEGSKLEGHKNLTSIKGIGPLTGSILLSVIGDINDFADEGKLAAYFGIVPRVSNSNETERSGRITKRGSKLGRTALVQCALIAQRYSPYLKRYYEQVKARRGTGKAIIALARKLLGIIYRTLKNKWVFEDFPNFVLAEV

SEQ ID NO: 113313 - protein, 366 aa, unidentified
MNITRIGLDLAKNVLQVHGVDERGKALLRKRLKRGEVVAFFARLSPCLIGMEACGSAHHWARELAALGHTVRLMAPQFVKPYVKANKSDARDAEAICEAVGRPSMRFVPVKTLEQQSVLSLHRARQGFVAARTAQANQIRGLLSEFGIVIAKGIRQIEGRVPEILEEAENGLCGMNRALFQRLFEHFRQLDRQVKQLEEQIHAWHREQVDSRRLAGIPGIGPLTASALTAAIGNAREFAHARQLAAWLGLVPRQASSGGKDRLLGISKRGDVYLRTLLIHRAPMRRRAGWRNWSIGATPMWRRWRWRTRTPGSSGRCWRMVGSINPATSARVCRRRPERAGSAPAAQPPSLPTQPSHHRLHRRFRA

SEQ ID NO: 113314 - protein, 348 aa, unidentified
MTLVGCDLHARKQQVAVLDTRTGELVEQELAHDGDAVERFYRALPPPVTIGIETTGYTQWFHALMHQLGHTVVVGEAAKIRAMVVRKTKTDRRDARHLLDLLQHDRFPAVWIPDPDTRDRRALIAHRVRLVRMRTMVKNGLQAIALNQRLALHSALWTQRGLTQLKALPLPPHTTRRRDDSLALLAWLTTRIDQLDALIAAVASADPRVQLLLTHPGVGPLTALTTVLVLGPLARFPDSKHVVSYVGLAPAVHASADTQRLGKITKQGNALLRWVLGQAAPLAARQDDELRRRYFSVMHRRGRPKAKVALARKLLVRLYIMLRDQIDYEEFRRRGRAPRPQPLPVAVM

SEQ ID NO: 113315 - protein, 313 aa, unidentified
MENYIGIDISKETLDVYHQVLGYHSFENRGSGFSAFKKWIDNFQGVHVVLEATGGYQRQLIEFLEGVGVLYSVVNPKRVRDFAKARGVLAKTDKVDARVLADLGITLAPEATNRPSRDVLDLNELTTRRAQLIDLLVQEKNRLEHAQGSILKDIKSLVSFITRKIEKIDEEIDKLIARSKELKKKADLLQGVKGVGATVCAILLSKLPELGTLPGKQIASLVGLAPFADQSGKLKGRRSIMGGREKVRSMLYMGTLSAIRSNPQIKAFYDRLVAKGKNKKLAITACMRKLLVILNAILRKETVWDKTMGLAVS

SEQ ID NO: 113316 - protein, 408 aa, unidentified
MRSNSFTAVGIDVSKCKSTVAARRPGGEVVWLPFDISHNTKGIQRLLEKLNGLDGEIRIVMEHTGMYWRPVALALQQAGFYVSVVNAILIHDFSDNSLRKVKTDRADALKIANYGLTFWMDLREYSVEDETRQMLKIQSRLYERTTTTGIMLRNGLISLLDQTFPRANKLFRDESRNTKGHVKWVDFIIRFWHKECVAALSLNAFADTFQKWCKRTGYRFSTSDAERIHAAAKNAVATLPKNDSTKLLITQAAISLNSVYDTLQALRTEMDRLASLLPEYELVMGMEGVGKITGPQLMAEVGDVRRFSHKGALVAYAGMDAPPFQSGAFDAKKRHVSKRGSPHLRKVLFEIASMVLVHGNMENPVFCFMDKKRAEGKHFYVYTVAGAAKFLRIYYAKVTQFLNAQAVA

SEQ ID NO: 113317 - protein, 344 aa, unidentified
MTKTPVAVLGIDLGKNSCSLAGQDASGAVVLRRRMTRERLIAFVSELPRCVVAMEACCGAHFLGRLFVGQGHDVRLMSPEYVQPYVKAQKTDDRDAEAIAEAATRPTMRLVTLKSEAQLDLQVLHRARQRLVTSRTRLTNQLRAVLLERGIILPKRRTSLVQRLDEIMNGELPISARAIRLIGDLRDEWASLDRLIKSYDDELAALTRDDAQARALATIPGIGVINATALLAAVGDGSAFARGRDLAAWLGLTPRQHSTGGKIRLLGISKRGNKYIRVQLIHGARAAMAHFVKQATPTGEWVRRLAARAHPNVVVVALAAKLARTAWAVLRHGRSFDSQVPVAA

SEQ ID NO: 113318 - protein, 430 aa, unidentified
MGLIVPSAVHPQQDDQPMPYEWFVGIDWGSQQHQVCVLDRDRHRVGERAVDHDGASLARLAAWLWTVSAGQPQRVAVAIEVPRGAIVEGLLERGFHVFALNPKQLDRFRDRHSVAGAKDDRRDALVLADSVRTDQPSFRRLHLEEPQLIVLRELSRAEETLLEEFRRHANRLRDQLHRFYPQMLQLCAAADEPWLWDLLQLAPTPAYAALLSEEQVQRVLTAHRIRRVKAPAVLACLQAPALPIAPGAAEAAQAHCGFLLPCLRVLAEQLQACGQQVNALLRTLAEELGEDERPSDVAIVLSLPGVGRKITAWFFAEAAQPLAERDYQMLRTHGGVAPVTKQSGKRRLVVMRRGCNPRLRHALYHMARVAMQRDAHFSSVYAALRAKGQRHGQALRNIGDRLLRILMAMLRHRTCYDASRIRREPVVQIG

SEQ ID NO: 113319 - protein, 606 aa, unidentified
MKYLTFGASLVKKHATKARTSANHEHSHDDDENIKADTALAETLKGVDANAIIGPALLRDLNTAMLYKLLQVKNVPGRSKLRTAEARANALAGMVTAGDMASLGIIVPAEDTIPALDDSIHVDVPSFIREHHEMYEKYKPGEGYRIDEPVGGIDVHAIDNVFAIANPGGIILTDMASNDTDGIHHMAQVFREHGVTCVAMESTAEYWLKLSWLLHAEGIHVLVANPKQTKETQGQKTDVRDAKRIALAFRDGRLKPSVLCTPEQFQLRKLSRDATERKQQATQEINALKVMYHMFDAPEWIQTLNISARGCRILSVAPSLTNGDDILSLLAAEFAHGKGMITDGAVLLTMAHQMDAFFHRMREVSGTMTRFAQHFRQYMHLREMARDLQYQILQIVGNDPAFVHNVELLITCPSVDVDTAVTFLVEIVDVRFFWHPGALVRWTGLGPRVHQSGHDKRRNGHLYKGGNKGARRSVWLAAKSDYAHYKKGGHPVGNYVAHLRSKNKSYKVSVTAGARKLLTIMYHVLVMQQPFQEVYAYLENDRLERNRERKQKAFEKRLKEASATDLLEALSKALPRDCIRFIEAEEQLARKVHDMLGARLEFASFG

SEQ ID NO: 113320 - protein, 384 aa, unidentified
MKESSTLYVGLDVHKDSIDVATADAGRDGEVRHVCSIGGDLVGLDKALRRLLSKGYRLHVVYEAGPCGFVIWRHLSAQGIECEVVAPSSIPKRAGDRVKTDRRDAMMLARLSRSGDLKAVRVPGAADEAVRDLARSREDAVRECRNARHRMKALLLRSGIAYAGKSAWTAAHLRWLATLKMEHAAQQIALQEYLHAVTEATTRIGRLEQAMRDTLPEWGLAPVVQALQAMRGVQLVAAMTLVAELQDFLRFDNPRQLMAYVGLVPGEHSSGPKRRQGSITKAGNSAARRMLVEVAWHYQHSPRVSPIIAARHEQLPKAVTDIAWKAQLRLNAKFKRLVARRVMKNKAVVAVARELTGFVWAIGREVQNSGWQGIKIEPAGLGAD

SEQ ID NO: 113321 - protein, 373 aa, unidentified
MPRYSTAFGMDVHLRSTTVCALDAETGEAVTRRFRGNPWGEVAEWMSGFPGPSLAAYESGYLGFAPQRELSGLGVDCVVAAVSKVPRSAADLSSKNDRNDAARMAKAILSHDISPVWVPSPEIEGPRDLAGAHDAATARLAAAKQRLLAFLARRGYAYGGTTPAGNPRKYWTYGFLRWLDGIHPDDDGGIRALAALRNEVEAADETREALLAEYRAAVAAGPLSAEVEALQSIKGCGFALAAAFASEVGDFSRFRSGRQVTAYFGLAPKQRSSADSVRLGRISGAGNALVRKLAVEGSWCYAQAGHQPKLMPKGSGVPLEIRMHGRKGSERLLRRREEMLERGMPQAKANAATAAELVRWLWALGAMCREATE

SEQ ID NO: 113322 - protein, 416 aa, unidentified
MFHLGIDWASMSHAVCITDQDGAVVKQCKIDDDYDGYLTLLECLRNLPAETREILFSIEDKNLKLVDFLLSHSFSGFFVPPASMESYRKRYSQNHAKSDTSDAFILSDLLRTDRNNLKPIVKDSAFIRELSALLKDRDAFVKDCSRLTLRLISTLKEYYPEFLKLFKDPARDTALDFLIKFPTFQDASKLSFPRLYKFCTKRHFCQTESIKKIFSILKAKPTPVDEVVMKTKSIKAVATAKQIKELLVVILSYEEKISALFNSHPDAKIFSSLPRSGTITAAGLLTVFGDNKDKFASSDEVQMAVGTAPVTIQSGKFRIVKFRHGCNHFHRSVLHYFSMNSTRESIWAKNYLQTKLNQGKSFSCALRCLGYRWNRIIFSMWKNNTVYDENVLLANFAKQSIAADLSKNLKFFPAAA

SEQ ID NO: 113323 - protein, 366 aa, unidentified
MIVIGTDTHKRTHALAAVDEGTGRVRGSREIKADEAGHLAALKWARGLDDERVWAIEDCRSVSRRLEEALVAAGERVVRVAPHRMGASRRGEREPGKSDQIDSLAIARAVVKDGVECFPAAFLDEQAMEIRLIADHRRDLVAERTRMQNRLRWHLVTLAPELEASLRRGALADVRQLDRIDRQLRRLTIGARVRVAREQITQIRSLTRQINLLKDELAILITAHRPALLSETGCGALTAAILIGRTAGAERFATDASFAQQTGTAPLKCSSGQRQQHRLNRGGDRQLNHALHIIAITRARYDPATRAYLARKQAEGKTTKGALRCLKRHLARRFHHLLAQPPTPGMGSTDHDQKEQPKNTLLANIT

SEQ ID NO: 113324 - protein, 394 aa, unidentified
MKLVGIDVGKNSHHFCVMDKETGEFNVAPSSFSNNKEGFDFLINSLKPYSKKSILIGMEDTGHYHVALLKFLLSNGYPVALINPKTTDLTRKMEGGITKNDKLDTITICDVLDTPERKKQYRITKVDRFDLYEQRQLTRHHHNLKEELNVYCNRLQKSIDLVFPEFNTLFSSKYSIVYMNLLKTFGSAEAIASTDIRTIRKCFEIKGRGNRISLTPEKLKECAKNSIGISSEVETIQIKHLVSQITLIKEQIAEIDKKIEEFSITNNSPILSIPGISHFSGTSILAELGDIGNYSKPSQIIKFAGVAPYHYESSQYNAQHTGITKKGSKYLRKTLYQIILTVINNNPVFKKYYLLKISQGKGHRCAQSHCIRKLLRIIYHLLETGQSFDPALLR

SEQ ID NO: 113325 - protein, 339 aa, unidentified
MQLTPIGIDIAKNVFQVHYMDQATGEIVNRQIKRAKFLEFFANRAACLIGMEACGGAHHWARQLIQMGHQVKLMPARWVKAFNIGNKNDAADARAIWLAVQQPGKPVAVKSELQQAMLALHRMRSQLIKIRTMQTNALRGLLAEYGEVAGQGRARLAKALPELLGRLSERLPAVLIDSLREQWAQVARIDERIAAIERRMCECNKQDPAVQAISQIPGVGLLTATAAVATMGDAKAFRSGREFAAWVGLVPRQSGTGGKVQLHGISKRGDTYLRTLLIHGARSVLTNAKNPAPWLEQIKSRRPTNVAAVALANKMARTIWAVLAHERAYQREYVSVRPA

SEQ ID NO: 113326 - protein, 355 aa, unidentified
MNAIKYIGMDVHLATTSIAVLDAKGKLMMEVTTATQASALVDFIRGLSGTLHVTFEEGTSAHWLYTLLERHVARVVVCDPRQNPRRLGEKKSDRLDARKLAELLRLGSLKPVYHGNALGPALKELARSYRTLVSDTARVMNRLKALYRARGIRCAGARVYSPRFRDQWLEQLPEPGVRGRADLLYKQLDLLLPLRQEARAAMLAESRKHPAHKILCSLPSLGPVRVALLIAMIQTPYRFRGKRQLWTYAGLALVTRTSADYQMVDGQVTRSRKPALVLGLNANHNHTLKGVFKDAAASALAHPGPFKDFYTTRVAQGMKPELARLTLGRKIAAITLTLWKKGECFNAEQVKAQAA

SEQ ID NO: 113327 - protein, 356 aa, unidentified
MIVIGADTHKSSHTLVAVDSVTGRRVGVCTVASTTAGALDALSWARRVCGGADRVWAVEDCRHVSGRLERLLISAGEAVVRVAPRLMAGARSSGRERGKSDPIDATAVARAAIREGVEQLPVARLEGAELDVRLLLDHHDDLVKARSQSQQRLRWHLHDLYDDLSIPAGALDRTVWLDRVLGRLRRSPQTTRVRIARDLVCEIRGLTRRIRELEQEIRLLVCELCPQLVAMPGCGPLTAAKLLGEVAGADRFKSDAKLARAAGVAPVPASSGRQDRHRLDRGGNRQLNLALHRLAVNAARHDPTTAAYLARKQAQGMSRMEALRCLKRHLVRRLHKLLTQPAHDQARAPETALALT

SEQ ID NO: 113328 - protein, 352 aa, unidentified
MTVTNLPRSVTGGVDTHLDVHVAAALDERGALLGVESFATTAEGYKELLGWLSEFGPVELVGVEGTGSYGAGLTRHLQAERVRVVEVDRPNRQRRRRKGKSDPQDAIAAAHAAQSGDAAGEAKTRDGNVESMRVLRVARSSARKGRTQALNQIRNLVSTAPEPIRAELRGLNVFRLLERTSTYRPGAKRDIISLTKFSLRMLARRAIELEEEITEIDAILKPLVKETAPELVATLGIGTDAASALLVAAGDNPERLRNEAAFAHLCGASPLDASSGKNERHRLSRSGDRQANSALWHIVITRMVYDPRTTEYIDRRTKEGKTKKEAVRCLKRYVAREVYGLLPQDKLGVDSP

SEQ ID NO: 113329 - protein, 425 aa, unidentified
MQEKILRITSQTIVVGVDIAKKEHWARITDYRGVELAKPIKVLNNEDGFKNLMARIDQLRIKNECDKVIIGLEPSGHYWKPFGWYLHLHKSNPILVGVNPYHTKQAKELDDNSQTKSDKKDALTIAHLIRDGRYFDVYLPEGSYSELRILCNERKRLQKQINRANNIIVALMDEYFPEYGEVWDKVTCPTSRAIMRKAPFPAGVLEAGEEVLTALLRQASAGTEGKVRVLKLIEAANRSIGVTEGMSSARVRLTSLIDELDFYENKLAIIETEMTAVMDHLEMGELLQTMKGVGPIISAVFLGEVGDVSRFDNWKQVRRLAGMNLVEQSSGQYRGKTKISKRGRLYLRYMLFLAGQVGSLHNPEMRSYYRCLRERKQNPLTGYQAFVAVGLKIMRILFHMAKNRVPYDPAKALGIVREQQIAALT

SEQ ID NO: 113330 - protein, 441 aa, unidentified
MADTAVTTPEPVWAAFVALDWASQKHAWILQPAGGGKQEEGYVDNSPEAIAVWAADLHQRFGGQPVAVALEQKRGSVVNLLLPYPHLVLFPVPASMSASYRKTFVPSGAKDDPGDAGWILDLLLRHRDRLRRLEPDDANTRLLLLLVEDRRQLVDDKTRLALRLQDCLKQYFPQLVKWFDVDTPLVADLLKQWPDLQHLQRCHDGTLRKFFRQHHCGEKLMGERIEAIRAAVPATNDPAVLEAGSMKARHLTQSIATLRDQITCLERRRDELVASHPDAPLFASFPGAGRATVPRLIAAFGTRRERYQSAFEVQCDSGIAPVHVRSGKVDLVSMRRACQDFTRQTFHEFAGQTLPRCQWAKAYYQAHCHKPEQHHAAVRALAFKWIRILFRCWKNRKPYDEQLYLTSLRRRSGLLGPGLASVTGVEWRAVAGFSKLSEKNA

SEQ ID NO: 113331 - protein, 349 aa, unidentified
MKYYIGLDAHKSTSTAVVVKENGEQVLRETFPTTESNLIGFLGKIDGEKYLTFEECTLAQWLFLILKSEVDHLLICNPVFIAKKQGAKTDFRDALHLAQELRTNHLKPVYHDNSKWMELRSLVNSYSDLVDNIVATKNRLKALFRSYGLDTDESDFYKDREQIKSLPNDVTKFVADSLFSQMESLEKLKAEYALFFHKNKQRYRPIKNLCTIPGISHVRANIITAIVCSPHRFQSKHQFWGYCMLVRHIQISGGKIYGNRRVHGRKELRDVFIGAAENAMRGDTSLRDYYDALRVKGIAHREAKLALARKIASLSIALLKNNDTFKNDFEHQQMERTNIRKTLNLETTI

SEQ ID NO: 113332 - protein, 392 aa, unidentified
MACVRHMANGLVRREVRTFKTTTKELLALSDWLAGEGCTDVAMEATGVYWKPVWHILSDGDVTLVLANAAHVKNVPGRKTDVNDATWLADLLAHGLIRGSFVPDEQTQEMRTLLRTRKQLVRECSRHVQRLQKTLEDANIKLDSVITDIMGLSGRRMIEALIAGESDPGRLAQLAHPRLKATPEALREALRGRVTRHHRLLLRLHLQQIAAINAAIEQIDREVDAQVEPFRAMIALLTTIPGVDELSARVILAEIGRDMSRFPTAAHLISWAGLCPRSDESAGKRRSTRMRKGAPWLKTTLVQCAKAAARKKASYLQAQFHRLRARRGAKKATSALAASILTIVYHMLTNGELYRDLGPDHFDHRAKAANTRRLVTRLQNLGYTVQITPLAA

SEQ ID NO: 113333 - protein, 371 aa, unidentified
MKSILSVGMDVHKNSFSLCAYDGYTGEIVSESTFASDVKLVIKFIETLKSRYENDVEIKCGYEAGCLGYSLYKSLTARGVDCIILAPTTMQVSAKNKMVKNDRMDALNIAKNLASGSYKSVYVPDEEDVEIKEYIRMIHDFKKELKRVKQEICAFVLRHGYQYDGKSKWTIRYMNWIRELEMSEIQRETLNEYIAEMENLNDKINRFMNRIDEMYQSERYHEKVSKLRCFKGIETFAAMTIQVETADFERFPSAKAYASYTGLTTGEHSSGDKNNRIGITKQGNTVIRKTLVECAQSLVKGNVYAKKSQGLKSRQKGMDVNIIAYADKATERLKKKYQKLIERNVPRNKAIVAVARVLACFIWGMETGNIH

SEQ ID NO: 113334 - protein, 335 aa, unidentified
MALYCGIDLHSNNHVVVVIDEEDWRIVEKRLPNDIAATLHLLEPYRSNLAGLVVESTFNWYWLVDGLMDAGYTVKLANTAAIQQYQGLKHTEDRYDAFFLAHLLRLGILPTGYIYPRAQRAVRDLLRRRLQLVHTRAQQLITVQSQIWRSTGVRVASNTIRREDFAPALPNPHEKLAAESHLAVLRAAAQEVERLEAAALQAVQLRPEFTILKTIKGVGPVLGLTIMLETGDIHRFPSVGDYSSYCRLVKTERLSNGKKKGAGNAKAGNKYLSWAFSEAAHFCVRYEPAAKRFYERKRKKTNGIVAIRATAHKLARASYYMLKDQAPFDAKRLFG

SEQ ID NO: 113335 - protein, 336 aa, unidentified
MDMVCATVGIDVSKKKLDLALLVNGKIKTKVLANSSEGYQALLDWLRKSAVPLSALHVCMEATGVYSEPVALALHEAGLVVSVVNPSCIKGFGHSENIRNKNDEIDAGLIARYCAAMKPPRWTPPPLEQRQLRAWSQRIQTLKDIRQQEENRLEALTISGVEDVAQHVKQLIAWLSTEIEKLERDINDHIDRHPGLKHDADLLTSIPGIGMTTVAKILGQLGDIRRFDSAKAFAAFLGVTPRQRCSGSSIKGRTVISRTGSSSIRAALYMPSLVARRYNPLLHQFAERLTINGMAKKAVIGAVMHKLAHLIYGVIHNNKPFDPNYLVKGLAIQDGI

SEQ ID NO: 113336 - protein, 383 aa, unidentified
MVSSLSIITKKERKEVKKRIIGQIIIESRKNDYYIAVDIGKRKCVVCITDKDGSILEETKYDNTLQEAERFASDLNKNYDNRKCHAVCESTGNMWLKTYQAFETYGIDVKLANPMKTKAIAEARIKTDKLDARILAHLLRSNLIAESYIAPDEVRENRSLLRLRINLVSDRTRVMNRVHSLLDKYDLKCKYDHIFGVNGIRWLKSIALKGNDQVQLANHIKSIEFLNSEITQIEKQISTEASENENVKILMSMTGIDYFSAMLICSEIGDISRFSTASKLVSWCGLCPTVHQSGNSTYMGRMKKDGNKKINWIMVQAANTASRTDTRLKKYYTRIAKRHGRHVAITHVANKMIRIMWAMLTYKQLYNERKKELYEIKLKKMQK

SEQ ID NO: 113337 - protein, 372 aa, unidentified
MSKMNSKNKASIIKHGIDIHKREYVVVEQVDGLSTKSPQRFSPEGFLEWIAKLKRSSDRIVSCYEAGCFGFILHRKLISMGVENLVVRPRNWDEYGSRVKTDARDASELCSHLDRYIAGNKKALSVVRVPTEEEEQERSLSRQRETLSKELKRLQNVGISNGRYYGIEINGSWWKAKRFSQLMEELPSFLLKILEPLQRILLVLHRELKEATAREERTANRKLPVGLGALTASVLDREFGDYNRFNNRKEVASYTGLCPSEHSSGKSRFQGSINKHGNPRIRHNLIEATWRLFQFQHDYKPILYWKERISNEPFGTTKKKKMTVAIARRFAIDWWRINTGQITPEDVGLRVDYPCAYATRALREGRVSKVHG

SEQ ID NO: 113338 - protein, 375 aa, unidentified
MKEKLRFLGLDVHAETIAVAIAEPDGEVRSLGAIPNRLESIRKLIKKMGPTEKLRACYEAGPTGYVVYWQLAALGVKCDVVAPTLVPVKAGDRVKTDRRDAEKLARSHRSGDLTAVWVPDEGSEALRDLVRTREAAKQDQLRARHRLSKFLLRSGQRPPSGIRPWTRPYLIWVAQLRFTQMAQEATRLDYLHEVEHMRERVERLERAITEAVKLASPALQQVINDLQALRGIADISAVTIAAELGQVSRFDGARQLMGYCGAVPSEDSSGKRTRRGSITKTGNAHLRRIVVEAAWSYHRPPCIWYGLRKRQESISEEVKEIAWKAQHRLHKRYMRLAAAGKDKRKITTAVARELLGFIWAIGTRAETTVRQRIAA

SEQ ID NO: 113339 - protein, 361 aa, unidentified
MKRYVGVDYHKGYSYMTVMDETGKICGQGQVSNQPEAIRDFLTQFGVNGNGAAVLEASRNWTVMHDWLEEMVDEVHLAHPLKVKAIAEAKIKTDKIDAKVLAHLLRCDLLPEAYVPTQAARQARNVLRQRMFFIRVRTMVKNRIWHLLDRYPEQANSRPCEELFSRHGLAWLKTISVKEPDREMLDEELKLYDALEERISQSDQLVKKLAHGDKRVKLLETIPGIGEFFAVLIANEVDNIRRFANEKKFFSYIGIISSTFSSGGRTFHGRLTKQGNKYLRWALVEAIWPAVRSDPELGAYYQSIRVRKGPNPAKIATARRLATIIYRVLCQERSYRVCGSRLPSYCPGGLRVYQSRTPEGE

SEQ ID NO: 113340 - protein, 354 aa, unidentified
MSNKSTAIVATIGIDIGKNWFHVVGLDRRGAIVLRQKWSRSQVEARLANMPPCLIGMEACVGAHHLSRKLQLCGHDARLMPAKYVRPYSKGQKNDFRDAEAIAEAVQRPTMKFVAIKTADQLDLQALHRVRGRLVSQRTGIINQIRAFLLERGVAVRQGLRFLRTELPIILATRSDVLSPRMMRMIEDLAGDWRRLDERIEGLSNEIEAVAYHDPACERLMTVPGIGPIISSAMVAAIGNGAVFTKGRDFGAWLGLVPKQISTGDRTILGAISRHGNRYLRALFVQAAWVVLIRIKDWDRYGLKAWIDAAKKRLHHNVLAIALANKLARIAWAVLRKECAFECMKRRAMASRPA

SEQ ID NO: 113341 - protein, 388 aa, unidentified
MIYAGIDVAKLNHFASVISSDGEVLVEPFKFSNDFEGFRSLSLVLDKYDREQLLVGLESTAHYGNNLVEFLVAKGYRFCVLNPIQTSAMRKANIRNTKTDKVDAVVIAKTLMASKHRLFEKQDLDLLHLKNLGRAHQDLMKKRTTAKIKLTSFVDQAFPELQYFFHGVHHKSVYALLKEAQTPEQIASMHMTHLANLLKVASHGHFKKEKAQELRILAQKSVGSNDSSISIQITQTIEQIELLDRQVQDNEAKIEEIVNAMGSVIMTIPGIRYVEAGMILGEIGDIHRFPDYHKLLAYAGLDPVIRQSGKFNASHTRMSKRGSRTLRYALVYSAHNVVKNNETFRKYYDQKCAQGHGHYAALGHCAGKLVRVIYKLLDHDVAFDPAKL

SEQ ID NO: 113342 - protein, 407 aa, unidentified
MNSVGIDISKGRSTIAVMRPFGEVVISPFEVRHADSELSELARQLKSLDGETRVVMEATGNYHASVAKLLHDAGQYVSVVNAKLVHDYGNNELRRVKTDRKDAVKLADYGLDRWLTLPRYIPEEDTRLLLKNCYRQYRQYSKVQTVLKNNLISLLDTVCPNANRLFSSPIRGDGSEKWVDFVAEFWHCRCVSEKSERTFTSKYLRWCRKHGYSFREAKAHTIYAEASGHIGVMPKSETTKLLVEQAVAQLRATSTALAALKHEMQSLASQLPEYPVVMDRFGVGPTLGPQLIAEIGDVRRFYSKKALVAYAGLDAPPNDSGDVTGRHKSMSKIGASSLRRTLFLVMSVYLQTAPLDEPVYQFMDRKRAEGKLYRIYMMASANKFLRIYYATVKAYLESLEHTAGSSP

SEQ ID NO: 113343 - protein, 400 aa, unidentified
MSERRARVWAGIDAGKGHHWAAAVDETGATLWSKKVGNDESAILTAMGEILDLADEVHWAVDISGTSSALLLALLAAHGQQAVYVPGRTVNRMSGAYRGEAKTDARDAYVIAETARTRRDFATIDVPAQLAADLALLTAHRSDLVADRVRMINRLRDTLTGVFPALERAFDYSSQKGALVLLTGCRTPAAIRRRGRARLTAWLANRSVRGADAVAATALEAAQAQQTALPGEDVAAQIVADLAEQILALNDRLKRIDQQIRETFRGHPQAEIIESLPGMGPILGAEFVVAAGDLTAYADAGHLASAAGLVPVPRDSGRRTGNLHRPKRYSRRLRRVFYMSAQTSIIREGPNRDFYLKKRGEGCKHVQAVIALARRRAGVLWALLRDNRVFTPELPVAQAA

SEQ ID NO: 113344 - protein, 374 aa, unidentified
MSDHSEVFVAFDTSKLRNSVAIAEAGRTGEVRFFGEIDNAPAATEKLVRKLAAKYSRLTFCYEAGPTGYGLYRQIEALGHECVVAAPSLIPKKPGNRVKTNRRDALNLAKLLRAGELTAVWVPDTRHEAMRDLVRARGAGVDDLKSKRQQILSLLLRLGRYYPGKKTWTRAHMIWLVSQKLAHREQRIALEEMLLAVRQAQERVVRLDAVIVAAVPDWSLAKVVTALMALRGLDLVAATIFLAEIGDLSRFASARELMAYLGLVPSEESTGEQISRGGITKAGNHRARRILVECSWSYRHPPRVGKKKLDKIAAVLRDVQDIAWKAQARLTARYRALTRRGKRPTVVVTAIARELAGFIWAVGRAVSAPTTPAM

SEQ ID NO: 113345 - protein, 366 aa, unidentified
MKNITTYVGVDAHKKDLFIAMLVGDHTTPVTWQLANEPNAVRRLVRKLEREAPGPVRMCYEAGPCGYALQRQVSTQRVSCQVIAPALIPRKPGDRIKTNRRDARKLAELLRAGLLTEVRPPTPAEEAVRDLCRARDDAREDLQRCRHRLGKLLLRRGLHYSGRNWTGAHRAWVDSLAWTEPAERVVVDDYLLAIDQLETRLLEFDARLGEIAVMEPYREPVGWLRCFRGIDTLTAILILAELHDFRRFHTPRALMAYLGLVPGEDSTGEKHRRGRITRTGNALVRRLLVETAWHYQHRPGVGVALTRRRKGQPGRVIAIADKAQQRLCRRFRRLAEQHKPAPKIAVAIARELAGFLWAALQPVPAK

SEQ ID NO: 113346 - protein, 374 aa, unidentified
MNKSITYVALDTHKKDHKIAISFANQTDIVEASVKNTADDIRKFISKLKKHPASEIRFCYEAGVCGFTLKRRIEVLGCQCVVIAPSLTPIKPGDKIKTDRRDAKKLLNLFKAGLLTEVHAPDQQQESARELTRCRETAKENLKRIRHQLLKFLTRHGYLYTDGHHWTNKHINWLRNLEFDNLLLKDVFDSFLTEMQHCMQRLDSLDRDVEKLAKSEIYREIVSLCCCMYGIDTLTAITLITEIFDFGRFSRPGELMSYLGLTPSEHSSGQREHKGSITKTGNKRIRRLLIETSWHYRHPYKVTNAGLRKRRVGQPQWAIDLADRAGQRLRKRYWYLLNHGKPPCKATVAVARELAGFLWAMFKEYQFRMKTKAA

SEQ ID NO: 113347 - protein, 366 aa, unidentified
MKKISTVQTFKSEIFKDQKLTIGLDLGDRWSFYCVLDEAGKIILEQKVPTTPEAVKQTFSRIPQSRIALETGTHSPWVSRLFTELGHEVIVAHAQKVQLITKSNRKDDRHDARTLARLARIDPELLAPVRHRSVQAQIHLTVIRARAELVSARTALVNAARGLVKSYGERLPKCGTQQVSRELAAKLSAELRDVLEPLLKEIESLNERIKEYDERMEKIAKEVYPEVSLLKQVKGVGTQIALTYVLTIEDPYRFLKSREVGCFLGLKPGRRDSGESKPQKGISKAGDRYLRTMMVQGAHYILGPFGEDSDLRRWGRKLAERGGKNAKKRAVVAVARKLAVLLHRLWVSGEVYEPLRNSQKAMRAVA

SEQ ID NO: 113348 - protein, 458 aa, unidentified
MSRGQRRRTARPSPPPVLNPHAAGIDIGATEIYVAVPLDRDPRPIRRFGTFTQDLFAVATWLQQCGVTTVAMESTGVYWIPLYQILDTRGVEVCLVNARHVKNVPGRKTDVQDCQWLQYLHAVGLLRGSFRPPETVCAVRALLRHRDRLVRLAAVHTQHIQKALNQMNLQVHHVLSDITGVTGLAILDAILAGERDPDALARHRDRRVKASQDTIAKALVGDYRPEHLFTLRQSLDSYRHYRRLIDACDAEVQALLATFASAIDPACHPLPRATTSHRKPQGNAPRFDLRTELYRVLGLDLTQIPGLNTTTVYTLFAELGPDLAKFPTSKHFASWLGLCPDNRISGGKVLSVQTRHVKHRVAQALRLAAQGLSHSASLLGAYFRRMRAKLGAPKAITATAHKLARIVYHLLTTRQPYAETRLAAAEEAHRHRTESRLRAQARALGYTLVPVPPDGAVS

SEQ ID NO: 113349 - protein, 339 aa, unidentified
MDITTIGFDLAKTVFQVHGADGKGRPVLRRKLRRGKVLAFFAGLPSCLVGMEACASAHYWARELQALGHEVRLIPPQYVRPFVKTNKNDAADAEAICEAVTRPTMRFAVAKSAEQQSVLMLHRARELLVRQRTMVINAIRGHCAEFGLIVAQGASKVEELIAIIEDPGDDRLLPLAREALGSLVEQLRSAQARIKQLEATLLAWHRSNEASRRLATIPGVGVITATALVATIGDGAQFRSGRQLSAWLGLVPRQHSSGGKDRLGRISKRGDGYIRRLLVHGARAVLRWRRAKPGSHPGWTDRLLERRPTNVVLVAMANKTARVAWALLRYERIYQPTPA

SEQ ID NO: 113350 - protein, 464 aa, unidentified
MTDKKLWRNRKERKEWARRLQSDDPGLEVVHPHAAGIDVGNGAHYVAVRPDRDPEPVRRFECFTADLHRLADWLRSCKVKTVAMQSTGVYWIPIYEILEERGFQVYLVNARHTKNLPGRKSDVQESQWLLKLHTYGLLNNSFQPPSEIRVLRTYWRQRGEHVHGAATCIQRMQKALTQMNVQLANVISDVSGLTGQAIIRAIVSGERDPRKLAELRDPRIHATHEEVAKSLEGNWRPELLFVLQQEVEMYDIYQRRIAECDQQLQKHLASFVDIIPSPTSQVEPKRKKAKPAKNAPRFELSSELQRITGVDLTRIDGIDIMVAQTLVSEIGLDMSRWKTEAHFASWLGLCPDNRVSGDKVLGRGTGCVINRAATALRMAAVTLMRSRTYLGAQYRRLRTKLGAPKAITAMAHRLARLVYRMLKYGQGYVDKGAEYYEQRYRRQQIEFLTKRATKLGLQITVAHP

SEQ ID NO: 113351 - protein, 354 aa, unidentified
MRFYKQPPDQQPHRFYCGVDLHARCMYLCILDAGGQTVLHRDYPADRGAFLDAIAPYRDGLAVAVECMFAWYWLADLCAEHGIPFVLGHALYMKAIHQGKSKNDRLDAAKIAGLLRGGLLPQAYVYPKTMRATRDLLRRRSFLVRRRADLLAHLVNTNSQYNLPALNKKLVYPGNRGELNLPERFTEPSARKMVECDLALIDALDAQIHELERHLIRTAKVHDAQAYARLQSIPGVGKVLGLVLLYEIHDVGRFPEAGHFLSYARLVRPRQESAGKASGFGNKKIGNAHLRWALGEAACLYLRASERAKRWQARQAKQHGPAKTLGILAAKLGRTVYHLLRTRQVFDEARFFAS

SEQ ID NO: 113352 - protein, 584 aa, unidentified
MATSSATSAPTLIGVGIDTARYGHRATFLRSDKQPAAPALDVPESREGYEKLAAELQRLYVRQPDARFHIRIDAAGQYATNLERFLRGLPLPIELSVGEPARNAAYRKTHFPKRKSDATESLANARFAVVERPAATPGTPPEFLALREVVSQLESQTRQTTRLICQLHNLLARVFPELAVLVRDLSTCWLLELLSRYPTPARIARARPESLETIAYLKKDKAMLIQQAARSSVGSLCGEVAEALVQDSIREIELSRQIEKRLKRLLGKAFSALPDGPHKLLTTIIGIGPGTAAAIVAKVVSIERFATPVQLVSYFGVFPEENTSGYDRFGNPLRPGAGVMSRQGNDLVRGYLWMAAQTATMHNPAIRSVYARQKARGKRGGVALGHCMRKLLHLVFAIWKTGRPFDPAHYPWDRVGESAAQTSLPADTQKAAGHNGDTPRKKPVVTAATPSVKVSPPRVNQGASDKRPRLDFAAIRQQITMEQVLDHLGWLSTLKGRGPQLRGPCPIHGRSGDPRRSFSVHLDKHVFRCFHGECAVQGNVLDLWAAVRRLPLYEATLDLAKTFNLIAHLNREEEPVRQPKRKPR

SEQ ID NO: 113353 - protein, 338 aa, unidentified
MRLYAGIDLHSNNNLTGIIDEGNKIIYKQKLRNEIEQILNALEPFRQEIEGIVVESTYNWYWLVDGLMENGYRLHLANPAAIQQYEGLKHVDDEQDALWLANLLRLGILPEGYIYPKEERPIRDLLRKRLQLVRQRTANILSIQNIISRNLGVKVSSNDIKKRDDEWISNLFTDEHLFLSVNTGVGVVRYLNEKINHIERVIKEKVKLRKEFEGLLTLPGVGDVLGSTIMLEVGDIRRFPEVGNYSSYCRCVKSVRISNEKSKGKGNRKNGNKYLSWAYVEAAHHARRNYPIVQRYYQRKSAKTNGVIAIKAISHKLARASYYIMRDQVEYDAEKLFH

SEQ ID NO: 113354 - protein, 410 aa, unidentified
MAERFVGIDVALREHRIAVLDRDGEAVGQSFTIAASKDGVATLLRTLAARAATAAQTLIGLEASGHLWENLEAALVSAGYRVLVLNPLQTRRYRDVVRRKAKTDDIDAHVIAGLLRSGAAQASYVPDEQIQSLRELARLRARLMDDRQNYLRQLIAQLDVVLPEHRTALGDLLSARARGILAQFPTAQHLAQASPRAIRRAAQDAGTRGFALDAAVAVRDAARQSLYSGKAVAARAQVVRTLVSQLERLTTAIDEVDGAATALLPPSEPGTGPSDADLLQTIPGIGPHTAATLLGELGVLARFTNARALVAYAGFYPVIAESGGRVATPRLSAVGSRIARQALYLAAVNAVRRSAEWRTIYLRKRAQGKKAKQALIVVAVKLLHTVYAMLKHRRPYTPSRLLVAAATIGT

SEQ ID NO: 113355 - protein, 338 aa, unidentified
MKTHVGVDLHQRFCYLTAMNASGRVCRQGQVVNEGGALQAWLRELPRPRQVVVEASGFWPAFARAAAVESERLVMVHPQRVKAIASAKLKNDRVDSETLAHLSRCDLLPEAWMADPATQQLRLRVRLRIALGRQRARAKNQLQAVLHQEGFRKPVTDVFGRRGRAWLKGLELSEAGRLVVDTWLREVDRLDAELTTQTRELERLAEADARAGWLQSVPGIGAYAAMVILAEIGDVERFASKRALASYAGLTPVVRESAGRRKRGGITHQGSNTLRWIMLQVAQVAARWSPGARSYYAGLRARKPAQVARTALARKLLTVVWALLRHGVDFDEELFIRG

SEQ ID NO: 113356 - protein, 329 aa, unidentified
MGFRYFLGIDVAKAKLDCLLLDSVTDRRRSKVVTNTAEGWLALVNWLAKQGAALEDVHAILEPTGTYHEGVLFSLAQSGIAISVVNPAQLRRFAEGLGVRTKTDASDSAVLARFGAMVAPETWQPAPLKARELRALLARRDAVAQDLQRERNRAEQLSVDTPERVRQSLREAISFLEDELQALQEAIDQHIDDDPGLKRIWDLLQSIPGVGQRVADHFTALLAGRDFASAEQLAAYIGLVPTEWQSGSSIKGRPRMSKAGSASLRQLLYMPAVVATRHNPHVHALYNRLLSKGKAKMSALGAAMHMLARLCFGVVRSGQPYRADWLVMT

SEQ ID NO: 113357 - protein, 384 aa, unidentified
MNKHSILFIGLDTHKEFNEVAYIEEHRGAQPVHLGRIPSSKVAVQKLVRQFESKYPGATLHFVYEAGPCGYWIYRLITSLGHCCYVVAPSLIPKKPGEKIKTDKRDALKLAKLLKSEDLTPIYVPEPEDEAVRDLSRAREVAMKDLKDAKYQLKALLLRNNINYKGTANWSQKHLRWLTELVLPHPAQHIVLQEFLQTITERISRLERLDNELTHHVHQWRYYPVVKAIQAMRGVRLLVATGVVAELGDLSRFDHPRKLMSYLGLVPSEHSSGGKRHIGAITKCGNGRARRLLVEGAHTYRYAANISTDMQKRQEGLPKNIIDIAWKAQLRLCKRYKKMIAKGKHYNLVVTAIAREMIAYIWAIAKEVVLTPVNTKLRLARVPA

SEQ ID NO: 113358 - protein, 406 aa, unidentified
MELNPIYKSAIGLDVHQNQITATVIIEQDGGTIHTEVKTFGGFKKDRLALAEWAKSWNPDVVVMESTGIYWKSPYAALERVGIFALVVNARHIKKVPGRKTDVSDSQWLAILARCGLLSGSFIPPEALRNLRLVARHRQNLVSMLAREKNRLHKVLADGGVRLSAVVSDLHGQSARQMTECLLEGGTPEQALEFASSRLKASREELLDALEGELTDVHRFVLNEILNHIRDIEAQISRFDAELLMRLEPYQWAVNLIQTIPGIDQVGAAMLIVEIGIEMEAFGKADRLASWAGICPGNNESAGKRKSSRTRKGNRYIRRLLCEMANAARRSECMFKSKYAGLVIRRGHKRSIIAVGHKLLKTIFVLLSREVPYRDSTVDYEALAVKRNAPRWIKALQRFGYVQVTT

SEQ ID NO: 113359 - protein, 372 aa, unidentified
MKYTTVFVGMDVHKESFSLACYTNEKEEAEYVQRTEAHYSKVISYLEAMRFHYGDDVTFVCGYEAGCLGYTLYHQLTSHHVKCVILAPTSMPTQKGKKKVKTDKRDAQKIARCLAHHDYSAVHVPTAKDEETKEYIRMRDDHKLALKKVKQQILAFCLRHNCSFPGNNHWTQAHLKWLREIKLGDVYQEILSEYLLTYSNLADKLERLDKRIEELAASEEYAENVHKLSCFLGIKTQSALSVLTETGDFKRFGTAQQYASYLGLTPGEDSSGEGQDRLGITKAGNRHLRMLLVEAAQSYGRGKPGYKSRELKKRQEGNPPEVIAYADKANERLRRKYYRLVLSYNKRSNVAKVAVARELACFIWGMMTGNVA

SEQ ID NO: 113360 - protein, 316 aa, unidentified
MEQKPVYVGVDVSKTQLDIAVRPTGQRWTAANTEAGIADAVARLQSLAPALIVLEATGGIQVPVAAALGTAGLAVAVVNPRQIREFARATGKLAKTDRLDAQALAHFAEAVRPEPRPLPNAQTQTLQALLARRRQVVTMLTAEQNRLCSALPPIRQRLEAHIAWLKKELATLDHDLGQMMRQTPLWRENEDLLKTVPGVGPVVTFTLVAELPELGRLDRRQIAALVGVAPLNRDSGALRGRRKVWGGRATVRTALYMATLVATRFNPVIKLFYQRLCTSGKAKKLALTACMRKLLTILNAMLKHRTPWQPDHVLTS

SEQ ID NO: 113361 - protein, 422 aa, unidentified
MQNTVARKLKQVPEGYMVVGIDPHKKRHAAVAITQDFTTQGKFKFDNTREGFEFVLHRARMEMVNSCCRGVIFAIETGGHYWRNLAYFLDEQGIPYRFINQFTLKRRREGKDLNRRKNDYRDSEVAAQLLCTGEFTESRLPQGVYADLRAAHNAYRRLVKERTRITNLIKGLLDAVFPEFTHVFKDPCALTALSVLSTCTIPRVIAGMTEDEFIATVEAHHQGRRLMRKKLGALHSIAETSIGIDAGAQSVSSEISFLVEKLHLIKRHIRSIDETLVMLVDETEEGKYLLSIRGLNYIAVAGLLAELGCFKSYRSAKQMIKMAGSNPTESESGGKRRSRSPMSKQGRPVLRYCAWTSVIPMLRLNSDFRAWAKNMRERPVHANPLNGREIVGAAINRLLRLSFALVKRQTFYQSPQLVQLTY

SEQ ID NO: 113362 - protein, 343 aa, unidentified
MKLTRIGIDIAKQVFQLHGTDRSERTVWRRRLPRDRWLQVLQEVAEPGCEVGIEACGGAHHWARQLQALGYRVKLIAPQFVKPYVKSNKNDANDAEAICEAMSRPSMRFVTVKTTRQQDIQAVHRVRSGLMEQRTAKGNQIRGLAAEYGLVAPLELSSLRRAIPAWLEDADNGLSACFRKILDGLWRDLRALDERLAEVDHDIALIAQHDPDAQRLQCLRGVGPMVATALIAAVGDAKQFTNGRQMAASLGLTPRQHSSGGKERLLGISKRGDAYVRGLLVHGARSALRTAPSKDDRLSQWVVRLAQRAHPNVACVALANKTARLAWALLRHQRDYQPALAAA

SEQ ID NO: 113363 - protein, 417 aa, unidentified
MPVPAPRGYLVNPYKQGDRMTESSDYESVQVFIGVDVGKDTHHAVAINRSGKRLFDKALPNDENKLRSLISDLKQHGQILLVVDQPATIGALPVAVSRSEGVLVGYLPGLAMRRIADLHAGEAKTDARDAAIIAEAARTLPHALRTLKLADEHIAELSMLCGFDDDLAAQTTQTSNRIRGLLTQIHPALERVLGPRLDHLAVLDLLQRYPSPEKLASLGEKKLANQLSKLAPRLGKRLAADITQALTEQTVVVPGTNAAVVVLPRLALQLITLRKQRDEVALEVEQRVLAHPLYPVLTSMPGVGVRTAARLLTEVACRAFASAAHLAAYAGLAPVTRRSGTSIRGEHPSRRGNKTLKRALFLSAFAALRDPISRAYYTRKMSQGKRHNQALIALARRRCDVLFAMMRDGTFYTPTAS

SEQ ID NO: 113364 - protein, 421 aa, unidentified
MKSASNGEISTALPADPPGGVTAGLDWARDDHAVSVIDDRGRERARCTLTHTAAGLRELVRFLNEHGAVEVAIERPDGPVVDTLLGAGFTVVVISPNQVKNLRGRYGSAGNKDDRFDAYVLADTLRTDRARLRPLVPDTDATVALRRACRARKDLVNHRVAIANQLRAHLRNVLPAAVGLFQDIDSAISLAFLTRFDTQDKIDWLTPTRLGDWLSKQGYSGKVASTVLHQRILNAAPGATGVHGAHQAHITASYVALLRTLVAQIKALSTQINTQLDAHSDAHVFTSLPRAGRVRAARLLAEIGDCRARFPTPESLTCLAGAAPSTRQSGKSRTVGFRWACDKQLRDAVTEFAADTRLVNPWAADLYNRARARGHDHPHAVRILARAWLHVIWHCWQDNLAYDPAKHRALQRITTPREEAA

SEQ ID NO: 113365 - protein, 388 aa, unidentified
MATAHEIQGSNWQAVLYMAFELGEKEWKLAFTTGMAQMPRLKAVPARDLARVAKEIGSAKARFGLAKETPVASCYEAGRDGFWLHRWLTREGVSNLVLDSSSIEVNRKKRRAKNDQLDACSLVRLLVRYRQGEKKVCSIVRVPDEAVEDQRQLHRELSALKDEQTSLVNQLKGHLCSQGLVLPAVNQKFPAWLAEARRWDGTPVPAELQGRLRRIFQRWQFVHGQILALAKQQRQRIHDERTPQVEPVRRLLCLKGIGYGSAWMLVKELLGWRRDLNRKQLGALVGLTPTPYASGKMRREQGISKAGNKRLRRLLVQLAWCWVLHQPQSALTRWFQERFGCGPRQRRIGITALARKLLIALWRYLETGETPAGAELMAWQPKVRAQAA

SEQ ID NO: 113366 - protein, 358 aa, unidentified
MSETAKTTAKTTVAVIGIDIGKNSFHVVGLDRRGAIALRQRWSRGQVEARLANMPPCLIGMEACVGAHHLSRRLKALGHDARLMPAKYVRPYSKGQKNDFRDAEAIAEAVQRPTMKFVATKTVEQLDLQALHRVRERLVGQRTGIVNQIRAFLLERGVAVRQGPRFLRTELPRILAMPSDVVSPRMVHIIEELAGDWRRLDERIEGLSIEIETIAHQDVGCERLMSVPGIGPITSSAMVAAIGAGDTFSKGRDFAAWLGLVPRQISTGDRTILGKISKRGNRYLRVLFVQAAWVVLIRPKSWERHGLKAWLETARKRLHRNVLAIALANKLARIAWSVLARGRAFEARRIDEATVQPA

SEQ ID NO: 113367 - protein, 404 aa, unidentified
MHRDSLVATILSRNGTKVQREFGVTISELFDFREWLASNECKAVAMESTGTYWIPVYTVLEDSFEIAVANPYVIKHIRKKKTDQVDSEWIAELCLNDQIVPSRIFLKEDRALRALTRTREGLVKTRTDYKNKIHRDLASANIKLSSVVADIFGKSGMHCLAGKLLGMGIEDIISTIPHKRVRKNADSIREAILANLNSVQILSINIALSIIETINEKILEIDEAIKIRILNRQKDLEIVMSVPGINFVSGVTILAEIGNYRDFSNPEKLAAYFGLVPYVYQSAGKLNTGCITKQGSKHIRWIMVQVANAASRVKNSWFRKFYLRVKARRGHNVAIVALARKLLCIIHHLLINQEWYSEDIKNSKNSKRSSCRRSLIKENTVEEMIEIVKRSGYQVIKMENGACS

SEQ ID NO: 113368 - protein, 524 aa, unidentified
MARTLRSKKRRRSVRAHLIFKPGGIIHPRVQAVGPEHFGIVSVDCAKARSKWMLAEFYGNVLVPPTTVEHNRKDLDAMVQSVRQVIEQFDLQDVIVAIERTGRYHLPMKRTFAQAGFDTRSVHPLTSKQFRQPANPGNKTDDTDLNAIHRAAVNGFGMIEPSPDPVYVHLQLLARHRRDLVEKSTALRCQIHEHLQAIMPGYARCFDDIYECHTALVIAKRLGSADEILRVGLAGLTQEVEKASVRPHRPTLEKILAWARAAAAGATEASVHHRVMRELDDDRVAKLGAIKAIEGELAELLVQTPYVLLLGTPGINVVSAADFAGEMGPIQFYANARAITGRAGLFPSRYQSDEVDRPDGRLVRCANRRLRNAIMIIADNLIDCNDHFRLLAAQWRVEGKDPRAIRVRVAGRFCRIAYHMVAGRTPYRHPSCQQRDYVLSKLIRFCTEHITDISQIMKHLDAAVAQLPGAEHREEGEALAIELGRLQKKRGSGPRSLAEILPAVLAKLGVNLVTSTKSGEPDLT

SEQ ID NO: 113369 - protein, 407 aa, unidentified
MAKVIIGVDPHKLSATIEVVDRRERLLGSGRFSTDQAGYAAMRTCVKAWPERVWAVEGSNGAGRPLAQRLLEAGEHVVDVPAKLAARVRLFDTGHNRKTDARDAHSIAVVAVRTRTLRVLAADGELEGLRMLCDRREELTRLRVQTVNRLQRLLAELIPGQGRKDLTALQAKAILATVRPRDIAGKTRRRIAVEELADLLAVEAKMKKATAELKTIVLARGSRLMDIHGVGPVVAARILADVGDITRFADRNRFASWTGTAPLDASSGEQNRHRLSRAGNRRMNHVIHIAAVTQIRLDTEGRAYYRRKRAAGKKPLEAMRCLKRRLSDVVYRQLVADAERAAMTAPSTEAGTGPGGHCGATQESSAVDLPPHIDTSDKPLPGPANPTLHPSRTVRKSPGRKTPQTTP

SEQ ID NO: 113370 - protein, 326 aa, unidentified
MTHPVAASKAELPPASITIGIDVSKDHLDAARHPGGDTVRVANTRKGQTALLRWIGDIKAVARVVFEPTGPYHRTLEERLAAVGIPQVKVNPRQARRFAEATGKLAKTDRVDALMLARYGALLDPVARPVRTDLQNRLAELVAARRSLMRDRTATLNRLKTLTIGLLQRHARHRLRQIEAQVTSLDAATDALVAEDAHLSRRRDVLASIPGLGTVTAHALLADMPELGMMEEGQAAALAGLAPITRQSGTWRGRSFIQGGRATVRQALYMPAIVAMRFNPDLKRVYDRLIAKGKHAKIAITAIMRKLVVLANALLHKDRLWTPKAA

SEQ ID NO: 113371 - protein, 319 aa, unidentified
MAQNDGVVVGIDVSKDKVDASIRVLALRQTCPSTSQGRRKLVAWLRKHQVRKAVMEASGGYERDWAKALREAGIEVRVVDPKRVRNFALSAGRLAKNDAIDAEMIAWFAETFSEGPSQIHDAAREELQVLVKARLGLVNLRMRLECQNEHAAPGLVQKAYAHVLKSLDDQIAKLEAAISAKVKSTPDLAERAEIIASVPGLGETSATNLVAGMPELGQVSDEIAAALIGVAPYDDDSGKRRGERHIKAGRRWVRNAIYMPCVGAATLNNPVLKAFYQRLIAKGKEPKVAIIACMRKLIIILNTMLARRQKWDPSRSALG

SEQ ID NO: 113372 - protein, 370 aa, unidentified
MAKRNMFVGMDVHKESIDVSIAEEGRDGEVRHYGVIPGDLEAVAKVVRALRVPNRQLRFVYEAGPCGFGIHRYLTAQGEDCVVVNPSSMPKRSGDRIKTDRRDGDALARLHRAGDLTAIYIPTADDEALRDLVRAREDAVGLSTQAKHRLKAFLLRQGRRYPGRAGWTRPYRRWLADLSFPLAPQHIALQEYRDTIDETERRVDRLTDQLRQQTPAWRWAPVVDALQALRGVSFVTAVGLVVEVGDIRRFDHPRQLMAFLGLVPSEYSSGPSVRRGGITKAGNPHARRLLAEAAWAYQGVPRIGRQMLYRQEALPKTVCDIAWKAQLRLTSRFRKLVARGKAKPKVATAIARELTGFIWAIAREIPLPPA

SEQ ID NO: 113373 - protein, 450 aa, unidentified
MSRPQVIDDQDHERIHDKVAAIDVAKDSGVVCARTPHPSRPGTRQSRIWTVKARMNTIRALGRQLRKDGIEKVTLESTSDYWRIWFFVLEAAGLAVQLVNAAQAKSLPGRPKTDKLDAQWLARLTEMGLLRASFVPPKPIRDLRDYTRARTRLVQERTRCFQRLEKLLEGALVKLSSVASKLTTVSAQDMITAMIAGQRDPKVLAGLARTGMKAKHDDLVQALDGMFDDHHGEIAGLLLDQIAFLDARITQLTARAADLTAAMPAAWGVDRDGTTGPGAGAGPDAAALPAARRLARIPGISPDLARAIIAETGLDMTRFPTAAHLVSWAGLCPTARQSGPRTRAGKKGQGNTWLRSHLGQAATGAAHTTTFLGERYHRIARRRGKAKAQVAVARSILVIIWHLLADPAARYTDLGPGYYQARTDKDRRIRNHIRQLEALLGHPITITTTP

SEQ ID NO: 113374 - protein, 313 aa, unidentified
MSELYVGVDVSQGHLDVASSDGVVLRVTNDDQGIRTLRERFEQAVPMLVLMEATGGLERALAVELSAAQIPVRIINARHVRHFAKATGLLAKTDRLDAAMLVLFAQRMKPEPRPIVPEQTQALQALILRRRQLVEMLTMERNRARTAHRGVRKGVQANIRWLEKCLAEVDGDIDQALRECGVWREKVELLESVPGIARVISVSLLASLPELGHLNRRQISALAGVAPFNRDSGRWQGRRSIYGGRPLVRSALYMAALVGARHNPVLKVFYQRLRAAGKPAKVALTACMRKLLVILNTMIRNGQRWQNTPIPTT

SEQ ID NO: 113375 - protein, 405 aa, unidentified
MKVREKVWVGIDVGKAAHHACVVDQAGKVVFSQKVVNGQSAIEALIARVRAKAVEVVWAVDMTSGAAGLLLALLATTGNPVVYVPGRLVNRMAGAFAGEGKTDAKDARTIAETARMRTDLTPITSPDQIVTDLKVLIARRENLMTDWVRGINQLREMLASIFPALERAFDYSTRSALILLTGYQTPAALRGDGHDGVRAYLLEHGAWAKGIAAMTDKALAAAAEQTIALPGEAVTGPLIARLARQLLDLDREVKDLDKQLTDRFGDHPHAAAITSVDGFGPILGAQLLADAGGDLHTVFGHAGRLAAYAGLAPVPRDSGKVKGNLHRPKRYHRGMRKVFYMAALSSIRRTDSPSRAFYQKKRAEGKVHTQALIALARRLIDVIWALVRDNRTFAIEAPAPISAAA

SEQ ID NO: 113376 - protein, 345 aa, unidentified
MEPMYYIGLDVHKRMISYCVKESSGRIHSEGSIPATRLDLDGWLETLPQPWSAAMEATLFSGWIYDYLKPHAAALKVAHPLMLRAIAAAKKKNDRIDARKICDCLRCDFLPECYMASTEIRERRRTLRYRNLLVRQMVQMKNKISVLLMAAGVSYNKQKLHQAGYFRELLATNPDIDEGLCSLLRVCRETVVRLQRTESALVRSLERDSLLMERVERLMTIPAVGPITALTWAMEIGEVQRFSSIKKAISYCGLCGAEKSSGSTIQRTPLSKQRNKHLQTILIEAAKMAPRISSDLAALYDREKQKGNANRATLAVARKLVAYLVAVDRREKGFLIVKNENRTAA

SEQ ID NO: 113377 - protein, 356 aa, unidentified
MTSSTKYIGMDVHKESISIAVRNAAGKIVMECVIETKANTILQFFDGLRGDVQVTFEEGTWAAWLYDLLKPHVGKLVVCDPRRNALLGDGNQNDRVDARKLSDLLYMNKLHAVYHENHGLRTMKELGRSYLTITRDLSRVMSRVKAIYRSWAIPCTGKQVYGSRHRTEWLGKIQEPGVRRRAELYYQQLDALRTLRQEVRRDLLAESKKHKVWKRLCEIPSIGPIRAAELLGILQTPHRFRTKRQLWTYCGLGVVTSSSADHGVENGQLRRKKKHVEIRGLNENCNHDLKDPFKGAAVVASIKPGPLAEFYAALVAKGMRPEMARLTLARKIATIVLIVWKKGVCFDAQHLKPQTA

SEQ ID NO: 113378 - protein, 389 aa, unidentified
MEAARAICIGFDVGKSAHRACAVSRASGEMLFNEALEDREGPIDETLALAGEGALVVVDQKRSIGALALERARAAGMEVAYLPGLAMKRARDMFPGAAKTDEMDAEVIARTAIGMPRCLRPAAEDADSGAEVRLPASRRRFPTECSTQSKDRLRSALLEVDPAFEAAVDLGAAWQVGVLSRFGGALGIAAAGRRGHRAFAVKKSGAPEAAADGLWDAALASAKSGGPHTAAEDAAVRMLAERIAEDLARAASVRESMDAPLADDAVCRAMLAVPGIGPKAASALVAGVDIGLLSSHDKLASFTGLAPSNRRSGTSLDSASSSKAGNKELKNPLVFSCNSLVGADNGFGRYYDACRARGTGRNKALKAVARKRLKVAFAVMRDARPYVRA

SEQ ID NO: 113379 - protein, 344 aa, unidentified
MTYYVGLDVSLRTVNICVIDDQGGRVAETKLASDVQDIVAYLDDLELEISVVGLEAGTLTQYLTYGLQAAGFEVICMEARQVKAALSAMRNKTDKHDARGIAQLLLSGWYSRVHVKSMQSHHIRMLLASRKAVLSKCIDLENEIRGLFKVFGIKLPPKLGHGAFDDTVRDIIEADKTLSHALLPMLDARLVLYQTFRILDNRTRQMAHRDPVCERLMSAPGVGFITALTFKAGVDDPTRFKRSRTVAAHFGLTPRRFQSGEMDIEGHISKCGDADVRCALYTAANAMLTRSSRWSSLKAWGMKLAKTRGHRKAVVAVARKLAVILHQIWINDDQFRWGTEVARS

SEQ ID NO: 113380 - protein, 403 aa, unidentified
MNNVAGIDVSKGKSMVSVLRPFGEVVAKPFSVGHTGSELKELADYLKSLDGETRVVMEHTGRYYEPVARFLHEEGVFVSAVNPKLIKDYGNNTLRKVKTDKADARKIARYGLDNWAELRQHTPMDTIRMQLKTLNRQQSLYAKTKTMMKNNLIALLDQTYPGVNALFDSPVREDGSQKWVDFATAFWHVDCVRNMSLTAFAERYRKWCKRHGYNFSQSKAVEVHAGAQDLIAMLPRDALTKTMVRQAIDALNAVSASLERLKAEMQALAAQLPEYPVVMAMHGVGDSLGPQLMAELGDVTRFTHRNAITAFAGVDPGADQSGTHEAKSTRVSKSGAPELRRALFLVMDCLLKTQPQDDPVYRFMDKKRAEGKPYLVYMTAGANKFLRIYYGRVKEYLASLEEN

SEQ ID NO: 113381 - protein, 312 aa, unidentified
MNGELNVGIDISKQTLDIAIIPDNKHWQCQNEVKEIEKLCQQLKQYNPARIVVEATGKLEYKLVSAMIEYELPLIVVNPARIREFARSEGTRAKTDKVDAFVLARFGEMHRPEPRVLPSDEQRLLKELVTRRRQLVDIRDAERCRLQQMVPALKNDIERHIEWLQQEIERYNQKLDDTIKQNRIWREICQQITEVKGIGPVTAATLIAALPELGKLDRKQIAALVGVAPIANDSGKRRGYRPIYGGRADIRKVLYMAATIAMRYNDKIKAFAKRLKEAGKKPKVVTVACMHKLLTIVNAKVKEHYQAEFATA

SEQ ID NO: 113382 - protein, 358 aa, unidentified
MQTESKTISFKGQNIYIGIDAHLKNWTLTILTENAFFKTFSQDPCAMTLKNYLHRNFPQGTYYSAYEAGFCGFSVHRELVNCGIQNIVVNPADIPTTDKEKRQKEDRRDSKKIARSLRNRELTAIYIPDKSVEELRGLVRYRKVVVKEIGRNKNRIKSFLYFNGIAVPVELNSASKYWSGRFTQWLKTIKMDTEYGNFVLQETVENTEYSRGKLLKIDRKFRELRKSSSYSKTLGLLQSIPGIGPIVSITLLTELGDLKRFNNLDKLCSFVGLIPTTNSSGEDEKTGSITPRAKKPLRNALVESAWVAIKHDPALNLVFNELCKRMKPNEAIIRIAKKLLGRMRYVINNETEYVHSIV

SEQ ID NO: 113383 - protein, 341 aa, unidentified
MQALRHIGIDLHRNQFTCCVRLDNGRNYLTDWKLEDLPRFVKKLRPSDQIAVEVTGNMRLFHDAVAPYVKRVVAVDPNQFKVISHSVKKTDPNDARNLALYLNKDLLPEVRMKDKTQAQLASLTQTRDTLVKLRTALKNKVNNILSAHGINLAKEALSSEKKLNEVLAMKFDPMVKIELEVIVEEIRSLNQKVAKLEKTIADEGSKLEGHKNLTSIKGIGPLTGSILLSVIGDIHDFADEGKLAAYFGIVPRVANSNETERSGRITKRGSKLGRTALVQSALIAQRYSPYLKRYYEKIKARRGTGKAIIALARKLLGIIYRTLKNNWVFEDFANFVLAEAT

SEQ ID NO: 113384 - protein, 353 aa, unidentified
MPRSTSLSVATMGIDIGKNSFHVVGLDQRGAIVVRQRWTRSQIRARLANMSPCLIGMEACVGAHHLSRRLHSLGHDARLMPAKYVKPYRKGQKNDFRDAEAIAEAVQRPTMRFVATKTADQLDLQALHRVRARLVSQRTGIINQIRAFLLERGIAVRQGLRFLRAQLPEVLGKRTDVLSDRMVHVIEDLAADWRRLDERIQGLSGEIEIVASQDPGCKRLMTVPGIGPIISSAMVAAIGSGAVFSNGRDFGAWLGLVPRQISTGDRTILGKVSKQGNRYLRVLFVQAAWVVLIKPQIWERYGLKQWITAAKRRLHPNVLAIALANKLARIAWAVLSKDCDFKCEKTDETPRCA

SEQ ID NO: 113385 - protein, 347 aa, unidentified
MLHAGLDLSRKKLDVCLLSEQGEHLDQLVSPPDGDALGTLARRIGETHRQPVCAVIESMTGARFVHDTLEQAGWEVEIADAQKVKGLAPLACKTDKIDSRVLAVLSQRDLVPAIWLPDPSVREERELARFRLHLVKHKSALKCRVHSTLINFGKPCPVTDLFGVEGRRLLERLQVPEPWRGNITASVELIDDLERQIAEINRRLKEGHADHRYIPLLMSAPGIGWVLAFTIAAEIGEIERFPSPEKLAGYTGLCPRVNQSGDKDRRGPLTKHGPTYLRWALLEATMHALKHPAYAQRYQRNKRRLGRQRGAKVAQVDIARRLAEAIWHMLSRDQPFAPKGATDPLTA

SEQ ID NO: 113386 - protein, 388 aa, unidentified
MYYVGIDLAKFKHSAAVVGDDGKRLVRGFDFPNRRDGFEALLRRLESVGATGAEARVCLEATGHYGRNLVAFLEGHGYEVFEVNPLLTANWRRATSVRKVKNDAVDAEALALWLLAGNPTARRRAKDESDDLRTLARSRTSLSHIIGDCKRRAAAILDVTFPELRGFFSDDFCAAATAILGRWQSAEALSHARLDSIRKVVREAGGRITDARIAELRGLARSSVGTASAPLAFQLRQLLAQIAFTRGQMAELDAELARMVEGSPVLTIPGVGTVLGAGILGEVGDASRFASAKKLLAFAGCDPSVFESGEFVGSRAHMSKRGSPYLRWYLWLAADMARRYDPALGAYYAKKRSEGKCHKVAVSAVVRKLVSIIYAVLRDGTPYVCPAT

SEQ ID NO: 113387 - protein, 370 aa, unidentified
MEIIIYVGMDVHKETYSVCCYDPRTNTYMFEQKMKASTASVLKYLKHVKEQFGEEIVFICGYEAGPTGFGLCRDLLRADISCIVMAPTSLKRNSGKKRKNDKVDAKQLAKALYTKDYSQVHLSTKKEEAIKEYCRMRQSLVTELKKAKQVLQAFLLRQGKVFEKDAWTKEHREWLRKLTFDQPYMQDALNEYLTSVNTLEARLKEVEKRLNEIAKDDEVKEKVEKLMCFSGIDIVTAVSIVSEVGDFTRFGRAWDFSNFVGLTVGEDSSGQREKKLGITKSGNRYLRRLFTESAKSIKKTNPRGEKSKRLIKRQEGQNPKVIAYADKCRMRLRNKMFRLEMRGKLPNVASTAAARELACFVWGMMTDNIA

SEQ ID NO: 113388 - protein, 412 aa, unidentified
MFKIFRNNCCGLDVHKTWIYACIGITDPNGRTEYKQARFSSFSNGLRELAAWLAKYSCSEVCMESTGKYWIPVFNILENSCFVTLAHPKYTKPQKGNKTDRKDAKWICDLFMCDMIKPSFIPSPEIRQLRDLIRYRSKLTNMLTGEKNRAQNCLTVSNLKLDDVFSDVFGKSARSITNYILEHPGEPFDVSPFVDPRCKTPVSEIQAAVNGAISPEQAVKLRQCLAHIDELEAHRKEIESEILQIAEPFSAVLDLLYTLPGFDKNPMTAIAILSEIGPDMSVFPSSKHLVSWAGCCPRNDQSCQKVKSRRISRAGSYLKPLLVQVANALIKSKKHPEFKERYHRIKSRRGHKKAIIAVCKMLLTAIWNMLSKLEPYNPEGFLEHRPVKQEKILTVSQALELLRLRGYTITNQ

SEQ ID NO: 113389 - protein, 345 aa, unidentified
MKKVIAGMDLHSNNVVIGVMDLDGQRLASRKLPCELKEVVRFLAPFRKRLEQVAVESTYNWYWLVDGLRALNYPVVLANPAGMEQYSGIKHADDTNDAFFVAELLRLKILPTGHIYDAPLRPVRDLLRRRLMLVHQRTALMLSFQSLYTRTTGQQMTLSALKGLEVKAAQNLYEHPANQLIAGMQIQHIQQLSQSIEKIEKGVLGSARELPYYEKLTTLPGVGKILGMTITMEVGDIQRFADPGHFASYCRAVEAKRMSNRKQKGENNSKCGNKYLAWAFVEAAHFARRSDEQCRKWFDRKAAKTSNVMATKALACKLAKAAWYLMTEAIDYDPQRMFGQPATVK

SEQ ID NO: 113390 - protein, 341 aa, unidentified
MEQITTIGLDIAKHVFQAHGADERGRAVFSRKISRAKLLSFFADQPQCVVALEACAGAHHWGRELARLGHDVRLIPPAYVKPFVKRQKNDAADAEAICEAAQRPTMRFVAVKSEAQQASALVFRARDLVVRQRTQLANALRSHMAELGWVAPKGLAHMARLAELVEDPASELPEDARPVLRLMLDMLAGLAAQIAVLDREIARRAREDEAARRLMTVPGIGPVTATALLALAPAPEAFNRGRDFAAWLGLVPRQHSSGGKERLGAITRMGDRTLRRLLILGASAVVRHAGSRGAAEGSWLAGMLARKPRMLVTVALANKTARIAWAVMRKNESYRAPALTA

SEQ ID NO: 113391 - protein, 427 aa, unidentified
MTKVQHTADARVLVGIDISKHRHEVLIAAPGKRRRRRLTITNTVDDIDRLIALLGDYNSPVQIGFEATGNYHRALMYRLGAVGFDLKLVSSIAMARTREALHNSWDKNDPKDAQVILHRLQIGATQIFLDPLRAGTNDIQELSKTHEVVSRAKTELWHRIQGHSLPLYFPEATRFHRNSRSDWFLAFLEMFPSPHLIAAMDKEAFIAAAWQVVGRKVSKTALISDIYETARGSVGLPVAEDSDALRMFRMVLAEGRSLIRQRKAIEDCATELLGDHPDCRLLTSVPGIGPINALTILAEAGDLRRFPHHRQFLKFCGMDLATVQSGMFRGQSRISKYGNARLRCTLWTAGQTAVLQRTNSFRDKFERYIAQDRHNPHLRRKAYTAVAAKMARTIHAVIKSGAPYRPFFEGVSPGGRTPLCRAVEAVR

SEQ ID NO: 113392 - protein, 406 aa, unidentified
MAAVMIGVDPHKASHTAVAIGAAEEPLGQLRVRAPAAQAGRLVAQAASWPERTWAVEGAGGLGYLLAQQLVAAGELVLDVQPKLGARVRLLATGASNKNDPGDARSVAIAALRSAAPRPVAAENHAAVLKLWSKRHRDLGRTRNQVACRLCAVLCDLVPGGISKEITAGKAARVRESAEPSGAIALARCELAAAFLDDLRRIDAQMRDTKKKLAVTVRASGTTLTEIFGAGPVIAATMIGYVADTSRFPSRDRFAACNGTAPIEVSSGNRKIYRLSRRGNRRLNHAIHMAAVTQIRYRHSDGRAYYDRKLAEGKTPKEALRCLKRRISDAIYTHLQADARRAAAVARTRGPGGQPGNDSVASAAGSHPENQLFGQATPEPATTLRRPDAPARTRPTPAPKKNRKGP

SEQ ID NO: 113393 - protein, 421 aa, unidentified
MTQSCSTTMPAVWVAIDVAKLHHDVLVQLPSGMRKHLKINSTLADFERLAAFIRDCGSPCLVGFEPTGDYHRPLAHFLHRQGFDLCMVSSIAVARTREARYNSWDKNDPKDCQVILHLLQTGTTQTYNDPLVNHYNDLQEMSNTYRQVSLRKVQIQHAIFTHYLPLYFPEAERYCHSSRAEWFTQLLLLTPCPAAVLAYGKQEFIDRASKIVGRKVDKQRFLADFYESARSSIAVPVAADSEAIAMFGLVLEQYLALCRLRQQLEKQVQQRLADHTDFKRLQTIPGIGPVLAMTILAESGDLRRFSHHRKFLKYCGLDLFTTQSGQFRGQPRLSKRGNARLRYALWMAGTVAVRMRQNGFRRKYEDYIRRDPLSADLKRKAHTAVAAKMARVVYAVIKKETDYHRFDEAVVTGGRIHSQGP

SEQ ID NO: 113394 - protein, 326 aa, unidentified
MDYYAGLDVSLRSCALCIVDEKGSVRLERELPCEIEAIADALADFPNPVARVGFEAGTMSQHLYFGLRDRGFDVVCMEARQVNAALSAMRNKTDRNDARGIAQVLRTGWFSPVHMKSRESHGVRALLSTRRALLSKTIDLANEVRGLLKIFGIRLPSSVSHGRFDEVARGLVEMDEVLAHAMLPLLDARRALYDQFLELDRRVKRAASRDEVCLRMMTVPGVEPIAALTFKAAVDDPARFRKSRTVAAHFGLTPKRYQSGETDNPGRISKAGDRDVRSTLYAAANAHQGPAPRCRRRGSQACGHPPSPLDRWDPVPSDRRGGCNMI

SEQ ID NO: 113395 - protein, 422 aa, unidentified
MRIIHQRCCGLDVHKKSVTACVLVWDGQTAVEERKQEFGTTKKELERLRFWLIACKVTIVAMESAGVYWKPVWHVLERQKRFKLKLVNAQHYHGVDGQKSDQIDSAWLAELLQCGLLKSSFIPPQWQRELRDLVRLRVSLLEEKNRIQNRIEKLLEDANLKLGSVASDTLGVSGRRILQAVVAGDKDPGWMADYAKGKLRSKRKQLEEALHGFVTAHHRTLLAMLLRQVDTVEADIAFLEADIRQRLAPHQDVIERLMEIPGFGEITAWTVIAELGLDMSVFGTPNRAASWCGLCPGNRKSAGKRGHGRTRKGNRWIRRGLTQSALAASNTKDSYLRSFYWRLASKRGAKKARIATAHKQLRIAFLIIRDGVRYQDLGSDYFDRRNLDRTKRYLTKRLEGLGFEVSLVAAPNDNPKANSVSR

SEQ ID NO: 113396 - protein, 422 aa, unidentified
MVQVETTKEKERRKAMISVGIDISKEKFTVCALEEGSKIIWKPFDVSLNKTKVEEFLEKLKKLKEKVKITMEATGKYHLPILYELKERGYFVTVINPLKMKQFCRALNFRKAKNDKIDAKQIAEYGLMYWKELEEYKVDEENYRVLKELNRSYQHYMDLRINQMNYIEQTVHQTFPGIKKLIPHNSGDFSKDKLLDFLEKWWHKDLVLEKTEEEFIEEYKTWAKEKRYHPNANKAKAIYKLAEDSISTQPSHNSKIETNIREGINLIKQINQILNSILSQMIEISEPLEEYQEAKKFSGISEKLAVQIVAEFGDLSKFKNKKSLISFIGIDAPPYESGNFKADQRKISKRGNTILRKVGYQAMKCMMSAKDPENEIYKYMIKKEKEGKAKKVCKFAGLNKFLRIYYARVMESKAEKKELKAA

SEQ ID NO: 113397 - protein, 403 aa, unidentified
MKFVGIDWSSQHNDICIVNEKEEKVKEFRIKINRKEFEYLLKQLNLVSADKDEIMIGIETDRNILTDFLLSHGYTVYSLNPLKVSRFKERYSVSSKKDDKFDAACIALFLLKDGHNFEKIRPSSPECDALRLHCETLERLTKDRTRLLNRLRSDLSAYFPAILGFFSDLDTSVPLNILRLCAGPSEFKKLTGEQFLDKLKTVKYMTEKRRIGLYNHLKSETIHFNSSREQALAVRVRIVADRVLEINRLMDECNKNIKELYERSEFAKIFSSLPGAGKILAPKLFALFGNNRNRFESYQSVQCYAGTAPVTERSGKSFYKVKMRRACNKSFRDALYQFAFSSISHEAWSAQYYQQLRNRGQSHSRAVRALSNKWVKIIFRMWKNSTVYDSSIFVTKREKYLAA

SEQ ID NO: 113398 - protein, 398 aa, unidentified
MVVMIGVDPHKGSHTAVAIDDNEVELARVRVRASSRQVSELLRWAARFKDRTWAVESAGGLGYLLAQQLLAAGERVWDVPATLAARVRVLASGRSNKNDPNDGYSIAVAALRAPALSPVERADHASVLRLLARRNLQLGSARTATACRLHALLAELVPGGIPKEITANRAERLLASITPAGPVEATRHALASEHLEDLRRLDQQLRAHHRRMADAVKASGTSVTELFGFGPVGAAIAVGHARNVGRFANRDRFAAYNGTAPIEMSSGGRTVHRLSRRGNRQLNHAIHIAAITQIRHAHSPGRGFYDRKIAEGKTQKEATRALKRRISDALYERLVADAKAGPGGQAGTTEQASVTSLTPQQPVLRKSHSRDRAHRRTRQRTTKRTTSTRRRSAAKNRS

SEQ ID NO: 113399 - protein, 393 aa, unidentified
MICVGIDVAKDKHDCVILNSEGKILAGVFTIPNNADGFDTLLQKIRSCTSSDDKIKVGLEATGHYSYNILGFLINQGLPTYVINPLHTNLYRKSMSLRKTKTDRVDAKTIATMLMSNVDLKSYTDTAYHNEELKSLTRYRFDKVRERAQLKQSVSRLVTILFPELEKLVPTLHMSSIYALLIEFPGAKQITEAHLTHLKSLLKDASKGRYGRDMATEIRDAAKHSIGSVMPAKSLELRHTIRLIHELDSEIEDIEAAIEAIMEELQSPITTIPGMGFRMGAMILAEIGDFARFDSPDKILAYAGMSPSTYQSGQLSLAGTYSHMEKRGSRYLRYALYNATKYVCHWDPGFAAYLAKKRAEGKHYNVALSHAAKKLVRLIYAMEKSRQPYKRAA

SEQ ID NO: 113400 - protein, 356 aa, unidentified
MSVREQAQGVVGGVDTHKDSHAVVALASTGQWLGWAQFPTNPAGYRDLLQWLRDRGPLLCVGVEATGSYGAGLTRHLVSQKVSVLEVIPPRRRSRRGRDKSDPADAEEAARAALSGQATGLPKSADGRVEALRMIRLVRSSAMKARTQAANQLHALVETAPAGLRERLRNHSIVDLVKEALRWRPGTIVDPVSACRGTLAPLARRWRQLAEEIRGYDREILRLTGELCPELLRRVGVGPEVASCLLVAAGDNPERLRSEASFAALCGVSPLDASSGRQRRHRLNRGGNRDANRALWVIAFVRLRMDPRTKQYAARRTAEGRSRNEITRCLKRYIAREVYRLLMDSRTLETSTATAS

SEQ ID NO: 113401 - protein, 353 aa, unidentified
MLIGKESNLNLGGAMRLYAGFDLHSSNTYLGIVDEDGKRVFKKKLSNDHEVILSTLAPYKDSMAGIVVESTYNWYWLVDILMEEGYQVHLANTTKIQKYSGLKYADDQHDAFWLAEMLRLGILPEGYIYPKEDRPIRDLLRKRSHLVRLRTSLILSLQNILSRNNGISLKANAVKALTIDHVTPYLAGNEDLALAGKVSKESIDFFTLQIKSLESVVEERIELRDPYNKLLTEPGIGKILGLTIMLEAGPINRFADVGNFVSYCRKVSTAWISNEKQKGKGNRKCGNKYLAWAFSEAAELARRFDKDARAYYNRKAQKTNRMVAHNALAHKLARAAYYIMRDGVPFVPEKCFG

SEQ ID NO: 113402 - protein, 386 aa, unidentified
MDHPTTLSVPDPTGIRGDCATLCVSLELSRSTWVATSLALGSKKISKHTLVGGDARKLLDLLARLKSRAEQRMAAPVKIVAIQEVGLDGFWIHRLLEANGVESHVVDPASIAVPRRHRRAKTDAIDGETLLRTLMAWQRGEPRVCAMTVPPSPSEEDCRRVSRERATLLRERIRHTNRIRGLLFGQGITNYNPLHKNRRKGLEELRTGDGRPVPAHLKAEILREIDRLELVLRQINEVEAERDEMLRLAQASSPVALLMRLKGIGPEFAAVLYLEGLFRHFENRRQLAAYAGLAPSPWKSGSVDHEQGISKAGNPRLRTTMVELAWMWVRYQPASALSCWFRQRVGSERGRIRRISIVALARKLLIALSRYINHGEIPAGAVVKPV

SEQ ID NO: 113403 - protein, 339 aa, unidentified
MFIIGIDPHKGSHHATVIDRDEQVLGEVRIRADRRQRDQLLAFAAPFTPRTWAVEGAAGLGLLLAQQLVAAGETVVDVPAKLAARVRVLDCESSDKTDSHDSRAAAIVGLHNKRLRMVGHEESWLVLRMLAKRHRDLIARRTQSVCRLHAVLCALVEGGVPKNLSAQRASSELRRIRSVDAVAVARREMAVELLAEVRRVDAELVALRKRITAAVAATATTVTDVYGVGPIVAAYLIGYSGDIDRFADAGHYARYNATAPLAASSGDHKRHRLNQKGNRQLNHALHLAAVTQISHATPGRDYYLRKLDEKKNPKEALRALKRRISNAVYRQLVNDARRS

SEQ ID NO: 113404 - protein, 421 aa, unidentified
MLVLYQRCAAIDIGKDVIAVAVRLPGDGPDHRQTIKRTFKTFYGVLKHAARWLTEQQVTHVAMEATGIYSMPVYHALIEHGGFEQVLVCNAGHVRNVPGRKTDLSDAEWLVHLLECGLLRGSFIPPAQIKAARDVIRYRTKLTESRTSELQRLGNILQDAAIKVDSVASTITARSVRAMVEALIDGERRPLVLAELAKGRMRARIPDLQRALEGRFDSHHALMCRLHLDHLDYLDEMIVRLDTQIEDMMQPFRAQRDLLTTIPGIGPFVAAAVISEAGADIAETFPSADQFASWIGVCPGNHESAGKRHSGKPRKGNQHLQHVLVECAWAASRTPGYLQSHYRWHVRKFGGARNATAKNKAIVAVAHKLAIIIWHVLATGKPYADLGADYFDRRIDPAAETRRLIARLQALGHTVTIEPAA

SEQ ID NO: 113405 - protein, 346 aa, unidentified
MMIIGCDFHPSWQQVSWLDTETGETGEQKLVQASGDAERFYRQVAAPALIGMEATGNCHWLVDLLSELGHELWVGDAAQIRASYVRQQKTDKRDAAHILKLLVEGRFPRIWMPSSEVRDLRQLLLHRYKLVIMRARVKNELQHLCLNKGVQRKHKLWSQAGQQILRELPLQPWAGRRRDDLLKLMAMLDQQIEPLDQAVKAEAQRDKMALLLQTQPGVGAITALAYVLTLGDVSRFPRGKQVASYLGLIPREHSSGGRQKLGAITKQGNRMLRMLLVEAAQAAVRYDPQFRKEYLHRCHQKPKAVAKVAAARKLAVRLYWMLRTQRPYPEIVRIESSPRVPLVGAS

SEQ ID NO: 113406 - protein, 412 aa, unidentified
MEVFCGIDWAEDHHDISLADRDGTLLARRRISDDAAGLAQLLELLAGHGDTAEDPVPVAIETPRGLLTACLRATGRKVYPINPMAVARYRDRHSVAGRKSDHGDAFVLANVLRTDLHAHRPLPDDSELAQAIAVLARAQQDAVWARTAAHNKLRSHLREYFPGFLAAFADARGGIMRPGARVILAAAPTPAAAAALTLTQLRGLLKEAGRSRGIDTEATRLRDAFRVRQMRQLPLVEDAMGRQALALLGQLDAACTAADDLEQAVTGSFNQHPDAGIITSFPGLGPLTGARVLAEIGDDRSRFADAKGLKACAGAAPITRASGKTRSVTRRHIKNNRLNAAGYSWAFSALTASPGARGHYDRRRDAGDRHAAAQRNLFGRLLGCLHHCLITGQHYNENIAFPENPKKLPQAA

SEQ ID NO: 113407 - protein, 412 aa, unidentified
MEVLYPKCCGIDVHKQFLVACLLIADEAGHQHQEIRRFSTMTGELLSCVDWLQKAHCTAVAMESTGVYWKPVWNVMEGLFETVMIVNAEHMRRVPGRKTDKKDAEWLAELLQVGLLKPSFIPSRPQRELRDLTRTRTTLTQERTRLINRVHKVLEDANLKLSSVLTDIMGQTGHHILGAIVRGEEDPTVLADMALRRAANKREALVLALRGRISDHHRALLRALLEMIRHHDPAIWHLDREIEERLRPYEEQIQRLDAVPGLSRRSIEILFAEVGWDMSPFPDAAHLASLVGICPGNYESGGKRLSGRIRKGNHWAKATLVQAAQAAARTKNTYLSAKSHQIAARRGGKRAAVAVGHSILVIYYHMLKTGEPYQEKGGDYFSELDRQHAERRLTKQLERLGYQVTLTPAKIA

SEQ ID NO: 113408 - protein, 423 aa, unidentified
MSASPKTWSERTAFAGFDWASDHHDVVVVDGRGTVVEDFRIEETAEGWQRLRERLCRYADLAVVVETCCGSAVERLLEAGFAIYPVNPMAAKRYRERKAPAGTKTDRMDAWSLADALRSDGHAWRALQPDDPLTVELRLLCRDEIGLIAQRTALINQLRAALREYYPVALQAFEDWTMRSSWAFVERFPTPAALVQAGKRRWEKFLHTHKLYRPETYASRLALFATADQFCGSPAVTQAKSMLATGLAVQLRVLQDQLDRYRARIEELFARHPDHDLFGSLPGAGCKLAPRLLAELGDDRARFDSAEGLQCYVGTAPVSYQSGKVRKARFRRSCNKLLRQTVHLWAGLSLKVCPWAQAYYEKKRSEGKSYACALRCLAQRWLKILWKMWQTRTRYDAELHQRNQVRHGSWVIALIPADSAQGG

SEQ ID NO: 113409 - protein, 341 aa, unidentified
MEEISTVGLDIAKSVFQVHAISYAGEVVVRRQLKRRQVLQFFAGLRPCLIGMEACATAHHWARELMKLGHDVRLMPPRYVKPYVKRNKNDAADAEAICEAVTRPTMRFVPVKTVDQQSVLMLHRTRQLFIRQRTTLINSIRAHLAEFGIVAGIGRNGVEVLLELIAKGDEDIVPAEARACLLALAAQLELVKRQIVEMDRRVLAWHRASGLSRSLEAIPGVGPLISTALVASIPDPKVFRSGRDLSAWIGLVPKQNSTGGKERLGGISKAGNHYLRQLLVVGALAVIRRAKQLGYTRHPWLVRLMERRSVKVAAVALANKMARIAWAMMARNEPYRATLPA

SEQ ID NO: 113410 - protein, 351 aa, unidentified
MEYYVGLDVSLKQTSICVVDRTGSVVREGVVDSDPEAISVYVRSKAPDAVRIGLETGPTSTWLWTELKQLGLPVICIDARHAKAVLKMQINKSDRNDAIGIARIMQTGWFKEVHVKDIDSHSVRALLASRALLVKIKRDLENHVRGLLKNLGLVIGRAKFNVFAVRAEELIEGRPELIAAIRPLLEARTAVEQQVSELDRKVMKLVRRDAQVRRFMTVPGVGPITALAFKATIDDPARFARSRSVGAYVGLTSRRHASGEVDWSGRISKCGDGMLRSYLFEAAGVLLTRVPRWSAVKAWGVRLAKRNGLRKAKVAVARKLAVILHRMWIDGTEFNWSKQEIAAQQSPASTN

SEQ ID NO: 113411 - protein, 410 aa, unidentified
MTGQQVSKVKLSTQHFGDGPTMTKLSSIPTGAVLVAIDMSKHRQEVLIERPEGGRRRRMTVMATKADYDRLAADLGEIGRPIIVGFEATGNYHRTLAHRLLTAGFELRLISSVALARTREALHNGGDKNDSKDAQVILHMLRIGATQRYVDPLAAGINDLQEMSKTHEAISKAKTQTWHRILTHYLPLYFPEIERFAGNSRSDWFLALLERFPTPVSMTALGQEAFTREAWSLVGRKVSKARLINDIYETACASVALPVDEDSVAITMFRMVIAQARSLIRQRDEIERTAHALLSENRDYQLLRMIPGIGPINALTILAEAGDLRRFAHHRQFLKFCGLDLATCQSGMFRGRTKLSKYGNARLRRTFWMATQVAIRQRDNSFRDKLGRYMAGHGNDCCATIKVRTARQSR

SEQ ID NO: 113412 - protein, 338 aa, unidentified
MYYAGIDLHKKTTYISVIDDKGNLVAKKNLASKEKAIGDFLESLPQRPKLVMESTRAWYWLYDFLKAKGYEVVVSHPKKTKAIAAAKIKNDKLDSHMLAQLLRAGLLATVHVSDPASRELKETLRHRARLVRDSSRMKNRIHNLLAKNNVELPVSDIFGVKGRELLFQVELPAHHQRPLERYLHLYDEIRASIEPLDKEIRQRAKDDEQARLLMSLPGVGPVVALTLLAEIGDISRFKSHRQLAAYAGLVPSLHSSAGKDRLGRISKEGSTWMRWALVEAAQSVARSKKSRLGVYFRKKIVKLGYRKATVATAHRLLQFVFYLLRDQRPYVEQFESAA

SEQ ID NO: 113413 - protein, 408 aa, unidentified
MNPLFVGIDVSSKNNVAYLMKPDGSKHSSFSVQNNLGGAKLLSERIVSALGSMQLERVVIGLEATSIYGDSLVYALREDGRLGRFQRKIHVLNPKQVRKFKEAYSDLPKNDWVDAFVIADHLRFGRINREVYMDDYRYKALQTLTRARFDVIQNLTREKQRFANYLFLKCSGMAQDKDIQNTSATTIALMEHFETVDDLANADLEELTAFITETGRGKFADPDATAKAVRAAAKGSYRLPKTVNDTVNQAMAVSIASMRALKGQVKVLDKAIEQQFEIIPNTLTSIPGIGKVYSAGIIAEIGDIHRFDSQASVAKYAGLVWNRSQSGDFEAEHSRMIKSGNRYLRYYLLEAANSVRRCDSEFRRYYDLKFKEVNKYQHKRALALTARKLVRLVFRLVKDNRLYIPPEG

SEQ ID NO: 113414 - protein, 423 aa, unidentified
MKGEIFFMKIVRPICCGMDVHKNIIVATIGITNKKTRITEYIQETFSTLNPDLLNLKQWLINHKCFDACMESTGKYWIPVFNILEDEINIYLTHPKYVKAIKGKKTDKKDSKWICDLFKHDLIKFSFIPPKEIRALREISRYRYKLVGMRSSERNRYQNCMTVSNIGIGSVFSDPFGKSAQAIMKEVLGSDIIEDEKILKCIHGSCKNKDKVLDSIKHCNIETDQRFKMNESMTHMEELQVHIDNCEIEMMKRAAPMFDQFMHITQLPGISTLSAILIISEIGVDMKQFESDKQLTCWAGLAPANNESANKKKSVRISKAGQYLKPLLVQCALGAIKDKEGYFGIKYSRIKKRRGHKKAIIAIARMMLVSIYHMILTGETFNPSDYESFRNPKPPIKQQVLTEESAIEFLKKSGFDVSKLTKP

SEQ ID NO: 113415 - protein, 387 aa, unidentified
MIYVGIDIAKETHVAAAVDSDGVIVIEPFSFSNNHEGFKLLKSKLDSLDKSNLLIGLESTAHYAENVIFFLHGCGYELAVINPVQTAAMRKTGIRKTKTDKVDSLLICKTLMVNSFRRYTENDIKTLKLKSLCRFRQNLKKSKARLKIQLTSYVDVIFPELQYFFKSGLHIKSCYELLKVYSSPDDIAALHLTKLSNILTKASRGRFGKQDAESLKSLAKSSVGVKNPYISIQITQTIAQIELIESQLNELETVIETAMDELDSVIMTVPGIGKLNGAMILGEIGDIKRFSDSSKLLAYAGLDPVINQSGKFNAKRTRMSKRGSKILRYALINAAWNVSLNNDTFKRYYDSKVAQGNSHYSALGHTAHKLVRVIFKLLNDNITFALV

SEQ ID NO: 113416 - protein, 343 aa, unidentified
MNHHTTISIDLAKTIFQIAIFSRHGKPLLNQAVKARKMCQLVSQYPNAVILMEACGTAHHWGRYFSQRGHTIQLIPAQLAAKYRSGNKNDRNDAIAIFEASKHSKLHPVSVRTLEQQDVAVLHKFREGIKKERLQVSNRIRGLALEYGVAIPQGIKALMRALPEALEDADNELTPAARQVLQALGEQLSGILERYEEAGQLLQSHVKTLVPCEILTSLPGFGWIVASCVYAKFGDAKQFKRGRDGSACLGIVPAHAGSGGRVTLGHITRRGDSYTRTMVINGARSVVATARKKSDPLSLWVQQLLTTKSFNVVVAVANKLVRMAVATLKTGQPYQPPVAQVKA

SEQ ID NO: 113417 - protein, 355 aa, unidentified
MNIEKYIGLDVHQATIVVAVTDSTGKLIMESILETEAATILQFFAGLRGTLAVTFEEGTWSAWLYDLLNPHVEKLVVCNPRKNALLKDGNKSDRIDARKLAELLRGNQLKSVYHGESGVRMLRELSRSYLTIVKDMSRVMNRLKAVYRSWAIPCAGRDVYYRRHRAQWLDKIREAGVRRRAERLYEQLDMLQYLRQQARRELLAESRKHAITARLRQIPYLGPIRSALAVALMQTPHRFRTKRQLWAYSGLALETRISAEYRMVEGQVRRSKKLLSIRGLNKDHNHDLKGLFKGAATMASVRPGPFQDFYQASLAKGIKPTMARLTLARKIAAITLTLWKKGESFDAEKLKSQAA

SEQ ID NO: 113418 - protein, 338 aa, unidentified
MALYAGIDLHSNNSVIVIQDEQDNVVGRRRLPNDLKRICPWLESYRKDLVGIVVEATYNWYWLVDGLMAQGYPVHLANTVAIQQYDGLKYRNDDSDARWLATLLRLGLLPEAHVYPRTERAIRDLLRKRSRFVRQATMNLLSIENLFARNHGQRPSANQLRRLTLEGAEAMFEDPNVALAVKSTLSVWDCLAEQIYQLEVAIRDQVRLRQSYKKLLTVPGIGEILAFTIMLETGDIGRFEDVGNYVSYGRLVGSSHWTNGKRKGSGNTKNGNAFLCWAFMEAANFAIRYEPKIRAYYQRKEAKTKRVIALKAVAHKLGRACYHMIKEDVAFDITRAFG

SEQ ID NO: 113419 - protein, 320 aa, unidentified
MMAQNDQIVVGIDVAKDKVDACIRSLSLRQTFPSTAQGHRKLVAWLRKHKVNKAAMEASGGYERDWAKVLRQAGIEVRIVDPKRVRGFALSAGRLAKNDAIDAEMIAWFAETFDEAPSQTHDAAHQELAALVKARKGLIGLKTRLQSQDEHVAPGPVQKAHARVLKSLAAEIAKLEAAISAKVKATPEFAERAEIIESVPGFAETTSATLIAGMPELGKVSKEIAAALLGAAPYDDDSGKRRGERHIKGGRRWVRNAIYMPCLGAATQNNPVLKAFYQRLIAKGKEPKVALVACMRKLIVILNTLIARRQKWDPSRYALS

SEQ ID NO: 113420 - protein, 345 aa, unidentified
MSQIKRIGLDTSKAVFTLHCVDQTGQTVLRTNLRRAQMATYFKKLAPAEIALEACGSSHHWARELTALGHEVRLIPPQYVKPFVKRAKNDRNDAEAICEAAGRPGMRFVPVKTAMQQAQGMVLKVRETLVHQRTQLANALRGHAAEFGIIAAKGISQITPLLEAIEAETAIPSEAKDMLALLGQEIEHLDTKLAEIEAKLASAHKANALSQRLATIPGVGRIIALTFATEVDPTAFQSGRHLAAWIGLTPKEHSTGGKQKMGGISRAGNERLRRLLVTGATAVIRFAARPSNKSASEWLLKLLQNKQRKLVAVALANKTARIIWAMMKSGEAYRRPSTAAATVAA

SEQ ID NO: 113421 - protein, 347 aa, unidentified
MEHYAGIDVSLDSASVCIVDAHGKILKAAKVACEPQALITWLAAHGTPMARIGLEAGPLSQWLFAEMKAAGLPVELLETRHVRAAFKAMPVKTDRTDARGIAQLMRLGWFRPVHCKSLPAQEVRALLTTRKLLQAKRHDVEMSLRGVLRGFGLKVGPTTPKTFAMRVQELGAHHDTLRTIAEALLKARAVLAQEFKAIEKRLAALARTNAPTRQLMTTPGVGAIVALTFASAIDDPSRFRSSRRVGAHFGLTPRKHQSGETDVTGRISRIGDHGVRVALYEAANVILTRAVRGSDLKSWALRVAQRAGMKKAKVALARKLAVVLHRMLADGTTFMASKVAQSAAGAA

SEQ ID NO: 113422 - protein, 360 aa, unidentified
MFSERASVGLDVHARSVVAAAIDGVTGEVFRARLVPDPAEVIGWISALPGPVAAVYQSGPTGFGLAPELNAAGIWCQVAAASKLQRPAGDRVKTDARYALHLARLLRLDEIVAVRVPTEVEESARDLVRFREAARADLMRARHRLSKLLLRHGIVYCGGKAWTQAHDYWLLGQSFALAGTQAAFEDAYQTVVLATARRDRLDVAITTMATDSQFTPVVARLSCLRGISTLTAFSLAVEIGDWNRFTGASIGAYLGLVPSEHSSGASRSQGPITKTGNTHARRLLVEAAWHHRKPYRPTAILRRRWAVAPPAAVARAQLGNHRLHDRWTAYAERSKRPVVANVAVARELAGWCWSLAVLPQ

SEQ ID NO: 113423 - protein, 351 aa, unidentified
MNDHSENTDIEVVAIDLAKKSFQLHGTDANGHKVMGKKLIRKKLAVFMVNLPPCLVVMESCVGAHYWGRLFQSYGHEVKLIAPQFVKPFVKSNKNDAVDAEAIYEASQRPGMRFVAIKSVEQLDMQAIHRVRSQLVKTRTAAVNQIRGLLLEQGIDIPKGRAQVLRKLPGILEDADNGLSGRFRSVLHDLQEELRHIDQRIQRYDTQIGQIVRDSDQAKLLLSVPGIGPQTATALLSSISDIGQFKNGRELAAFLGLVPRQHSTGGKPTLLGISKRGDIYLRTLLIHGARAVLRYVDNKQDHTSRWAKQLMHRRGANIAAVAMANKMARTVYALLSKGERYNINHVAIKSA

SEQ ID NO: 113424 - protein, 363 aa, unidentified
MTKKRLRGNHLLDFLGADEKTPVWIGLDVHKKSYHVALRRADGVCQSWVSPADPIVLAQQLSAISQRISLIVYEAGPTGYCLERVLKENGYKVAVIAPSRIPRPVTNQAKTDKLDCLKLAEYAAKGMIEAITTPTAQESAERSVLRRRNQLVDSTRKTKQRIKSFLLFHGIEEEYGLRYWNRSARAELSKLPLQSDLKFVLKSLLRQLSYEEEELARITNRLARIAKRSQHWEVVKNLKTVPGVGDIVACAFRTELFRPERFRRAEEVCSFLGLAPAIRQSGEKRQGGWLMRSGQKRLKSLLIEAAWMWRAKDPWARKKYQTHLSRCGITQKAITALARRLAVILWRLSVENRAYVMLQVDSV

SEQ ID NO: 113425 - protein, 345 aa, unidentified
MKNTIAGVDLAKDVIQVCICKNNKVHSNTEMAHCEFLAWLFNSKPMTLIFEACGTSNYWKQRAIEAGHDARLISAKLVSSIRQNQKTDKNDALAIAQASQLADIQFVKGKSVEQQQLQSMMRLRELAIKQKTASSNQIKALLLEFNIRVSLKQGGLKGVIESLLEDAENGFSSEFRRALNAAWELHREILDSIRVYDRCLETTIGEHDDCKRLLKLEGVGTLNAINLYIALGCADLGVFSKGKDASACIGLTPLQHSSGGVTKLGHIGKGVKNSSIRSQLITGAMAVVNQVMKRTAVTKKEVWVQGLVARRGKKCAAVALANKTVRTAYVMLTQGTEYKAELVAA

SEQ ID NO: 113426 - protein, 456 aa, unidentified
MAQRNRSLSPKFPKSAKSRAALSLTHPNAAGIDIGSAVHYVAVPPDRDDEPVREFPSFTADLERLAEWLKACGVDTVAMESTGVYWIALFELLDARGFKVLLVNARHVKNVSGRKSDVLDCQWLQQLMSYGLLRGAFRPADEVCALRSLSRQREMLLGGQARHVQHVQKALTQMNIQLANVISDVAGETGQKILRAIVAGERDGQALAAMKNARIRASADEIAKSLQGNWREEHLFALKQALALFDFYGTQLAECDVEVEKQLQSLQVHNGEPAKGKQRGRARNAPKFDLRTHLFKMCGVDLTRIDGIDVTTALAVLSEVGADMSRFPTVKHFTSWLGLCPGTKITGGKVMSGKTTRCVNRAAQALRLAAASLRSSHSALGAYFRRMCSRMDKSKAVTAAAHKLARLIYTMLTKGEEYTDQGQDYYEERYRQRVVWHLSKRAEKLGMKLVAPEQAA

SEQ ID NO: 113427 - protein, 375 aa, unidentified
MSNHSEAFVAFDSSKLRNAVAIADSGRTGEIRFLGEIENSTTATAKLVRKLASKYERLTFCYEAGPTGYELYRQIRILGQECIVVAPSLIPKKPGDRVKTNRRDAVSLAKLLRAGELTAVWVPDRHHEAMRDLTRARDTAVDDLRSKRQQISAFLLRQGLHYCAGKKTWSQAHLNWLARQKFEYLEHRLVFEEMMTAMRQAQERLERLEQAMRAAVPDWSLAHLVTALMAMRGIDLISAATFLAEIGDLSRFQSPSELMAYLGLVPSEDSTGDHIKRGPITKAGNRRARRTLVECSWSYQHPPRVGKDKQEKVAAAPQAVREIAWKAQSRLNRRYRALVRRGKLKTVAITAVAREFAGFIWAVAREATAARAAAK

SEQ ID NO: 113428 - protein, 375 aa, unidentified
MKEKVRFLGLDVHAETIAVAVAEPDGEVRSLGTIANREESIRKLVNKLGPVEQLRACYEAGPTGYVLYWQLTQLGVECAVVAPTLVPVKAGDRVKTDRRDAEKLARSHRSDDLTAVWVPDEGSEALRDLVRAREAAKQDQLRARHRLSKFLLRTGRRPAMGLKAWTERYLAWVQQIQFSQPAQEFTLLDYLHEVQHTDERVQRLEQAITEAVKFASPQVQEVIRGLQALRGVAHISAVTIAAELGNLSRFESARKLMGYSGAVPSEDSSGQRQRRGNITKTGNAHLRRIVVESAWSYRFRPAIGPRLRQRQEGVSEEIKEIAWKAQIRLHKRYLKLMAAGKDKKKIITAVGRELLGFVWAIGIKAEIASKLQMAA

SEQ ID NO: 113429 - protein, 422 aa, unidentified
MLEETQETEEIIQRVAALDVGKAELTCCVRVPGQSGSGRRLQEVRTYQTMTRLLLVLADRLAELGVTRVVMEATSDYWRGVFYLLEAHGFEVWLVNARDVKHLPGRPKTDTLDAVWLCKLAERQMLRPSFVPPRPIRQLRQVTRYRADLVAARTAEKQRVEKLLEDAQIKLSVVASDIFGVSGRAMLAALVAGERDPKRLAQLARARMRAKLSLLEEAFTGHFSDHHAFLLAKMLGRVDALDADLAELDAKIQELIAGFAGAVDRLDEIPGVGQLAAHLLIAELGTDMTRFPTAGHLVSWAKFAPGVKESAGKRKGSGSTGHGNPYLARVLGEAAVAASKTDTFLGERYRRIARRRGKRRAIVAVGRSILVIVWQLLSDPEAHFQDLGAGFYDTRVGPERAKRNHIRQLEALGYKVTLDPAA

SEQ ID NO: 113430 - protein, 323 aa, unidentified
MGAVVNQIQSSRVSPLFVGIDVSGKFLDVAFHESNEYFRVANSPDGIADLLSRLIPLKPERVVLEATGKLERAVLEALCQAGLPGVAVNSKWIRDFARSSGQLAKTDHLDARVIAHYGAAIKPKVRPLNDEQTQQLQALILRRSQLIDMLTAEQNRRKRAHKSALPSIDELIQFLQQRIKDADRDIDSFLRSNELWCKTEALLRSTPGIGKGTAAALIAFLPELGKLNAREIASLVGLAPFNSDSGNQIGQRHIKGGRHIVRRALYMACVAAQRANPDIKAFCDRLRAKGKKTKVAFVAGMRKMLTRLNAMMRDATPWNPPKA

SEQ ID NO: 113431 - protein, 364 aa, unidentified
MKTLQQVKQKMDFSEDSIYVGIDVHKKQWSVFIMSDYKEHKGFVQPPDPRALANYLRKNFPGATYYSTYEAGFSGFWIDEALKKEGINNIVVNPADVPTTDKEKKTKSDRVDSRKLCKKLRDKDLEAIFVPERYQLEDRELVRLRTKLVRDVRRCKGRIKSMLNFYGINHSFTGWTKAFFTWLQELHLVYSNGTFTLHALVEELQSIEDLKKKVGRQIRSGIVKNERYAKLIGLLCRIPGIGLIGAITILTELGNMKRFRNCDHLCSYVGLVPTLYSSDETEYVGNLTPRGNTYVLPILIECAWAAVGKDPALMNAYHQLCKRMKGQDAIIRIARKLLRRIRHVLIHETPYELNTVSQCMQLSR

SEQ ID NO: 113432 - protein, 358 aa, unidentified
MAGKVTETAVVGGVDTHKDLHVAAVVDQNNKVLEPQFFSTTRQGYRQMLAWMTSFGALKRIGVECTGTYGSGLLRYLQNAGLEVLEVTAPDRMERRKRGKSDTIDAECAAHAAFSGIRTVTPKTRNGMIESLRVLKTCRKTAISARRVALQIIHSNIISAPDELREQLRNMTRMQLIRTLGSWRPDASEYRNVTNVYRISLKSLARRYLELHDEIADLDVMIAAIVDELAPELIKRNAIGYESASQLLITAGDNPQRLRSESGFAALCGVSPVPVSSEKTNRYRLNRGGDRAANSALHIIAIGRLQTDDKTKEYVARRVAEGHTKMEVIRCLKRYISREVYTLLRNQNRQINSIPIIA

SEQ ID NO: 113433 - protein, 445 aa, unidentified
MSESLTSTASEPEWAAFAAVDWADQKNFWRLVPAGSQRHEQGVLENTPEAVEVWAAALQQRFGGRPIAVCLEQSRGALVYMLTKYPHLVLFPVHPTTAARYRETFCPSGAKADPSDTASLLDLLLRHRERLRQLQPDTVETRLLHFLVEERRRTVDEKTRQCNRLTDCLKLYFPQLLGWFDDMDSPLVGALLERWPSLEELRRAHPGTLRKFFHEHNCRSAELIQERITAIYQAIPATKDQAVLEAGALTARGLVTMLATLRSNIAVFDQRIAELVLAHPDSALFSSLPGAGPVLVPRLIVAFGTRRERYDSASQMQCYSGIAPVKEASGKTEWVHFRFACPKFLRQTFHEFASHSIGQSEWAKAYYQHLREDEKKSHHAAVRALAFKWIRIIFRCWKDGKPYDEQVYQKSLRRRGSLLGDALASATGVGWKTVAGFQKLSENNA

SEQ ID NO: 113434 - protein, 358 aa, unidentified
MNEITRVGVDLAKSVIQVYAVNGAGLRVTGRALRRDKFLAWCVQLPAGCLVAMEASSSAHHWGRKLLALGLDARIIAAQHVLPYRLQGRSGKNDANDAAAICEAASRPQMHFVPIKSVEQQSMLCIHRLREGFKAERTACINRIRGLLAEFGLVFAQSPEALRQALPDAMEDATNEMSGMVRQALQMAYEHWQELDAHMHQCDERIAAHGKASEQVRQAEQLLGVGPVTASAVVATVGDFKQFKNAAQFGAWLGLTPRQNSSGGKNNLGRITKRGDSYLRTLLIQGAKSIVLTAHKRDDPISRWAQALRERSGWQKAVVALANKNARILWAVFARGRAFDAHHVSNKPAGAIAVVIAA

SEQ ID NO: 113435 - protein, 403 aa, unidentified
MQDLKQLAFVGVDIHKDQHTACLTDCFSRNLATFDIPNDPNYFPELTNRINAISGENGLKPVFGLEDTRYFGQRLAQFLISTGNYVKEIPAFKTERKRSQSAHRDKSDPGDALAIAKVLIQDFDKLQTVDTFDELHLTLRVLVNQRGALIKEQTKIKNRLHLIIHRQYPRYEKMFKYPFTKSAVAFWERFSHPSYLKGITVKSLAHFLKLHSNHTVSTKAAQRILSIVSSDTPACESELVRAKVLQSLIRHLRFLQNEIELAEQELKTFVPKAGLKLETLTGVDTVVAAKLISYIGNINRFSSSDKLAKCAGIAPTNKSSGKRTRYRKSKGGHRQLNATIYYIALTQVSKNRVGAPLNLKAREYYLKKIAEGKSKKEALTCLMRRLCDIIYAMMKNKTEYRIS

SEQ ID NO: 113436 - protein, 361 aa, unidentified
MITIPNEVIAVTAGVDTHSDTHTAAALDDRGGLLGVAEFSATAIGYRQMQQWLEEFGEVDCIGVEGTGSYGAGLARHMKAVGLRVLEVGRPDRQLRRRRGKSDPVDAEAAARAVFSGQALGTPKSQDGPVEAMRLLRVERRSAIKARTQAANQLHGTLATAPEMLRRRFRGRTVRAIVEGASAFRIPEPSASLEATVRYVLRGLARRWLSLNEEVERLDKLLTKIVHELAPELVAQVGIGTEVASALMVAVGDNPERLESEASFAALCGVSPVDASSGRQQRHRLNRGGNRDANRALWVIAFVRMRCDTRTKEYASRRTQEGLSRLEILRCLKRYIARDLFKILRPLAVNKSNNNRSQKAA

SEQ ID NO: 113437 - protein, 360 aa, unidentified
MTRSTKHVGLDVHQATTVTSVREDSGRVIARSVLPTDEAPLLEYFRGMRGAIHVAFEEGTQAQWLHDLLAPVVDRVVVCDRRGESKRGNKADQVDADELSDLLRCGRLRPVYHGGRGAPHRLTLRELAHGYQNLVEDATRLMSRLKALFRARGIKTPGQQLYQPARRAEWLARLTEPGARFRAETLFAQLEPVQALRPGVKRALLAEARRDPSWDVLRSIPFLGPVRVAQLLATAQTPWRFRTKRQLWAYVGLAVVTQTSAQYEMRDARPVRRKRAPLTRGLNRNHNRVLKNVFKGAATAAAAREGELRGWYEARLAQGMRPEMARLTLARKLAALTLRLWKTGERYDATKLTTPAAHAR

SEQ ID NO: 113438 - protein, 337 aa, unidentified
MSPNQPLYPPVESPPVLGIDVSKLTLDTCLLQSGKSQQQRFANTPVGLDQMLAMLQTCGASQALVAMEATGPYSLAAALAAWEAGHAVVVINPRRVLDYARACERRNKTDRADAALIARFAAKEPLPRWRPLPAEQGLLRELLRRQSDLETHLHAEERRLEMAPSAPALRQSLKRSVTWLRAELERLEKSIRQHLEAHCALATDIEHLQAVPGFGQKSARLLAAEIPRHFANARAVCAWLRVVPQQCTSGTSVRKPSVIGRGAPCLRHKLYFAAITAIRFDPRSKAFAERLQAAGKSKMSIIFAVLHKLVRTAFAILKTGLPYQPDHVVTPRPSCSP

SEQ ID NO: 113439 - protein, 362 aa, unidentified
MKKDSTGKQVKGSKRVVTVAVGIDIGDKDCQACGRDAAGRITFERKVRTTRAGLASALGKLRACRVVLEAGSQTRWIAEAIIKMGHRVKVVDPRRMRRIYESDSKSDVRDARELSEAALDRWERLPEVKLRSRESQRKLSVLRTRDALVRSRTALVNVVRSLLKQYGIKVSKCTTEAFPKKAAALVPEELSVAASPLLRQISELGLQIKGLDKWIESQAAGDANIRVLRQIQGVGPVTAAAFVWTLDDPERFKRSRSVGAYLGLRPKRDQSGEVDKQLPITKAGDRYVRALLVSCAHYILSKKGPDTALKRFGLRLAERGGKVAKKKAAVATARKLAVLLHHLWVAGEIYEAFPDTCKRRAA

SEQ ID NO: 113440 - protein, 408 aa, unidentified
MNPLFVGIDVSSRNNVAYLMNPDGSKHSSFSVQNNLGGAKLLSERIVSALSSMQLSDVVIGLEATSIYGDSLVYALREDGRLGRFQRKIHVLNPKQVRKFKEAYSDLPKNDWVDAFVIADHLRFGRINREVYMDDYRYKALQTLTRARFDVIQNLTREKQRFANYLFLKCSGMAQDKDIQNTSATTIALMEHFETVDDLANADLEELTAFITETGRGKFADPDATAKAVRAAAKGSYRLPKTVNDTVNQAMAVSIASMRALKGQVKVLDKAIEQQFEIIPNTLTSIPGIGKVYSAGIIAEIGDIHRFDSQASVAKYAGLVWNRSQSGDFEAEHSRMIKSGNRYLRYYLLEAANSVRRCDSEFRRYYDLKFKEVNKYQHKRALALTARKLVRLVFRLLKDNRLYIPPEG

SEQ ID NO: 113441 - protein, 480 aa, unidentified
MNVKTNKTKKQANVENQAVNLLSKEELCKRIEDVEKELKSYTWRELETNGKFAKNDKLSFIKDDMLIVGCDIGSETHYIRAIDIRGRELSRKAFEFSNTAEGFEAAKAWMLELAVQNRKSQIVLGLEPTGHYWFTLAAWLITAGISVVQVNPYAVKQSKEIEDNSQLKDDKKDPKLIANLVKDGNYGMPYLPEEIYADMRRLSMLRDQLTEDRIRNINRLHRELKIYFPEYMDAFGKIDGTFALEVLKVSCIPSEITELGTEGLRNIWHEAKLRGRGYSRASEIVEYAEKSVGLKDGSSVGRETVKWFAKEIMKLDEQLAWIENTLHKKCMEIPYAENILEIKGVGENILAGIVAEMGEISRFDDVKEIQKLSGMSLVACSSGKHKGQTKISDRGRKRLRYWLFQAARLAVSHAEEFKELHVYYTARADNPLKRMQSLIVIACKILRVIYTILKTGKDYDPQKMLKDIKRPKAALAAKAA

SEQ ID NO: 113442 - protein, 341 aa, unidentified
MYYIGLDVHKKTISYCVKDASGLVHQEGKIGATRRELDSWIKALPQPRIVAMEATIFTGWIYDHLLPHAAQVKVAHPLMLRAIAAAKKKNDRIDAGKIADCLRCDFLPECHMAPIEIRDRRRTLRYRQLLVRQMVQMKNRISGLLMETGVEYNKRRLHKVGYFGELLSTNEEIKESIRPLLKLSRETIVRLQKTEYALVSSLQRDPLLAERIRRLRTVPGVGPITALTWALEMGDVSRFRSVKQAISYCGLCGDEKSSADKVMRTPLSKQRNKHIQRVLVEAAKLAPREDHKLALVYEAEKQKGNANRATLAVARKMVSYLLAVDRGARSFVPAEEHSTAA

SEQ ID NO: 113443 - protein, 331 aa, unidentified
MNSSNKNKKRTGQTVTPSVVGDRAKARVVPSLLPKSSNSCLGYPSPHVTQGRATLEPVQIIKEDCILEVSLIFVGIDVSKAQLDVAIRPTAQTLSVTNDKAGIKILVKHLEKLEPTLVVLESTGGLERQVMLALIGTEIPVVMANPRQVRDFAKATGQLAKTDRIDAAVLAHYAEAIRPKPRPLPDELTLELRALTVRRRQIIDMIVAEKNHLATASKAIKKRITAHITYLEQELDRADQDLDRFIQKNPTWKDNQEILCSTPSIGPVSSRTLVAELPELGTLGRKQISALVGVAPFPRDSGTLKGRRTIWGGQSFGTQRFVHGDIERHSF

SEQ ID NO: 113444 - protein, 402 aa, unidentified
MNAVGIDVSKGKSVVAVMRPFGEVVFAPFEISHTDKDLTDLAKKLKSLPGETRVVMEATGSYHVPVAWVLHSAGLYVSVVNAVLVHDYGNNSLRRVKTDKKDSLKLANYALDRWIHLPQFAPAEENRLLLKACYRQYQQCAKVHTALSNNLISLLDTVFPNVNCLLKSPARDDGSVKWVDFVDFFWHKDCVSKLSEKAFITKYQKWCKKQRYNFSEQKAAEIYAAAKSGVAAMPKADAAKCMVQQAVSALRACSKALAELSKQMLSLASSLPEYPVVMQMFGVGPILGPQLMAEIGDVRRFHSKKALVAYAGIDSPPNDSGRVIGNHKKMSKVGSSALRRTLFLVMSVYLQNAPLDEPVFQFMNRKRAEGKPYKVYMMASANKFLRIYYAAVNAYLDSLNQT

SEQ ID NO: 113445 - protein, 312 aa, unidentified
MKNDTIGVDVSKDHLDAHRLADGATRRFANDKGGHKALIKWLAETPLNRVVFEPTGPYHRAVERALGASGVPFVKVNPRQARRFAEATGKLAKTDRLDAAILARMGSLLELGARPARSEVLFELKELYVAREALVKDRTAARNRGKALTLSLLKRQNAQRLEQIDRQIATVEAAILQLVEADESLADRFAILISIPGVSNITAFALLIAMPELGSLEAGQAANLAGLAPIARQSGRWTGRSFIRGGRADVRQALYMPALVAARFNPDMKAKYAHLIETGKPAKVALTAIMRKLVVLANALLKANRTWTPRTA

SEQ ID NO: 113446 - protein, 337 aa, unidentified
MSVYVGIDVHRKRSQVAVVTEDGTVQLNKNVVNGSEPFLRLIGDLPSGTPVAFEAAFGWSWLAELLEDYGFEAHLVHPLRCKAIASARLKNDKVDAAILAQLLRADLLPEAWLAPPRVRQLRALLRHRASLVRLGTQLRNRIHAVAADHGYDRSASYWTGPGRGWLAELDLPAASREIVGDCLAVIDGLAPVIDRIDGELHAHARADPRVKVLRTLPGVGEFTALVMLAEIGDITRFGSARKLASWAGLTPTVRGSDLKVRHGHISKQGSAWLRWVMNQAAQTAKRSPEFAASYAAIAKRRGKKIATIAVARKLLTRAWHLLNEMQATDTNAPLRRP

SEQ ID NO: 113447 - protein, 412 aa, unidentified
MKDLLEISCGLDVHKEKIVACILTGPLGKPTRSEIREFSTLIPDMIALRNWIVSKNCHHVAMESTGIYWMPIYEILEDAFYGDITLLVVNARHMKNVPGKKTDMRDSEWISTLLRAGLLNGSFIPEKRIREFRDLNRYRKSVIRDITSQKNRIEKFLQSSGFRLSSFISDIFGASGRNIILHLIEHGQIDKTALDSCLKIKTRNRIDEILISVNGTLSEHQKAFLRILMTHYDSLKKHLAEIETSLEEDMAPFALQVEQLNSIYGISTTASCAIIAEIGIDMKPFKTAEHICSWAGLCPGNNESAGKRKSTSVTKGNPYIKSMLCEIAWVIAGKRNTYLSAWYWRIKQKKGAKKAIVALARKLLVIIYTMLKQGTLFDESCFETRRKHCEQKQLSRYIRELEKHGYHVEAQS

SEQ ID NO: 113448 - protein, 360 aa, unidentified
MQLHDALTIPKIFIGLDIHKKSWTVSIQTDLFFHKTYSLPSVSEDLYQYIERTFANHEVHLVYEAGCCGFSVARYFLNLGWHVLVVNPADVKTGDKDRYQKTDALDSKNLSNQLKSGVLKGIYIPTEAQEQFTTLARHRTQITKKLRQTKSHIKSMLLFHGIKVPDQFDNSNWSNDFVAWLEELKFSTSCGDLALQGKIRLYKFIKSEYLEIANQMRLHCRKNNKKDYYLLKSIPGIGGYLASVILAECGDLRRFNTEAQFSSYIGLVPGIYNSGDSEKCLGITPRSRSQLRSYLIEAAWIAIRKDIEMQQYYRKHQGKNVKSIIVKVAHKMARRILSVIKTETPYQINRNLEVEHKNKI

SEQ ID NO: 113449 - protein, 456 aa, unidentified
MPEKDNRLGRVEGLPVIRYLVAGIDLGSELHWVCAPTPDGSGREIAAFGATTPELIRLAEWLQERQVESAAMESTGVYWIAPHEILEAQGLEVWLVDTRQLARVPGRDKKTDPTDCEWIQRLHSCGLLRASFRPQEQICMLRTLVRDKANLVAESADWLRRMQKSLDQMNVRVHRAVADLEGATGMAILRAIAAGERDARKLARLRDPRCQKSEQQIAEQLSGHWREDHLFSLRQALKMYDAIREQIAAYEQEILRTLQHLERQEQHGQTAPPLPNANKAKAIQKRGQEGKRQALYRMSGVDATQIDAIGVETVEVVLSEYGPDLSRFPTEKQFVSHATLAPHVPKSGGKPIKKRKRNSASTRVAAALRMAALSLRHSNTALGAYYRNIAKRIGGDVAVFATARKLATLVYRLLRWGQPYVDEGAEAYENRYRQQRIRSLTARAQALGYQLTPVDS

SEQ ID NO: 113450 - protein, 356 aa, unidentified
MSREVKYIGMDVHKEAIVIAVRNTRGYVVMESIVETKASSILQFIHGLQGELHVTWEEGTWAAWLYDLLKPHVHQVLVCNPRRNALLKEGSKNDKVDARKLADLLRTGMLRPVYHGEHGLRTLRELARTYQTLSQDLNRVMNRLKALYRGWGIACGGTQVYAPRYREEWLGKIEHAGVRRRAELLYEQLDGLQALRRTLRSELLAESRKHKATKLLRQIPCIGPIRAARLIALMQTPHRFRSKRQLWTYSGLGIETHDSAQYRFVRGELQRAKKPQQIRGLNRNHNHEMKDIFKGAANRASCGVGPLRDFYVALLAKGMKPEMARLTLARKIAAIALTLWKKEERFNAEQLKTQAA

SEQ ID NO: 113451 - protein, 430 aa, unidentified
MLSKYVGRLTSSIENDITKTRNHSRQRGNIMRAVFGIDVSKASSEVAILVNGEKVHGYTMSNDALGFARLLGDLRTVHKPEIIFEATGVYSRRLQTFLDEHGYAYTRLNPLEAKKQLDSLRVRKTDQIDAEKLAQSQFVLNRKTTYVQEEVYQELRDLSRFYQNLTEDIVRAKNRLHKVLQVTFPEIETVLSKPTGEQYWNLVTAFPCKDFVLELSKDELLESIRQSTSKRISDKRVAYLAEKLTALANQSYCAVKKTSPIMEEVRYYAKELLRLSEQRQTVLDQMVELAQPLPEYDILLSIPGIAETTATSIIGELGDIRRFQSTNQINAFIGIDLRHYESGNFLAKEHITKRGNPYARKILFKCIHNIASASHTNPCHIADFYEKRKRQSQTTSTKPHTIASIHRLIRTMYYLITHNKLYDYTSTQNR

SEQ ID NO: 113452 - protein, 383 aa, unidentified
MAQVNDLSRSLTAFDPISTLVVVVEMSKASWLVSGAVPGVERQPLKKLEPDATALLRLIERWRSAGWPISRIALAYEAGRDGFWLARWLIARGIEAHVIHSASVAVSRDRKRAKTDRLDAAMLMRVFLGWLRGERGHCGMVVIPTMEEEAARRPSRERESLVNERSRITNRMKSALARLGIRGFKPHLRKAPERLADLRTAEGTGLPANVIEEFRRDMARLALVREQISSIEKTRAERLERAPDTGPHAMVRLLARVIGIGIETADMLVREILSRKLRDRRAVARYAGLTGSPDESGLKRREKGLAKVGNARVRRGLIQLAWRFLMFQKDSALARWYRTRTEGPSGARKTTMIVALARKLLIALWRLVTTGEVPDGVELRPAT

SEQ ID NO: 113453 - protein, 345 aa, unidentified
MGPMYYIGLDVHKRKISYCVKDGSGRIHAEGSISATRLELDHWMRSLPQPWSAAMEATMFTGWIYDYLQPHAATLKVAHPLMLRAIAAAKKKNDRIDASKICDCLRCDFLPESHMASTAIRERRRTLRYRNLLVRQMVQMKIKTSALLMEAGVSYNKQRLHKAGYFRELLTTNPDIDEGLRSLLRLCRETVVRLGKSETALVRSLERDSLLVERVERLMTIPAVGPITALTWALEVGDVQRFSSIKKAISYCGLCGAEKSSGNTVQRTPLSKQRNKHLQTTLIEAAKMAPRNSPELAMLYDKEKQKGNANRATLAVARKLVAYMMAVDRGQRNFQRAETSSSIAA

SEQ ID NO: 113454 - protein, 341 aa, unidentified
MQDVTLIGIDLGKHSFHVHCQDRQGKALLRKKFGRKQLIEFLATFHACTIVMEACAGAHHMARLLTGYGHEVKLISPQFVRPFVKSNKNDFIDAEAICEASCRPSMRFVTPKTESQQCLSALHRVRESLVRERVKASNQIHGFLLEFGISLPIGHAVIRRLPSVLAEQVLPARLVILLERLHSHFKYLDEQIADIERELDRQLQDDDLGKRLMSIPGVGPITASVLAAEVGDGKQYRCGRDFAASIGLVPRQYSTGGKNNLLGISKRGDKNIRRLLVQCARAYMLRLERQTDRMAQWVRSMLTRRHTNVVACALANKLARTAWAIAANHTEFKRQEAVMVE

SEQ ID NO: 113455 - protein, 407 aa, unidentified
MKRYYIGVDWGDRLHQVYVGDHEGKKVREIKVPETVEALAEIGRWLDEQRAEGFELWAAIEKPAGRIVDFLLDHGVEVYPVNPKAVDRVRDRYRMSDSKSDAFDAYVLAEFLRTDQAHLKALRPSSQNAQELKMLCRDQHRVVRLKSRLLNQLTTTLKEYYARPLEVFGDIETEVALDFLTRYPTPAHLGALKRKEFNRFAKQHHLSKQRCEELWEKLQKPQLAVPEHVVRAKAQLVEVLIDQLRASIKAVKTYHHKVESFFASSPAAPLAKTLPGGKSGTLVAAIWAELGDAQGRWESSGHLQAEAGAVPVTKASGKSHVVHFRFACNKQLRYSMYWFSFVSLNNSEWAKLYYRGQRDKGHNHPQALRALGAKWLKIIFVMWRDHKPYDEQFHLANIALQKMRQAA

SEQ ID NO: 113456 - protein, 346 aa, unidentified
MVLIGCDFHPSWQQVSWMNRETGEAGDQKLVHEPGAVEKFYRQFPAGTRIGMEATGNCQWFVELVTGLGHKVLVGDAAKIRASDSRQQKHDKRDARLLVQLLAEDRFPEIWVPSREQKDLRQLLIHRYKLVRIRAQVKNGLQHLAMNQGVMKKQKLWSKAGEKVLRELPLAPWASRRREDLFKVREMLNGQIDLLDQAVVEAAEKNEKARLLMTQPGVGPITSLAFVLTIGDVKRFQRGKQVASYLGLIPREYSSGGHQRLGSISKQGNTFLRMLLVEAAQGAVRCDPGFRNEYLHRCHSKPKGVAKVAAARKLAIRLYWMLRTNTGYPEVVRVESSSRVALVSES

SEQ ID NO: 113457 - protein, 376 aa, unidentified
MLYLGIDQHAKQLTISLRNEAGDVLQARQVSTQPEKVHDYLQSLKSLSDDGFVAIVEVCGFNDWLLEMLPNYGCSKVALIQPEKKKLIKTDKRDAKGLSELLWLNRQRIARGESVRGVRQVVLPSQADLENQRLTKVRQQLARRQTKIVCQIKHILRRYNLQWSMPTKTFPSKKAIVWLKSLKLSTWDRQEMNWHLGELELLPVRMSFLDVEIAKRMSGNDSAAILLTIPGCGNYTALALQSRIGNAHRFARGRSIANYFGLTPRVSDSGEGTGRRGSITKAGNATVRWLLAQMVVHVLRQDEEMKKWYKSIRTRRGSKVARVAVMRRLCPVIRNMMIECKDYWSCRKSMLERRDRQRYQELASKRARKKTVNRKR

SEQ ID NO: 113458 - protein, 341 aa, unidentified
MKSTTIAVDVAKEVLEVAVSVRPGQVSEQKRLSRAAFMKFCTDQPPATVLLEACGSAHYWGRRLQSLGHRVVLLPPHATRPYVFRNKTDRTDTRGLLEAFRNEDIHPVPVKSVSQQALTALHRLRSTWLATRTARLNTVRGLLREFGCTIPVGAHHVLAKTWDLLADPESGLPDALRPGLAAACTEIRDLEGRVRVVEDQLQALADQTPAVARLRSIPGVGLITATALVAFVGDVQRFPSGRHFASYLGLTPRERSSGLVRRLGAISKRGDVYLRMLLIHGARAVLWAAKKRPTPDRLRAWALHLQTLRGHNKAAIALANKLARIVWAVWKHDVDFREEAA

SEQ ID NO: 113459 - protein, 349 aa, unidentified
MLSTVAVDLAKSVFQLAVANRVGRIVQRHRFSRAQFAAFLRAAAPAHVVMEACGTAHYWGRVAQQAGHRVTLLPPRYVRPYVRRDKSDRADAEALLEAFRNPAIAPVPVKSVAQQELVALHRIRDQWMATRTARLNAMRGVLREHGLLLPAGAKRALCELPLLLANANAPLPACLRHSLFALYEEVRQLEARVATLEKDLEKLAAPDPVAQRLQTIPGVGLLTATAVRGTVANIHSFRRARQFASWLGLTSRERSSGNRRRLGAITKQGDTYLRYLLTHGARAVLLAAQRAARAGRPLTHLQHWAVTLAERSGHNRATIAVANKLARIIWAVWAREQPFAARPALPAAA

SEQ ID NO: 113460 - protein, 357 aa, unidentified
MRQQSYKKDFNGQNIFVGIDVHLKTWSVSVALPGGYLKTHTQKASPKELFEHLNKNYPNGTYHAVYESGFSGFSTCYALRELGVDCIIVHAADVPTTQKEKVTKSDPTDSRKLAKSLMNGELEGIYVHSKDNLDDRGLLRHRTMLLKLMGGIKSRIKHLLYNNGVSYPEEFAQKSKHWSRRFISWLQHDVQLLSGTRVTLDLLIEELLYFRARVLDVNKKIRVLAYTDRYREQYENLISIPGIGAIVSMCLLTEIDDIWRFNNQRQFASFLGLVPVMMASGDNFYVGEKTFRGNKILGPKVIEASWITIKHDSELAAKFGYLCDKGMKRNKAIVRIARKMSNIIFTILRENRKYVCR

SEQ ID NO: 113461 - protein, 352 aa, unidentified
MVYVAVDIGKRRCVTCVTDQDGSILDTSSYPNTFLDASHYARQMVEKYGECKAVVESSGRMCMKTYEAFESNGVQVKLANPVKTRAIAEARVKTDKVDSRILAHLLRADLIAECYVPSRDLRLSRALLSHRVNITREQTRIKNRIHSLLDKYDLECEYDDIFGAHGMHWLHTLQLNGHDHEILQSLLRQLEFLQDEETKANSTIAKDALHSQYVPIIMSMTGFDYYSASVLAAYIADISRFPSPPHLVSWVGLCPSVYQTGESLYMGKMKGGSRKVNWIMIQAANTTIRSDPRMKAFYERKLRRHHHNVAVTHVANKMLRIIWHMLRENRLYNERRERLYESKLKRMTHTAQ

SEQ ID NO: 113462 - protein, 354 aa, unidentified
MRLYQTATEFNCGVDLHARQMYVCVVDKEGKVLVHRNIKDNDFEFFLKLVGPYRHSLTVCSECCFCWYWLADACEEAGIPFVLAHALYLRSIQADKKKNDRVDSEKIAHLLRTNMIPYAYVYPREMRPLRSLLRRRLAYVWHRSELLGWQTCGLIAQGLPEVEVQSRPRDRWEQQLMERHTNEHLKLLVETDLSLVREYDRQIDRLERTIMAAARKDRWKDLHVLLSVPGIGKVLAMTLLYEIGDINRFNRHQEFCSYSRLVKGSVESAGVIKGMRGGKMGNGYLKWAMKEAVLVAKRSHPDVRALAQRLEKRHGRQTANAVLAHRLARAIFYMLKHGMTFSMAMFSKRMERAA

SEQ ID NO: 113463 - protein, 373 aa, unidentified
MREFNKFIGLDVHKSTIAISIAPVDGGEVRYFGEIPNTHEALTKFANKFSQGSLKLSFCYEAGGCGYEVYRHLRNIGHDCMVVAPSLIPKKAGQRVKTDRRDSLNLARLHRAGELTGVWVPDAMNEALRDLTRAREDMKHLQRQAKQRLLAFLLRHGWTYSGKSNWTNAHFNWLETVKFKHAAQQIVFQEYVDTVKYCGKRVESVTQQIEICSRESACWPVIESLMALKGIDLITAATIMAEIGDLTRFDSAPKLMSYLGLVPSEHSSGSSVRRGGITKTGNSHVRRVLVEAAWTYRFPARKTAHTQKRAKLTSDAVQEISWNAQKRLCQRYKELNAKGKIKVQTCTAVARELAGFVWAIGQTVPLKQSANFQ

SEQ ID NO: 113464 - protein, 415 aa, unidentified
MEPMFPHCAGLDVHKKTVVACVLVTGADGKLQAVKRQFGTTLAGLEQLAAWLLSYGVTHVVMESTGVYWKPVYNVLAPQCEVWVVNAQHVKQVPGRKTDWNDAEWLARLMCYGLLERSFIPDEEQRELRDLTRYRTRLTGERAAAANRLEKTLEDANIKMTSVLTDIQGVSARAMLEALISGESDPEVMAELARGRLRAKLPQLEEALAGRMRDHHRFMLRELLTHLDHIGTCIATVNGRIAELTAPYEAVIQRLSAVTGIKRHTAEVILAEVGPDITPFPTAKHLASWACLCPGNNLSAGKRRSGKTRKGQPWLRAALVEAAWVASHSLDTYLAAQFQRLRARRGDKRAAVAVAHSILTIVWHLLANPEAVFTELGGDYFLRKNPEREQRRAVRKLEALGFTVTLTPAAAAAAA

SEQ ID NO: 113465 - protein, 403 aa, unidentified
MSSVFAGLDWASQTHAVCVIDEHGSVCKQWDVAHDADGLRDLLRQLRALHVVRIAIERPSGLLVDALVEAGFEVVPIHPNAVKASRPRYRSHGGKSDASDAYLLADLLRTDGHRFKPLAAQSDEIRALRALVRGRDDLVATRVQLANQLRALLESYWAGAAEVFADVDSPIALAFILRYSTPDAASRLGPKRMAAFCAQHAYCGRRSAEELLRRLRQAPSIAMGELELDAKGELASSLARTLGTVVDQIRLLSARIEHHVAASEDGPILMSFPRAGRICAAQILAELGSVRERFDSDEHLAAEAGVAPVTYASGKHKAVVFRWACNHRLRKALTCLADNSRHASAWAAAIYAKARGRGCDHPHAIRILSRAWLRVIWRAWTDRKPYDPSLHGGLQTMLKTAGG

SEQ ID NO: 113466 - protein, 358 aa, unidentified
MQERAFIGLDVHARSVKAGLLDGLTGEVRSLAVPATTAALVAWVCAQPGPQAVACEAGPTGYELVRALAAAGVPCLVAAPSRIPRAPGEHVKTDRRDAVRLARLLRLEELTAVRVPDLAEEAARDLVRAREDARGDLMRARHRLSKLLLRRGLLWEERTWTEAHELWLARQRFPERPLQIAYEEALAAMFSVRARREALDAAIAAEAREEPWAPVVARLTCLRGVSTLTAFALTVEIGDWRRFSGRSLGAFLGLVPSESSSGSTRRQGAITRAGNGHARRLLIEAAWQQRRVPGKNMRVRTAREQAAPAVRERARLAERRLHRRWVRFDERGKHSTVAAVAVARELAGWCWSLAVMDA

SEQ ID NO: 113467 - protein, 410 aa, unidentified
MVKENFIYVGIDLHKETHTAVMIDCYNQKLGEITFPNRPADFPKLVTKVKKCNTDAKEVVYGLENAYGYGRPLAVWLIDKGYFVKDVNTAISHRQAKHRGVMYRKSDSDDAEAIALATLNMLDKLPDACPNDAYWSLGQLVHRRDNIMKQRTRLVNQLHEQLCIAYPSYKQFFNDISRPTALYFWEHYPSRKYLKGKSVEDLRTELVPVSHNRCSTKNCEKILDAVASDKVKNNAYQDARDMVTLSIVSDLQHYDSQLAEVDKMLEQMYKMLGCTLTTIPGVNVITAVKILAEIGDIKRFSNANKLAQFAGIAPLHLSSSGKGKDVATKQGNRRLQATIYFLAIQMVQVSSKGTPRNSVVRAYYEKRKAEGKTSQQALICISRRLISIIYGMLKHGTEYRMPVVESAGEK

SEQ ID NO: 113468 - protein, 368 aa, unidentified
MKKNNKNTKSPRRSMGIRKSDRATIGMDLGDKESRYYALNGAGELGAERSCPTTKKGMAQTFSTMPHCRIAIEVGTHSPWVSRQLKKYGHEVIVANPRQVKLISQSSRKNDKLDAQLLARLARMDPALLRPIRHRSEEAQKDLMTIRIRAALVEARTGLVNAARGLTKAIGERLPACDADQMDTEKLEGLPADVRQTLKPLLEEVASLTEKIKQCDNKIEQIARDRYPETQLLRQVSGVGPLIALTFILTIEDKDRFKKSRDVGCFLGLRPKQSESGERQPELPISKEGDVYLRKLLVQGAHCIMAKRGPDTDLKRWGTKLAGRGGKNARKRAIVAVARKLGILLHRLWVTGEVYEPLRNSPAMAKAA

SEQ ID NO: 113469 - protein, 371 aa, unidentified
MKEFSKYVGLDVHKETIAVSLAEAGGGEVRYFGEVANTPEALAKLARQLAKGNARLSFCYEAGACGYSVYRQLRELKHDCMVVAPSLIPRKAGDRVKTDRRDSLSLARLHRAHELTPVWVPDGTQEALRDLTRAREDMKHLQRQVKQRLLAFLLRHGKRYSGKSRWTQAHSRWLETVKCDHPVQQIVFQEYVDTVSALTQRVKALDQHIESASRESVFWPVIEALMALRGVSLLAATTIVAEIGDLRRFASAPQLMAYLGVVPSEHSSGGKRSRGGITKTGNGHVRRVLVEAAWTYRHPARKSVVLQRRAQCTSEAVQTIAWKAQTRLCQRYRRLEGKGKLKVQVCTAIARELAGFIWAIGQASPRHVAQA

SEQ ID NO: 113470 - protein, 358 aa, unidentified
MKYVGIDVHKKMCQAAVLDEDGTLIDETRFANTPEGIEEYATKLTSYSDDVKAVVESTGNLWIQIHDRLETRGFTVELSNPGKTRLIAEAKVKTDKVDARTLAQLLRADMIPTCYVPGEETRSRRELLRHRVNLVKNRTMVKNRIHGILDKHGLRMPGAYPFSGGNITWLRGLSLGFMDDAILRSDLALLEALSEQVELIEAKIAALAVEDQRTRLLMTMTGVGYFSAMLIVSEVGDIGRFRSEKAFASWMGLAPVVRQSGERTWIGGVPRRSNGRLKAALVECAQTAVRCDARFRGLHERVSRRRGSGCATVAVAHEMARIMFFMLSRGEAYRGVDVGLVGRKLKDMSRKAMVGLRS

SEQ ID NO: 113471 - protein, 383 aa, unidentified
MTKQSTTTAFDHDSTLVLALELSDKGWEVGAVVPGITRRPRRSVAARDMAVLLQQIERWKSESGRAGRTVRRTVLTYEAGRDGFWIARYLRSHGIEVQIMHPASIPVERRGRRAKTDRIDLDMLLRTLLAWLRGEPRACSMVRIPSETEEDMRRPERERERLVSERIALENRIENLLCLQGITGFKPRLKKAAERLDELRGFAGDPVPPKLLEELKRLMTRHRLLSEQLRDIETAREQVAMAAEPDHAVQQIQMLTRLVGLGLATATGLTREVLCRSFAGRRAIAGFVGLTGTPFNSGGSEREQGISKNGNPRVRRILLQLAWRWLRFQPDSALSCWFVERTGGAKGRIRKVMVVALARKLLVALWRYVETGELPHGARLAAA

SEQ ID NO: 113472 - protein, 460 aa, unidentified
MNRNRSKSRVDRTMPMVHPNAAAIDIGATMHMAAVRADRAPEPVRSFGTFTADLHRLVDWFTECGVETVVIESTSVYWIPIFELLDARGFAVFLVNARDAKHVPGRKTDVSDAQWLQRLHSFGLLRASFRPKGQIAELRAYVRQRERLLEYAASHIQHMQKALTEMNLQLHHVVADITGATGLRIIRAILAGERDPEALAGLRHYSCHSSAETIAKALTGSYRTEHLFALEQALSLYDAYHEKASACDVRIESVLKELIIHRGHDHGSAPPVSRRRNRTDQANALAFDVRAALFGLLGKDVTTIDGLGPYLSLKLIAECGDDLTSWPSAKHFTSWLGLAPSNKVSGGKMLSSRTRRSGGRAAALLRLAAVTVGRTDTALGAFYRRLSSRIGKAKAVTATARKIAVLFYNAVRHGMDYVDPGASSYETRYRTRVINNLHRRAKTFGFVLQPLEPKAGAAVS

SEQ ID NO: 113473 - protein, 438 aa, unidentified
MSNKVIFNLDDLFISVGIDVGADFSWMSIALPNQQFVGKPYKILHNSIDSLTTAVSKIKEAEELYSLESRIFLESTGIYHYPLFCYLRDKGFNCSVINPIITKNSTNINIRKVHNDRFDSKKAALVGLKPDLKVSLIPSDLALNCRNLCREYYDLMDNRSAYVNKLQGELHMAFPQYIGIFSKVTINTSLTLLETYTSPSAFLEADKQEIIDIIKSTARFGLTYAQNKYNAIIQAATDANQFGYIIDSNIKRIRLYISFIRKYDEEINIILESLHELVDANEDADFVKQIHLIETFKGAGFLSAVSIMGEIGDFSAFSKPKQLFAYFGLDPAVKQSGKFEGTKVRMSKRGSAIARRVIHTLTLQSISISRNGEAKNPVLREYYLKKCDSKPKLVAMGAVSHKVCNMIFAILRDNKPFEIITPQEHIKQYNASKCDMAA

SEQ ID NO: 113474 - protein, 341 aa, unidentified
MYTLGIDLHKNFAFWSLLDPDGSVLWQKKLETNLDLAKEEAQKLPKPCQAVLEPTGCFSLYAERLKEAGVDPHLAHPLEVKLIAKSKSKNDKIDATILAQLLRSNFLPEAYLPSKDIKELRSFIQFRSKIVSTKTRAKTRMRMLLNSLNIKTDITDLFGVKGIKFLEALNLSPLMAIQRDELIRTVNTCNGQLKTINAVILELAEKDDDIQRIMTIPTIGPVVATVIKAYVADFKRFPNADKLASYAGLVPSVRQSGDKEAHGHITKQGPGMLRWALVQSAAIVRPSHGDLYKFYNKKKVKIGVKKARIALAKKLLTISYRVVIDKTEYIDMSKKEMDKTC

SEQ ID NO: 113475 - protein, 377 aa, unidentified
MSKVRFVGLDVHAETIAVAVAEMGGEVRSLGSIPNKPESVRKLIGKLGPVGTLRCCYEAGPTGYVLYWQLTQLGVACEVIAPSLVPSKAGDRVKTDRRDAEKLARCYRAGELTAVWVPDAAHEALRDLVRAREAAKKDQLRHRHRLGKFLLRHGKRPTDAGKPWTQKYVNWIRIHACFEQPALDATVAHYLEEIDHIAGRIVKLEQAIDEAVKQSAPEIRAVIEALQALRGVAQTTAATVVSELGSLSRFQNPWQLMGYSGVVPREYSSGNKIQRGPITKSGNAHLRRVLVEAAWTYQHRPNVQGRVLRRQKALALSDEAKKIAWKAQQRLHKRFTAMTARGKNHNQTITALARELLGFMWAIAVHAEAQFNLAKAA

SEQ ID NO: 113476 - protein, 328 aa, unidentified
MARNGPIVGIDISKSKADGCIRSLQLRCSEPSTPDGLAAMVGWLRAHDVTAAVMEATGGYERAWAEALRHAGIRVRIVDPKRVRHFAKSAGRLAKSDPIDAEMIAWVGETFDDDIGLPHDPRREHPDRFVTARAALSKMLTQIRNQAEHRPPPLVAKAQAAVVKALRTQIAKLDAEIATLIEANEDFAQRAKIIDSVPGLGDRAVAGLIAWFPELGHVTDTKAAALLGVAPFDDDSGRHHGERHIKGGRSELRTLLYMPVVAAATQHNHVLKAYYQRLAATGKKGKVIIIACMRKLIIILNTMLARGQLWNPPPRAVAPSAGAVPATA

SEQ ID NO: 113477 - protein, 384 aa, unidentified
MKVACGLDVHKDSVFCCILCANGEKIQHKFGVLTEELVTLRDLMVSEGVEECAMESTSIYWIPIWRVLEGSVKLHLVNPYFIKQLPGKKSDVNDAEWIATCLSKELIASSFVPDDKIQRLRQYDRRIFDLNASISRNLVKLDQCIQRCNIRISNYISTTDSKGYRSIVKLISQGVTDAEVLVKELHGRTINRHGRETLVKALTGVVSETDIDIIKQLVEEIELQQRHKDEAQEKMTALCMEWFPQEVENLQTIPGVKERSATSIIAEIGTDMTHFQTPKKLVSWVGLRPRNEESAGKIKARGITHGNRFVRKTMIECSWGAARMKESFFAEFSYRQCIERRKNKMKVQVAIARKILVAVWYVLSQGTQYIKPTDHYTAAHMTAV

SEQ ID NO: 113478 - protein, 377 aa, unidentified
MGDYSEAFVGIDTSKLRNAVAIADAGRGGEVRFLGEIENMPAATAKLVRKLSSKYKRLTFCYEAGPTGYGLHRQIKGLGFECVVVAPSLIPKRPGDRVKTNRRDALSLAKLLRADELTAVWVPDGRHEAMRDLTRARETAMLDLRTKRQHVSAFLLRLGRPYPQSKKTWTKAHASWIASQKLEHPQQRLVLEEMMLAIRQAQERLARLEQAIAAAVPEWSLAPVVTALMAMRGIDLVSATTLLAEIGDLSRFRTPTELMAYLGLVPSENSTGDTVKRGPITKAGNRRARRMLVECSWSYQHPPRVGQAKQPKVDAAPPAVREIAWKAQCRLYRRYRALIRKGKLKTVAIVAIARELAGFIWAVARAVSTMRIAAAAT

SEQ ID NO: 113479 - protein, 324 aa, unidentified
MTAVLGIDVAKATYQVTLLVEGHNYKRSFGNHESAFPELLNWLHKHYTGQLLVGMEATGRYWEALAYYLHAQGHVVSVINPSRISYFARSKLVRNKTDAIDATLIAEYCLSQQPEPWTPPPAEVRELQALVRHLEALQGLRTQQSNRLQAAPPSCDVRASLQSLLSHLDDQIRAIECKIRGHMDQHPTLKQQSVLLQSIPGIGQITAARLLGENIQQFDSTRALTAYAGLTPRHNISGTSVHGRPHLCKTGNEHLRRDLYFPAIVAMRYNPVVNSFSKRLSERGKHKMAVVGAAMRKLPAIALGVLKSKTPFDPRYSERNLVLT

SEQ ID NO: 113480 - protein, 343 aa, unidentified
MLNIGLDLHKRETQVCGVDEAGRLQFERRIPTTRPALTHLLGGQVPARLLLEAGTESEWVAQHLEGLGHEVIVADPNFAPMYATRQRAVKTDRRDARSLAEACRLGAYRVVHRRSARQQAVSAELAVRESLVRTRTRTINLLRALLRQQGLRLPSGDADQVLPRLARVELPPPLAATLGPVLHLLRPLQAELRAADARVAALAASDPAARHLDLVPGIGPVTAAAFVAALDDVTRFRSAHQVEAYLGLSPRERSSGERQQRGAITKQGNTRVRWLLVEAAWRVRRSRHPAHAPLRAWAARIEARRGRRIAVVALARRLAGILYALWRDGSPYGARVGAVVSAA

SEQ ID NO: 113481 - protein, 463 aa, unidentified
MSRTGRHPARRVRLPPALRHVHLNAAGIDVGAGSHHVAIPPGRDPEGRDVREFGAFTADLSALAEWLRRCGIETVAMESTGVYWIPLFELLAARGFAVRLVDPRQLRNVPGRKSDVLDCQWIQQLHTFGLLAAAFRPDDQICVLRSYLRQRAMLVTYAAHHIQHVQKALEQMNVKLARVVSDVTGVTGRRIIGAVLDGERDPRVLARLRDRRCQHDEETIARSLEGTWRSEHLFALRQAVDLLDFYQQQIVACDREIEVCLGGFADKTAGRTLPAKPRTTKPNRTAPAFDVRTHLYRLTGVDLTRIDGIDAPTALKVVAETGLDMRRWPSDKHFASWLTLAPGTKVSGGKTLSGRTKPSASRAAAALRLAAGSLHHSKSALGAFFRRLKTRLGAPKAITATAHKLARLIYRMLTRGTDYVDQGQEYYERRYQTRVLSTLSRRAHALGYTLIKTPDQAPAPSEA

SEQ ID NO: 113482 - protein, 369 aa, unidentified
MEGEILIEPFQFSNDYDGFYLLLSKLAPLDQHSIIIGLESTAHYGDNLVRFLICKDFKVCVLNPIMTSSMRKNNVRKMKTDKVDTLVIAKTLMMQDSLRFSTLEDLDYIELKELGRFRQKTMKQRTRLKIQLTSYMDQVFPELQYFFKSGLHQKAVYALLKEAPMPKDIASLHLTHLSNLLVKSSHGHFTKDMARELRVLAQRSVGLNDSSLSIQITQTIAQIELLDSQLFETELELANLVTCLHSVLMTIPGIGTVNGGMILGEIGDIHRFSTLGKLLAFAGLDPTVYQSGNFQAKRTHMSKRGARVLRYALMNAAHNVVKNNATFKAYYDTKRAEGRTHYNALGHCAGKLVRVIWKMLTDEVEFNLE

SEQ ID NO: 113483 - protein, 417 aa, unidentified
MNTMIMQPYAAFVGIDWADTKHDVCIQSADSLRREFAVIPHKVEEIDEWAQSLHRRFSGPIAIALELSKGPIVYALQKYDYFVIFPINPSTLAKYREAFQPSRAKDDPTDAELALDLILRHPERFEPLQPQSVEIRELAALVEQRRRLVSDRVRLTNRLRNTLKQYYPQTLEWFNRIDTKLFCGFIERWPTLMQVKRARTTTLTTFFRAGHTRNPALLETRLASIRSSQHLTLDEAVIAPNKLHALMLVGMLRVILDAIKSYDQTIAELAPKHDDYYLFSSLPGAGPSLAPRLLVAFGEQRSRFKNAAELQKYSGIAPVTERSGTKHWVHWRWRCPNFVRQTFVEWAAQTINKSYWAGEYYRQQREKGSAHQSALRALAFKWIRILYCCWQTKTQYDEATYLKALQRRGSPLVAKAD

SEQ ID NO: 113484 - protein, 340 aa, unidentified
MDKRDFAGIEVSAQDLIVGLQHEGRRQALRTFENNPQGQQAIIRSLRRAGVTVRICMESTGVYGLDLALALARAGFELMVANPRAARHFATALMQRSKNDRIDAGVLMEFAQRMPFQAWVPPRPVVLQLHALSRRLEALKDMQEAEKSRRHAAQVTDTTPPALRRDLERSLRSLRRAIARLTVEAVELIEKDPDLKLRFALLISAKGIKEVIAIPLLAELALVPPDMDVRQWVAYAGLDPCEHSSGKSVRQKVRISKQGNAHLRRALYMPALVAIRHQPNLRAFYQHLLAQGKLKMVALVAAMRKLLHAIYGMFKHQTAFDGSKVYALPISRISTTEAAA

SEQ ID NO: 113485 - protein, 392 aa, unidentified
MFFIGIDIAKRSHQAAVTDVSGNIIIKPFNFKNSSLGFNQFLSVLESNSVPKDDCVIGLESTGHYWYPLYFFLVGQKFNVKVFNPIQTAAFREITIRKVKNDNLDSIMIADFTRFGRYSETHIPSENMLALKNLSRFRLSVSDICGTLKKRTIVLLDQVFPEYDTVFCDIFGTTSKLLLEKFSTPEEFSEISTTKLANFIHKVSRGRLGREKAELIKAAANNSIGISYAVDTFSFQIKQLIEQIEFMENQLSEIDAEMAKLLALSEYSVITTISGIGPTLGSIIVSEIGDIERFETSSKLVAYAGLDASVKQSGEFNSSQNKISKRGSPYLRRALWMAAFMSLQCDPALYGYYSRLRARGKSHRLATTAVARKLCIIVWAIMKSKLPYSPNI

SEQ ID NO: 113486 - protein, 350 aa, unidentified
MLIIGCDYHPGFQQIAYVNTDTGELSEARLGHKEQAEQFYYDLKTHGVPVRVGMEASGHARWFERLLAELQFELWIGDAAEIRTKRVRKQKTDRQDAQLLLRLMIEDRFPRIWVADAENRDLRQLLWHRHRLVQMRTRVMNQLHVVALNEGLRRKKALWRPAGRRELEALSLAPWASRRRQDLLDLLDRLTPKIHELNEKLEQMVARRPVTRQLSTHPGVGPLTALAFELVIGTPERFACAKQIASYVGLVPAEESSGDRRRLGHISKQGNALLRFLLVEAAQVTVRSDAQWRSQFFHLAMRRGRKIAKVATARKLAVELYWMWRNGWDYHEMQQLGSHAGAPGNRHGVQ

SEQ ID NO: 113487 - protein, 343 aa, unidentified
MQAITTIGLDIAKSVFQVHGVDPDGHVVVRRQLKRRYVLAFFEKLAPCLIGIEACASSHHWSRQLQALGHDVRLMPPSYVKPYVKRQKNDATDAEAICEAVSRANMRFVPTKTPEQQSGLVLHRTRHLCIRQQTSVINAIRAHCAEFGIVAPVGRRGIEELLNVIANANDEQVPEIARACLSALGDQLHRIKAQILAFDRMIGAWHRSCAASKRLDEIPGVGPALATALVASIADPRTFRSGRDFAAWIGLVPKQSSSGGKPRLGSISKQGDRYLRGLFTAGALAVIRYAKIHRIGHRPWLTALLARRPTKVAAIALANKIARMAWAMMARGERYREPVALAA

SEQ ID NO: 113488 - protein, 338 aa, unidentified
MSQITTIGLDTAKHVFHALGFDRAWKEQLRKKLRRNRVLKFFAQLPSTVVAMEACSGSHYWARELQKLGHTVRLIPARDVRVLRRGQKNDFNDARAIAEAAGRPDQRFVPIKGVTDHDFQLLQRLRRGYINARTAQSNRIRGLLAEYGLVLPKGLAALRRRIPELLEDGDNDLSTVVRHLLHQALEYLRHLDQQIATCDQQMKQQLQHDELAQRLLAEPGLGEVSVACWRAVIGDGRWFRRGRDVSAAIGLVPRQHTTGGRPQLLGITKSGDKELRSLLIHGARSVVRHAHKKDDPLSHWICQLIARRGIHKATVALANKMARRAWAITVYGDEVRSY

SEQ ID NO: 113489 - protein, 363 aa, unidentified
MGKRLRLEEGREQEQSARPQPGTEVMIAVDLSRSKWVYCVRWDRAERLRLSTTAELRHLQALVRRYVGCPVHLAFEACGFGYEIAWWAREEQIAVTVIAPSRMERAPGLQVKTDRLDVGRMARQLEEGSLKGIYVVARADHERRQVVRTYGQAVKERKRAQVRIRSLLQEHGRLGPAPRAGWKAYREWLGGQKLPEDVQLCVETLLAMRTLANQKAQLLEHRLLAMTHSDDYRQIVEALCTQHGVGALSAIRFLLEIGDVRRFPTADSIGHYLGLTPSEYSSGELLHRGAILKCGPGSLRAAMLQCGWASVRKGGDASLRAVYDRLAPRRGKKRAIIAVTRRLVVRLRARWLEVLEEGRAAAA

SEQ ID NO: 113490 - protein, 396 aa, unidentified
MNTPHPYDLIIGLDRSDKKADLRLITTATGQRRSEIIDTTPEALWEWLLELRQQQPQARVGLCLEQPAVHLIAFLEAYEWITLYPINPITLQKYREAFVTSRAKDDAKDADYLADLLLTHHAKLKPWAPEDSATRAVQQLVFHRRAVVDERTGLSNRLIALLKQYFPQALVLCGEDLWRPLATRFLLKWSSLQAVQKAKPASLKQFYYLNGSRSAKLLEQRLALVEKAVPVTDERALIESFALRVQLICRQLQLVQQTITLYEKQIAAAYAVHPDREIFASLPGAGAVLGPRLLASLGSQRERFSAAADLQHYTGIAPVTKKSGGSCYIHRRYLCPKFHKQSFHEFAKESILWSRWAAAYYLQQRTKGSPHQTAVRALAFKWQRVIWRCWQNRTPY

SEQ ID NO: 113491 - protein, 367 aa, unidentified
MKSYVGLDVHSKSSVFVIQNERGEELGRGELPTSVEGFSSLRLRFRLRASTLVALESGTMAFFAARKLSELGLSPVVVDAREVRMKAHRPRQKSDTRDAAELCEGLRRGIYRAIVHVPPAEIEHLRNTLSRRRHFVRLGTAQINAAKKMLRSAGLSELSRQHLGTLRAWQRLLQALASHPQVRSYVELHHRAWQSAMEQKAACEKSLGEQHASFREDLERLKTVPGVGEIVALTAIAVFSDATRFPSAKHAASYAGLVPQTYQSGDVNRQGHITKTGSPELRAMLVQAAHTARRQSSPLNPFLRNLTLRLGTRRAVTAVAHRLCRVLYAMLRDKTSFDPSMLKAHEPRATARAARIYRLKPQEAKSR

SEQ ID NO: 113492 - protein, 403 aa, unidentified
MSLLHLIFGKRSPVSQEKCVELIATPINDFSMISQEAVMFYTGIDLHRRSIVVCTLNEQGTTVAHRHMSAEAEVVTMYFRQWPAEEQCAVIEATACWYWLCDLLGSLGIRAVLAHAKYLKAISYAKVKTDAVDAHTLAQLLRLGYVPEAHQLPGEYRAMRDLLRQRMVMEHKRTNLIQRISSILAQFNVRLQVSPSAAGFAAFLEGCNLPVEYRMTLLMYHQQCIQATEHRKRLEKYFKEKLRPTPILQLLMSIPGVGDITGSIIAMETGDIARFADAKHYCSYCRLVPGSKDSGGKRAHRSGSKDGNHYLKYAFTEAAIKAMMYYPEIKRFALELQGRTSKRIARTVVAKELAKIAYYVLHRRQEFRTFKGVVIEKLRDWPRARKPVRITEERPDPVMSVAG

SEQ ID NO: 113493 - protein, 415 aa, unidentified
MKKVYDNCCGIDVHKKLMVACFIHGEEQEVREFGATTKALLELADWLHTGNCQMVAMESTASYWKPLYNILESSDLSAMVVNARHMKAVPGRKTDVKDAEWIADLLQHGLLQASYIPDKAQRELRELVGYRKSLVADKTRELNRLQKMLEGANIKLSGSVAEINGMSARKILEVILSGEKIDEEKLYQMKKDKVIAHNLRTPFAQLAEDLNGFISPLQERMMKELLSHIDELDVHIQNLNDEIDHRMRPEEKRAVEAIIAVTGVAEDSARAIIAVIGTDIGRFPTDAHISSWAGICPGNHESAGKKHSGKTRKGNQLLRTTLVVCAHSAAKVKNSYFHAQFQRISAHRGKKRAYVAVAHSILIAIYHILKDGVEFQDLGAEYYNQFNRERKVNAYLKKLKALGWEAPVAMEVQTA

SEQ ID NO: 113494 - protein, 368 aa, unidentified
MTKTVYIGMDVHSTNYTLSSYTCEADNCFSTVKLGPNVKNILNYISRIKKDHGDDIEIVTGYEAGCLGYTLYKSLEKEGIKCIIIAPTTLPKQKAGEIKTDKRDAQKIARALGTGTYKSVYIPDQEDDDVKQYIRMRDDHKQTLKKTKQQINAFCLRNGFTFTEGKSKWTQKHIKWLRSLEMTAMQREILDEYLITFDYYTMRIKQMDEKIEEISRQERYKENVDKLCCFAGMSTHKALCHIVETGDFSRFAKAPSYSAYLGTVPGEDSSSTSVNRLPITKAGNSHLRLLDIEAAHAIGRTSKQKSRALIERQKGCSPEVIAYADKANARMRKMYREISERKNKNVAAAAVARELACFIWGMMTDHIS

SEQ ID NO: 113495 - protein, 399 aa, unidentified
MLEQAWAGVDVGKEHHHCVVIDAEGRRLLSRRVANDEAVLLALISDVTGLAGQVRWAVDISTGEAALLLALLAAHDQQVCYLSGHQVNRAAGGYRGSGKTDAKDAAIIADQARMRRDLAPIRVPDEVIVELRMLVARRRDLQSDRVRAVNRLHETLLTISPALEKALDLTNQGPLILLTGYQTPAAIGQLGVTELTEWLRARNVRRAGELATRAVAAANAQQIALPGEALAAHLAGQLAEGVIALDEQIKHTDKLIEGRFHRHHAAPVILSMPGIGFLLGAEFLAATGGDTAAFATPDRLAGYAGLAPAPRDSGRISGNLYRPKRYNRQLQRVFYTSALISIRCCPESRTFYDRKRAAGKRHNQAVIALARRRVNVLWALLRDHRPYQASPPVSTAAVA

SEQ ID NO: 113496 - protein, 352 aa, unidentified
MILVGCDLHSRKQQVAALDTDTGEVLEQELAHTGDAVEQFYRALPRPVTVGIETTGYTLWFHALMQQLGHTLLIGEAAKIRAMVVRKTKTDRRDARHLLGLLKDDRFPSVWIPDPATRDLRALVTHRARLVRMRTMVKNSLQAIALNARVALGPSLWTQRGLAQLQALPLPLHAARRRAESLELLTWLTTRIDGLDARIAEAAAVDPGAQLLLTHPGVGPLTALSTVLVLGPVTRFPSSKHVVSYVGLAPAVDASADKYRLGKITKQGNALLRWVLGQAAPLAARADAELKRRYLAVLRRRGRPKAKVALARTLLVRLYIMRRDQIDYEEFRRRGHARRPGRDLATATGSTP

SEQ ID NO: 113497 - protein, 326 aa, unidentified
MEHELHYIGIDTAKEKLDVDVLRPDGRHRTKKFANTTKGHDELVSWLKGHKIDHAHICIEATGTYMEPVAESLYDAGYIVSVINPALGKAFAQSEGLRNKTDTVDARMLAEFCRQKRPAAWEAPHPLERALRALVVRHQALTDMHTQELNRTETAREVQRPSIDAHLLWLEAELKRLEKQIKDLTDDDPDMKHRRKLLESIPGIGEKTSAVLLAYIGLKDRFAHARQFAAFAGLTPRRYESGSSVRGASRMSKAGHVSLRRALYMPAMVATSKTEWGRAFRDRLAANGKKGKVILGAMMRKLAQVAYGVLKSGVPFDASRHNPVAA

SEQ ID NO: 113498 - protein, 421 aa, unidentified
MADVDKVTVVSSLDIHKRSVVGHVLNVFFDKNENKFIAESRAVKRVPRTLVGLGGLADFLRGFNVHTVVMESSGPYGLMVYYFLESEGFDVWMVPAQDNKSGGGKKTDIEDAKRLARNFVAGSIRAYKLPSDPKVRALRTYVRARKKLVDQLVALKNMIIKTFDEACIDIKSVFSSLGKGFLVFLEGYLKDDSLDKIIERWPRLGKKREMLEIIMKTRLSEASLTSLGSYLIIAKTIMKEIEKLDARIESLLVEFSDEIRLLLTVPGVGLKSAAVILAEIGDIKRFASAKKLASYAGLVPTVYQSGDEIIYGKLRSECNRRLRWILYEVALNAVRVSPWLRSFYERLIARGKKKKQALIAVARKIAVGIWHILAKHVPWKEAVRKNVRMPKKRRAPKVTVREALRILREAGYIVIKAKSGL

SEQ ID NO: 113499 - protein, 476 aa, unidentified
MKQRQRSPSKPKLSQGVPKPASLAPREKPVTLSVQHPHAAGIDVHSDMHMVCVPADSDPEPVRRFGANTCDLEAIADWLKQCGVTTVALESTGVYWIPLLELLEARGFEVWLVEPGQLSHCGARPKTDVLDCQWIQRLHSYGLLRPSFRPPESILALRGYWRQRQMQIRYAASHVQHMQKALEQMNVKLTEVVSDIAGLTGRRIITAILAGERDLYKLAALRDPKCKNDLSTIAKALQGTWRPEHLFALQQAYDLYQFHHQQIDQCDAKIQAELPKLPHRAGDKPFTAKPPRRGRKANDLGFDACGPLFKALGVDLTEIEGIDVGTALVILAEIGVDVSRFPTEKHFAAWLGLCPRVYESNKTQKKKGPRKGKNRVAIALRMASQSLGRTMSPLALFYRRIKSRIGGKGAITATAHKLACLVYRMLKYGRDYVKQSMDDYEAKIRQQQERSLRRKALALGYELVLKPAAPQSVSDS

SEQ ID NO: 113500 - protein, 439 aa, unidentified
MPTPSLPVLDPTAAAIDVGSEQLHVSIAGGRPKVFGTTTGELHGLRDYLLAQGVRSVAMEATGIYWLCPYEVLEKAGLQVVVVNGKYVKNLPGRKTDLSDCQWQATLHAHGLLKPGFVPPEHIRRLQDYLRVRTDHIVMAGSHEQHMQKALERMNLKIHDVISDLTGVSGLKMVQAIIGGERNPVALLALCDPQIQKNKAGRLRAALEGTWKAEHVFALRQAYELWQFYQQKIVECDQAIEAVLKELAGPEDPKNPAPPPIKRGGVNAPHIGGLHGLLWRLCGGKDPTQLPGIADYVLLQLLSEVGTDLEKNWKTEKHFTAWLGLAPGSRNSGKRRGSQRRSRNRAGRLFCVVARSVGRSVDKALGGFYRRLKGRKGGLVANLALARKLAELFWRLMVHGIAYVEQGLKKYESKVAQTEQRLLQKLACKYNMVLQPKAD

SEQ ID NO: 113501 - protein, 439 aa, unidentified
MDLLVERPGALDVHKESVTACVRVPREGQRVQEVREFKTTVRGLLGLRDWLAESGVTHVAMEATGVYWKPVWAILEDDFELLLCNAAHVKNVPGRKTDVGDSQWLCRLLECGLLRASFVPPKPVRELRELTRRRKTLVRDRQREAGRLHKALEDTGIKLDCVATDILGVSGRLMLDALIGGERDPAKLAGLAKGRLRVKNSALVEAFEGVRFGDQHALLIGGILRHIDFLDAEIDALGSAIETHITAQSQPARDADQTGADAGTARPFELAAQLMCSLPGIQQRTAQTLIGEFGIDMSRFPSEKHFVSWAAQCPGNHESAGKRRSGRTRKGPEHLNTALNDAAMGAIRVKDGHFARKYRRVKARSCHGVALGAVKHSLLIAIYHMLKNGELYRPPTPNPEAEQRQRERTTRRLVAQLERLGNLVTLGTATSTATAAVAP

SEQ ID NO: 113502 - protein, 358 aa, unidentified
MKITTIGIDLAKEVFQIHEVDIHGKAMLRKQLRRSEMARFFANLNPCLIGMEACGSSHHWARKLGEFGHIVKLISPQFVKPYVKTNKHDMADAEAVCEAVSRPNMRFVPIKNVEQQAILSIHRARQGFVKARTAQANQMRGLLSEFGIVMSQGIRSINKRMPDIPEDAENGLPGTMRRLLERLNNHFKELDRQVEELELQIKLWHKENEASQRLEAIPGIGPITASAIVATVGDAAEFKNGRQLSAWFGLVPKQRSSGGKQTLLGISKRGDTYLRTLLIHGARAVIRFSGNKAEPESWLRRLMARRNKNVAAVALANKNARIIWALLAKDTKFGSVALSVFRPIVSLISLKKNCREIA

SEQ ID NO: 113503 - protein, 394 aa, unidentified
MATIGIDVGKLQHIAAIHHQGEREARKTVLRFAADRAGLAELRDWIARQGGVERAVLESSGHYHLNLAAALQRQGLPVAVINPLESKYFGKRRLQRTKSDPADARTLATLAMVDEPVVRDVLAGAELREAARFAMGLVDQLGRIDQKICRLVELGFPELEEAYDDPTCVSALAVLRAAPTAAAAARKHSATLAQAARPGGGRRIGPTKAAQISALAKDTIAAPELAAQIGFQMRLLIAQHDLLEAQIAEAEAHLATLLDGELVRRLRTIPGAGPAIVATLIAEIGDIARFSEFDKLVAFVGVHPAEKSSGEKGKNPETSWRMSKAGNSYLRTALYRMAIVGIQHNPLIRAHYARKRAQGKSKMNAVGHCMKKALAIVWGVWRSGTDFAAPPSLP

SEQ ID NO: 113504 - protein, 333 aa, unidentified
MVDGTKGSHRKEGTTKMSENNINAAGIDTGKAKLDVALAGGKARLQIDNALSGWRELATWVKRHNVDRIGIEASGGYERGVVAYLREKGFTVILFQPLQIRAYAGFRLQRAKNDRIDADLIAVCTAATTTVRQAPDPRFQAFCEHLTLIEQIEEDVARAKTRLEAFRDSRHREILASEIKRLKAWRTAELKRLLDALRRHDDLANRLTLIESVPGIGSRTALALLIRMPELGSLSREEAAALAGLAPYDDDSGKHQGLRHIAGGRERLRRSLFAAALPAAFQWNPSLVALYARLTAAGKSHKVALIACARKLLIFANTVVARGTPWTEHHATV

SEQ ID NO: 113505 - protein, 387 aa, unidentified
MQKPHDNSKVCRAAFVQDSTLVVVIEMALTSWLVAGMIPGVDREPLKKIAPDPEELLQLLYRWRDEAIKAGKEITRIAVAYETGRDSFWLARWLRARGIDAHVIHATSVAISREHRRAKTDRIDTAMLRRGFLGWLRGEPGHCSLAIVPTVAEEDAKRPHRERESLVQERTSTVNRMKSILIQFGVRNFNPVLRKASEKLDAVRTPEGIPLPPNAVAALRRHMERLRVIKEQIKAIERTRLQRLQRDPADKMNAMVFLLVRIIGFGVETAEQLVHEILFRDLRDRKAVARYAGLTGSPDESGSKRREKGLSRSGNGRVRTILIQLSWRLLKLQPGSELVHWYQKRTADAKGSRKPMIVAFARKLIIALWRYVNTGLLPEGFELKPAA

SEQ ID NO: 113506 - protein, 409 aa, unidentified
MLYFVGLDWASREHAVCVIDERGRVLDQFTVEHSASGMTELSARLCKRAPAAELRVAIERPTGLIVDTLVEEGFVVVPIHPNVVKATRPRYSAAQGKTDLGDAYLLADVLRTDGHRFRVLTPLSDETKALRGLVRLRDDLVGQRVALANQLRCLLEQFWPGAAAIFADIDSPIALDFLDRYPTPSAAASLGEKRMAAFMARHSYCGRRSAAELLSRLRAAPVGVTGELEAEAKGECVRALIAVLRPLVAQVQALTAAVEHAVEAHQDGQVVTSLFRSGRVCAAQILAELGDDRVRFASAEHLAAEAGVAPITRESGKHRAVGFRWACNKRLRTALTCLADISRRTSPWAAELYQRARDRGCDHPHACRIVARAWCRVLWSCWQKRTAYDPSKHAAARAFTPRIVDQEAA

SEQ ID NO: 113507 - protein, 338 aa, unidentified
MALYCGIDLHSNNSVISIIDDHDKLISEKRLANNLAAIDQFLSPYQADISGIVVESTFNWYWLVDGLVDQGYPVHLANTLAIQQYNGIKYTNDATDARFLAHLLRLNILPTGYIYPKAMRQVRDVLRRRLLLVQQRTAQILSLQSLIGRHTGQQLTALKIKQLKTTDLLDYFPEAASEFSARHMLQLIDQLTTQIDEIEAFVLARCQQDPLYENLLSTPGIGKILGMTILLETGPIERFAAVGNYSSYARCVPTDKISNGKSKGKGNAKNGNRYLGMAFMEAAHYATIWNDTIKRYYQRKCKKVPVMVPKKTVANKLTRACYHMLKEGSLFDVKRAFR

SEQ ID NO: 113508 - protein, 352 aa, unidentified
MPTITTVGLDLAKKVFQVHGVDAEGKVVVARKLRRKEVLAFFAKLAPCLVGMEACGSAHYWAREIAKLGHSVKLMPPKYVKAYVKRGKTDAGDAAAICEAVTRPSMSFVPVKGVEQQGLSMLHSARSQLIGQRTQLINAVRAHLSELGIIAARGLLGLAELAAIVRDESDQRLSATARTALMVLVRQIEIVSTEIAALDTALRKENKASELGPRLETIPTIGPVIASALRARVTDPKLFDNGRHLSAWLGIVPENDSTGGKVKQKGLSKKGDRYLRSLLITGAMAVVRQAKIRPDKRPSVTKLLTRMSKKQAAVAIANKTARIAWAIMVHGGVYDAAHRAPQCRAEACAATK

SEQ ID NO: 113509 - protein, 349 aa, unidentified
MEAYDGPQIVGMDLHRRRSVLVRMTEDGRKLGTARIANSPARLAAEVARAGGHPQVVLEACYGWYWAADALAAAGAEVHLAHPLGVKAFSCRRVKNDELDARDLADLLRMGRLAEAWIAPAEIRELREVTRYRGKLVQLRTSCKDQVHGVLAKLGIEVTCSDIFGAWGTQWLDELTLPQPYCWKVASLRQLIGWLTSEIAVLEQVTAELLAGHDGYRAVQQLPGIGPVLAAVIVAEIGDITRFRHPARLCSWAGLTPRHHESDIKVVRGRITKQGSRPLRWALVEAVQRTPAGTPVHQARDAIIARRGIQARNIAKVAAARKLLTYVFYAMRDGHVRALDTPAAEHEAR

SEQ ID NO: 113510 - protein, 366 aa, unidentified
MKKTSTVRVNGNMIFKGHKLTIGVDLGDRWSNYCVLDEAGEVLLEQKLATTPEAVKQTFERMPRSLVALETGTHSPWLSRLLKELGHEVLVAHAQKVELISKSNRKDDRHDARTLARLARIDPELLGPVRHRSAKAQIHLTVIRARAELVSARTALVNATRGLAKSYGERLRKCGTEQVSRELTAELSAELREVLEPLLKEIESLNERIKEYDARMEKIARESYPQVALLKQVKGVGTQIALTYVLTLDDPYRFAKSREVGCFLGLKPGRRDSGESQPQMRISKEGDRYLRTMLVQGAHYILGPFGEDSDLRRWGLRLAERGGKNAKKRAVVAVARKLAVLLHRLWVSGEVYEPLRNSHKAMRAAA

SEQ ID NO: 113511 - protein, 485 aa, unidentified
MKAKRVNAFRRSHRKQYGPIRPAASMPVVHPHAAGIDVGSVEHWVCVPEDSVPEGEANVRSFGGFTADLDQLVEWLLAGGIKTVALESTGVYWIPLVQKLEAAQIEVILVNARHLKYVPGRKTDVKDCQWLQQLHSYGLLNGSFRPTEDICALRSLLRHRQNLIESAGREVQHMQKALQQMNVHLHHAVSDLVGATGLRILDAILAGERDPKVLVELRDDKLCTKTTKVELEKALEGDWQEEHLFVLSQALETHRHLLKQVVQCDEQIKKALAEVKMPEHQEPEGPLPQNPKAKETADTKPKKKRFHRNKTGPSLKLDLTEELKRLCGVDLTQIIGLSVLSVLIIISEIGLDMSRWRHAKAFCAWLGLCPRNKISGGRVLDSRTAHVVNRVSILLRIVAPSIGKTDTWLGIFHRRMRARLGPAGANTATARKLACLVYHLLKYKEQYIDVDQMIFMEKIRTQRINRLRKQAQELGMQLTEMPKAA

SEQ ID NO: 113512 - protein, 312 aa, unidentified
MSTPCYVGIDVAKAHLDVAVYPPAATPRFPHDEAGLRALVTHVQQLAPALVVLEATGGYETDVVAALALAGLPLAVVNPRQVRDFAKAIGRLAKTDALDAAVLALFAARVQPAPRPLPDAAQQELTALLARRRQLVEMLTAERNRLPLARGRVHHDVQVHIHFLEQRLKETNTDLRTLLQASPVWRAHEQLLRSVPGIGPTTAATLIADLPELGRLSRQQIAALVGVAPLNRDSGPRHGPRSTWGGRAAVRAPLYMATRVATRCNPIIRTFYQRLRAAGKPPKVALVAAMHKLLTILNAMVKAQRTWQPIDM

SEQ ID NO: 113513 - protein, 404 aa, unidentified
MEAGMVWVGVDVGRYSHALCAIDASGSVIWERKRVLNTTWAMRRVLAKLLHFLRGRPVHFAVEEPNGNAAALVRLLTADDLPVLLAQPLRVYRFHLALGQPHKTDPYDAQVIAQFARQNASKLPPVRILTPATQSLRVLSRRADAVGRDLRRCVSRLRGVLAEYAPEWLACRVFKDWSSAAALGTLERYGCISKLQRTRVSRLGRALSKWTQGRYGETHARTLIEAFAEVVLPSQVEQAYHQVICSLVKQIRALVAERRHLLSLIRAQGESLPAMAELQSEFGYGPELSAIIVSEVGDMADFPSEAGFATYCGVTPVKRKSGVSRGSSRLSRFTNKRLLRAVTQAARTAATHEPESRTYYQRKLAGRSDPHAKTLALIALARHRTRRLYKLLRRVSIQPEELVA

SEQ ID NO: 113514 - protein, 352 aa, unidentified
MWARKMESDNGILCWTGRVVEADIDLRGKSNGIYLQEGVVDSDPDSIASFVRSKAPGTVRIGIETGPTTTWLWTELKRLGLPVICIDARHAKAVLKMQINKSDRNDAVGIARIMQTGWFKEVRVKDLDSHSVRALLASRALLVKIKRDLENQVRGLLKNLGLVIGRAKFNVFAVRAEELIEGRPELVVAVRPLLEARKAIEQQVDDLDRKVQKLARHDAQVRRFMTAPGVGPITALCFKATIDDPTRFKRSRSVGAYVGLTTRRHASGEVDWSGRISKCGDAMLRMYLFEAAGVLLTRVPKWSGLKAWGAKLTKRNGLRKAKVAVARKLAVILHRMWIDGTEFNWSTKKAAA

SEQ ID NO: 113515 - protein, 424 aa, unidentified
MAIRRRTNKVDINALVDLYERCAGIDVHKETVTVCVIRPGTDGSAQGEMATYGTTTRELRQLSQWLQECGVTHAVMESTGVYWRPVWQILETGGFRLFLANAKQVRNMPGRKTDQADAVWLATLLRKGLIKGSFIAPPQIRALRDLCRSRASLVHDRTRVVQRIEKVLEEANIKLDTVASDLMGVGPRMMLEELIQGETDTTKIAELALGRMRSKIPQLVGALEGYFRPHQTFLLKQLLSQFDDLCRRIERFEQQIEKYSRPFDKQVARLDSVPGIDRLSAAAILSETGVDMDPFPTPQQFCRWATIAPGNNKTAGKQRSGKIGRGNRWLRGSLTQCAWAATHDKNSYFAAQYHRLLHRGKRRALVGVGHSMIAAIWHMLRRDVEYRELGADYFEKQNLEGLKKTYLKKLERLGFKVSLEPVAA

SEQ ID NO: 113516 - protein, 332 aa, unidentified
MENKIYIGIDLHKRLQTWVVLGEADNTKLLSRTYPVTPESISRAVSEVTKLGNVCIALVEPVCGWIWVVKQLRELGIEVQISNPRRIRMIADSLKKTDENDAFTLARLLKTGEVALSYECTPETRKHRSLVRERCFLVNTRASVKTRLESIVTRDGNHTFKLQAKNRTQIIVANTEVKIHQDTVDALDVIIKKVEKEIEKSTKLSPSIKRLMSIPCVGLVTASTICAEVGDFKNFKKPDNLASFAGLVPRERSSGGKQRLGSITHAGSAYLRYVLIETALRIREVPETFSLYNFYKRIKTKSGAMRGRVALARKLLTIMWHMMNKGQDYVAH

SEQ ID NO: 113517 - protein, 427 aa, unidentified
MRVLYDRVAAIDVHKDMVKVAVRVPGKKRGTRKTDVLEYRTFYGVLQAMARELRGRGVTHVVMEASGVYTEPVYYALTELDFTEVLVINPAHAKALRGHKTDAKDAVRLLDLYECGALLRGSYIPAPDLKEVRDLARYRVKTVQARASEIQRLQKTLESAGIKLDSVVSDITGMSSTAMIEALIDGERRGGVLADLALGRMRTAGKLADLSMALTGRFTDHHALMCRLHRDRISMFDDAVGELDAKIAPLVARHAREAELLRTLPGFGEVVAAGWLGAIGPAPHRHFGTAERLASWVTLCPGNYISARKSRSGRTGDGGSYIKPLLVQAAWAAIRTPGRLQARFHRLVRKFGGPKNKGARKRAIIAIAHTLLKIAYAVLKTGKPYQEPGADFYTRRESAQARGDYLLRQLQKLNPGCVITITPAEAA

SEQ ID NO: 113518 - protein, 411 aa, unidentified
MEVVHERCAGIDVHKATVVACVRMPGARPGERHSETKTFATTTRGLTELTHWLVGHGVTDVAMESTSVYWRPVYAVLENTVRLILVNARHVKMVPGRKTDVRDSEWLAQLLECGLLRASFVPPRPVRDLRDLTRLRKTLIRERGHHVNRIEKTLELAHIKLGCVVTDLMGKTGRAILQALSAGIDDPDQLAEYAQGLLRKKRAALREALVGRLTPHYAFLLQQHLALIDTLETHIVTLDARIEEAMAPFAEPAALAQTMPGVAVRAAQAILAETGVDMQPFPTAAHLASWARLCPGTHESAGKRQPTTTGKGATWLRATLQEVAWAAVRTKKSYYRALYHRIKGRGGPKKAIVAVQHAMIVALWHMLTRRVAHHDLGADYFERRNTARIRRHHIRRLEQLGYDVVLVDKAA

SEQ ID NO: 113519 - protein, 329 aa, unidentified
MHGVDEQGKASLKKQLKRAQVLPFFANLPPCLIGMEACGGAHYWARKLEQMGHRVKLMAPQFVKPYVKTNKNDVADAEAICESVSRPTMRFVPIKTGEQQAVLSLHRAREGFVKARTAQANQIRGLLAEYGIVMPLGIDNIAKYLPEILEDGENDLPGVFRQLLQRLGEHLKELDRQVDELNTQIQLWHRQNAASRKLAKIPGIGPLTASALAASIGDAKSFENGRQLAAWLGLVPRQRSTGGKPTLLGISKRGDRYLRTLLIHGARAVIRVSERKIEPADDWLTRIVARRNKNVATVALANKNARIVWALLAHDREFQPDYAPAVAGV

SEQ ID NO: 113520 - protein, 429 aa, unidentified
MSEEKPLELRVSVDVGYRRHSVAMGLSSGEVLEEFEIDHRLEGFQEFFTRIEKHRKKEYCAVAVAMEGYNGYARPLDSMVRQRGYRLYNLNNLKFARFKEIFPGAAKSDRIDARKGLELFQLSDHLALAKEVLQEVSGTAPENEILKRLTRRRRRLVNERVRVVNNLQADLQAVCPGLLEITGEASNQWFLNFLLSADTLPQLARLKRSTLLKIPSVGVKSAAIIEHWQKRAHFSQEVEWVSEMIQEDAKRCLELDEKIKRLQAKIAEVAKNSKIAKTLRSIPGFGAVCTSELAGEIGTIERFASEGSLSLYLGMSMLDNSSGKYQGTKAPKHVNTRAKAAMMIGVDRHRKYVPESQRYYEKKRSEGKKHNQAIRALGRHLARIIYKMLKQEREYEIRPEKGDTKAKVGPRSFVKTKIRRPKISSKETK

SEQ ID NO: 113521 - protein, 385 aa, unidentified
MDDITYVGLDVHKATVCVAVAESGRGGEVRQVGVFQNRPEILCKMAAKLGRGGRRLSFSYEAGPCGYGLHRLLTACGHSCVVVAPSLIPMKSGDRVKTDRRDAMMLAKLHRAGELTAIWIPDATHEAIRDLVRARATAGRVLSKARQHLQGFLLRHDRIYRGARAWTQAYWRWLTTVRFEHPAQQIVLQDYIHAVEDAEARRDRLTRQIEEMLPSWSMAPVVAALQAMRGVALVVAVTVVAEVGDFRRFANARQLMAYLGLVPSEHSSGSTIRRSGITKAGNTLVRRVLIEGAWTYRMTARVSRKLHDRRAAIPGDPGHCVESAGPPMRAISAPSRVRQAEGRGHHCDRPRNGRLHLGNRLHRPASSCLIQLSNETDGRTGSRAQ

SEQ ID NO: 113522 - protein, 337 aa, unidentified
MTMLPTFVGLDYHQSSVQVCVMNAAGEVLANRKCPNDWRAVARAVGERGAQVHAAIEACGGAADLADELVQQAGWSVDLAHPGYVHRIKQSPDKTDYSDAQLLADLERVGYLPRVWHAPQRIRELRRLVRYRQQLVAQRRSLKLRIRALLRDHRLTFTDARAWTKVWLAWVAEGAELPPWSRWIMNQHLSELTHLTERIREVEALLADLAQEDRLIEELLKNPGIGLVTAVTIRAEIGRFDRFRNGKQLGRFCGVSPRNASSGQRQADAGLIKAGNAELRRVLTQAAHRLIRYEPRWQALACQLKQRGKPIPLVVAAVANRWMRTLYHQLQSYGLAA

SEQ ID NO: 113523 - protein, 400 aa, unidentified
MRVVFGIDVSKVSSEVAILVNGEKVHGYTMSNDAIGFSRLLGDLKTVHKPEIIFEATGVYSRHLQTFLDEHGYAYTRLNPLEAKKQLDSLRVRKTDQIDAEKLAQSQFVLNRKTTYVQKEVYQNLRDLSRFYQNLTEDIVRAKNRLHKALQVTFPELENILSTPTGEQYWNLVIAFPCKDFVLDLSKDELSESIRQSTSKRISDKRVAYLAEKLIALANQSYCAVKKNSPMLEEVRYYTKELLRLSEQRQAVLDEMVELAQPLPEYDILLSIPGIAETTATSIIGELGDIRRFQSANQINAFIGIDLRHYESGNFLAKEHITKRGNPYARKILFKCIHNIASASHTNPCHIADFYEKRKRQSQTTSTKPHTIASIHRLIRTMYYLIMHNKLYDYASTQNR

SEQ ID NO: 113524 - protein, 412 aa, unidentified
MDGSMEIVYKRCCGIDVHKKEIVCCLITGQKKTETRKYGTLTKDLQELTKWLKEEGCEKIAMESTGSYWKPLYNIFELEGLEAIVVNAQHMKTIPGRKTDVNDAQWIAKLLRHGLLKASFIPDRQQREYREITRYRNSRIEERAREKNRLQKMLEGANIKLSNHVSKITGVSSLRLLELAMGEEELTKENISKYRHHNCKSSVEGFLDALTGIITPLQRELFRQVLQTIEEQSRQIKRIEELIQTHTTEEYDKAAKALEAIPGIGRASAEQIVAEIGVDMERFQTAHHISAWSGIAPGNNESAGKKKKGKSLKGNKTLKKTLVQCANNAILNKESFFYAQYQRLVVRLGKNKAKVAVAHSVLIAIYHVLSGKEFKDLGADYYTQFNRDKKINAHLKQLQKLGWVPESPAMAG

SEQ ID NO: 113525 - protein, 366 aa, unidentified
MSKSSTVVNNRVEIFKDDKLTIGVDLGDRFSHYCVLNGAGEIIREHRLPTTPKGIDEVFSKIPTSRVALETGTHSPWISRQLARWGHEVIVAHARNVRLIGGSSRKDDRLDARTLARLARIDPGLLGPVRHRSAKAQIHLTVIRARAGLVSARTALVNAARGLTKSYGERLQKCGTQQMNRESAKGLSQELRDALDPLLAEIESLNTRIAEYDRRIEQIAKEVYPHVALLKQVKGVGTLIALTYVLTLDDPHRFRRSRDAGCFVGLRPGRRNSGMSQPQLHISKEGDRYLRTMLVQGAHYILGPFGEDSDLRRWGMRLAERGGKNAKKRAIVAVARKLAVLLHKLWVSGEVYEPLRNSHKVIGQVA

SEQ ID NO: 113526 - protein, 393 aa, unidentified
MACVRMPGEEGARAEEVKEFGTTTNELLALRDWLTANGVTLAGMESTGVYWKPVYYVLEEAMECWLLNARHLRNVPGRKTDLKDAQWIAQLVEHELVRPSFVPPKPIRELRNLTRYRKAQIEERGREAQRLDKVLQDAGVKLSSVATDILGKSGRDMLNALVRGTRDPEVLAELARGKLRAKIPALREALLGRFSNHHALLVSSILAKLDFLEEIIGSLSEEIDRVIAPFGHHVERIVTIPGVDKRVAEALIAEVGVDMAVFGTPDRLASWAGMCTGNHESAGKQRSGRSRKGPKWLQACLTEAAKAAGRTKNTYSGSQYQRLRGRRGPAKATKAVGHSILVAYFYIIQNEVPYRELGPDWFARRRPEAQARKLIRQLNVLGYAVSLTPIQAA

SEQ ID NO: 113527 - protein, 351 aa, unidentified
MKTIAKAVPVTIGLDIAKSYFQVHGVDGLGQVVLRRKLSRGEVLGFFEAQPKVLVGIEACGTGHYWAREIAALGHEVRLLPPTYVKAYVKRGKTDAADAEAICEAVTRPNMHVVPIKTSEQQAALMMHRSRELLVGQRTALVNALRGHLAELGIVTAKGIHRVADLLAELVGEENIKIPPLARASLHCLAAQIEAMQTQIDKLETLILEWHKGNEASRRLAKVPGVGPITASAVVATIGDASNFTSGRHLSAALGLTPRQNSSGGKARQGGISKAGNTYLRRLLFIGAIAVIRSKRAQEASSWLARLIERRPAKVVAIALANKSARIIWAMLRRGEAYRAPTIHAVAAAAA

SEQ ID NO: 113528 - protein, 408 aa, unidentified
MGRAAEVVAPSSSIRTDGGCPVAQVNDLSRSLTAFDPISTLVVVVEMSKASWLVNGVVPGVERQPLKKLEPDATALLRLIERWRNEAVRAGRPISRIALAYEAGRDGFWLARWLIARGIEAHVIHSASVAVSRERKRAKTDRLDAAMLMRVFLGWLRGERGHCGMVAIPTMEEEDARRPSRERESLVDERSRITNRMKSALARLGIRGFKPHLRKAPERLAGLQTAEGTGLPANIIEEFRRDMARLALVREQISSIEKTRAERLERAPDTGPHAMVRLLARVIGIGIETADMLVREILSRKLRDRQAVARYAGLTGSPDESGLKRREKGLAKAGNARVRRGLIQLAWRFLMFQKDSALAQWYRTRTEGPSGARKTTMIVALARKLLIALWRLVTTGEVPDGVELRPAA

SEQ ID NO: 113529 - protein, 365 aa, unidentified
MEECIIKSVISGMDVHERTIKVCTAAHDGATEVKTFANTEEGRAALIRYLQSLAKKYGCGKIETAYEACMLGFELHDALSDAGIVNHVLAPSLMRKSRKDVKRKTDEADARMIFETLRGHLLAGNELPAVWIPPPELREDREVVRARLEVGNKVTQIKTQIQMLLKKHGVRKPAGLGDSWTMLHRKWLHGLLTCGGPALPPGGKVVLSSLLRQLAMLEKEIQTLDEAVEALSHKPRYQIACQALVKQIKGVGLLTAMVFLTEIGDLNRFGNRRKLGAFLGLAPTSNESGEVTNRKGHITRSGTSRVRWVLCQASWVRLQHDEAESAVFERIRKGAKKLTRVAQTACMRRLAILMWHTAKDAAAAA

SEQ ID NO: 113530 - protein, 397 aa, unidentified
MYIVGIDIAKRKHEAAVIDGEGAVIIKPFSFTNNCSGYNRLLAMLTKAKLPLDEVSFAMEATGHYWLALFTRLQKEGFRVQVINPVQTNSIRSFYIRQAKTDPRDALLIAEVIRFGHFSESTLHPENIYELRELCRGRHAIVSMQADVKRKVVALLDQVFPEYETAFTNMFGDTSMAILQTCPTPKELSEMPLEELCHLIEVSSHKRFRMAKAQELQELARSSFGFAMAGDVFSTMIRLYAKHLDFLKQQVREMDRKIAEIMDSLDTPITTITGIGPTLGAYILSEIGDISRFSSAAKLAAYAGIDPTMRQSGEYNGVRNRMSKRGSPYLRHAIWLAASSAVLHDPALKLYFQKKRDEGKPYMASVGHACRKMVSIIYAVMRDNKTYTPHIPNEISA

SEQ ID NO: 113531 - protein, 432 aa, unidentified
MISVSPPVAPENSVFAAFVGLDWADQKHDLVLYDQRGGRPEHRELAHTPEAIDEWACGLRQRFGGRPIAVCFEQSRGGIAYALLKYDFLVLFPLPPARLASYRESFSNSGAKDDPTDAALLVDYLLRHRDQLRVWQPDTPATRELQLLSEARRDAVDQRTRLSNQLTDVLKRYFPQAVVLVGRDVDCPLACDFLSKWPTLAAVQAAAPATLRKFYYAHHSRKEERIAERLELVKSAIPLTTDLALIHAGVLQVQCLVGQLRALAKAIEKYEARLNELMDQHPDAALFRTLPGAGPALAPRLLVAFGSDRERFQSAAELQSFSGVAPVTKRSGKKCHVHRRWACPKFLLQTFHEFAHCSCKRSAWAKAFYLQQRSVGKGHHAALRTLAFKWIRILFRCWKTKIPYSEERYLESLRRRNAPLLAFLITAESTDA

SEQ ID NO: 113532 - protein, 362 aa, unidentified
MPRKRILVKSIDTSISYQVIGIDLAKHLVSACLITGAGEIFGIDRLTYDDLLKSAERMSPTLFCMEPCPEVHYLAEKLQGYGHHTKVIDGAAVKEYIKTHFGGQKTDLNDAQAIAFLSLDTNLPEITPKNTSNSVLSSIQAVREQFRKEYIQSFVSLKGICQRWGLPISKGVMNKNKVEELVSESKKIPQEVKDWLLELLQSCRELQKRLNKISKYLKEYADNDEICQKIMSVPGIGPITATRLKATIGDIQRFEKPKSIVAYYGLVPKSKATGHNEKKGGITRRGDRVARSLLIEGAGVVLNLAAKGFLRSKPLNKWIEKKRKLKMPWGKLCCASGRTHQKLSNEPRYRSPFIGDLTRGTF

SEQ ID NO: 113533 - protein, 475 aa, unidentified
MAKRTAQADLQVIPRLSRETLYVGVDIGKKTHVAGFVSTTLLSRHQRFEHCPALSFENSREGFRSLVDRISSYVPLTQVYVVMEVTGHYHRPLLHYLQELDFPVYVMHVQKRQEGLLKTDKRDALGLGNLLFNQLEKGIQMGDPMQAVRRLAPPTEAASQLRGMVQHRQELTVESTRRKNKLTSICDEVFPEFVQILKDPNLPTALAIRKRFPTPAALATASLLDLQELRGKNRSLSDAKLLEWQRLAVQSIGTKEPARLRGLIFEQTQLIAELELIQAHLEQLETEMAQVIDHCREGKILTSIPGIGPTQAAAILASIGTIANFERAAQLKSYFGWAPSVAQSGSTLNHVRLTPRGQRQMKLTMYLVVWQAIRLKDSEWSKIYERLVPIKCSFNEKTHQYAGRGKVIGRIAGQMISVIYALLKQDLETLSKTPSGAKPPDPVLYNPEIHHKHRAGQYRASVQKKPRNVIELPPH

SEQ ID NO: 113534 - protein, 403 aa, unidentified
MQYLGIDLHRKQMTVSLRNHNGDVLLRRQVSTRWPKLEEFRNQLHQTLADGEKYVAVVEVCGFHDWLVQWLNRDERCLQVLVVQPLGRSASKTDRRDAHGLSELLWVNRERLLRGERVHGVRTVQVPTESEQADRCLTQTRERLVRRRTQTLNQIHKILRRRNLEWERPTKTFQTVKVRRWLKTLPLDPIDRLAMDHLLVQWSLWDEQLVAADGWIRERFLANRNAQLLATMPGVSRFIGLAIACRIAPMERFPQGRSLANFLGLTPGCRSSGDTERVGSITKIGSRMVRYLLAQAIQHVLRRDGSIRAWYQRLKRRRGSKVARVAVMRRTATIMWRMLSTGEPWRCGRARSEMPEADEPRQTRVPQDGPAEQLAPSADPELAGFNTGSSSLLAGEEVAPCPA

SEQ ID NO: 113535 - protein, 406 aa, unidentified
MIFVGVDWAEAHHDVLVSDENGKRVGGGRLAEGVEGIARFHDLVAKHVEDPGQVVIGIETDRGLFVTALVAAGYQVFAVNPLSTSRYRDRHSVSGAKSDPGDAKVLADMVRTDRHNHRLVAADSETVLAVKVLARAHQSMIWSRARQTNLLRSTLREFYPAALAALDDLDSPDALEILRVAPTPELGATLSRSKIAAALRRGGRQRRIDERAGEIQTALRAPQLAAPAAVSSAMGASVAASVAVIATMSAQIAALTAELEAGFDQHPDAKVVRSLPGLGTILGARVLGEFGDEPNRYATAKCRKNYAGTSPITRASGTKKAVLARHVRNHRLADAIYLWAFATLTASPGARAFYDAHRAAGDTHHAALRALGNRLVGILHGCLEHRSLYDETIAWGHRGYKLPQAA

SEQ ID NO: 113536 - protein, 315 aa, unidentified
MEAAAVVVGIDVSKRTLEVALSSGGGFRVTNDEDGISELLARLRPSGAALVVLEASGGYERAAYLALWEAGVPTALINPRDAYHFAQAHRQLAKTDQLDARGLCEFGLRMQPQPLPPPEAADEQLKALAVRRRQVIKMLAAERTRVQQAPRAVRPSVKRMVRALARELGAVDHQIEQRLRDNPRLAQRCAQLEQVPGLGPVTCAILVSRLPELGRLGPKQVAALVGVAPYDHQSGQWRGRSPIFGGRAEVRSALYMATLSAIRCNPLLRSFYHRLRAAGKPAKVAIIAAMRKLLVILNAMLKTNSPWSPPCAITT

SEQ ID NO: 113537 - protein, 362 aa, unidentified
MTKSTTIIAFDQHAATTVAAVLLPGHRAPALQTLASDSPTILKFVERLRREAPITCCYEAGPCGFELQRALRARDIACEVIAPALIPRRAGDRIKTDRRDAGQLAVLYRAGALTAIHIPTEQEEAARDLLRCREDIRADLLRARHRLSKFLLRHGRRFIGTKKAWSKRHDTGLRAQVWPLPALDQTHRAYLRAVDETLARLRDVEADLRALLDLEPLRPRVQRLRCFRGIDDLTALTIAAELGDARRFATAPSTMAFVGLVPSEHSSGTKRAQGGITKTGNSHLRRVLVESAWHYRHHPFVSAALRARQRGAPADVIARAWNAQQRLHRRYARLAARGKPKQHIVTAVARELTGFVWAALTQ

SEQ ID NO: 113538 - protein, 343 aa, unidentified
MQTITTIGLDIAKSVFQAHGIDAAGQVVMRRQLKRRFVLSFFEKLPPCLVGIEACASSHHWSRELQALGHTVRLMPPAYVKPYVKRQKNDSTDAEAICEAVTRPNMRFVPTKTAEQQSCLMLHRARHLFIRQQTAVINSIRAYLAEFGIVAPVGRRGVEQLLEVVADTADDRLPGVARACLAALGSQLRALKAQILEFDRRIIAWHRSSATSKRLDAIPGVGPALATALVASIADPKAFRSGRDFSAWVGLVPKQNSSGGKDRLGSIRKQGDRYLRSLFTAGALAVIRYAKIHGTGHRPWLTGLLARRPTKVAAIALANKLARMAWAMMAKNERYQEPAALAA

SEQ ID NO: 113539 - protein, 352 aa, unidentified
MQYVGIDWAYRRAAWCALSDGGAISGEGMVPADEDGLARLVLTVGREVRACVEMMSGAVWVRDRLAAAGWKVEVAHARKVRDIAPLACKTDKVDARVLAELCRRDLVPALWLPSLEDRALRERLRRRMHLVRLRTSARNRIFGLLTQWGLRLSLKRLRAPDAMDVLAACGVEEAWRRSIAEALEVIDLLDARIAPLDAELRPLAAADPRVLLLRTIPGLGDLLGLTFAAEIGDISRFSAPRKLIGYAGLAPKISQSGDRSRTGALSKAGSRTLRWAAVEAAHQSWRPTNPWHELYADVTRRAGKNPAKSAVARKVLIAAWHVLSREQPFNPAGPRNTASTTVPASSRCFLAA

SEQ ID NO: 113540 - protein, 357 aa, unidentified
MEYFAGLDISLEETSVCIVDEHGKIIRESKVATDPDALMKELNSLRVTYKRVGLEASSLGGWLHVELTARGFAAIVVEARHMRSSLNAQRNKTDRNDARGIAQMMRMGWFRAVHVKSAEAQRLRLLLANRRLLKRKMIDIENHIRGALRAFGLRMGTVARGGFEARVNELTAESDGAMKAFVVTMLEVWKAMRVGYNALHKTLIAVVAADPLCRRFMEIPGVGPIAALSFRAGVDDPLRFTSSRVVGAHFGLTPRKWQSGTIDVDGSISKQGDVDVRTALCEAAASMLLRSKKWTALWAWGLRIAKRSSMKNAMIAVARKLATIMHRMWIDGTDYIFGKGAAVPEKRILIGTVVEQE

SEQ ID NO: 113541 - protein, 396 aa, unidentified
MAAIWAGIDAGKTHHHCVAIDESGHRLLSRRVANDEPELLELLTNVLALGDEVTWGIDLADGGAALAITILLNHDQPLHYISGRAIHRASESYRGDGKTDAKDAAVIADQVRIRRDLQRLRTGDETVTDLKILTGRRMDLVADRTRTVNRLRAQLTDIFPGLERALDLTNTGPLTLLTGYQTPASLRRTGKKRLETWLRNRKVLRPDRLAETAWGAAVRQHTSLPGEKLTAQLVHTLAAEVMALNQQVAELDKAIEARFREHRDFEVITSMPGLGVILGAEFLAATGGDMSLFGTPDRLAGFGGVAPVPRDSGKISGNLRRPRRYNRRLQRVFYISALFSIRICEDSRRFYDRKRSEGKRHIQAVLALARRRVNVLWALLRDGRPYETVPPAALPA

SEQ ID NO: 113542 - protein, 376 aa, unidentified
MSHYIGLDVSLKTVSICILNKEGKISHETCVVTDPQAIVKAIAQTNLSVEKVALESGGISHWLITELVKLGLPVVCIDARTMSAAISMRTNKTDKNDAREIALALRAGYYKEVYHKPQSLIATGTLLTTRRLLVDQRTQITNSIRGLLRLHGKLHLGGSSNSEKFKATVLEALKSFAPDIQDGIIGLLNTYEVTSKQIEDLEDRIEAVEKGNADIQLLQTIPGVGLITAVTFVLEIGDPKRFKNSRAVGAFFGMTPTQYSSGDTQKQGAISKTGSKEMRSLLSDAAMCMMYSCKAWSYPKVFGLKIKKKHGHKKAIVALGRKLAVIMHRMLIDRKPFDPGTIEQKEIEKLTAQSKQEKKASKKNTPKSNKDTKERP

SEQ ID NO: 113543 - protein, 353 aa, unidentified
MLIIGCDFHPGFQQVAIFDNQTGEYQEKRLSHRQEAEQFYRSLAGQKVRVGMEACGHYPWFERLLADLGMELWLGDAAKIRASVVRKQKTDRRDAEHLQVLLREDRFPRIWVPTLEERDARQLLVHRHKQVQARTRTKNQLHALALSQGVQKKRKLWTEAGRAELEKLELLPYAAIRRERLLETLDRLEAEIAALNRQVEAEVQQRPAAVRLMTHPGVGPVTALAMVLTLGPAERFASPKQVGSYFGLIPSEYSSGGRQRLGHISKQGSSFLRFLLVEAGQSAARYDPQLGRFYGRLAARKHRALAKVAVARKLATRLYLMLREDWNYAQLCRAVVQASPSHSVVEQQKKPTV

SEQ ID NO: 113544 - protein, 395 aa, unidentified
MFIVGIDVAKRSHEVCMITSDGQTVQRPFSIRNNCTGYNLMLEKIRKHTNIKSQIVFAMESTAHYWLALFTRLRKDGYHVILLNPIQTSAMRDMFIRKIKTDAKDSFIIAELIRFGRYAESNVAQDRLLALKELCRNRFYLVDMAGDLKRKLIALIDRVFPEYEAQFDTIFCKSSVAVLKKYPTPQKFSNAHLDKLTELLWNSSNGHFGEWKARELRELARNSFGVEDCDGAYSTLILLMLDQIQSLSGKADALEKEISRLFQSFDTTVTTIPGVGPIIGAVILSEVGDISRFSSADKLAAYIGVDPSVNQSGEFQAAHAHMSKRGSPYLRRCIWMASQVAVQRDPMFRAYYEKKAAEGLKYMTIIGHVTRKMTAVIFAILRDHKVYEPVLPTAA

SEQ ID NO: 113545 - protein, 316 aa, unidentified
MAAIICGVDVSKDALDARIGLKGASLKVSATADGVDELVAFCVTHDASLVVMEATGGYERVAFSLLWARGVACAVVNPRSVRRFAEALGFLEKTDDIDAGVIARYGEVKGIVGQEPASDAQERLRALTTRLRQLTEAAVVQKNQRRLVTQVEARASCDRTIAFLNGEMRLIEPQIAELLGADPLWKALDAAFREIKGVADRTVARIMAEIPEIGTLSNKAVAKLAGLAPMANDSGQRRGKRSVRGGRSHVRSIIFVVADLARRHNPDLADFHKRLTQAGKPKMVVRIALARKLLVRLNAKARDVRNDFAAKLEVPA

SEQ ID NO: 113546 - protein, 401 aa, unidentified
MANTHKVDRTLSHSSLHRLDDMERVRASCLSSPALMQYIYKSSTESSSLEETRSQFNGGRCTIKLGIDVHQDFYVVVMQEGASNPKPPQRFRKEAFLHWVARLKQRGAQVHALYEACGFGFSLQRKLRALGLHCYVVCPQKLDEQNKRVKTDGLDAKALCLKLDRFVEGNRDALALVRVPSEEEQPARVIHRQREQLVKARKQLEAHGRSLMVNHGIEPVVQQWWKPRAFAQLQVPDWMRALLCNSQPILLGLQEKISALTVQLQSAASANQPRGLGLLTSVIIDREIGDWHRFNNRRQVGSYTGLCPGEYSSGNSRLQSCVTKHGNPPLRAALVELAWRLIRFQPNYRAVIKWRRILAKGALATGAARKKAIVAVARQLAIDLWRIRTGRCSAQQLGLTI

SEQ ID NO: 113547 - protein, 371 aa, unidentified
MNYNTVYVGMDVHKESFTFCAYTIDAEKGSHFQRTEADYKNVLKYLEFLRTVYGNDANFICGYEAGCLGYTLYHQLTEHHVNCVILAPTTMLEQRSKKRIKTDKRDAEIIAKCLAQHNYSPVHIPTAADEETKEFLRMRDDHKLALKKVKQQILAFCLRHNYRYDGNSHWTAAHIKWLKSLKPEALYKEILDEYLLTYTTLSDKLERLDKRIEELASKDEYRESVKKLCCFIGIKTHTALSVLIEVGDFQRFASAQKFASYLGLVPGEDSSGESYHRLGITKQGNSTIRTTLVEAAQVLVRGTIGKKGKKVKSKQKDQDVKVIDYADKAVIRLQKKYHRMIFRGVKRNIAITAVARELACFIWGMMTNNIA

SEQ ID NO: 113548 - protein, 389 aa, unidentified
MIYVGIDVAKDKHDCCILGSEADKIYPVFTIPNNKAGFDELYEKIFSVTDDLNEIKVGLEATGHYSLNLLGSLIDKGLTTCVINPLHTNLYRKGLSLRKTKTDKVDAGSIAMMLMTNKTLKPYSDTSYHSEELKSLTRYRFDKVQERAKLKSSVARLINILFPELEKLVSNLHMASVYALLSEFPGASYIAESHLTHLRNVLETASKGHYGRDMAVTIRDAAKDSIGSVMPAKSMELKHTIHLIEVMTDEIDEIEASIKSIMDTCNSPIMTIPGISYRMGAMILAEIGDFTRFSNADQILAFAGLSPSTYQSGQLDSSYSHMEKRGSRYLRYALFNATKFVCKWDENFGAYLSKKISEGKHYNVAVGHATKKLIRTIYRMELTGEAYRK

SEQ ID NO: 113549 - protein, 350 aa, unidentified
MLYTGLDLHKSFSYITIMNDRGEVIGQKKLPSNGEILDFLKGFEDSMEVAIEATPSWYWLYDCLEDEGFEVKLSHPLRTKAIAYAKVKTDKVDSATLAHLLRSNLLPLSYVPEKPVRLNRELLRYRASLVKIQTRIKNKIHTILAKNNVSHDYTDLFGKAGMAFLHSLPLPENYKIALEGYLCVLETVRHEIGGASKRVQQLAEDDQDSMLLMTIPGVGYYSALLIKSEIGDVKRFPSAKQLCSYAGLVPSTHASGNVCYHGHITKQGSRWLRWILIEASIHVVKRPGPLRRFYFKIERKKGGQIAKVATARKLLEWIYHILKDSKSFQEVEKVVEAIARGEPVNSSGNA

SEQ ID NO: 113550 - protein, 313 aa, unidentified
MPQSECYVGIDVSKGTLEASAYPDGSRVEEVNDAKGRRALNRWLKRKAPTLIVYEPSGGYERPLAHSLSEAGLAHRRVDAWRVRRYAEALGRRAKTDRIDAEVLARFAAVAAEEQGPEAEESAPPQLVSLMAARTQLVAEQVRLAGQLDQVGDPLAKRLLEARLKLVQRQMQIVLKAVRKRVAEDPILQRRFQVLCSAPGVGEITALTILAELPELGRRDSRRIAGLVGVAPRDRQSGKTRGRSAIQGGRSGLRRVLYMAALSTARTKGKWAGLRQKLTERGKPPKVVLVAIMRRLLVVLNAMLKNDQLYQPA

SEQ ID NO: 113551 - protein, 359 aa, unidentified
MVYLGVDLHRKVSHVVALDESGEVLLSRRFGNDPAEFRRVFGELEPAPIEVVFEATYGWGWFADLLADAGIPAHMTHPLATKAISAGRVKNDAVDARTLAHLLRTNLLPEAWIAPPEVRAARRLVRMRTSLMRIRSRLKCQVHAICADLGVPIPVSDLFGARGRELLTTLALPVVTAGRLEANLRLIDTLTAEIRLADREIVRHFRADPRIRRLTPIPGIGFLTAAMIVAEVGDVGRFETPERLCSWAGLTPTERSSADHVQRGHISKQGTRWLRWVLVEAAVTASRGPSLAGFFGPIRERRGTKIARVALARRLLTLAFYALRDEAGCRAYPILPRPSRSTRARSPYGMASSDGRDVD

SEQ ID NO: 113552 - protein, 404 aa, unidentified
MAVYAGIDWGATAHAVCVLDESAVPLAQFEIKHEAAGLAELGVRLRKFVHTPSELRVAIERPSGLLVDSLLDAGFALVPIHPNVVKASRPRYRAAAGKCDRSDAYLLADLLRTDGHRFRALAPECDAIRALRALVRSRDDLVRHRVALANQLRSLLESFWPGAAALFAEVDSPIALAFLERYPTPHSAARLGQKRLRSFLATHAYCGRRHPIALLARLRNAAHVPLGEHEAEAKGELVQALVRILATLVAQLATLSARIEHDVAALPDGQIIMSFPRSGRINAAQLLCELGSVRERFATEAQLAAEAGVCPVTYQSGKFRGVVFRWACNHRLRAALITWAGNSRHACPWAAHLYHGARRRGARHPHAVRILARAWVRVLWRCWIDQRPYDPAKHHAAASLLATA

SEQ ID NO: 113553 - protein, 423 aa, unidentified
MTKRVSTPTGVVLVAIDMSKHRQEVLIERPEGGRRRRMTVMATKQDYDRLAADLTAIGRPILVGFEATGNYHRTLAYRLLTAGFELRLISSVALARTREALHNGWDKNDPKDAQVILHMLRIGATQAYVDPLAAGINDLQELSKTHETISKVKTQTWHRILTHYLPLYFPEIGRFAGNSRSDWFLALIERFPTPGSIIALEREAFVAEAWPLVGRKVSKARLINDIYETACSSIALPVPEESTAITMFRMIIAQARSLIRERNRIEEIAQVTLADHHDYQLLRRIPGIGPINALTILAEAGDLRRFGHHRQFLKFCGLDLATCQSGTFRGRTKLSKYGNARLRRTFWMAAQVAARQCDNSFRDKLGRYVAGHAGDADRRRKAMTALTAKMARVAHAVVKTGTEYRPFLERSGTRWKDPSLQEP

SEQ ID NO: 113554 - protein, 414 aa, unidentified
MLKIVYRVCCGMDVHKSFVVACIAATNEQGVTTYKSKRFSTFTGDLRRCAAWLAENNCKDVCMESTGKYWIPIYNILEHTCNIVLAHPKYVKAIRGKKTDKRDAKWIADIFKHDLVAGSFIPPADIRQLRDLVRYRWKLTNFTTGEKNRAQNCLTVSNFKLDDVFSDVFGKAASAITTRILENPAEKITDVSSFRTKRMKATDEEILAAVDGEMCEEQAEKLRIIRSHMDSLELCKLNLESLILSTAEKYLPQFNLVMSAPGIQSFAAIGIISEIGVDMSVFPTSKHLCSWAGLTPQNNESAGKKKTTRISRAGAYIKPLLVQCALCAIRAKQFPEVRNRYLALKKRRGHKKAIIAIARMLLTAIYNMLKKNEPYNPELYRQADRPPTHREVSVEEAIFILQRQGYLVTAPSVT

SEQ ID NO: 113555 - protein, 324 aa, unidentified
MKQEIGAYAGIDVSKKTLDVTLLNEKGGKRRKRVANTAKGIQKLLKWFKKQTKVQLHVCMESTSVYWEDVAEILYETGYQVSVVNPVRIKGYAISKLSRSKTDPLDGDVIAEFCQKQSPDVWEPPSAVEKKLRALVRHLEALKKSRTQQSNRLSTCKDEDVKNSLDTLLNTIDAEIKQVKKQINDLIDQNPDLKERKELLKSIPGFNDKTAIHILAEMYDLPNYKNAKAVAADVGITTSHHESGTSVRRKPKISRMGKAAIRAALYYPAITALQHNPAVQKLAKRLEARGKTKSVIQGAAKRKLMHLAYGVVKNGKPFDPAYTG

SEQ ID NO: 113556 - protein, 323 aa, unidentified
MAKRNTICAGIDTGKRKLDVALDGSSERIQVDNTPEGYTVLLEWLKRHKVRRVGIEASGGYEQAVVAELRRKRLVVVVFQPAQVRAYAVFHLKRAKNDRIDAALIATCTAAVKKIHPAPDPRLQPFAEHLTMIEQITEDIARLKNRLESCRNARVQKLWKEDIARLAKRERVELKALAVAIREHHDLAERLDLINSIDGIGLKTAIIILVRMPEIGQITREQAAALAGLAPYDDDSGNHVGFRHIAGGRERLRRALFTAALPASFRWNPQLIAFYGKLTGAGKEHKRALIACARKLLIFANTVVARGSPWQKKSPEVASVPAT

SEQ ID NO: 113557 - protein, 335 aa, unidentified
MHYLYYVGLDVSKETFDASLVAFEDANEMAHRKFANSRKGICSCLHWVEKRHGIRLDDVIFCAEDMGSYISEMAVCASDRTLTFNFSLISPLVIKYSMGIARGKTDRVDARRIAEYAITHYRKIALYLPAEKELCQLRTWLILRAHLAKQRVAKLVLLEKLDYKEKFADVSIQRSMLQEEIAYAETHMKTIEREMKELIAADSNICRNYKLLTSIKGVGPITAIVMLCSTLNFTKITDHRKFACYCGLAPFEHSSGTSVRGGCHTSSMANRDIKVQLNRSALIAIRCDPQLKTYYERKVAEGKHKFSVLNAVRAKIAARCFAVVRRGTPYVALQI

SEQ ID NO: 113558 - protein, 322 aa, unidentified
MDRHILGVDISKNTFDVALLREGKFKHKKFRNTASGFKELSTWLDRLKATSLHVCMEATGTYGEALAQYLFDAKHQVSVVNPARIKGFAQGELMRTKTDKSDASLIARFCLMMAPSLWAPEPYEIRLLRDLSRRYESLLEMRQQEVNRLKVTGDELQIDIEKHIAYLDVSIAETKKRIRDHIDDHPDMKRQKKLLESIPGIGEVTINVVLSEFADISRFDSAKQLASFIGLAPRHRLSGTSVRGRASMSKIGNAKVRKSFFMPALVGMKYNPVLIEMRKRLLKAGKPKMLIVGAVMRKLIHIIYGVLKNNQPFNPDFQVKNG

SEQ ID NO: 113559 - protein, 352 aa, unidentified
MEKNNKLDFGGQHIYVGMDVHKKSWSVSIHTEQFEHKTFTQPPEVEKLTYYLERTFPGATYHTVYEAGFSGFWLHDKLREKGIDCMVVNPADVPTKDKERAGKRDRVDCRKLARGLRNGEISGIYVPPRVKVEDRTLMRTRQSMVRKQTRCKNQITSILFFYGIVIPEDGRWSRRFINWIESIRMERASGDFALKAHLEELKHLRQIIANLNKAILSLSRAEEYRADVLLLKSVPGISTLTAMILLTELADLSRFASLDKLASYAGLVPDIRSSGETEYSAGITFRRNAALRALLIESSWIAVRKDPALTMAFNKLSTRMKKTKAVVHIARKLLNRIRFVLKNRQEYVPAVV

SEQ ID NO: 113560 - protein, 446 aa, unidentified
MFPLHYECAMEGTTTTNMINVNELVTLRVCIYKVTLLSVCGFITFDNSNKEVFILIFIGIDIAKDHHDIVIIDDYGEIIKEHFQINNDKAGFKKLHTEIKSCMKSLNDIHIGMEETGIYHENLRDFLISKGFTVYTINPLLTSYSRKASSPRLTKTDKIDATAICRYIMNNVRLLHSYTPSLYYIDELKQLSRTYHHKKELLSKTKMELKRLLQISFPEFTKHFNPYAKWSLDILGEYPLPTSFKGLHIEVLAARIKTKTDRLSKATLLKQLAKDSIGKCDDLRSFLIRSIVSDFIHYESQIKELRKIITDKMSIFPKIMSVPGIGPINGATILGETGNINRFNNKHEYYAFYGCDPIIHESGNYKLKKSRLSKRGDKYLRTAIYSASRIACVGPHNIDNKFRRKYQVMYSKDNKHHNTIIFAVGKNMVHSIFKMLKNDEFYDDSK

SEQ ID NO: 113561 - protein, 416 aa, unidentified
MRPEAWFAGVDWASEAHHVCVVGGDGSKREERIFRHGGAGLAEMADWIAARCGGSAPEDIPVAIEIPHGPVVESLMDHGFAVYSINPKQLDRFRDRYSPAGAKDDSLDARVLADALRTDLRHFRRIDPVDPVVIELRAWSRIDEDLTRDRTRLSNRVREQLWRYYPQILEAVGNLVEPWVLDLWAKVPTPAKARRIQRRTLERLLKRHRIRRITADQLQEILRAPAIAVAPGTTEAAVAHIKSVSERLRLVHRQLADAKREIARLIDVLADSEDSGSGQPGGQRDVTVLSSLPGVGQTVLATLLAEAPQALARRDYKALRCMCGVAPVTRRSGKYKLVVRRMAAHARLRDAVYHWARVAVQRDPVSKAKYAALRGRGHGHARALRSVSDRLLAVACAMLRTQTCYRPPCPAEENAA

SEQ ID NO: 113562 - protein, 410 aa, unidentified
MGQATRVWHLWRFHATERRSMSQPNDSNKSVIPLEQDGTMITVIEMGQASWLVAGIVPGLERQPLKKIGSDEQALFQLLRRWRNEAVQAGRTIKRLVVAYEAGRDGFWLARCLRAREIEAYVIHPNSVAVSREHRRAKTDRLDTELLKRAFLGWLRGEAGHCSMAAIPTIEEEDARRPNRERENLVGERTRIGNRIKATLARFGIRSFKFTLRHADERLNDLRTAEAGSLPANTHAELRRDIARLRVVGDQIKEIEQQRLQRIKQAAPSEKGPHAMTRLLARVIGIGVETADMLVHEILSRQLRDRKAVARYAGLTGSPDESGKRRREKGLSRAGNARVRRGMIQLAWRFLMFQKGSALAQWYRARTADVRGGTRKTMIVALARKLLIALWRMVTTGEISEGISLRPAVA

SEQ ID NO: 113563 - protein, 354 aa, unidentified
MKLYVGLDVGLEETSICIVDGEGLTVREVKVSTEPEAIRSAVEGCADRLDRVGVEASSLGIWLYRELQPAGLPMIVVEARHMRVSLSTMRNKTDRNDARGIAQMMRLGWYRAVHVKNIEMQKMRSLLANRKLLKRKLIDLENHIRGTLRAYGLMVGAVGRGGYEARVRELIEHSDPVFSMMIESMLDVRRAIFEGYERLHKVLLQVVQHDAICRRLMTVPGVGPVAALSFKVGVDDPLRFARSRTVGAHFGLTPRRHQSGTSIDYEGRITKQGDVAVREALCEAAASLLLRVRKWSALRAWGLRIAKRSSMLCAIVAVARKLASILHRMWINQTDFHVGFGAKVTQRLRLRPAQ

SEQ ID NO: 113564 - protein, 362 aa, unidentified
MTIVDAPRPVTGGVDTHLDLNVAAALDPIGGLLAVADFPATSGGHRRLLDWLAGFGPVTRVGVEGTGSFGAGLARYLRAAGVEVVEVDRPNRQARRRAGKSDPLDAIEAARAALSGRACGVAKTRDGNVEAIRALVVAKRSARSVKIKTLNQICHLSFTAPDQLRERLKGVSRQQLAARAAALRPSQREGADPVLMATKTALRILGRRVLALDEEKARIDALLSELVTQTAPELLTLHGVGIDTAASLLVTAGDNPGRLRSEAAWAHLCGTAPIPASSGKVTRWRLNRGGDRQANCALWGIVITRLRRDPRTQAYMTRRLAEGRSKPEVIRILKRYVADTGRSTTTCPGPEASLILAAGLAR

SEQ ID NO: 113565 - protein, 346 aa, unidentified
MKHYAGLDVSLKETSICIVDETGAICREMKVPSYPEDLVRALQDPAWRLARIGLEAGPLSQWLFSGLAQAGLPVVCIETRHTKAFLKAQVNKSDRNDARGIAQMMRVNLFRPVHVKTLTSQHRRALLTARRLLQEKAVAIENDIRGLLRNFGLKVGMTGAVGFDVRIRELVEGRPELEDITASLLAARQMLREELSRLHRKVLEITRGDSVCRRLMTIPGIGPVVALAFTSTIDVPARFRKSKAVGPVLGLTPVLKESGESKRVGQVSLCGDGMMRGLLYEAAQVLLTRVKKWSWLKAWAMNVAKRRGARKAIVALARRLAVIMHRIWSDGTEFRWTKDPLVQPSL

SEQ ID NO: 113566 - protein, 400 aa, unidentified
MFVGWDWASTTHDITVIDTTGAVVDRWAPPHTERGLAQTITRLVRHGHPADLPVAIERPSGLVVDRLLTAGHPVVPIHAAAFHAARPRWGAAGAKSDPGDSYKLADYLRTDGHRLRRLRPLDDATRRLQALVRLREDHIKAKTAASNQLNALLDAAWPGAAAIFSRLGSDIALAFLQAYPTPQAAARLSQARLAAFCRRHSYRGGRSPAELLARLRAAPTPPAGLDPETLTELVNAQVRLLRTLLATIADLDRAIGAALLSHTKARLLAPMPYIGEINLGQIVAEVGPILDRASSAEHAIAECGAAPVTRASGKTRTVSFRWAANRHARTALHAFADNSRHGSPWAAKLYADARRRGKRHPHAIRILARAWLRVMWACWHTDTAYDPAQHRAEQRLAAGT

SEQ ID NO: 113567 - protein, 373 aa, unidentified
MTDYDAYIGLDVHKDSISVAIADAGRSGEDRLFGAIANEPDAICKLVKKLSSKHGRVEFVYEAGPCGYNVFRQIEALGFVCRAVAPSHTPVRPGNRQKNDTRDAVMLARLLRAGELTFVWVPDVVHEAMRDLVRARSVASHDARKARTLIQLFLLKHDLRYSAKSWTSRHRTWLRNRHFQHHAQQIAFQSYLNRLEQAEARKKELEDQIAVISQTWSLARTVMNLQAFKGIGLVIAATLVAEVGIFSRFDSPRKLMAYLGLVPGEHSSGGSVRPRGITKTGNSALRALLFEAAWSYRVQAKIGNWMHKRRPDVPQAINDIAWKAQVRLSARYRKLVGSGKKSNVAITAVARELVGFLWDVARKTESETMSSAA

SEQ ID NO: 113568 - protein, 462 aa, unidentified
MTDDKKTSTKKKAVTALAAIRPTVAGIDIGASQHWVCGPERDDAEPNVRVFGTTTPELNELVDWLVAQGVTSAAMESTYVYWIPLYELLESRGIEPVLVNARQLHNVPGRKTDFSDCQWLQQLHSCGLLRGSFRPTECITRLRALQRQMANLVTERTRCVQWMQKALDQMNIQVHRAVTDLTGKTGMAIVRAIIAGERDPMRLAAHRDSRCRKSVQEIARYLTGNWREEHLFNLASAVRLYDTFEEMIASYDQHLLDELRTLQPPERQGQPVPRHPNPSKERSIKARGDQQGRTTLWQFAGVDLTRIDGISTMAAQVILTEVGTNVTAFPSEHHFVSWLRLCPRTPISGGKPLKKRRNSMGANRIAGILRMAAVSAQRSKTALGAAFRRIARHKGGAVAVFATARQLAVHVYRMLRFGHDYVDVGEKAYEDKFQARRLAALVHNAKAMGFLLVDDPAAVVAT

SEQ ID NO: 113569 - protein, 372 aa, unidentified
MTSIIYVGMDVHTTNYTLCCYSMEDDRFFAEVQVEPDAKNILKYLARIEKQQSRDCRIVCGYEAGCLGYSLYHQLHAHGIDCVILAPTTMMTKPGKRIKTDRRDARLISKCLAFHTYSPVYIPTEVDNAVKEYIRMRDDANSVLARVKQQIIAFCIRHGKIHDGKSYWTNKHLEWLSSLDLGNKILSEVLQEYLIRYYQLREQVDMYDMRINELAQAEPYRQKVEKLGCFRGIAAHTALSFCVEVGDFRRFATAQQFASYLGLVPGECSSGDKQQYTGITKAGNSHLRKLLVETAQVFGRSATKSGKSVALKERQAKCDSLTVAYADKANARLKKKYFKIAMRSKVNIAKTAVAREMACFIWGMMTDNISCA

SEQ ID NO: 113570 - protein, 401 aa, unidentified
MQTVRDNASRVKRFRELKATLRTNRQRLLVGLDIAQAEHVVHLRHAHTRVVTPTLTIPNTTRGFAQLWARIQQAQRATGCREIVCGLEPTGTYHQAVAAFLERQGADVVLISSSVAYWNRRTQDGTWDKHDRKDAANCAELLEQGKVLFYSQPTGPLAELRHLVKLLRRARAELASCKARWRTTLRPALGPMGEPLPNRLRAELPAVLQAWEPVAPGRLAHPQGRLPLGLATACADLGAQVTAVQARIATLEAACTPVADRLPAYALLRTIPGIGPTVGAILLAEIGDIAWFTQFSQLRKLAGLDIVRVQSGQFAGQARISKCGRGLLRWALYQAALGAARTVAGRARLAALKAKRHGDRFAGFKALVELAAKVLRVVWGVWRSGTPYDPMRAGGLRRQPR

SEQ ID NO: 113571 - protein, 344 aa, unidentified
MITIGIDPHKSSHTAVALDEAGRVLGELRVAATKAMLERLLRWAERWPDRIWAVEGAAGLGHLLAQRLVARQETVLDVPATLAARARLLARGHGRKTDGIDAASVARVAQSQADLRRVGPEDHSAVLRLLSDRRDELTGERRRVVNRLHRLLRDLLPGGAPTELSTEAAARLLNRIRPKTAVDLERKLMARALVADLRRADRALVANRARCAAAVAASGTTLTTVFGISDVLAAKILGHVGDVSRFGSADRFASYSGTAPIEVSSGEVTRHRLSRNGNRALNNALHLAARVQTMHAGPGRDHYERKLSEHKSSREAVRSLKRQLAKVVYRHLVVDQAHRLALAS

SEQ ID NO: 113572 - protein, 334 aa, unidentified
MENIALIGIDLGKNSFHIHCQDRRGKAVYRKKFTRPKLIEFLATCPATTIAMEACGGSHFMARKLEELGHFPKLISPQFVRPFVKSNKNDFVDAEAICEAASRPSMRFVQPRTESQQAMRALHRVRESLVQDKVKTTNQMHAFLREFGISVPRGAAVKSADSWELEDNSLPLYLSQLLLKLQQHYHYLVEQIKDLESQLKRKLDEDEVGQRLLSIPCVGTLTASTISTEIGDGKQYASSRDFAAATGLVPRQYSTGGRTTLLGISKRGNKKIRTLLVQCARVFIQKLEHQSGKLADWVRDLLCRKSNFVVTCALANKLARIAWALTARQQTYVA

SEQ ID NO: 113573 - protein, 452 aa, unidentified
MPPKPERKGTWSATTYILQPNAAGVDIGATEIYIAVPPDRDSQPVRSFRTFTAELNAAAEWLKQCRIETVAMESTGVYWIPFFQILEAAGFKVFLVNARHVKNVPGRKSDVADCQWLQYLHSVGLLRASFRPKQAVCAVRSILRHRESLIQIATIHVQHLQKALDQMNLQLHHVISDITGVSGIAIIEAILNGERDPVVLSKMCDKRIKASRQTIAAALVGDYRREHLFTLRQSLHAYRQCQELIAACDREIEQHLAAFDSKLELQAAPLPKPKDRHKPRRNQMKFDLRAHMYRVYGVDLTAIPGIDALTAHVLFAEIGPDLAQFTSAAAFVSWLGLCPDNRISGGKLLCAKTRVVKSRVAKALRMAAQSLHRSQSYLGSYYRRMRTRLGTPKAITAAAHKLARVIYHLLTTRQSYEESVFARCEALHQQRLEHRIRRQARDLGFDLVRSPS

SEQ ID NO: 113574 - protein, 356 aa, unidentified
MLIIGCDFHPGFQQVAIFDNRTGEYEQRRLGHREEAEQFYRSLAGQPVRVGMEACGHYPWFERLLAGLGQELWLGDAAQIRAKVVRKQKTDRRDAEHILQLLLDPDPKQFPRIWVPSLEERDVRQLLVHRHKQVQARTRVKNQLQAMALSQGVQKKWKLWTEAGRAELEKLELLPYAAERRKQLLQSLDRLEVEIEQLNRRVEEEVQKRPSAVKLQTHPGVGPVTALAMVLTLGPAKRFGSGREVGSYFGLIPSEYSSGGRQRLGHISKQGSSFLRFLLVEAGQSAARGDAELGRFYRRLAVRKHRALAKVAVARKLAVRLYLMLREDWTYAQLCRAVVQASPSHSVVERKHRPLE

SEQ ID NO: 113575 - protein, 343 aa, unidentified
MQTVTTIGLDIAKSVFQVHGIDAEDRVIIRRQLKRRYVLAFFAKLPACLVGIEACASSHHWSRELKTLGHTVRLMPPAYVKPYVKRQKNDAADAEAICEAVTRANMRFVATKTPEQQSCLTLHRTRHLFIRQQTAVINVIRAHLTEFGIVAPVGRKGVEELLNVVADPTDKRVPEIARACLAALGAQLRRLKEQILEFDRMMMAWHRSNEVSRRLDAIPGVGPMLATALVASVADPKAFRSGRNFSAWIGLVPKQHSSGGKDRLGSISKQGDRYLRSLFMAGALAVIRYAKIYSIKHRPWLTALLARRPTKVAAIALANKLARMAWAMMARGERYKQPVALAV

SEQ ID NO: 113576 - protein, 401 aa, unidentified
MLSIGIDVSKGKSTVCGMKPGGEIVYTPFEIQHTREGMSDLVSLLRGSGEEVRAVLESTGSYHCPVVAALLENGIFVSVVNSLRMKRFCSQSIRKVKTDRIDAMQIALYGLAYWQELQPARLPEDTYRELQLLARQYYQMTSMLIKAKVDFNAICDRVLPGMQELMSDHAGRHKLSDFVLRYRHTTHILEMGETRFRKDYCKWAEKKGYRNFERMAAHIFATAQNGIPVLPNAPSTQIVITEAIRVLHTVEASRDAILTQMQALAKTLPEYSLVREMPCIGDTLAPRLIAEIGDVRRFHSKRALIAYAGIDAPPYQSGKFCANNRHISKRGNRYLRKTGYEVMQSYVMHKPANDPIFTFIEKKRSEGKCGKLAMVAGLNKFLRVYYGKVTELYRSLPARIS

SEQ ID NO: 113577 - protein, 419 aa, unidentified
MSTEKRKVCGIDVHKAFLIATVLDREGKSETRRIQQNIDSLLELRDWIQSENCESAAFESTADYWRSLYLVLDGRVPVVVANAHHIKHVPGRKTDITDSRWIAQLELNGLITPSRIFAGEMYDLRSLTRSRELLVQNRTELKNKIHHLLDSASIRLSSVLSDLFGKSGSIILNGIVQNKSFEEIIESLPKKMRGSADAISAALPASIPPVFLVLLESYLKLVHDLDNEIKLLEGRIREALMNKSREIQILTSIPGIGFIGASTLIAEIGNVHDFEDADKLTKWAGLTPSVYQSANVTRTGSITKQGSKHIRWILVELAHVAIRSPGRIRTFFERLMPKKGYKKAIVAVARKMLRIVWHLLVHNEVFVDDFPRSKQVKFPKMPKKIQAVGINRIIELLSKASEIIIRDRNQEIFRLGLSD

SEQ ID NO: 113578 - protein, 350 aa, unidentified
MIIIGVDFHPSFQQIASVDKGTGEWDERQLNHREEAEKFYHDLKLRGISVRVGMEATGHARWFERLLAELGFELWIGDPAEIKAKRVRKQKTDRQDAQLLLKLLLEDRFPRVWVPSPENRDVRQLLWHRHRLVQMRTRILNQLQAIAMNEGVRRKKELWSKAGRTQLESFRLAPWATRRRQDLLELLDRLNPSIAQLSAAIEQESEKRPEVRRLMTHPGVGPITALAFVLIIGSPDRFRCGKQIGSYIGLIPCEDSSAGHQRLGHISKQGNSLLRFLLVEAAQTTVRDDPDWRRRFLHLAMRRERRIAKVAMARKLAVSLYWMWRKGWDYQQVLKFGSHAGQLVAVHGVK

SEQ ID NO: 113579 - protein, 433 aa, unidentified
MPTNHPYDLVIGLDRSDRKADLHLIDTRTGNAQKQTVATSPEALHAWLAQLRLDHPQDRVAICLEQPAANLIVFLETYSWITLYPINPISLQKFRETFVTSRAKDDGKDARYMAELVLSHHDKLKPWQPDDSQTRQLQQLVLHRRAVVDERTGLTNRLTALLKQYFPQALELSGEDLWRPLATAFLLKWPTLQSLKKVRKESLKQFYYLQGSRSQMLIEQRLERIDKAVPLTDEIALLQSYTLRVQLICKELQLLLKTLQQFDEQIAKVFQQHTDRPIFEALPGAGPVLAPRLLASMGSERERFARPENLQSFSGVAPVTKQSGGKCYIHRRYMCPKFLRQSFHEYAKESILHSRWAAAYYGQQRNKGCGHHTAVRALAYKWQRIIWKCWQTRTIYKEQIYEAALKKNKSPLTGLLDQIELGKSPIKTREKKS

SEQ ID NO: 113580 - protein, 350 aa, unidentified
MLIIGCDYHPGFQQIAYVDSETGELQERRLPHPEGAEKFYRDLWEGSVKVRVGMEASGHARWFERLLEELSFELWMGDAAKIRAKRVRKQRTDRLDAQHILKLMLKDDFPKIWVPNWGNRDLRQLLWHRHRMVQTRTRIMNQLQAVAINEGVRYKKRLWREAGRKQLESLRLPQWASRRRQDLLEVLDRINPTIAELTQAIENEAEKCCEARRLMTHPGVGALTAVAFVLIIGEAHRFDCGKQIAAYLGLVPEEDSSGERRRLGHISKQGNSLLRFLLVEAAQATARSDGRWRNQFFHLAQRRGRKIAKVAMARRLAVRLYWMWRRGWDYEQLQSFGSRAGQPGYPHGVQ

SEQ ID NO: 113581 - protein, 343 aa, unidentified
MTVIIGVDPHKATHTAVAICRDERELASITVRATKNQATKLVSWAEPLGPRTWAIESAGGLGYLLAQQLVEAGEDVVDVPATLASRIRVLATRRSNKNDPNDALSVAIAALRAPALRSVKPADHSEVLRLLAKRNKDLGSLRTKVVCRLHALLADLTPGGISKEMNASDAVRLLDRFDPATPVEQTRYELALELLADVRRLDAQLKESHRRITIAVKASGTSLTDLYGIGPIIASEMVGYAGDVRRFAGRDAFAAYNGTAPIELSSGGRVVHRVSRRGNRQLNHAIHMAAICQIRQTGSDGRAYFERKVAEGKTKKEAIRSLKRHVSNAVYRQLLIDAERSKK

SEQ ID NO: 113582 - protein, 327 aa, unidentified
MTASVSSHNHIFIGIDVGGASFEAAWHRGGCTQYQNRPDAIAAFVARLSLEKQIIRIAVEPTGGYEKPLVKALRGAGLPVEMVHTSRFAAYRTLIGAKAKSDTSDARLLAAYAAAPEEVRGRKAGHVVLPQDDVREQLAELAARRDQLKHMIHAETCRLSTVRSRSIRDDITAHLQALRQADCKTYDAMMQLVRQRDELRNAKRLLQTIKGIGDKTALTSIAAVPELGLISNKAAAALVGVAPFVRQSGTMRAPAHIRGGRAAVRNAFYMAAVTASRHNPVLAPFYARLIAAGKPVKVALVAVMRRLVVFANAVLRSGQPWKGAQII

SEQ ID NO: 113583 - protein, 413 aa, unidentified
MKSAPNTLPTEPANGVTGGIDWARDDHAVSVVDHLGREIVRATIEHNATGLRELLTVLQRAGAREVAIERPDGPVVDTLLNAGVTVAVISPHQVKNLRSRYGSAGNKDDRFDAFVLADTLRTDRARLHRLLPDTAATATLRQTCRARKDLVAHRVAVANQLRAHLMIVFPGAVGLFADLDSQISLTFLTRFNCQDRADWLSVTRLATWLASVGYSGRTDPAVLHRRLTSAPRGTTGTDTTATTGAFVTVLKSLNAQIDALDADIADQLARHADAQIFTSLPRSGTVRAARLLAEIGDCRAKFPTPESLACLAGVAPSTRQSGKVIHVGFRWGANKQLRDAVTDFAADSRRANPWAADIYNRAIARNKSHQQAVRILARAWLYVIWHCWQDGVAYNPANHRALQTLLNHQHRAA

SEQ ID NO: 113584 - protein, 326 aa, unidentified
MTLSHLTDNTFVGIDVGGAGLDVAWHRGDSAHYANRPDAIATLVERLRTGPEVTRIVLEPTGGYEKPLVKALRQAQLPVEVIHTTRFNAYRALVGVKAKSDTSDARLLASYAAAPDEVRGRKAGHVELPEDAIREALSELAGRRDQLKHMIHAETCRLGMVRLTELRQAITAHLEALRAEDKQVHRMMLELVRQRIDLRRDQRLLKTIKGIGVKSALGLLASVPELGRIDNKAAAALIGVAPFVRKSGTMSAPARIHGGRAAVRSILYMAAVTASRHNPVLRPFYERLIANGKPPKLALIAVLRRLVVFANAVLRSGQPWRGANAT

SEQ ID NO: 113585 - protein, 338 aa, unidentified
MHKYIGIDLHSNNSVVVVTDEADRIIFQKRLANSLNEILPVLEPHRDESVGVVVESTYNWYWLVDGLMDAGYQVHLAHPSAIKKYEGLKYSGDFADATYLAHLLRLGLLPEGYIFPRELRATRDLARKRMQLVRCRTTQILSIENILTRETGARMSSRQIKAMTAESIEALGLRDDVALAMESNRVICQALQQQIDVLEKRLESQVKLQPGYQLIKTVPGIGQILATTIMLEAGPVSRFPEVGNFSSYCRCVDSLRESNGKKKGSGNTKNGNKYLSWAFMEAANFALMFCPEAKRFYERKKSRTNRIVALKSVAHKLARACYYILREQQPFEVKRCFV

SEQ ID NO: 113586 - protein, 364 aa, unidentified
MCILYENGSKIESVFGVLTPELDKLRDLLVSHHVCEVALESTSIYWIPIWNILSVDFSLKLVNPYFIKQLPGRKSDVKDAEWIATVLQKGLIRGSYVPDRMIQCLRQYERRNHELSKNIVHAEQRMDMILQRCNIRISNYVSCISCKGYQKVVNAIISGESNPKVLVTLIHKRTLNKHGRQVVEDSLNGFVSDTDRDILRQYRDERMQMEQHKSENKAKMQAICEAHYCEELELLQTLPGIKEESAANIIAEIGVDMKMFLTASAIVGWAGLKPCNDQSAGKIKSRKIPHGNKYLRKILVEAAWSAARTKDSRFMKMYQRLLARGKSKQKALIAVARKLLVLIWNILSKKEAFNPEYKRRIQAA

SEQ ID NO: 113587 - protein, 344 aa, unidentified
MNKLSRVGIDLAKNVFQLHGVDRNEQTVWRRRLTRGKWLKVLLQNVEPGCEIGMEACASAHHWARELQSHGYTVRLIPPQFVKPYVKSNKNDANDAEAICEAMSRPNMRFVAVKSVAQQDIQATHRIRAELMRQRRAKANQIRGLVAEYGLVAPLTLNALRRTIPGWLEDAENGLTDYFRSLLNGLWSDLILLDDRVLEMDREIERLANSHEVTRRLQQLRGVGPMVATALVATVGSAEQYPKGRQMAAALGLTPRQCSSGGKQRLLGISKRGDAYLRTLLIHGARAVVSQAKHREDRLSRWVTAIATRRHPNVAAVALANKTARMAWAMLRHGTDYDPDFAMS

SEQ ID NO: 113588 - protein, 343 aa, unidentified
MAIVILGIDLGKNICSLVGVDGDGAVVLRRRMRRQTVLTFAAKLPSCVVAMEACCGAHHLGRLLTAQGHTVKLMSPEYVRPYVKAQKNDDRDAEGIAEAASRPTMRFVDLKSQEQLDLQSLHRVRSRLVGVRRTLLNQLRAILLERGHIFPQGRRKLEAAIDTLVTDPACEISSRIRQLVIDIRSEWQALDSRIEALNGEFVAIARHDEAARRLVTIPGVGVLNATALVAAVGNGAAFRRGRDLGAWLGLVPKQHTTGGKPKLLGISKRGNKYLRMLFIHGARAAMPSLAASQSPLGEWLRGLLARTHRNIAIVALANKLARIAWATLRRKTSFDLRHLAVAG

SEQ ID NO: 113589 - protein, 427 aa, unidentified
MIAPITLPATENLPPARETICNDPQVCRIVDLPVYYELETNNGNRDYRIQIGGHYMNYNTVYVGMDVHKESFTLCSCKYEDEKASHYQRTPASYKNVLRYLAFLRTIYGEDTRFVCGYEAGCLGYSLYHQLENFNVECVILAPTTMLEQRSKRRIKTDKRDAEIIARSLAQHNYSPVHIPTETDNQTKEFIRMRDDHKAELKKIKQQILSFCLRQGYQYDGSGNWTAKHVKWLRSLKPAGLYKEILDEYLLTYTILTDKLNRLDQRIEELASKEEYKESVSKLTCFLGIKTHTALSVIVEVGDFQRFVSARKFAGYLGLVPGQHSSGDDRNGLGITKAGNTHVRRLLVESAQSYTRGKIGYKSRVLRSRQAGNSPQVINYADRANERLRRRYYKMVLKDGKKYNIAKTAIARELACFIWGMMTDNIY

SEQ ID NO: 113590 - protein, 343 aa, unidentified
MDQYVALDVSLQKTAVCVLNVSGRVLIEADVPSEPAALIAFIQTHAPGAARVGLESGPTSPWLWHSLKAAGLPVVCMDARHAHAALSVRPSKSDRNDAHGLAEMVRMGWYREVQVKSLAAHERMALLGVRRRLVDMRVEIDGQIRGILKTFGLVVGSGNKGAFAQRARMLAQDHPVLSALIDKLIEVREVAVAKVAALDKEIRRFVRDDLTLRRFMTVPGVGPVTALAFRSTIDEPNRFKRARDVGPYLGLTPRRYQSGETDRHGGISKCGDRFTRTCLYEAASVLLTKVQRWSPLKAWGTRLARRIGSKKARVALARKIAVILRCIWTDGTEFWWTKETATA

SEQ ID NO: 113591 - protein, 350 aa, unidentified
MIIIGCDYHPGFQQIAFVDTETGDYGERRLEHSEGAEKFYRDLAAQGKKVRVGMEASGHARWFERLLAELTFELWIGDASEIRAKRVRKQKTDRQDAQHILQLLMENRFPKIWVPSGENRDLRQLLWHRHRMVQMRTRIMNQLQAVALNEGLRCKKRLWRQHGREQLESFRLAPWASRRREDLLQLLDRLNPTITDLTQVIEQEVEKCAEARRLRTHPGVGALTALAFVLIIGRAERFQCGKQIASYLGLVPLEDSSGNRRRLGHITKQGSSMLRFLLVEAAQVTARSIPEWRSKYFHLAMRRGRKIAKVAMARRLAIALYWMWRKGWNYEQSRKFGSHAGQLGTGDGVQ

SEQ ID NO: 113592 - protein, 309 aa, unidentified
MNGTPTIGLDAAKRISFFHGEDARGKVVLREKLSRERLLPFLANQPVSTIAIEAGCGAHHWARAFSKLSHGVRVIHPKFVRPFVKTNKNDWNDAAAICEAAQRPTMRFVAAKSLEQQDLLAIHRVRERLVGQRTGLRNQIRGLLCEYGIVLRQTVSRLRRALPEVLEDAENELTVRGRELIASLADELRNIEERIKPYERAVEHASVDSWTCRRLRSIPGIGPIGATAVVATTGDPKAFKNGRHFAAFLGLVPRQHSSGGKSQLGRISRRGDVYVRRSMCHCAPVFRIHSAASSTSRAGTGLRPGRTSG

SEQ ID NO: 113593 - protein, 429 aa, unidentified
MRTESTPGARGPVFCGVDTHADSHWLCVLDWRGRKVLSRQFPADAAGYEALAGAIAAAGEPACVAMEGTSSYGAGPTRHLASLGMPVREALSPARMQRRRPGQGKCDESDAERAARAAMSGSKLGTPKSQDGWVDGVRCMLAARSGAVKARTSAINTARSLLTTAPEGLRSRFRGMAGPRLMEELPSVRAEGALGAALGALADLWAAARDAALDMERAIEASLEENCPALLAMYGCGPVSAAKLAVAAGDNPGRLRSEASFAAICGACPIPASSGKTVRHRLNRGGDRQANSALHEIARQRVMRDPETAEYAERARARGKSDREVMRCLKRYVAREAYRALMRPHEVRRPEDASGLVAARRAARVSQVRAASILGTSEKYISMLERGQRELGPIRRAYEAWVEAGLPLDWDRQAFEAERKMDSKKHLAK

SEQ ID NO: 113594 - protein, 341 aa, unidentified
MKKFIRVGVDLAKNYFQIHALASEDGTPVTRKLTRVKMREFFSQIEPGLVGMEACGSAHYWARELKAMGHEVLLMPPAYTKPYVKRGKNDAVDADAICEAMSRPGMRFVPIKSAEQQAMLMLHKTRELLVKQRTMSVNALRGHLSEFGIVAAKGIGRVDELLDLAENDATLPNAARASVKVLAQALEGLDKAIGDLEKQISSAHAQNEMSRLLDKVPGIGKLIASVIAASVPDPSVFKSGRDFAAWLGLTPRQNSSGGKQTLGAITKQGNRYIRKMLVLGATSLLNVVGKRKGALRDWIVGLLAKKPARLVTVALANKLARILWAMMKTGECFRTETFTKA

SEQ ID NO: 113595 - protein, 360 aa, unidentified
MTIVAHSHPFVIGVDTHARTHTLAVLVAATGELVATEQFPATDAGMGRAVAWAARRTDGELATLWVIEGVATYGAHLASVVKRAGFKVVEAAAMDARAHRGTGKSDPLDARRIATAVLSLQPEQLRRPRSDDGIRTALRVLVTARAHMTTERTATVNALTALLRVASLGIDARRPLSVKQIGEVARWRTRVEDLATITARAEAVRLAKRVVDLNEELTANQVQMIDLIRASKAAVLLDKTGIGPVTVAVVYTAWSHAGRVRSEAAFAALAGVNPIPASSGNTIRHRLNRGGDRRLNRALHMAVITRMTHDPETRAYVERRRAEGLTIKEIRRCLKRYLARQLYRTLERLHTEHDAYPQDA

SEQ ID NO: 113596 - protein, 315 aa, unidentified
MNLGIDVSKNTLDCCLISDGIFFERQFKNNRAGFEQLKAWLKESGATNALHCCCEATGKYYEAAADYLAESYVMSVENPRKIKGYGNAKLQRSKTDRLDARLIAQYCRDMKPRAWKKPSEAQTQLKELNQYRQRLKAQKAAEQTKLHTAPDYLAPLIEDTIRHLQKQIKAVQEKIGQFHQDHPDYKANRNRLKTITGVGDHAADTLLTVLAEQDRFENQRQFTAYLGLDPKQFKSGTSVKGRERISKVGSSRLRTALYMPAMYAYRSRTFAPFVSRLQANGKRPKQIIVALMRKLAVIAYNLIKTGKDFEPERYK

SEQ ID NO: 113597 - protein, 373 aa, unidentified
MANSTTYVAMDTHKKEHKVTLHYPGDGQIVEFVVKNTLGEIKKMVSRITRRAPGDVLFCYEAGVCGFTLKRRIEAMGCKCAVIAPSLTPKKPGERIKTDRRDAKKMLAMFMSGLLTEVYPPDLQQEAARELTRCREAAKENLNRARHQLLKFLTRHGYIYTNGDHWTIRHLRWLRSLEFEQLLLRDVFDNYLTQMQHCMQRLDSLDRQVEELAQSESYKEPVGLLRCFHGIDTLTAITVLTEIFNFVRFCNPRDLMGYLGLTPSESSSGDKQHKGPITKTGNRRIRRLLIETAWHYRHPFTVSKALKRRRKNQPQWAIDMADMAGMRLRKRYHRLICRGKMPCKVTVAIARELAGFIWAVLNEYELRKNKKAA

SEQ ID NO: 113598 - protein, 396 aa, unidentified
MSKLFVGIDVSKDSSTAKGLDKEGHSQFYVEFKMDLEGFLKLLKALTTHCEDLSQVTVAMESTGCYHINLFAFLTEKGIKCFVINPLLITNFARLSLRKTKTDKKDASTIAQFLLAHEDSLCKVTFSQDLQDLKDLARERESLVVLISALKNDIKRMLQITFPELESLCPIFSETMLKFLMKFPSARLIKTAKPKAIARALIHEDKRKRVSLSSEAIIKAAKDSIASPSRAKELILPEKISTLLYLMEKRDKMTKALVEACEAIRVQDLEIITSIGGIRDTLGSLFLAEIGDYKAFKSYKHLIAFAGLDPSVHQSGQFQGISKISKRGNRHLRYVIYNMTFCVIRLDNVFRAYFLRRKKEGLPFKKALLATAHKLIRVIFAMLSNKSHFRPEVVNK

SEQ ID NO: 113599 - protein, 456 aa, unidentified
MAPRKQKAAQVSPALPPQLATANLHAAGIDSGAEAHFVAVPPSDDPQPVRSCGAYTADLEALADWLATCGITTVALALTGVYWIPLLELLETRGFAVLLVDPQQVQKIRGRLKSDVYDCQWIQRLHTFGLLARAFRPADQVCGLRSYRRHRAMLLTYAGQHIQHMQKALTQMHIKLQHVVSDLTGVTGMAIIRAILAGERDPVTLARLRDYRCQHSEETLAKALYGQWREEPLFALAQAGALYEVYHQQMLEGDRQIEAHLSTCAEHSPDQAPPSPPTRKRNQPTFDVRGSLQRVTGVDLTTIEGIDDTTALIVISEVGLDMSRWPTVKHFTSWLGLCPHQQVSGGKVLSRRTKSSADRVATALRLGAACLHHRHSALGAFFHRMKARLGTPKAITATAHKLARLIYTMLKHGTTYVQRGMDDYEQQYRERAVQSLTRRAKAFGYTLVQTPVGTHS

SEQ ID NO: 113600 - protein, 419 aa, unidentified
MSFKIFKFNCCGLDVHKTWIYACIGITDSNNRTEYKQARFSSFTKGLNELCDWLAKYNCKDVCMESTGKYWIPVFNILEQHKIRVTLSHPKYTKPMKGNKTDRKDAKWICDLYMCGMVKPSFIPPADIRELRDLVRYRFKLTCMITGEKNRAQNCLTVSNLKLDDVFSDVFGKSSRSITEQILQHPGEKFDVSPFVDSRCKTPIEEIQAAVDGNISKEQDVKLRQCLDHIDELQKHISEVEQEILRLSDKYEVALNLIRTVPGFDKNPLTAIQVLSEIGGDMSVFPTAKHLVSWAGCCPRNDQSNQKIKSTRISRAGSYFKPVLVQIANALIKSKKHFEFTTRYKRIKTRRGHKKAIIARCRMILTAIWHILTDLKPYTSDGFLESRPVKKEKVLTTSQALNLLRQRGYLIKDEPSPVS

SEQ ID NO: 113601 - protein, 376 aa, unidentified
MQTLVERGCGLDVHQATVVACLLIVLKSGKVHKQVRTFGTTTRDLLGLREWLLSEGCTHVAMESTGVYWKPIYAILEGAFEIVVANAQHVKKVPGCKTDVKDAEWIADLFCHGLLRASFVPPKPIRELRDLTRYRRKLVESRSAERNRLLKVLETANIKLASVVSDVFGASGRLMLLALAEGKDTAQEMAQLAKKQLRKKIPELQLALEGKVEEHHRFLLSVQLHRLGAVEKDLAIVEQRIEEKLKPYEAEIKLLDEIPGVDVALAGAIIAELGADMRVFENVSQLASWAGVCPGNNESAGKRRSGRIPKGNVYLKTALVEAANAAAKAKGTYLRDKFYRLKARRGYKRAAVAVAHKILVAIYHLSLLKNQANGKS

SEQ ID NO: 113602 - protein, 379 aa, unidentified
MSHHSEAFVAFDTSKLRNAVAVAEAGRAGEVRFVGEIDNSAAATAKLVKKLAARYERLTFCYEAGPTGYGLYRQIKSLGHECVVVAPSLIPQRPGDRVKTNRRDALSLARLLRGGDLTAVWVADERHEAMRDLSRARGTAVEDLRGKRQQVSSFLLRQGLYYPGKKTWTKAHMIWLASVKLAHAEQRMAFEEMLLAVRQAQERVARLEQAIRDAVPDWSLVEVVTALMAMRGLDLIAATTFLAEIGDLSRFQTPRQLMAYLGLVPSEASTGDTVRRGPITKTGNHRARRILVECSWSYQHAPRVGKKKLDKVAAAPQAVREIAWKAQCRLSARYRALVRKGKPKNLAVTAVAREFAGFIWAVSRVVSPPGAATPSTAAR

SEQ ID NO: 113603 - protein, 415 aa, unidentified
MKVVFPICCGVDVHKTFVVATIITTPADSLQPIYQKKRFSTFNSDLNRFADWLLEHGCLDVCMESTGKYWVPVFNILEKRGIQVVIANPKWVKAVKGNKDDTKDSKWIGDLFRIGLVKSSFIPDLNIRILREFTRYRYKLISMKSSEKNRFQNAFTVCNVALDSVVSDMFGKSATAITDYLTSDESFDPEHCVSLLQRSLKKKAEQVLESIEGFSIADEQKARIKIIREHHDFIEEMIATVDTRVNEMVAKYEGNINLLCTIPGIDRNSAITIISEIGTDMRQFGSSKRLCCWAGLTPGNNESAGKKKSVRISRAGVYLKPALVQVAHAAVKDNDHPYYKLKYERIAKRRGKKRAIIAIARMILTAVYSMFCTGEVWNPVDLYKVDMPGCLKEQQLAKAIKQATRFLEKQGLSVA

SEQ ID NO: 113604 - protein, 355 aa, unidentified
MKKNIIPVSEIPELTIGLDLSDRTFQFCELNAAGEIVHEGQLKLDRNTLRKYLASKPAGARVALETGTHSAWVRDEIEQLGHDAVVANARELAAVTGRTTRTDHRDARQLARLARVDRALLNPVELRRSPEQADLFVIRARAVLVEARTMLINFARGITKTLGHRLPSSVTHRFAQRVRAAVPDALQSALLPLLDVLDQIGAQIDLYDQHIDGLAEHRYPQTRWLRQVPGVGTLTALTFVLTVGEPERFAHSRDVGPFLGLVPRRRQSGEQDPQLRITKCGDRYLRRLLVQCAHVVMGRFGGDCALRRWALEHAQHSRAAKKRTVVALARRLAVLLHRLWRRQEVFQAFPLSVAA

SEQ ID NO: 113605 - protein, 317 aa, unidentified
MKRYLGVDLHRRQFVVCTRLEDGKSWLRQWAMEALPQWVEQLQAEDEIAVEATSGTARFYEAVVGKVRRVVVVNPHQFKVISESAKKTDCRDAEALALYLSKDLLPEVRMKPQKHRELAHLAETRDLLVKQRSALKSKINNLLAMQGIELKREGLSSQVALEQIRSLNASIRELEDLIEEEGEPLPGHKNLTSIKGIGTLSATVLLTTIGEIRDFADENKLAAYLGLVPRVQNSNESQRSGHITKMGNKLARTALVQCGLVAKRYSPYLQNFYERVKQRRGGGKAKIALARKLVKIVYDTLKNDWVFQDFPSFTLAA

SEQ ID NO: 113606 - protein, 342 aa, unidentified
MKQYVGLDVSQRETAVCVVNETGQVIFEGKAKSNPGALTDLLNKHAPHAERIGFETGAMASWLWHELRRVELPVVCIDARHAHAALSVRMNKSDQNDARGLAELVRVGWYREVKVKSEESQKIRAILVARSRLVSMRRDIENQVCSLIKECGLLFPRAIGQQFRNQVSELLGVDHLLLSVISPLLAIHENVCQQQGKFDNEVRRLAKLDETTRRLMTVPGVGVVTALTFRHTIDAPSRFRSASTVGAYLGLTPRRSQSGETDTNGKISRWGDRLLRTYLFEAATVLLYRTKKWSSLKAWGMKLAKRIGMKKAKVAIARKIAVILHCIWVDGTSFDWGQPKPI

SEQ ID NO: 113607 - protein, 330 aa, unidentified
MTESSDCESVQVFIGVDVGKDTHHAVAINRSGKRLFDKALPNDENKLRSLISDLKQHGQILLVVDQPATIGALPVAVARSEGVLVGYLPGLAMRRIADLHAGEAKTDARDAAIIAEAARTLPHALRTLKLADEQIAELSMLCGFDDDLAAQTTQASNRIRGLLTQIHPALERVLGPRLEHPAVLDLLQRYPSPEKLASLGEKKLAAQLCKLAPRLGKRLAADIAQALAEQTVVVPGTNAAAVVLPRLALQLITLRKQRDKVALEVEQRVLAHPLYPVLTSMPGVGVRTAARLLTEVACRAFASAAHLAAYAGLAPVTRRSGSSIRGEHPS

SEQ ID NO: 113608 - protein, 343 aa, unidentified
MQVTTVGLDLAKHWFQVHGVDADGQIVVRRRLRRSEVLAFFQSLPPCLVGMEACATAHHWARELAALGHTVKLMPPAYVKAYVKRNKNDAADAEAICEAVTRPSMRFVPVKDAHQQSVLMLHRARSLLVRQRTMLVNSLRAHMAEFGIIAPQGLRNVEALIKQIAHKQERLPELARAILQMIADQLYDTMARVRQIELRLAKWHRQNRVSQLLATVPGVGIMGASAIAATVADPSLFRSGREFAAWLGMTPRQNSSGGKERLGRTSKRGDKYIRSLLIAGAVAILRHARTRSTKDAAWVRSLLARKPTKVAAVALANKTARIVWAVMARGDGYRAKTPIGQAA

SEQ ID NO: 113609 - protein, 345 aa, unidentified
MKITTIGIDLAKAVFQVHGVDERGKAVLRKQLKRKDMLSFFANLAPCLIGMEACGSAHYWARELAKFGHTVRLMAPQFVKPYVKTNKSDRNDAEGICEAVARPNMRFVPVKTLEQQAVLSVHRARQGFVKTRTAQANQMRGLLAEYGIVVPKGIGHIAKRVPEILEDGENALPGMMRELLQRLNEELKAVDRQVGELERQIKLWHRANEQSRKLEEIAGIGPLSASAFVATLGDAKSFKNARQVPAWLGMVPRHEGTGGNVKLGKISKRGDVYLRTLLIHGARAVIRQFKRKPDQADGWLKKLLARRNENIAAVALAAKNARVAWALLAHERSYECNYVATRPAA

SEQ ID NO: 113610 - protein, 347 aa, unidentified
MLYAGLDLSRHRLDVHVMNQAGQPLLVTAAPPDADGLRGLARQVVELGQPVAAAIESMNGARFVHDQLEFAGWQVAIADAQKVKGLAPLACKTDRIDAWVLAELSRRDLVPEIWLPTPGVRAERERARFRLHLVRHRTALKNRVHATLLAFGKPCVVSDLFGAGGRRLLDQLEVPAPWAGTLAAAVQLIDHLDERVAGCERELRRLGADHPYVPLLMTAPGIAWVLGYTIAAEVGDIGRFPSPKKLCGYTGLCPRVYQSGDRDHRGPLAKNGPKYLRWALIEAATHAARHPCYRDHYQATRRRLGKQRGPKVARVEVARKLAEAIWYMLTRQQPFVPARPHAKALVA

SEQ ID NO: 113611 - protein, 403 aa, unidentified
MEGPLISLDVSKGKSNYRFFENGTDRKGKKGVIRHDIQGFDSIRDEAEKMEKRLRIKPSVIFESTGVYSDVVEKYFTDKGFDVYVISPLLSASMRKEGVRPAKNDSLDTLSIAKVFYSKDDLRKCSGNDKKAERLREMSYELDMMNRRIRPMKCQFLRLLDKVWPCLDEVSDYSSRFMLDFIIAFGHPENIKTVKGVLSVIRKSEMGTAGRKDKIAQDLFDYCHTHLSAVSKDSSYVELLKRMAIELKAMAKKKSELIDRMAEEARNKDEFARLLTIPAVAKTTALKIMARVGDISRFRNAEALVAYCGLDPRVYQSGKMTGEHRTITKKGDCILRSTLFLAVKLMVMLYPDTKVARFVAAKAKNGLSYKQAVVAGSAKLARIIYSMLTHHENYVEFNADIVA

SEQ ID NO: 113612 - protein, 334 aa, unidentified
MKKFYVGIDISKSKLDVAVYDAEKKKIANKFVIKNEADGIQSLFSTLKKEKINLEDCWFCFEHTGHYGFSLCYELEQICCVYSIIPALQIKLSLGMTRGKNDQVDAERIAMFAYTFRDKLQPSKMSSGCFQKIKQLLTYRNQMVRISTQLQNSLKSHQAVCQLTHFDYVVDEIKKQIIEVKVKIESIDELLMSEIKRDKTLENNFNLLKTIKGIGPIISIYLLVLTQNFESFTDARKFNCYAGIAPFEHSSGSSIRGKTKTSSLRNKTIKSLLFNGANAAALHDKEINNYYKRKKEEGKHHQSIMNAIACKLVYRAFSVIKRQSPYVTLYAQNF

SEQ ID NO: 113613 - protein, 369 aa, unidentified
MKGYNAYVGLDVHKETIAVAIADARSNDVRFYGGIKNTPDAVAAMIKKLGERHKRLRFVYEAGPCGYGLYRQINAAGHLCEVISPAHTPRRAGDRVKTDRRDAIMLARLSRAGELTAVWVPDEPHEAMRDLIRAREVAVKDIRHARQRIQGFLLRHGRRYVGAVWKKSHRAWLDNQSFAHPAQQIAFQTYLNAMDQAIDRKTVIDRQIAELVPAWSLGPVVEALQALRGVALAVAAGLVAEVGDMRRFEKPRQLMAYLGLVPGEHSSGESRRLTSITKAGSTVARRLIIEAAWAYRMPARIGQAMRRRQEALPTTIRDIAWKAQTRLCARYRRMLARRKKAPVVITAVARELVGFIWAIAQVTPKQVAA

SEQ ID NO: 113614 - protein, 267 aa, unidentified
MSTVPVFVGIDISKDRLDIALRPTGEREAVPNTEPDIAALVARLQACHPTLIVLEATGGFELAVTAALAAARQPVVVVNPRQVRDFAKATGQLAKTDALDATILAQFAEAVRPPIRVLPDATAQALAALLTRRRQLVVMRTAEQNRLATALPPVRTGILAHLAWLDRQLAQLDEDLTCAIRESPVWREKDNLPQSVPGVGPVLARTLLASLPELGTLNRKQIAALVGVAPLNRDSGTLRGRRTIWGGRAPCEPRSIWGPWPPPAGIR

SEQ ID NO: 113615 - protein, 338 aa, unidentified
MQFKRVAVDTSKSVFTIHAVDNDEHPVVRRDLSRSQFQTFFSKLPPTVVVLEATGGSHHWGRLLSSMGHEVKLIPPQYVKPFVKRSKNDRNDAEAISEAASRPNMRFVPLKSAEMQADGIELNSRQILVEQRTALVNSLRGHAAEFGVVAAKGLHRVEKLLEVIEASLDVPPTAKTALAQLGKQIAYLDSQLEEIDRRLVTQQKSHPVAQLLSAVPGIGAISSLTLALQVDPKQFKSGRHFSAWLGLTPKQHSSGGKHRLGGISRAGHERIRQLLVVGAMAVVRHAVNGSKAATSWLLSLLERRPRKLAAVALANKMARIAWAMMMNGEEYRHPARTA

SEQ ID NO: 113616 - protein, 411 aa, unidentified
MHEKQKHLYVGVDLHKQHHVAVIINCWQEKLDEIKFENKPSAFSTFLLDIDKLIDDGLTPVFGLEDVGGYGRSLAQFLTDHGQVVKEVNPALSYAERKSHMTTQKSDSWDAECVARILVNKLDQLPDAKPHDLYWSIQQLVTRRNALVKAQGALKNQLHIQLSHHYPSYKKFFSEVDGKTALAFWERYPSPSCLEGVSIKQLTTFLLEVSHNTCSVKKANEILKLVIEDGNTTKEYQETRNFLVESIVRHILFGKQEIGKVERELKELMSLLDFQLDSMPGIDLVTASALIAEIGDVRRFPNANKLARFAGIAPVYFGSGGKGKEQKSKQGNRALHALFYNLAVQQVQVAKGSKLPRNPVFHTYYQRKLKEGKTKGQALVCIMRRLVNIIYGMMKHKTTYEMPIIKEKEVV

SEQ ID NO: 113617 - protein, 355 aa, unidentified
MNDAKYIGMDVHTATISATVRDSSGNLVMEATLETKAETILEFVHGLRGSLHVSFEEGTCAAWLHDLLKPHVTEVLVCDSRKNALLRVGNKNDREDARKLSELLFLNKLHPVYHGETGIRTLKELARSYLTITRDLTRVMNRLKAIYRGWGIACAGQQVYAPRYRAEWLAKITEAGVRRRAEIYYQQFDALAALRQEVRRELLAESRKHPAMRLLRQIPSIGPIRAALLIALMQTPHRFRTKRQLWAYCGLALRTYDSGEYRFVGGQLKRSKKAVTIRGLNKNHNHDLKNIFKGAATQAAATAGPLQNFYEARITNGMKPPMARLTLARKIAAITLLVWKKGVRFDAEQLKQQAA

SEQ ID NO: 113618 - protein, 281 aa, unidentified
MAKSTPLFVGLDVHNDSIAVAHAQGQSADPPVFVGAIGTRQADLDKLIRRLQAKTPTLVFAYEAGPCGYTLHRDLTGRGFTCHVVAPSLIPKKPGDKVKTDRRDAVELARLLRSGDLTPVYVPTVEDEAIRDLCRARDAARLTLKNAKLRLKAFLLRLGLHYVGRADWNDAHRRYLAKVVCPTPAQQIVFQESVRAVDEQVDRLARLEAELRELAPAWRLYPVVQALQALRGVQWLVAITVVAELGDLTRFTSPRQLAAFVGLIPSEYSSGPSRRDHQSRQ

SEQ ID NO: 113619 - protein, 308 aa, unidentified
MLTERTPSPAMRFVALDVHRQYLMVGAVAIQQQVVLSPRRFGFAAFAEWATSHLPHADAVVLEATANAWLLYDQLQPLVSEVGVAHPQAVKLIAAARVKTDSRDTIKLASLLAANLIPAVWVPPQEVRALRTLVTHRNRLVKPRTQAGNRLHSVLHRHKLDPPPGKPFAVHQREWWLTLDLSLAEKLRVQQDLSLYQTLEALIQEIEAELGRLSTCDPWVKQVPFLVHLPGLGVLSAMRLLAAIGEITRFPSAKHLVGYAGLGASVHQSGETTRGGRITKEGRSDLRGVMVEAAWVAVEHHPQRISPM

SEQ ID NO: 113620 - protein, 464 aa, unidentified
MKLPPNQGHNQPVLTEKVSSTLEEINQNAAGIDLGGGEHWVCVPADRTDKNVRRFGCFTPDLIAMADWLIECRVDTVAMEATGVYWIPVFQILEAKGFEVKLVNAHHVKTVPGRKTDVLDCQWLQKLHTYGLLSGSFRPQDQVCVLRSYIRQRDSLIKSASTHVQRMQKALIQMNLHLHKVISDVTGLTGMKIIKAIVAGEQDPQVLATLKDPRIKSSTADIAKALTGDYRREHLFVLQQELTLYEVYQQQISAIDAEIEKCLASFQPQTLDEPPTTPKKRRKKPTANHPNFDLHKYLYRMAGVDFTLINGLDALTVQTILSEVGLDPKRFPTVKHFTSWLGLCPGQKVTGGKVKSSKTRTVVNRAANAFRMAAFSLTHSRSALGGFYRRLRSRLGAPKAITATAHKLARLFYRMWITAGQYSDPGMDYYEQKYQELILKHLQQKAQAFGLELIPISDSTQCVS

SEQ ID NO: 113621 - protein, 387 aa, unidentified
MYYVGIDIAKLNHFASVVSSDGEVLVKPFKFTNDNDGFCTLLSALASYDRGSLIIGLESTAHYADNLVEFLVSKRYQVCVINPIQTSTMRKNNIRKTKTDKVDTLVIARTLIAQPHRFFSQEDIDLMHLKNLGRFRQKNIKERTRLKIQLTAYVDRVFPELQYFFKSGLHQKTIYALLKEAPTPELVASMHLTHLAHLLEVSSHGHFNKEQAKELRILAQKSVGSSDRALSLQVTQSVEQIELLDRQINDVESEMTEIMLGLDSVIMTIPGIGYINGGMILGEIGDIHRFSKPCQLLAFAGLDPSVYQSGNFNASHTRMSKRGSRVLRYALINAAHNVVKNNNTFKAYYDAKMAESRNHYNALGHCAGKLVRILFKMLTDDVAFNLE

SEQ ID NO: 113622 - protein, 326 aa, unidentified
METPFSPAVVGIDVSKATLAVCYPADGQPHHLEVSNSPAGFAQLVRTCPAESLYVMEATGTYYLALAYHLHAHGAKVAVLNPLIIKRFIQMHLSKGKSDRKDAQWLMRYGQQRATPSWQPDEAVLVECRQLEQVSEQLLKQKTMVTNSLEALAQQPVISPVAQQRLLQTKQLLEEQVKAVEEELLALLEQRYAQEMPLLRSIPGIGRKTAGMLLLFAGGFTPYANYRQLIAKAGLSPREHTSGTSIRGKVRITKMGGGLIRSKLYLCSFSAKRANAACKALYDRLVAKGKHGKVALIAVCNKLLKQAFAIVKSGVPYQADFTSLAT

SEQ ID NO: 113623 - protein, 319 aa, unidentified
METAPVTLWVAIDVAKETLEIGCSTPDTVRVRRVANAPAGFRELLKALPPRAHTAVVLEATGGYERNVIAELLEAGYRVALVNPRQVRDFAKGWGILAKTDRIDARVIALFAQHVQPRMLREMPEQQRELADLVTRRRQLLDLRTRESNRWAQTSAKAARKSIQQVLNLLDGQIHKLDKAIAELIDSDDDWKAKSELLQSTPGLGRVTAATLLAELPELGELNRQQIAALVGLAPFNDDSGQHQGQRHITGGRAAVRCVLYMATLVATKHNPTLKAFAQRLQKSGKKFKVVQTACMRKLLVILNTMLKNKTSWNPAFDA

SEQ ID NO: 113624 - protein, 308 aa, unidentified
MQIAILGIDLGKNSCSVVGLDVAGRVVLRRRLRREGVIKLAAGMPGCVIAMEACCGAHHLGRLLREHGHQVRLMSPEYVRPYVKAQKNDDRDAEAIAEAATRPTMRFVELKSEAQLDMQSLHRARDRLVGERTALINQLRAVLLERGIVVPQGRRKLERYVDALLAEEEIRLSPRTGLLVEDLRAEWRELDRRISAFDDEFAAQAHSDETARLLTSIPGIGPLNATALTAAIGNAQTFGRGRDLAAWLGLVPKQVTTGGKPKLLGSASAAIDICARCSFTVRVPPCQRCPKARRHWARGCVACSGGRM

SEQ ID NO: 113625 - protein, 410 aa, unidentified
MRRVRDRVAGIDVHRDTAVACCQLWAEQQLTVDKQTFSTTATGLRSLRDWLAGHEIELVVMEATGDYWKPVFYPMEGVFDDVWVVNAQHVKNVPGRKTDMADAEWLADVAAHGMVRPSFIPPPEVRSVRDLTRYRKTQIKARGQEIQRLEKVLQDAGVKLTSVASRVWSKSSAAMVEALIAGERDPAKLAELAKGRMRSKIPELVEALEGNWRPHHSVVAGRILAHIKFLDEQIESLNTEIVEATRPFDAAVTLLETIPGVSTLTAQTIVAEIGTDMTRFPTAGHLAAWAGLAPGSRESAGKHKPVGTRKGGRHLRTSMIEAAKSASRAKNTFFAARYRRVARRRGHQRATVAVAHSMICAVWHMLATGEVYNDLGEEHYDRYQQPERRHQRAITELQSAGYTITAPQAA

SEQ ID NO: 113626 - protein, 360 aa, unidentified
MKYYVMKYYTSTTEFNCGIDLHAHQMYVCLMDREGKKLVHTNIRHNDFNFFLKLVAPYRHDLTVCAECMFGWYWLADACQAAGITFVLAHALYVRAIHGGKNKNDRIDSEKLAHLLRSNLIPPGYVYPAAQRPLRALLRQRLNFVWQRTQLLTRIQSHQQAHNWQSPFPASTNRDRWQEHLLAHESDPVYQLSLQNSLALIGHYDAQIRTVEAQLQKLTKVHAHRDYTLLQTVVGIGEHLGLTLLYEIGDIHRFPTVKDFLSYCRLVKGTVASAGKIKGLRGAKLGNPYLRWAFGEAAIIAKRDPALIGPLYQRLEARMNGNKFKANTVLAIKLARSVYYILKNKTVFDPQRLVAALAHN

SEQ ID NO: 113627 - protein, 367 aa, unidentified
MKKHTTKSNSLSSADVSACSTVAIDLAKNVFQVAGEDALGQIIYEARIKSREAFLVLLHKLPAGVTVLMETGPGAQAWARLLQAQGKLARILPAQRVAEHRSGAKNDRNDVLAILRAGRDQNIAAVPIKSTAQLAMQALHRARQGYVRRHTAMGNQMRGLLLEHGIAMAQGATTLGRNVPRILEDATQPLPELLRELIAEMLGEWSHLGERIEVLTGRLETAAREDETAKRLMTVRGIGPIIATALLAKQTEPERFANARMFAAYFGTVPEQHSSGQTVRLGKMCKRGDAYLRSLAIQGAHAVLRQVRPDSEHPDDHRLRRWLSRHGQKGAAVRLANRNLRIVWVLLQNDQTYRRQPAGCQEATMTH

SEQ ID NO: 113628 - protein, 456 aa, unidentified
MSKRTGVTRGDKRRNERLAELRRLVPRANALVGVDLAEDKQALAVTDHDSRVLARKTVRVTLAHQLGKHLDWAVERARREGFFAVTVACEPTGSRWLHLQRLCEDRGIAFVCVQPLVTHIAREQEDYTRNKSDERDAVLIARLTGELRCYRPERLNEEWATLRHLGRRRARLVTTATGCVHQIRDYLALAWPAMLTTAARPFESVTWLAALAVVTERCGADPARLRELGLEEFTDLVRAEVPRFGGRRLTCRISTAVFEALTCTDGVAAQRRGLLRRTGWALEDLRVARRHLRQVEQEMVAQLDVLGVAASLASVPGMTAATAAAILAETGDPARFSSSRALVKHAGVAPASNDSGHHQGESRISRRGRPALRLAVWRVTWGMLRHNPVLAAKYTALTTRETGKLTTGQAHIACAAALLRWIYALTVHHTTWDPRIASGVIPHDQADTATTSPKAA

SEQ ID NO: 113629 - protein, 412 aa, unidentified
MSLPECDFYVGIDWAAQTHAVCVQDAAGKITAQFTIEHTADGFATLLARLGRLASDPMQVSVALERPDGRLVDALLEAGYPVVPVSPNAIKTWRDGEVLSGAKSDAGDAAVIAEYLRLRSHRLRPATPFTAQTKAVRTVVRTRDDIVAMRTAATNQLTALLDAHWPGATKIFADIESPIALEFLTRYPTAKHAAGLGEKRMHTFCVKHGYSGRRPAAELLARLRAAPAGTTDPDLVEAVRDAVLALVAVLRTLGAVRKDLDRSVTAHLGEHPDAAIFTSLPRSGQINAAQVLAEWGDSRQAYDSPDAVAALAGLTPVTKASGKYHAVHFRWACNKRFRKAMTTFADNSRHQSPWAADVYRRAIQRGHDHPHAVRVLARAWVRVIYRCWLDRQPYDPARHGNAIKINNGQIAA

SEQ ID NO: 113630 - protein, 348 aa, unidentified
MSKAKQWYVGIDAHKGSSSVCVMDVTGRVFLEQTCSSQPAHLISLLENLAGEKDVVIEETTIADFLYRCLRPYARSVVVASPRHNALLAEDDNISDQISAQKLATLLRMNCIKPVYHPLSELRHEFKSLVLFRDGQNCSLVRFRNKFKAIFGSYLIPCEGSAVYGQQQRQQWLDKLPYRSARFRVQELYEQIDDALASVDRTDKEIAHQARRFPEIELFKQLPGIGPVRAATWFAIIDTPDRFERRSHLWAYCGLGIVRRKSANEAGPQHLNRNGNPMLKNVLKSAAVQAIGKGDHNRFQRQFERLLSDHVPEAKARLTVARSIATTMHTMWRTGEDYQDDYKPRCLR

SEQ ID NO: 113631 - protein, 340 aa, unidentified
MTITTVGIDLAKNVFAVHCVDQNGKTVLVKPKVSRAALPELIASLPPCVIGMEACSGAHYWARVFRQYGHEPRLMAAKFVSPYRMAGKSGKNDAADAQAICEAVRRPHMRFVPVKDESQQAMQCLHRTRQGFIEEKTATYNRLRGLISEFDVIAPQSTDALRHMVSEQKNSLPLQVQQCVDDLLEHINRIEDNIAEYDRILSRMAKTDHRSQRLMELKGIGPTTACALVASIGNAHDFKNGRQLAAWLGLTPSQYSSGGKSKLGRITKAGDSYLRTLLVQGARSVLIGAEKRTDSFSRWVCTLVERRGYWRAVVAIAAKNARLCWASLHYGDDFRLYSAS

SEQ ID NO: 113632 - protein, 347 aa, unidentified
MVVSLIASVGIDLGKTTFHLVALDCHAKVIVRKKLSRTQLLAYTANLPWSIIGMEACSGAHFFAAKLRNQGHEVKLIPGQFVKPFVKTNKNDFNDAEAIAEAVTRQNMRFVPIKTDDQLDLQALHRVRDRLVHRRTALINQIRGFLLERGIAFPKGPANLRKQMPVILEDAERNITARMRRLLDDLWQEWKQLEANITKISEEIEHISHEDQGCRRLRQIPGVGPLVSTAMVAAIGNGAAFRNGRDFAAWLGLVPRQHSTGGKPRLFGISKRGNTYLRRMFVHGARAVLLRVKYDTGGLGQWVHQLEARTARNKVIVAIANKLARIAWAVLFNQQDYRATAAAAVAA

SEQ ID NO: 113633 - protein, 362 aa, unidentified
MPKDQAPVTERITAGVDTHKDLHVAAIVDAYDRVVASECFASTRQGYKKMLTWMRSFGAIERVGIECTGTYGAGLLRYLQAAGITVLEVTAPDKVDRRRRGKDDTLDAINPAHAAYSGVRTVTPKSRTGMVEALRVLKSCRKTAISARRVALQLIQNNIVSAPDPLREQLRSMTRMQLIRTLAAWRPDLTDYRNVTSAYRIAFKSLGRRYLELHDEITDLDTMIAALVDELAPDLIARIAIGYETAAQLLITAGDNIGRLHSEAGFAALCGVSPVPASSGKVQRHRLNRGGDRAANSALHIIAVGRLRLDPTTQAYMAKRLSQGNSKLEAIRCLKRYIAREVFYCLRKRNLEISQTKSALDC

SEQ ID NO: 113634 - protein, 412 aa, unidentified
MDLVYARCAGLDVHKATVVGCVRVPGLGRGERHTETRTFATTLRGLEELTTWLTGHGITHVAMESTGVYWRPVYAGLEGVVQVLLVNARHVQMVPGRKTDGRDCEWLAQLLECGLLRGSYVPPAAGRDLRDLTRLRKALIRERGHHVNRIEKTLELANIKLGIVVTDIMGKTGRAILEALSAGHDAPEQLTALAQGSIRTKKQAALREAVAGRLTPHYAFLLRQHLSLIEALDTHIGTLDARIETAMAPFAEAAALVQTMPGVATRAAQAILAETGVDMGPFPTAGHFASWARLCPGTHESAGKRRPTTTGQGAVWLRATLQEAAWAAARTKRSYYRALYHRLKGRRGAKKAIVAVQHAMLVALWHMLKRRVPHHDLGADYFDRRNTARLRHHHVRRLQQLGYQVVLVQEAA

SEQ ID NO: 113635 - protein, 478 aa, unidentified
MRKSKPQQHLKSQVGMAKKNTTSSKSKSKARKNVLERINPNAAGVDIGANFHLVAIPEDRAEENIKKFGPFSSDLHRLADWLTEHQIQTVAMESTGVYWIPVFQILEHRGFEVKLVNAAHVKNLPGRKSDVSDCQWIQQLHTFGLLNGSFRPKDEVCVLRTFLRLRDTLVKDCSSHVLRMQKALTEMNVQIHRVLSDITGYTGMAIIRAILAGERDGLKLAQMKHPQVKASTERIVKALEGDYRTEHLFALQTAVALYDAYQLKITECENQIEQQLEHFETKLDFEKILEQSGALKARSAKVRLGLQRQAYLTSVCGVDLTRLPGLSTLAVEVIISETGLNMDCWKSERHFCSWLKVCPDNRISGGKVLSSRSRKTKNRAAGMFRLAAQGAMQSKTAVGAFIRRLRARLGAPTAINAGANKLARLFYRMLKFGAPYVEQGQTYYEQRYKDRLLYNLTKRAKELGFQLTPFQPATVSVS

SEQ ID NO: 113636 - protein, 352 aa, unidentified
MRILALDLGKYKTVACEYEGESGQHRFATVATTPKALHDLIVDREPDRVVIEICSIAGWVWDLVRTLGVEIQVANTADERWRWRKVKQKNDRRDALKAAQLSAVNQLSLVHVPQIEVRQWRALIAYRHHLVRRRTKIKNHVRDLLLREGQLLPRGRSAWTQVGMAALEAMVKPLSEMQISELWRGELGVELAQLKELQSQIVTVEAKLDELAAADSRIRLLRTIPGVGPRLAEAVVTMFDDPARFRTAGQVSSYIGMVPKSFDSGETERSGRITRHGHRLVRSLLVEIAWAALRHNSWARECFQRISGGKKSRRKIAIVAVGRKLLVRCWGMLRHRTPWQVSVAEVVATGSK

SEQ ID NO: 113637 - protein, 355 aa, unidentified
MNQEKYIGMDVHQATISVAVMDSSGKLIMECILETKAATILEFLHGLRGTVSVTFEEGTSAAWLHDLLKPHVANLVVCDPRKNALLKDGSKSDRIDARKLAELLRGNQLHSVYHGEHGVRSLKELGRSYQTLTKDVTRVMSRIKALYRSWAIPCSATTVYAPRHRAEWLAKIPQPGVRRRAERLYQQLDLLQPVRQEARGDLLRESRKHDAVKMLRQIPSIGPIRAALLVALLQTPHRFRTKRQLWAYSGFAIETHDSGEYRYVRGKIQRNRERITVRGLNDNHNHDLKNLFKGAALSASTQPGPLRDFYAALVEKGMRPTMARLTLARKIAAITLTIWKKGVSFDAKQLHRQAA

SEQ ID NO: 113638 - protein, 343 aa, unidentified
MEIRSVGIDLGKTSFHLVALGESGHVLFRKKFTQRQLIVFTANLSTSLMGLEACSGAHFLGRALREQGHDVRLIPAQFVKPFVKSNKNDFVDAEAIAEAVDRQNMRFVPIKTDDQLDLQAIHRVRDRLIARRTAVINQLRAFLLERGMIFAKSPAKLRKEIPEVLEDADANLTPRMRNLLDLLWGEWKMLEQQLGGLNEQIEQIASADAACQRLRKIPGIGPLISTAIVAAIGNGAAFHKGRDFAAWLGLVPKQHSTGGKARLLGISKRGNRYLRKILIHGARAAVLRLKRERAPMGAWMTALEARAPRNVLIVATANKLARIAWAVLSSGEEYRAETSLVAV

SEQ ID NO: 113639 - protein, 405 aa, unidentified
MAVMIGVDPHKGSHTAVAIGADEKPLGRLRVRASAAQGEKLVAWADAWPERTWAVEGAGGLGHLLAQQLVAAGERVLDVQPKLAARVRLLQAGDTNKNDPNDALSVAIAALRSRARREVAADDYTAVLKVWSKRHRDLSRARNQVACRLHAVLCELVPGGFSKEISAGQAARVLEQVTPSGAIAQARCDLAGQFLDDLRNLDAQLRGTKKKLAAAVRASGTTLTEIFGIGPVIAGTVIGDAGDVSRFATRDHFAAYNGTAPIEVSSGGRKTYRLSLRGNRRINHAIHMAAITQIRNRHSDGRAYYDRKIAEGKTHKEALRSLKRRISNAIYARLRADARQAAAASEEGPGGQPGNDSDSSATGSHPARQLFGQATPGPSTTIRPGKTASTASPSKPIPKKIQATT

SEQ ID NO: 113640 - protein, 358 aa, unidentified
MTTKNTDTIGIDLGDNSHEACILNKAGKVIATTTLLNCKSELEAFSAENAGAKIIFEAGTHSPWISRLFEELGHKVIVANPRKLSAIYKSDNKTDERDAEILARMGRFDPKLLHAIQHSSLKHQRDRKVADTREALVDARTKLINYVRSSLKSFGVFLPKGTSTATFAKKAREYLAEEDYDLFASAIETIADLTERIKAADKEIEILIEEDYPEALRLQQVAGVGPITSLTFVLTIGTPDRFDKARDVGPFLGLVPKRDQSGESDKALRITKAGDRQLRRLLVSCAQYALSDKGPDCALKRSGLKRAKGGGKTDKKKAVVKTARKIAVLLLALWKDEHGEYLRFPDQPNENAAKEEAA

SEQ ID NO: 113641 - protein, 354 aa, unidentified
MAHQFVGVDAHKRSVTVAVVDAVGGQLVAASFANSSSGVAEVMTWLSAVAPAVLRVGVEGSSGHGRHLAERLVAAGYDVREVPPRRTAERRRARRAPKTDYHDSYAIARAVAAEPTLGPVKPGAGLGEAHDELVIVRDHRNLLVQRRKTMLNQAEAALDAAPLAWTDADRAGRKVLPRLRALLHAAQQPATAAERELLALLSELDADIAELNRRIRVLDKQLAALIAACGSTLLEERGIGVITAAALLAEVGDPTRFRNEGAFNRWWGGAPVAVSSGEGDGVPTRHRLDLLGNRAINSVLYIMSITQGRYHPPATAYLARKQAEGKTRKEAIRCLKRHLARTVHHTLRTANHLT

SEQ ID NO: 113642 - protein, 321 aa, unidentified
MHKYNEIFGVDISKDVFDIMNSKGDYDQFSNDLNGFKKFTKKLTKQTLVVMEATGYYHYCLAQYLYQQGYLVSVVNPLSVKRFIQMKLSKIKTDKSDAKAICEYGQFNQVPLYTAKDESQAECLQLIRLIDIYLKQSTAIKNKLHGETTLGIPSKVVYSSLNRSLKSIKKEISLLEDRLNDLVKDYQQKQLTLLKSIPGMGTKTAIMLIVMTDGFNKFENSKQLCSYAGITPTIRHSGSSVRGKSRISKMGNQKMRNLLFLCSFSACKYNKGCRAIYERIVSKGKSKKLALIAVSNKLLKQAFAIAKSGLPYDDNFVSVLK

SEQ ID NO: 113643 - protein, 313 aa, unidentified
MSPNNTPILYAGLDVAKLVLELHLAGRSRTLANDAKGHAQLLKLLRAQPQAHLVCEATGGYEQPVVRVCHAAGVPISIVEAGRVRYFARAHGQRAKTDPIDAAVLAAYGVTFQPAATPPVSASQQQLAELTQRRRQLLQLQTNERNHAEQYRDAFRRRQSRQLAKTLEKQIAECDEAIAALIAQDVPLAHKAERLKAIPGVGPVVAATLLAELPELGRLNPQTAAALAGVAPYNRDSGGQQGRRRINGGRVAVRCALYMATLSAVRHDRILKAVYERLLAAGKKPLVAMTACMRKLVILMNRLLKNPNFQLAS

SEQ ID NO: 113644 - protein, 454 aa, unidentified
MGKLKQSSSMPIIHRNAAGIDIGSKFHVVAVSPEITDEPVKTFKSFTGELHAMAKWLKECHVETIAMESTGVYWIPAFEILENYGFEVYLVNAREVTTVPGRKTDVNDSQWVQQLHQFGLLHASFQPSKENAELRAYLRQREKLLDYKAAHIQHMQKALMQMNIQLHHVVADVNGKTGMEIIRAIVQGQHAPDELVKLRDNRCKNSVEVMKAALTGNYKAEHLFSLTQALELIDIYMEKIEACDRVIESTLERLHQLADSMHTTPPKPKGRDKSKNAPSFDVRQSLFNMIGTDLTQIDGIGSSIALKLVAECGTDMTKWPTSKHFTSWLCLAPCNKISGGKVLSSKTRRSSSRAATYLRLAAVVVGKTNTALGAFYRRLAWRTGKAKAVTATARKLATLFYNALRYGMEYVDKGANYYKEQYRKKIIGGLRRQAESLGYTLQEKVPALAETEVS

SEQ ID NO: 113645 - protein, 358 aa, unidentified
MRIAVLGVDLGKNVCSLVGLNASGAVVLRRRAKRETVIALAAKLSPCIVGMEACCGAHHLGRVFAVHGHDVRLMSPEYVRPYVKAQKNDDRDAEGIAEAATRPTMRFVELKSQEQLDMQTLHRSRDRLVGERTALINQLRAILLERGIAAPQGKRKLEQFLFNLMDEQGGPGLSPRMIMLINDARAQWAELDRRIAAFDAEFVRWTKENEDGRRLATIPGVGATIASALIAAIGKGETFEHGRDLAAWLGLVPPQFTTGGRPKLLGISKRGNRYLRKLLIHGARAALPMSPGPTRRSADGPKHCCSAPIPMSPLWRSPTSSPGSPGRCYGAAKGSWSGDCPWRRSRWSGKSRSALTDL

SEQ ID NO: 113646 - protein, 351 aa, unidentified
MERYIGLDTHASSCTLAVVGPSGKRLGSHVVETNARALIEVLRGIPRNRHVCLEEGTLSGWLWEVLEPHVEELVVTGVHESRGPKSDKRDAFALAEQLRIGALETVVYKDRGRLRRLGQLARAYGFVTRDTVRVKNRLKSVYRSRGVWPGKGRSVYGKGEREGWLAKLPEASRVVAEVLYEEHDALSVLQAKAKRALLAEARRHREWHIVKTCPGLGPIRTAELLPVVVTPYRFRSRSGFWAYCGLGIVMRSSSDWVRTPTGEWVKTAVQRTRGLNQNFNHTLKRIFKGAATTVIGRGEDDPVYHHYERLLDGGTKPNLAKLTLARQIAAIALAVWRSGEPYDPKRLEATE

SEQ ID NO: 113647 - protein, 352 aa, unidentified
MEHVGLDLGALHTHVVVMDAQAELKKRTKVRTEQLAEWLRKQPTCRVVMEACTQSPAIARAALASHHETVIVPGQVVRALGVGARGIKTDDRDAEVLARASVRNEHLPSVHLRSEESTAMRELIAARALLLKSRTTITLSVKSWMRGQLIGIKGRATSNAFSDAVRSTLLKRGEGMPSTIAMLLETYDHLCGQIDKLDEQVKEMAAHDATCQLLMTVPGVGPCVSLAFRSHLDDPTRFESSSKLASYLALVPGENTTGGKIHRTGMIKAGPTYLKALLVQSAWAAWRSRPNEPMVLWARAIAGKRGRRIAIIALARKLGVVMWSMWKNRTKYDPSKASTVRATSASEVSQPS

SEQ ID NO: 113648 - protein, 445 aa, unidentified
MIILALDLGKFNTMCCIYNSRTRKHEFINAATERNYLTTLLKKTKCDLVVMEACGPSGWINDLAISLGQKTLVCSTNEDAWKWSNVKRKTDKDDALKLARMAAMGELKPVHMPSEANREFRSLVKYRKTLDSRICKMKCTIRAWFVNHGIAIDTGEKAWHTGRTYINSFRKPIADCAPNELWKGELDNELTQLDAVTAQMDAIVKKLEAIGKTDPRIQRVKTIPGVGPRTAEILVACIDDPNRFANGRQVSAYFGLVPRQYQSGETDRNGRITKRGNPIARTILVECAWASLRYNPWAKGVYDRICGKQKTRKKKAAIALGRKIAVLAWAMLRDEKDWDTSIMLNTTKSFGGKPPLDEKDLLAMKPKECRHKRKNRLAREARLNKQQTKASQSPKALTKNPPNVKASKPTKSTDSKRTSKPLAQTADRLKSTTKPRRARKLVSAV

SEQ ID NO: 113649 - protein, 364 aa, unidentified
MKIIGCDFHPSFQQIAMVDTESGETTERRLLHGDGEAQQFYESLSGPVLVGIETSGNTLWFERLLEKLGHQLLIGDATAIRAAAPRHQRCDPRDARNVLQLLLEKRFPTIWVPTLAERDLRQLLKHRHTLVQMRTRAKNQLQHIAMNQGMQKKRQLWSKAGLEQLKSLALEPWTKRRRDDLLKILEQMDSHIAELSKAVAAEAQHWPQAVLLMSHPGVGPIVALATVLTLGEVSRFARGKQVASYLGLIPREDSSGEHRRLGSITKQGNSFMRFLLVQAGMSAARGDAELGRVYKRLAQRKHHGVAKVAVARRLVLRLYWMLRTNRRYPEVVRMQGSSSHPVAEVKADRLSEHPASRGCTHPGR

SEQ ID NO: 113650 - protein, 343 aa, unidentified
MDHFAGLDVSVKDTSICIVDDTGRITREVKVASEPGALLTVLMNASHRFKRIGLEAGPLSQWLFSALAEAGLPVICVETRHMRAVLKAQINKTDRNDARGIAQMMRVGLYRPVHVKTLRSQKLRMLLTHRKLLQSKAIAVENDLRATLRNFGLKVGMVGTARFEARIKELVENVADLVVLVEPLLVVRRVVREQIGVLHRRLLAIVRDDEVCRRLMTVPGVGPVVALTYRATVDVPARFRKSKSVGAVFGLTCSRDQSGERDRPGAISRCGDEMMRAMLYEAAQAMLLRSAKWSWLKAWAMQIARRRGMRRAIVALARRLAVIMHRIWADGTEFRWTREVAVA

SEQ ID NO: 113651 - protein, 384 aa, unidentified
MSAKPKGAADVVMTGVRSPESADVEVVLGVDTHLDFHVAVALDNLGRRLGELTVPTTTKGYKRLLSWAEDFGAVRCAGVEGTSSYGAGLARYLTATGVAVAEVERPKRRHLRRNGKSDPIDAEAAARTVLAGETAGAPKSADGRVEMIRALRTARRSAVKARGQAANQLQALVVTAPDALRERLRRLSTRRLVAAACRFRPGTQPETPEAATKLALRSVARRHEALSEEIAELDVQLDRLVAEAAPELLALPAVGTDHAATLLIVAGDNPERLRSEASFASLCGASPVEASSGKVVRHRLNRGGNRDANRALHMICMVRMGQDRRTREYVARRTAEGKSKREILRCLKRYVAREVYRVLVVAVEASPLTTGYLGASSGRLSVMS

SEQ ID NO: 113652 - protein, 336 aa, unidentified
MQITTLGVDLAKSVFQLHGIDESGKVVLRRKVRRGALLDVLSNLAPCLIGMEACASSHYWAREIAAMGHEVRLIPPAYVKPYVKRQKNDMADAAAICEAVTRTNMHFVAIKSAHQQAVLMLHRARDILVRQRTMLINALRAHLAELGIVAARGPHKLCFLLSELKNGDCELPGLGKSALLCLVRQVEGLESEIARLDCEIQAWHRESAVSQKLATIPGIGPLTATALAATIADPSQFRSARQFAAWLGLVPRQNSSGGKDRLGRITKMGDSYLRKLLVVGATAVLRHAIRAQTRTGQWLRHLLERKPSRLVSVALANKTARIVWAVMSKKEAYNAA

SEQ ID NO: 113653 - protein, 410 aa, unidentified
MRIIALDVHRSFAQTAILENGKLRDAGKIDLEYSRLLRFARKLKPDDEIVIEATGNTSAIVRVLLPFVGRVVIANPILVRAIAWAKVKTDKIDAAVLAKLHASGFLPEVWMPDEETEARRRVVAERTQLVSQMTRLKNRIQSVLHANLIPPYKGVLFSQRGRAWLEAQPLAEDQRRVIVRHAGELDRLGAELAEVDKSLAQAALEEPRVKRLMTITGVNSTVAMSVLAAIGDIHRFSSPEKLVSYFGLNPRVRQSGDKPAYHGRITKQGRAHARSMLVEAAWVISGAPGPLRAFFIRIRDKRGKHVAAVATARKLAVIIWHILSKDEDYTWNRPALLQWKLRKLELKAGHPSRRGGRQKGSAAAYSNKSVRDSERETIANAEDEYRRFVATWKQQSPKGRSGATKEVRRS

SEQ ID NO: 113654 - protein, 369 aa, unidentified
MSNTHNRLTAAAPARCPLELREQARARARSGAVAVEALSKPERLAGSKSRIEHKEGSNNMEQFVGIDVSKAWLDGEAVPQSRPMRYGNDSAGIATLVRALGADPPALVVLEATGGFETEVASALAAAGVPTVVVNPKQVRDFAKAMGILAKSDRLDARVLALFGQRIRPQVRPLPSPEQRDLAELLDRRAQLVSMRAQERTRLATALAVAKPSLREHIQWLDARIGELEIELTARLRNSAAWKVKVDLLKPVPGVGKVLLFTLLARLPELGHLNRCDIAALAGLAPFADDSGERRGQRFIRGGRAEVRKALYMATLSATQHNPAIKAFFARLTAAGKPFKVAMTACMRKLLTILNAMLKTNQPWQPRVA

SEQ ID NO: 113655 - protein, 387 aa, unidentified
MKKDSIFEKDSRKKGKGTKKGELSNQELVAKIEALQRERETALKLTIGLDLGDRSSCYCALDEKGEVIGRGVVVTEGKEMEQLFGQLPASVVALEVGGHSPWVSRLLEKVGHKVIVANARRVKLISQNSGKNDRLDAEFLGRLARADEKLLAPIRHRSETAQADLMGIRVRAQLVELRTETVNAARGLVKSFGQRLAKCDADSLKESHAKDLEPAIRGHIERLLRVVGELTKEIAACDEELEKLSAERYGEETKRLKQVPMVGTITSLAYVLTLDDASRFERSRDVGCYLGMRPKRDDSGQSQPELRITKEGDVYLRKLLVQCAQQILSRRGPDCDLKRWGEKIAAKGKKKAKRRAVVAVARKLGILLHRLWVSGEPYQPQRHKQAA

SEQ ID NO: 113656 - protein, 369 aa, unidentified
MNENITWVGLDAHKRSISVAMLLPERRQALEWEVPNEPSAVKRLARKLEREAPGEVRCCYEAGPCGYALQRQLLDADVICEVVAPSLIPVKPGEHIKTDQRDARKLAELLRAGLLTEVRPPSKDEEAARDLCRCREDAVEDLARCRHRVLKMVLRRGLVFGVGKKAWTRAHREWLRSIRFERAADQAVFEDYLLAITQVEERIKALDERIEVLGAEAPFRAPVGWLRCFRGIDTITAMTLVAELHDFRRFGSPRELMAYLGLVPSEHSSSDKTRRGSITKAGNSHVRRVLVESAWHYRHPPAIGETLRRRRHGQPPRAIAIADKAQQRLCRRFRRLIERGKPNHKAVIAVARELAGFVWSALTELSRAA

SEQ ID NO: 113657 - protein, 311 aa, unidentified
MTDDTIGIDISKATLDIHRLSDGKTMSFSNCPAGFKALSRFCAKTAVARVVYEATGAYHGGLERALGAHLPLVKVNPLQARRFAQAQGVRAKTDAVDAKMLAEMGNAFALVPDEPASGIQHDLKELRAFRSGLIKDRTSIINRLKTQTLSITSRQSKARLAQVDKQIAEISAELDRLISSCDTLAHSMKILRSIPGIGAVCAATILIEMPEIGRLDRKQVASLTGLAPMARQSGQWRGKSFIQGGRKIVRDALYMPALVAMRHNPDLKAKYQALIKAGKPPKVALTALMRKLIELANALIKADRNWVKRGA

SEQ ID NO: 113658 - protein, 423 aa, unidentified
MDVMFERVAGLDVHKAMVVAAVRIVLGAKVERECRTFETTTAGLLELLAWLTQARCTHVAMEATGVYWKPVWSILSDGGFELVLANAAHIKNVPGRKTDVNDATWIADLMACGLIKASFVPDAEIQHLRALQRARKQLVHEQTRYTQRIQKTLEEANIKLDTVISDILGVSGRKMIEAMIAGVRHPAKLAALADRRIKASPKELYDALHGRLTDHHRFMLKLYLGQYDALDRSIIEIDQQVAAAIEHMDREVAAGNAPFRSLINLLSTMPGVGAASATAILAETGTDMTHFPTARHFVAWAGLCPGQNESAGKRKSARLRKGAPWLKTALVQAAWSAVKKKNGYYRAQFQRLKARGGAKKAICAVAAAMLTAIYHMLKNGVAHADLGADHFDRRSTDSKAKRLVAQLTKLGFDVALQPLEKAA

SEQ ID NO: 113659 - protein, 311 aa, unidentified
MVIIGIDPHPGSHTAAVLDKNGKVLNHLSIVNDKAGIKSLKKWLKSYEVEACAVEGANNPFARELTCELMKQYKLVNINANLTSQYRRKRTSTKNDEVDAENIARAYLANPDLSTFCVNDNIEQLKALTRTRENLVAQLTAHGLSLRTAEQASVKAALESVISVLKAEIKKLEQAMKKLVKALMPELLELQGVGLVHAATLLAEVGDVRTLKSQHAFAMSAGCAPVQRSSGGQKRYQLNTRGNRKLNKVFHMIVQVRLRLDEATKTYVAKKEQEGKTKRAAFRCLKTYIARQVFKFMLDNTRSHPERWLGT

SEQ ID NO: 113660 - protein, 444 aa, unidentified
MACSGMILIREVADAPVIMGISKPAGLKSPCGEVKIVNPLFVGIDVSSRNNVAYLMKPDGSKHSSFSVQNNLGGAKLLSERIVSALRSMQLSDVVIGLEATSIYGDSLVYALREDGRLGQFQRKIHVLNPKQVRKFKEAYPDLPKNDFVDAFVIADHLRFGRIAREVYMDDYRYKALQTLTRARFEVIQNLTREKQRFANYLFLKCSGMAQDKDIANSSSTTIALMERFETVDDLANSDLEELTAFVTETGRGRFADPAATAIAVRAAAKGSYRLPKTVNDTVNQAMSVSIASMRALKEQVKVLDKAIEQQFEIIPNTLTSIPGIGKVYSAGIIAEIGDIHRFDSQASVAKFAGLVWHKNQSGEFEAEHSRMIKSGNRYLRYYLLEAANSVRRCDSEFRRYYDLKFKEVNKYQHKRALALTARKLVRLVFRLLKDNRLYIPPEG

SEQ ID NO: 113661 - protein, 405 aa, unidentified
MEIIVERGCGLDVHKKTIAACIMGKGIKKEIRSFSTMTNDLLRLKKWLKEKGITHVAMESTGVYWKPVFNILEDSFEVILVNARHIKNVPGRKTDVKDSEWICKLLRNGLLQGSFIPPKDIRELRDLTRYRRKLVQAISSEKNRVQKILEDANIKLSSVVSDTFGISGSEIINALIKGEMTIEEMSELAKGKLCKKKDELKEALVGNFQEHHRFMLKASLEHIHSIEKIIERLDFEINKKMDKYREEYELLQTIPGVKEHGASSIIAEIGTDMSRFPSEEHLSSWAGMSPGNNESAGKKKACRINYGNKCLKGTLTECAWAGSRTKNTYLKAKYKSLVGRRGKKRALVAVGHKILIMSYCILKYKVAYKELGIDYLDNRKKEKIVKSYINRLNNFGYKVIIEKAA

SEQ ID NO: 113662 - protein, 475 aa, unidentified
MTDYYLGSDASKGYCDFVILDKSKEIVEPNFQLDDTYSGHQILIKTLKGFFAKNPDMVFYAGLESTGGYESNWYHTLLNLKDTVNIKVARLNPVGVNHHKKAGLERNSTDKISARVVAEYLIDHGKNIVYNREDAKVALKKEWKFIKMLNKQCVQLLNQFESALYNTHPHLLTYCRNEVSNWLLMVVMQYPSAVKLSEARPKTLAKIPFVTLERAKELVKNAKESIGAEQDEVTEIRLKSLAQQILHLRQLIKTQTKAMMHFCPFAEIEIIKSFVGISEFSAVGLMLVIDNIERFKSCEKLSSYVGVHPVYKESGDGIWGYRMSKQGSKEVRSILFNVARCSIIHNEMIKNRYEHYLAEGKEKMSAIGIIMHKILRIIYGMLKNNQKYDPQVDQANREKSNKKKIENGNGNSNRTKPDKNRRYQEQDQNAPISRRQQKKRKQLQTVQTKQIDNKGIGKTDKQTNSLGKAKQKEKA

SEQ ID NO: 113663 - protein, 367 aa, unidentified
MQKRTTKPQTAHLADLSRCTTVAVDLAKQVFQVAGEDAGGVLVYEKRIQSREAFSTLLGRLAKGATVLLETGPGAQAWARQVQAVGCQVRLLPAQRVAEHRSGAKNDRNDAQAILRAGRDTAIHAVPVKTAEALAMQAVHRVRQGYLRRRTALGNQIRGLLLEHGLAIPQGAAALSDRVSRILEDATLPLPDLLRALIADLQAEWQALEGRILMQTKRLEQSAHADKTACRLMSVRGIGPIIATALVAKQVEPERFPNARQFAAYVGLVPDQHSSGQKVRLGKMSKRGDGYLRSLLIEGAHAVLRTLKADSEEVDDRRLNRWMQRHGRKGAAVRLANRNLRIAWVLLQSDALYSRNPPVRPEAAMAE

SEQ ID NO: 113664 - protein, 316 aa, unidentified
MSAPQVFVGIDVAKAHLDIALRPMGERWTVANDEPGITALVIRLQEIAPQLIVLEATGGYQRAVVAALAVAGLPVVVVNPRQARDFATATGQFATTDPLDARALAHVAEAIRPTPRPLPDAQTEERRALLARRRPLVDMRTAEHNRLGNAPRRLQADLHAPIAWLHERLAALDDALDTTRRASPVWRERAELLRSVPGIGPVCSRTLVRDLPEGGTLSRQRLAALVGVAPLHRDSGTLRGSRTIWGGRAHVRATLYMRTLVAVRYHPVRKAFYERLRARGKAAKVALTACMRKPLTILNAMVKHHKPWHVQEVPRA

SEQ ID NO: 113665 - protein, 358 aa, unidentified
MLYLGIDQHRKQWTVNLRDELGEVILQRQVSTEPARAEAFVSELAARAATARGCVAIVEVCGFNDWLLALLERHQLRVLLVQPESRSRRKTDRRDASQLSETLWVNRQRLVAGLPVRGVRVIARPTPDEAAARQLTGLRRQLGQWRTRTYNRIQRLLLKHNLQESRPTKTMWTKKCRVWLEQLTLPVVDRLNLDLLIAQWKLFDQQIEQVEQEIAQACARDANAALIATTPGGGHYSSLTLSSRIGDVRRFKRPKSLANYFGLAPSCANSGDNNRRLGSITKQGSVLARHVLGEMVLHALRRDDVLKRWYLHIKRRRGAKIARVAVMRRLTTILWHMLAKQQPYAACRPRTRLPAAAS

SEQ ID NO: 113666 - protein, 412 aa, unidentified
MEPIYTSCCGLDVHKKSIQACVRRVGKGGKIQQEIRPFGTMTQDIMALADWLSQEEVTHVAMESAGVYWKPIYNILEGRFDILLVNARHIKNVPGRKTDVKDCQWIAHLLQSGLLKGSFIPDRTQRELRDLTRHRTKLVDQRASVVNRVHKVLEDANIKLGAVATDVMGKSGKDMIRALIEGEKDSAEMADLARRQLRGKIPQLRLALEGHVTDHHRFMLGQLMDQLDYLDRQIDLFSQRIEEVSRPFAGAIEEVMRLPGFEKRAAENVIAEIGCNMGQFPSADHLSSWAGICPGSNESAGKRKSGKTTKGSKWLRATLAQAAWAASKKKNSYFHAQYGRLAGRRGKKRAVIAVAHSLLTVIYYVLRDHVDYKDLGRDYFDKLNSKRLVPYLVNRLKNMGYEVNLTPLESAA

SEQ ID NO: 113667 - protein, 415 aa, unidentified
MKVVYPVCCGIDVHKTFLVGTIISTTNGVQPNYRKKRFSTYNRDLHRFADWLHMNNCLDVCMESTGKYWVPVFNILEEREIRVTIANPKWVKAVKGNKDDTKDSKWIGDLFRLGLVPGSFIPPKDIRILREFTRYRYKLVSMKSSEKNRFQNAFTVCNVALDSVVSDMFGKSATAITDYLISENPFNSEYCVTLLQRSLKKKFDSVLESIEGYSITPEQKLRMRIVRSHLDYITNAVSQVDSSIDAMVAKHEGLISLLCTIPGVDRNSAITIISEIGTDMAQFGSSKRLCCRAGLTPGNNESAGKKKSVRITRAGVYLKPALVQVAHAAVKATDNSYYRLKYEQIAKRRGKKRAIIAIARMILTAVFKMMSTGEVWTPADLFKVDMPETLKEKQLAKAVKQATKFLEKQGLTVAS

SEQ ID NO: 113668 - protein, 331 aa, unidentified
MKNFLESVGIDISKDTIDVALHLGQQYRQFKNSPSGFRTMTSWVKSLRVHPGSTLFCFEHTGWYCLELCWFLEDRELPFHCAHALQLKRSLGLRRGKSDKTDAYDIARYAWVNREEIPLSHAPARRLVELQRMLSLREQLVKQSTAMKNQEHAMRLLVKGVTNDPSMAIIRETIVFLKGQLEAIEKQLEALVEATPEFASNYALLKGIKGIGLVLALELVVHTHNFTRFATWRQFSSYCGLAPFPYQSGTSIHRKPKTHPICDKRMKSLLSMAAMSTIRSDPEMKLYFKRRVDEGKNKMSVINIIRNKLVARAFAVVKRQTPFVELGKFAA

SEQ ID NO: 113669 - protein, 339 aa, unidentified
MNNNMEACGVEVSARELVVARKGKAGVQLTRFANTAAGHRQLLRTLTRGGQRVRVVLEATGLYALDLALLLSAQEQVQLMVANPRAVRHFAQAMMQRSKNDQLDAVVLLEFAERMPFTPWVRPQENALALWAIARRLQALTRLCTAEKNRAHAMGLSEAIPATVRRDIARSLQFHQRAMKKLRQQALQCIAADAQLQQRYQLLRSVPGLGEISAVQTLAELLLLPEDRDVRQWVAYAGLDPREYSSGTSVRKYTRISKVGNAHLRRALYMPALVASRVEPHMRGFYEHLLARGKSKRQALVAVARKLLHAIYGMFRSRQSYDGTRVYLLPGLAEKPLEL

SEQ ID NO: 113670 - protein, 390 aa, unidentified
MFAGIDVASERHVLARLDGTGRPLGRPIGIDEDAGGYRMLLEALGPPPALVVMEATGHYWKNLYATLVAEGHDVVLLNPIVARRFQQAQLERTKTDAIDAAALARFAFEKRPAPSYIPDAAAEALRELVRHRDRLQQDFEDRVLQLHRLVDLGFPEFTRYVKGMHTMLATALLSECPTAAAFARTPPRRLAKLRYDGRHRVGEDLAERLVEAARRSVGQHHGPVYDLQVRHICQDLDLWRRRLKELDSDIGGLLDAHEVGRLLTSIDGIGPNSAARIIAIVGDPARFRSAGAFAAYVGVVPALRQSGKRTGTRAATGFGNAKLRRALWMTMLAAVRLNDWLRPFYERLRAAGKPPKLALIAAMRKLLHAVYSVAKNRKPFVPITEQARAA

SEQ ID NO: 113671 - protein, 357 aa, unidentified
MKKVYRLQHCVVRGKEIFVGLEDSKRTWKLAVRSEKMLIHQVSMEAKYPALIGYLRNQFPECTIHLIYEAGFKGFNLYDALTEDGIDCVVIPPHVVTEPKVNRVKTDKRDARRLAKVLENHDFKDACFVPDKERREDRQVSRTLIALQKDVVRTRNRIRKFLQFHGIEVDFPDRWGRNEFRALKKLELSEPLRISLDIFLTQLEELWAHQVSLRAALKKLCKKERYHKAYTIARSLPGIGWFTAIRLVLELGEDLTRFTSGKKIASFVGLTSSEDSTGETEHKGRITGMGSGFIRSTLVENSWMSITKDPVLLAKFTRVWHASGSRKKAIVAVARMLIVRYRACLISGTPYVIGVAA

SEQ ID NO: 113672 - protein, 333 aa, unidentified
MSKFKHFLGIDVSKEYFDAVVILDGNKEKSIYSQFVNDYKGIKSLCKWLKEQGSTFENTLVCLEHTGMYGKLIIKCLMIEKFSLWVEMSLKIIRSIGVQRGKNDKVDAQRIAFYAMKNVEEAVIFNAPRMEINKMRNLLSLREKLVATKASLLRNVKELKAFDLEVARLSEKLQKSTIKGIDLDLKNIEKQLDKTINDDENISRIFTLVTSVIGIGKVTALFLICFTNEFTMYSTPRQLACYAGVVPFEHTSGKSVRSKPKVHYMANKKLKKQFHMCALSAITSDPELKHYFNRKVEEGKNKMLVINNVRNKLVHRVCACVRENKMFEKRQVA

SEQ ID NO: 113673 - protein, 316 aa, unidentified
MNTKTQVEINVGIDTSQSQLDIYVRPTGDYFSVENTPEGAKQAARKIRSYQPTRVLIEATGRLELNFVCAAHNAGLPVVVCNAGQVRQFARSTGRLAKTDKLDAQDIAHFGEALQPVLTVIKPDKLRDISDLITVRRQCLDMSTMQKNRLLRMPKSVQPPIQRILKAIQKEVARIDQKLDKLVDAIPQWQEQRDLLMSAKGVGKVVAYTLMSELPELGKLNRKEIAALVGVAPMNRDSGSYRGKRRVSGGRSKVRTVLYISMWSAIQYDPKIKATYERLVAAGKPKKVAMVACMRKQLTILNTMMKNGTHWEEKIA

SEQ ID NO: 113674 - protein, 342 aa, unidentified
MSEVITVGLDLAKNVFQAHGADALGRVLFRKKLGRDQVLPFFSQQPSCVVAMEACGGAHFWGRELGKLGHEVRLIPPAYVKPFVKRQKNDMADAEAICEAATRPTMRFVPVKSEETQGAAMVFRIRELLIRQRTQAINALRGHLGEFGQIVPQGADNAARLIAIIEGPDGGLPADAIATLDVLVAALRHLEAEIGKLDAEISRRAKDNEVARRLMTIPGIGPLIATAIATLAPPPELFRKGRDFAAWLGLTPRQHSTGGKQRLGATTKMGERSLRRLMIIGANSVVIKRHVHASARPGTWLGGMLTRKPPMLVRVALANKMARIVWALMAHGDVYKAPAAAA

SEQ ID NO: 113675 - protein, 405 aa, unidentified
MRVVNERCAGLDVHKSSVVACAMVPEGKQLRAFGTTTPKLQQLVSWLHELGVSSVAMESSGIYWRPVFNLLEEAGFELLVANARHMKAVPGRKTDVKDAEWIADLHRHGLLKASFIPSRPERELRDLVRYRRSLIEQRAHEVQRVHKLLEAANIKLEDVISDVMGVNGRRFLTAMLEPDYDPEALAAGATHGLQRKRQQLAEALTGRVGEHQRFLLRQILGHIEFIEQQIVALDAEVAMRTRPFEAAIVALDKIPGVGRRAAEEVLAEIGTDMSRFPSHRHLASWAKVCPGNNQSGGKRRSGYSGKGNRWLKATLVDSAWCAVRTRNSYFSALYHRLAARRGKKRAQLAVAHSLLVTIYHLLCDGTVYQDLGAGYFDERDRNLIQRRAVRSLERLGYRVSLEGAA

SEQ ID NO: 113676 - protein, 343 aa, unidentified
MQPATTIGLDIAKNIFQVHGVAADGSVVLRRRLRRAQVLTFFARQPRCLVGIEACATAHHWGRELMKLGHDVRLMPACYVKPYVKRNKTDAADAEAICEAVTRPTMRFVPIKTSDQQSVQTLHRTRLLFVRHRVRLVNTIRAHLAEFGIVAGVGRRGIDALMKLICAGEDSRVPVEARACLLALAEQLAVVTRQIADADRRILVWHRSNALSRKLEAIPGVGPLIASALIAAVPDPRAFRSGRDLSAWIGLVPKQHSSGGKQRPGSISKAGNQYLRQLLVVGAMSMIKRVKLHGPGRHPWLASLLDRRTPKIAAVALANKIIRIAWALMSRPDTYRPDRPLAA

SEQ ID NO: 113677 - protein, 403 aa, unidentified
MNNVAGIDVSKGKSMVSVLRPFGEVVAKPFSIGHTGSELKELADYLKSLDGETRVVMEHTGRYYEPVARFLHDEGVFVSAVNPKLIKDYGNNTLRKVKTDKADSRKIARYGIDNWAELRQHTPMDTIRMQLKTLNRQQSLYTKTKTMMKNNLIALLDQTYPGVNALFDSPVREDGSQKWVDFATAFWHVDCVRNMSLTAFAERYRKWCKRHGYNFSQSKAVEVHAGAQDLIAMLPRDALTKTMVRQAIDALNAISASLERLKAEMQALAAQLPEYPVVMAMHGVGDSLGPQLMAELGDVTRFTHRNAITAFAGVDPGADQSGTHEAKSTRVSKSGPPELRRALFLVMDCLLKTQPQDDPVYRFMDKKRAEGKPYLVYMTAGANKFLRIYYGRVKEYLASLEGN

SEQ ID NO: 113678 - protein, 343 aa, unidentified
MHIASIGIDLGKTTFHLVALGERSKVLARKKFSRRQLLAHTANLSPSLIGLEACSGAHFLGSALREQGHDVRLIPAQFVKPYRKSNKNDFIDAEAIAEAVTKQNMRFVPIKTEEQLDVQAMHRVRDRLVQRRTALINEIRGFLLERGITFPVQPIHLRKNLPTVVEDAEQNLTPRLRWLRNRLWQEWKQTEIDIETVTDEIERISAEDERCRRLRQIPGFGPLVSTAMVAAIGNGAAFRRGRDFAAWVGVVPRQYSTGGKQKLFGISKRGNIYLRRMLIHGARAVLFRIKYDTAGLGQWVHRLRQRAPRNKVVVAIANKLARIAWAVLSSGKDYRHQTLQPAA

SEQ ID NO: 113679 - protein, 386 aa, unidentified
MQKLNDLSRSLTALEPEGTLIAVIEMSLSSWLVAGIVPGVERQPLKKLAVDESALLKLLHRWREEAEKAGRRIERIAVAFEAGRDGFWLARWLKARGIEAYVIHASSVAVSREHRRAKTDRLDTELLKRSFLGWLRGERDHCKMVAIPTMKDEDAKRPNREHDSLIGERSRIVNRMKAALVRLGIRGFNPKLKRASTRLDGLRTPEGEPIPPNALAELRRDMERRRLVNNQIRQIEEERLKRIDQAPCDGPHVMVRLLARVMGVGIETADMLVHEVLSRNMRDRRAVARYAGLTGSPDESGRKRREKGLARSGNTRVRRGMIQLAWRFLLHQRNSALTKWFRSRTENARGTRKPMIVALARKLLIALWRLVREGIVPDGVVLRAAQ

SEQ ID NO: 113680 - protein, 409 aa, unidentified
MEVIVERVSALDVHKAQVTACVRVPGADGVREPHLAEFQTTVRGLLALRDWLAAHRVSQVVMEATGVYWKPVWAVLEDDFELMLVNARHVKQVPGRKTDMSDAAWLCQLAEAGLLRANFVPPKPRALRMLTRYRKTQVAERQREANRLHKALEDTGIKLDCVASDILGASGRAMLDALVAGTTDPVMLAELAKGRLRAKIPALREALEGRFDALHSLLIGAILAHLDFLDEQIDSLSDAIEEQLVPFAPAVELLCTIPGVGRRTAQNVLAEIGTDMTVFPTARHLASWAGQCPGNNRSAGKQRSGKTRKGSKWLNEALKDAAIAATRTKGTYLQSQYQRLRPRIGHGRAIGALKHTIICACWHMLSTGETYRDLGADFLARRNPQQATRRLIAQLERLGHNVTIQEAAA

SEQ ID NO: 113681 - protein, 361 aa, unidentified
MKCVQSNKLDFRGQNIYVGIDVHLKSWSVAILSEHSVLKRFSQSPEPEALHNYLVSNYPGANYFSVYEAGFCGFWIHEKLTDLGITNIVVNPADVPTMSKEKLRKTDAVDCNKQARELRSGSLEGIYVPKADVLEMRSLIRMRNLIVKDSTRAKNRIKSLLRFHGVEIPQEFIRCSIGCWSKRFLTWLHSLELSTEYGKKTLELHLEQFVRLRKMLLQETRAIREISRKAPFEKPIRLLTSVPGIGVTTAATLMVELDDIVRFKNADHLASFIGLVPMCHSSGESNGTGDITVRRHFMLRCLLVEAAWIAIRKDPAMTVAYTEYRKRMNPQKSIIKIARRLVNRIYYVLKHEKEYVPCVVK

SEQ ID NO: 113682 - protein, 351 aa, unidentified
MIIIGVDYHPSFQQISFVDKESGECGERQLNHSEGEAEKFYRDLKLRGASVRVGMEATGYARWFERLLAELGFELWIGDPAEIKTMRVRKQKTDRNDARLLLRLLLENRFPRIWVPSPENRDLRQLLWHRHRLVQMRARIMNQLQALAMNEGRRWKTKLWSQKGRAELAKLPLAFWASRRRQELLELFDQMNPIIGELTAAIEQEAEKRPEALRLMTHPGVGPLTALAYVLIIGTPTRFHCGKQIGSYLGMIPSEDSSAGKQRLGHISKQGNSLLRFLLVEAAQVAVRIDSDWRRRYLHLAFRREPRIAKVAMARKLGVRLYWMWRKEWTYEQVLQFGPHAGQLVTGHGVK

SEQ ID NO: 113683 - protein, 341 aa, unidentified
MMKKQTCFFLGIDVSKLWFDISLMPVVNYQKEPMITERFDNTMKGLALLKRWLKEQKVSFDNNTLLVIENTGIYHRLLWKFFSENNIPIHIGNAAHIKKSFGIARGKNDKIDSQRLCSYAYKNDDELKASSALNPAFLNLKDLITSRTRLKTQLGANKAYLKELKNINDKATQKMMENVYKMAINGLQKSITEIEKQITIVIKSDSSINANYTFLLSVPAIGPVTATYILCCTNNFANKISGKQLSCYAGVVPFADRSGKSLKGRNKVHKMANKELKSLLHLCALSSIKYYQEFRDYYERKVKEGKHPNSVLNAICNKILLRAVAVVNNQKSYVENYKKAA

SEQ ID NO: 113684 - protein, 383 aa, unidentified
MLRDVGQEVQNRQGRGRSYLPEAEEPVGELDRRATTNSAESPNSRWSRSRELESRKVGRRPRSRRVMLEKGKVYAGIDVAKDSLEVAVSTGECFTVANNDEGIAQAVQRLTAAGPVLVVMEASGGYERQAWVALWEAGLPVALVNPRDTYHFAQANRQLAKTDRLDARGLMLFGAQIQPAPCAPPSADNRELSELVGRRRQLVNMLTAERNRRQQVMTTPSKRSIERTIKTLLRERKSIERAIADKLSHSAELTDLAQLLCSATGVAAVTSATLLTRMPELGTLSNPEVGALVGSAPFDRKSGRWSGESHIFGGRAEVRTALYMAVTTAKRYPGPIRELYQRLRKAGKQHKVAMIACVRKLAIILNAMVKHHTPWRSSCAAAS

SEQ ID NO: 113685 - protein, 345 aa, unidentified
MKYFAGLDVSLDETAVCIVDEDGIIITEAKTASEPDDLACWIAATGLTIIRLGLEAGPLSPWLHAGLRAAGLPAICIETRRMKGATAAMAVKTDRNDARAIAHAMRVGWFTAVHVKTADSQELRLLLNNRRTLLEKRVAIDNEIRGTLKAFGFKIGSVGVAGFPARVTELLGERPRLFAMVRPMLDAREALRRQGAVLHKMLLQIVRASTVCRRLLSVPGVGPVVALTYATGIDDPARFARSRDIGPHFGLTPRKYASGEIDRNGSITKAGDGAVREALVQAALALLTRNRRWCTLKAWGMAVAKRRGLHRAIVAVARKLAIILHRIWIDGTTFTWSRDAAATPA

SEQ ID NO: 113686 - protein, 396 aa, unidentified
MAKLWIGVDIGKTHHHVAAVDSDGRLVYSRRVANDETSLLTVMAEVSTHGRPVCWAVDVTTSLSALLLTLLWRRQVQVRYVSGTVAFHMAAAFAGENKTDARDAVVIAQTIRMRPDIPILEPSDRLLAELTVLTGYRADLVGQRVATLFRLQELLTGISPALERAVDLNRKAPMMVLACWQTPAAIRHAGVDRITALLRRGHVKNAVQVAEAMVTAARQQTVNLPGQRAAAVVVGQMATEILAIEQRIAAVDDLIAEQLDQHPLAPIIGSLPGMGPLLTAELLVHTAGMTEYDSPAKLAAHAGLAPVSRDSGTVAGNHRPPRRYHRRLRHILWMAAFTAARECPTSRAYYERKRAEGKNHRQAILALARRRVDVLWALIRDRKTFTRPAPTVRTAA

SEQ ID NO: 113687 - protein, 356 aa, unidentified
MSREIKYIGMDVHQEAIVIAVLNGSGKLVMETILEAKASSILQFIHGLRGELHVTWEEGTWAAWLYDLLQPQVEQVLVCNPRRNALLKEGNKSDKVDARKLAELLRTGMLRPVYHGENGLRTLRELGRSYQTLSKDLTRVMNRLKALYRGWGIPCAGTQVYAARYREEWLSKLAQAGVRRRAELLYQQLDSLQALRRILRPEFLAEGRKHQAAKLLRQIPCIGPIRAARLIALIQTPHRFRSKRQLWTYSGLGIETHDSAQYRYVGGQLQRSKKPQQLRGLNQNHNHEMKEIFKSAATRASCGRGPFHDFYAALLAKGMKPEMARLTLARKIAAITLTLWKRGEGFDAEQLKTQAA

SEQ ID NO: 113688 - protein, 357 aa, unidentified
MKQKRSVEGEFRIYVGFDWGTEFHRACVLDSTGKILRQCRVDHNGQAITDFLRSLDKLANGQPATIAMAIEVPRGPVVEAFLEGGFAVFSINPKQLDRFRDRYTVAGAKDDSRDAYVAADSLRTDQHCFRRIATDHPDVVRLREISRTEESLGEDLRRTVNQVHQLLLRYYPQLLQLNSTPDEPWIWALLEAAPIPQRGAKLTLARLKSLLAKYRIRRWAAEDLQALLRTPPLPLSAGSADAISEHALLLLPQLRLLYSQRNKVRDRIEALLNHMTLLGHEHPECREHRDVGLLLSIPGLGNLIAANLFTEGSDALAQRDYAALRAHSGAAPVTRQSGKSKQVVMRRGCSERLRSAV

SEQ ID NO: 113689 - protein, 413 aa, unidentified
MKLFAGDDWAEDHHDVELMDSAGRRLAKARLPEGVAGIARLHAMIGEQLGEDADEEDAGQVAVGIETDRGPWVQALIAAGYTVYAVNPLQASRYRERHAVSGAKSDAGDAHVLADMVRTDSCQLRTVAGDSAQAAAVKVVTRTHKTLIWERTRHAHRLRHALRDYFPAALEAFEDLDAPDTLELLARAPDPAAAARLTTAQISAALKRARRHHIAAKAGQIQAALRAAHLGQPAIVTAAYAASVRALIAVLATLNEQITTLQGQVEAYFGQHPDAEIIMSQPGLGPVLGARVLAESGDDPGRYASARARKNYAGTSPITRASGKKKTVAARYVRNDRLIDALMAQAFTALHASPGARACYDRQRARGASHNAALRQLANRLTGILHGCLKTRTLYDEATAWPHTTAKTEKAAA

SEQ ID NO: 113690 - protein, 359 aa, unidentified
MFNNSTFFIGLDLGDKQSHIFVLDPKGELIEESRLPTNPTSLQRKFASLPRSRVAMEVGAHSRWASQLLKDLGHEVLVANARKLRAIYSNPRKGDRADAETLARLARLDPNLLSPIHHRSPQAQADLAVLRSRDALVRSRTLLINHVRSVAKSSGARLPSCSADSFSNKAAASIPQPLCPALLPLLETIASLTQQIHAYDRQITSLGETRYPETQPLRRIDGVGPITALAFVLTLEDPSRFQKSREVGPAIGLVPRTDQSGDRDPQLRITKTGNSYLRRLLVNSAQYILGPFGPECELRTWGLMLAERGGKNAKKRAVVAVARKLAILLHRLWKNGEIYDPFYRSRSNAGQPVIASAAA

SEQ ID NO: 113691 - protein, 332 aa, unidentified
MENFYFIGVDVSKKKLDFCVMFEGKVVHEEETSNHQGAIMSLLHHLEEDYGIASGQMLVCAEHTGQYTFPLACACKAVECKLWLENAAEIKYSSGVQRGKNDRVDAKRIAIYASRFQDKVQYYERPTEDIERLKQLESERTLYVTDLAKYKGQMKDQKEYMPKSLYERKMKRLQALMDDLEEAIQSITDEMDEVIASCPVLFRQRELLMSIDGVGRVVATNMIIATEAFTRFGDPRKFNCYAGVAPFSYSSGSSQHSKARVLHRADKVMKRLLHLAAVAVTHRIGGELKKYYERKVAEGKNKMSVINALRAKIVARMFAVIKRNERYKPILS

SEQ ID NO: 113692 - protein, 422 aa, unidentified
MNTNDYAAFVGLDWGDKTHAFALQLKGIEKIETGTLAASAETFHQWLEGLGARCAGRRVALAIEAGHRALLHAMAEHPWLDIFPIHPATCDRFRAAFRPSGAKDDIPDALTLLTLVTQHREKLQRWRMDGAPTRELSGLVLARRHAVDRRTQLSSQLRTVLKGYFPQALELIGDELERPLALDFLQRWPDLASVQKVRPATLRSFYNLHTVRRPQLIEKRIELIRLARPLVQDTAIIAPAVMQVQMFVDMLRAQQKHIERFETRIDEAFAAHPAANFFRQLPGAGPAFGPRLLVAFGDDPARYPAASNLQMYAGIAPVQKKSGQQLWIHWRWLAPVFLRQTFTEWAGQTVLHSPWARAYYFRQKRLGKTRNVILRALAFKWIRILWRCWQNHEPYDEARYQESLKRRRSPLTAELETGLTAA

SEQ ID NO: 113693 - protein, 316 aa, unidentified
MSETANEKFVGIDVSKATLDAHIEPAGETLHVGYDEAGIGRLVERLKEVGPALIVMEATGGLEVRLASELASAGLPVAVINPRQARDFAKATGQLAKTDQVDAAMLAAFARAIRPQARPLKDADTRALDEMVSRRRQLIAMRVQETLRLGTATSKPMQKSLKVHIAWLEKQITEIDGDLNRRLRESDIWRAKDDLLRAIPGIGAVTSLTMLAKCPELGTLNRREIAALTGVAPLANDSGKHRGKRFIWGGRAEVRVVLYMAAVSAMRCNEAIKAFAERLKQAGKPPKVVIVACMRKLLTIMNAMLKNNAPWCPKHP

SEQ ID NO: 113694 - protein, 453 aa, unidentified
MPKTIPSNAQQLRRMNPRAAAIDIGATMHMAAVNPDADDMPIRAFGTFTHDLHDLAYWFKSCGVTSVAMESTGVYWIPAYEILEQHGFKVILVNARYAKNVPGRKTDVSDAAWLRQLHSYGLLRGSFRPNAQIATLRAYLRQRERLVEYAAAHIQHMQKALMEMNLQLHHVVSDITGVTGMRIIRAIVAGERDPDVLASLRDIRCHSSVETIRASLVGNDRDEHIFALSQSLDLYDFYQQKMLECDRKLEQAIATMAHNVEKPQSPLPKIRTKTKQPNTPSFDVRAALYGLVGTDLTQIHGLGSSLALKLIGECGTDLRAWPTAKHFTSWLCLAPGNKISGGRLLSSRTRRSSSRAAALLRLAATTIGRSDTALGAFYRRLAGRIGKQKAVTATARKIAVLFFNALRFGMAYRDPGAEAYDERHRGRVLATLQRRARALGYQLDPIPDAQSVS

SEQ ID NO: 113695 - protein, 456 aa, unidentified
MRKKRSPRSRKQNKRVLEQINHQAAGADMGSDAVWICVGEHLSAEQVRTFGTTTAELNASAAWMKSVGVDTVALEATGVYWVAAYEIYEARGLKPILINSQAIRSFNGMKKSDYIDCQWIHLLHTFGILQASARPEPQMIALRGCMRQRKTLTEQCSEQIQRMQKALTLMNVRLDQAVTDITGATGMRILRAVVGGERDPEKLAKLRDGGCARSEREIAEALSGHWREEQLFVLEQTIRLWDFCQMLMRECDEKIEALVRELPVQTEAESTAPRRKPRKNQVRFDGRTLLHQRLGIDLTRIKGLDVLTVLTMISECGLDLSRFPTEKHFVSWLGLAPGTKKSGHRVLSSRSRRTTSRAATALRLSAQSLLRSQSELGAFGRALRARIGAEKAITAVAAKLARRIYLSLQTGRVYEDRGEAYHDQQHQHRSLAALHKRARRLGMQLIPMPSTFQEVS

SEQ ID NO: 113696 - protein, 420 aa, unidentified
MYKDTMPQELSAFRKEWRMWYAGIDWADTHHDALVIDESGQQVSSLRVSHTPEGVSHLISFLSSMVPTKEQMACIIETNHGLLIAALLEAGFAVYPVNPKTVDRRRGASGAKTDAIDAYLLAKTGRADLADLRQLKPDSPVVAELKALTRDQDALIQSQTRLVNQLTACLKAYYPVALQLFTKLHQASTLKFLQTYPTPQAAQAASVEQLTTVLKATRHPTPAKTAQHIWHMLQQPQLQADAITTRTKSRLMLALVAQLLPLIGQIAAYDKEISTLFLTHADQEVFRSLPGAGKRLAPRLLVEWGDDRERYSDASSVQALAGTSPVAYESGNYSKPHKRYACVKPLRNALQQFAWQSTRQEAWALAYYQRKRKEGKSHSMALRALANVWVRILYAMWLNHTCYDGATFEAAQRAHTKLAA

SEQ ID NO: 113697 - protein, 420 aa, unidentified
MPRRKSTPPEAALVAIDVAKHRNEVLIEAVRGGRRRRMTILNTRADHDKLITSLQAMQKPIVVGLEPTGNYHRVLAHRLIEAGFGVRLISSMALARTREALHNGWDKNDPKDAQVILHMLGIGATMVYQDPLTAGINDLQELSKTHEVVSKAKTEIWHRLLTHYLPLYFPEIERFVGNSRSDWFLAFLERFPTPASMTGLTKEGFVAAAWEVVGRKVSKARLLGDIYETACTSAALPVLLDSPAIAMFRLVLAEARSLVQQRNVIEAHAHQLLCGHPDYLRLRQVPGIGPIHALTILAEAGDLRRFGHHRQFLKFCGLDLATHQSGQFRGQTRLSKYGNARLRRTFWLAAQVAIRQRDNSLRDCFSRHIAKNRENKDLRRKATVAVATKMARVVHALIKTGTDYRPFQEGPVPSGRTLAL

SEQ ID NO: 113698 - protein, 439 aa, unidentified
MEVVAPHCAGLDVHRSMITGCALLSEERGRARQVKSQFVTTRAGLERLAVWLRGLGVTDVGMESTGVYWMPVFAVLEAAGGFELLVLNPEHVKGIKGRKSDMKDAEWLADLVRHGLVRGSFVPPKPIRELRDLTRYRRTLVENQGSERRRLIKLLEAADIKLAGVVSDIFGVSGRAILRALIEGGLSAVEMSKLVRGRLRQKRGLVIDALAGGLAEHQRDILAMQLARVEADEADIAALDRLIDERLAPYAPQMALLVTIPGIDRVVAATVIAEIGVDMSVFPSHRHIAAWGGTCPGNNESPTGPARGLKAHGKRKPIGARKEPAPAKAGGNPYLKTALCNAATAAARKRGSFFKAKYHKLKSRRGGGRAALAIAHKLLVCIYHMLSGNTSYRELGENYFDLRDTQRAARRYVRRLQDLGFSVILEASCQPQAEPANAL

SEQ ID NO: 113699 - protein, 349 aa, unidentified
MVILGIDAHKRTHTVAAIDDAGRQLGQKATVATTTEAHLELVRWADRFGPDRSWAVEDCRHLSRRLEADLIVGGERIVRVPPKLMAHARDAARTYGKSDPIDALAVARAALREPALPVARLDGPSRELRLLVDHREDLVRERTGHINRLRWHLHELDPTWDPTPRSLVRYKQLDVLRARLEALEGMVARIARDLVGRIRDLTVQANALELEIVQRARSLTPSLLELAGVGGLTAAKLVAEVADVRRFRSKDAFARHNGTAPLPVWSANRVRHRLSRTGNRQINAAIHRVAITQMRVHDGAKAYLERRLASGNTKTEALRALKRKLSDVIYRTLLADATLAMATGYGEAA

SEQ ID NO: 113700 - protein, 337 aa, unidentified
MAYVGIDVHRRRSQIAVMDEGGRTAVNRNVLNGRENVLAVIGDLPAGTPVAFEAAFGWGWLLELLQDYGFEPHMAHPLQCKAIASARLKNDKIDAATLAHLLRSDLLPEAWIAPRAVREQRAALRHRAQLVRLRTLLRNRIHGVLAQYGCDRPSGCWSAPGRAWLSELPLPSASRHIVTDLLESIDALQHIIDRADALLAESATSDPRVKALTQLPGVGPLTAMTIVAEVGDISRFSSARKLASWAGLTPTVRGSDRTVRYGHISKQGDPWLRWITNQAAQTAKRSPQFAAHYQQVACRRGKKIATVAIARKLLTHAYYLLREAQAAQASKEAGGPA

SEQ ID NO: 113701 - protein, 345 aa, unidentified
MNVTTVGIDLAKNVLQVHGADARGKAALRKQLRRDQVTAFFAKLPPCLIGMEACASAHHWGRTLERFGHTVRLMAPQFVKPYVKTNKNDVADAEAICEAVSRPNMRFVPIKSIEQQAVLSLHRVRQGFVKARTAQANQIRGLLGEFGLVIPKGIWHIAERVPGLLEDASNKLPLTLRQLIDRLTCHLKELDRQVRELEREILSWHKSSELSRKLEQIPGIGPLAATALVASIADARSFDNGRQVSAWLGLVPRQNSSGGKPTLLAMSKRGDVYLRTLLIHGARSAILAARRRNDSRNGWLANLLARRHANIAAVALANKNVRTVWALLAHGRDFNPGYVPQRAAA

SEQ ID NO: 113702 - protein, 403 aa, unidentified
MRFIGLDVHRDWCDVAIYEDGSVRSVGRIGTAPDQLQLFAQSLGPDDRVGLETTGNALSIARIIEPHVAGVLVADTRNVRAMTHAKVKNDRVDARMIAKLLAAGMLPGVWICDEQTRVLRRQIARRTQLVRGRTRARNQIHATLIRNLGGRGPARDILAKKGREWLQSLELPADERATILSCMREADFLARELAQVDREIARYAVGCPEIRRLMTIPGVDVTTAATLMATIGRIDRFASPRHLVGYLGLDPRSRQSGLGAVQHGHISKQGSATARHVLCEAAHATMRSPGPLRAFGQRVRARRNNKIATVAVARKLACLTWQLLTTEQDYIYERPALTFRKLRQLELAAGAPKRHNPRGSRAPATPDTPAQWKTERQDAQRVEDDYRAAVADWKPQRPPSPIT

SEQ ID NO: 113703 - protein, 323 aa, unidentified
MNRPNRIVAGLDVHKDSVFLCIIDDSGKIFEHKYGVLTPDLDRMSNDMHKYGVTELAMESTSIYWIPIWRVLEEMFDQKLVNPYFIKQLPGRKTDVKDAEWIATCVHKELIRGSYVPEPVILQLRQYNRMMFDLSKDISRKLVKLDTCLQRCNIRISNYISNVDSKSYRMVAKAISQGVTKPEKLIIHIHGRTLNKHGRDTMLAALTGVVTEVDSDIIGMLLEEVEMLQAHKDKCQEKMSLLCKKHYPKQLERLQKIPGVKERSATSIIAEVGVDMKMFATASALVSWCGLRPRNEESADSAEIERYAMDGLHRLTEIMNFTN

SEQ ID NO: 113704 - protein, 419 aa, unidentified
MKIFYKCCSGIDVHRSILKVNLRRNGVKGKKDLDEIRTFDTMTRDLLALSDWLKEAGCTHIAIESTGVFWKPVFNILGSDFKVILVNARHYKGVPGHKTDAKDCRWLGELLQHGLLKASFIPPQPIRELRDLTRQRRRLIQEKSSAVNRIHKILQDANIKLSSVLTDIMGKSGQEMLQHLINGESDAAKIADCARGRMKAKIEQLTYALEGRVTPHHRFMLSKHMKQIRFLEEMVREFNQQIDEHIKAQGEDFAALIPLLSTLPGADKQSAEEVVAEIGADMNQFPTEENLSSWAGMCPGNNETGGKRKSGKTTKGSRWLRTTLGEMAWAGSRTKGTYLSAHYKRIVRRRGKKRAVIAVGHTMLVMAYHMIKHQLPYNELGDDYFNKMDEEKFKSNMVKRLEKLGYKVELTKKEEEKAA

SEQ ID NO: 113705 - protein, 323 aa, unidentified
MDAEGTIRSNDRIPSTVEDLDAFLDGFEDASFVLESTGIWEFVYETIERHGFEAVLAHPLKVRAIAEAKVKTDKVDARILAHLLRADLVPRSYIPSKDMRDLRQLVRQRAYLVQRSTSFKNRIHAELLRRGIRRPKELVKPFTQKSTHWMRSLAIPTVNSSLDCLEAIQTQVEQLNEQLLQEFDRRREAQLIATIPGIGFYGALLIWAEIADVHRFPDPEHLCSYAGLTPTVSQSASKSHYGGVSKEGSKHLRWILTESALIHVWNCPDSRLSRFHARVARRRGKQKATSATARKLLHVIYWMLIKDEEYHGQGFNPESKPAA

SEQ ID NO: 113706 - protein, 420 aa, unidentified
MKVVYQTCCGVDVHKSFLVATIIKTTSGVEPSYQKKRFSTFNNSILQFKEWLVKNQCRDVCMESTGKYWVPVFNLLEDEINITIANPKWVKAVKGNKDDTKDSKWIGDLFRLGLVPGSYIPCKPIRILREFTRNRYKLTSCRTSEKNRYQNALTVCNVALDSVVSDIFGKSATSVIDYLIEQPDNSINHEEIASRLLRSLKRKSDSVIESIEGYQMTDSQKYRMCLIRAHLDYITSTINDIDTMLNSLIAPYENAVQLLCTIPGVDRNSAITVISEIGTDMTPFSNSKRLCCWAGLTPGNNESAGKKKSVRITRAGVYLKPALVQVAHAAVKSDKSPYYKQKYERIMKRRGKKRAIIAIARMILTAIYQMLSTGEAWNPTDLFKIDMPEPMKEKQKEKAIKQAMKLLIREGKISESQLAS

SEQ ID NO: 113707 - protein, 331 aa, unidentified
MFCSSSSSSSSSSSSSSSSSSSFLGIDVAKGSFDLSFDAAPDRPVQRVANEPKAIRRLVRQLCAVTPAPRLIALEATGGYERSLMHALIDAKLPVVRLNPLRVRRFAQSRGILAKTDAIDARVIADFARHNAETLSPMQPTSETARMLRELTTRRRQLVEQTVASKGQREHVTLPALRRSIDRTIKHLCAEIAEVERLIQDLIDNDPDLKGRQAKLLAVKGIGPRVSRVLVSELPELGRIDKRKAAALVGVAPFNDDSGNHVGRRTIQGGRATVRAALYMATLVAVRHDPVIRARYEHLKGRGKPKKVALVACMRTMVNYLTAVLAEKENA

SEQ ID NO: 113708 - protein, 420 aa, unidentified
MDVMVERCAGLDVHRDNVVATSRVPGQGRRRFEQQTQTFTATLPGLTELAAWLAAAGVTLVGMEATGVYWKTVFQALEGQFECWLLNAHHLRNVPGRKTDVKDSEWICQLVQHGLVRPSFVPPPEIRRLRDLTRLRAAQNNERTRTIQRLEKVLQDAGIKISSVASTSYSKSARAMLEALLSGVSDPDQLAELSKGRMRAKIPQLREALQNRFTIEHHGVMVAQLLAHIDTLDTELQHLSERIELVLAPHAHIIELLSTIPGVQAHAAQVLIAECGLDMSVFPTVGHFASWAGACPGHHQSAGRRKSGRTRPGPKWLTSQLTECARAAVRTKETYLASHFAQLRGRRGEPKAIGAIRHDLLVAYYHIVRDQVPYRDLGPNWQRKRYSVEHRASRLQRQLEALGYTVTLDKTDPAEVEQTA

SEQ ID NO: 113709 - protein, 335 aa, unidentified
MQIYGIDLAKEKFDVSFLRQSAKSAVGAPVHKVVSNTESSIRTFLKSVPAGSILVAEHTGVYGERLLKMCTDMNVKIAYVGGHVIHTYKAGPDRGKTDELDCSLLREFGERFTDRLRLATFPTEAIYELQQLSRQRTMLVEERKCVATADKAEECRPYRSETVRRSMRNLMDMLDEEIRDIEKAMLDIIGKDEGLSNSYDIITSVNGVGLVTAVELIVKTKNFTTIKTAKQYAAYAGTAPYEKSSGKMNRGAHISKWGNRRSKTLLYICAESARRYNKEIKLYYERRTIVDKKAHHYVLNAIANKLLKLVFTLIAKNEKYDPCYIQHDPRTFNKK

SEQ ID NO: 113710 - protein, 431 aa, unidentified
MICAEIERCAGIDVGKERLAVCVMVGPLAREPRVEFREFGTVTAELERLRQWLQAEGITHVVMESTGSYWKPVFNVLEDSVRVYLANSQEVKNRKGHKTDKKDSWWLAHLLRHAMIRPSFVPPRGLRELRDLTRRRRKMIGVATSERNRVDKILQDANVKLSSALSDIFGVSGQLMLEALLKGKAQPAEIAQFAQRRAQRKIPQIMAALEGHRMSDHHRQMIRYSLEHLRFLEDHLSELDEQIVAKIEALGYTPQWQLLQTVPGVKENSAASVLAEIGPDMGQFGSEKNLSSWAGVCPGNNLSAGKNKGSKTTKGNRWLRDALTECAWGVSSKKNCFLKEKFWRIATKKHRKPPATMAIAHTLLELCYQVLKSGQPYQERGLPVMDEKQRNRLIGHHMRRLGKLGIRVRSLAVAEDSRKSKRKTTAANRNR

SEQ ID NO: 113711 - protein, 367 aa, unidentified
MSQYVTSIGLDVHARSISAFAFNPMTGECESARFGYDPVSVAEWALGFEEPKAVYESGVTGFHLCRALRALGVDCVVGAVSKMQRPAADRRRKTDRRDAEFLARLLATRNVTEVWVPDERTEAARDLSRALADARDDLRRAKQRMGKFLLRHGHVFDERTPAGRRRGNWTAAYCRWVGSISFAEADDACVLEYYRDCVRRAEEAWRDLARRVAEAAGRPEWKPVCDALRCLKGVESATAFCLAAEAGDFGRFPTAPSFASWCGLTPSERSSGETVSRGGITRAGNAHARAALVEAAWHVPMSGRAPKALASGQSVAPAVRRHATKGNRRLQDRREAMRLSGKRPCVANCATAREMACWAWALARMAG

SEQ ID NO: 113712 - protein, 321 aa, unidentified
MTYVGIDVSKATFVAAYSSAKGSRTNSFKNTVKGIHEFIQTISVAEHHCVLEATGNYSALLVYLLSEAGIAVSLENPLKIKNFARVMLSVTKTDEIDARLIAMYGEKMQPTSYKLRNDTILILKQKRTVIRQLKKQLVATGNLKGSMEVLPFFDPKCKKTIEKTIIFLEKQIKGLEEELASLAQSEYKKQMDLLTSIKGIGVTLAAALIMATGGFTYFDNAKQLTRYLGLSPTYQQSGTSVNVKGHINRNGDSSLRSQLYVAAFASLRCNTECKACFDRLRSNGKPGKVALIAVANKLIRQAFAVVTQEKLYVDGFKSEKP

SEQ ID NO: 113713 - protein, 431 aa, unidentified
MLKINPLSTLYVGIDVSSKSNYVCALDFYKNKYINSSFANNQPGAEELALKILECLKEHPDITTIVAALESTSVYSIHIANYLSSCEELMRFKPYVFVLNPKCTANYKKSYIGLGKSDPIDAFVIADYARAGNIESEPWRGSQFLALKRLTRHRLHLVECMTREKTYLVSNLYLKFSELQMLEGDDQPFCDIYGATSSSVLMEYFSPEEILDSSEEDLIAFLAKKSRNRIKDISKTADLLKKAARDSYRLDKALYEPLNVSIASSFNCIETFKREIKVIDNAIEKEIKGLNPNAFIILQSIDGIGPVFAGGIIAEIGDITAFHSSDALAKYAGLTWKSNQSGDFYGEDTPMIKAGNRYLRYYLGEAANSMRKHNVEYGAYYRKKYNEVPKHQHKRALALTSRKFVRLVYGLLARNQLYSGVSLDTSIKDSN

SEQ ID NO: 113714 - protein, 315 aa, unidentified
MSETVIFVGVDVSKARLDVAVRPSGDTLTVLHDEAGIAGLVMRLHAWQPAAVVLEATGDLQLPLVSALIAAGLPVHVVNPRQVREFARATGQLAKTDRLDARVLAQFADAVRPAPRARPDEATQTLSAVLTRRRQLIEMLTAEKNRLSQARLSLRKRIEAHIEWPTSELRRVEADLDTAIRQSPVWREQDDLLQSMPGVGPGLSRTMLAELPELGTLSSKQLAALVGVAPHNRDSSTLHGKRTIWGGRAVVRTALYMAALAATKWNPVIKAFYHQLLARGKAKKVALVACMHKLLIILNAMVKHRTPWRANVQQA

SEQ ID NO: 113715 - protein, 462 aa, unidentified
MNHKPIKRLSHQRAKARLNKHLEQVNLYAAGIDVGSQEHYVAVAEGLDDKPVRSFPCFTGDLNRMADWLVEIGIQTVVMESTGVYWIPVFEILEERGLEVLLVNARHVKNVSGRKSDVLDCQWLQQLHTYGLLEGAFRPPEQVCALRAFLRQRENLIRYAASHVQHIQKALRQMNLLLDNVVSDITGKTGMLIIRTIVDGERDPHKLAQHRDRRCKRSEEEIAKSLEGHYRDEHLFALGQAVELYDIYHEKILACDHAIEQQIDTFDTESTRDLPPGKKMRKQGNAFAFDVRGQLYRITGVDLTRIDGIDETTALKFLSETGTDMSRWKTEKHFASWLGLSPGNKISGGKILNSKTKPSANRAAAALRVAAFTLANSKSALGAFYRRLRSRLGAPKAITATAHKLARLIYAMLKQGSEYVDLGQDYYEQQYQERIMNNLRKKAAQFGFTLIPNECAQEEPVI

SEQ ID NO: 113716 - protein, 399 aa, unidentified
MTASARVVIGADTHLDSHHLAVISDAGKPLADTDFPTSQTGYDDAVRWAQSFGTIVIAGVEGTSSYGAGLTWVLQAAGIEVAEVSRPDRAARRRQGKSDPLDAYTAARAALAGHGISVPKDAHTGAVRALLSARRSAVKAHTAATNQIHALLVTGPTELRERYRRHSTTALIKALARCRPAAHADPTAIAVLTAAKALAQRTEFLERQKHDLTAQLDILVSQINPALRAAYGVGADTAAQLLVTAGTNTHRLRNEGSFAALCGAAPVPASSGKITRHRLSRGGDRAANNALYRIALVRMSAHPQTRDYVERQVAKGRTKKEILRLLKRAIAREVFRLLTRPAPLDDYRDLRTARQAKNLTLATAATHFGVPLITISRLERGHHRNDTLANNYRQWLTAA

SEQ ID NO: 113717 - protein, 315 aa, unidentified
MDAVIVGIDVAKDKLDVGVRPSGERFVVSRAEAGLEELKDRLGKLGVAVVGLEATGGYETVVAASLSAAGLPVVVVNPAQVRAFANALGKRAKTDPIDAAVIAHFIEATKPKPRPLPDEATRQLSDLVGRRGQIVAMIVAETQRKQHRPSKRMLASIERLLAALQRELSDLDGQIREAIKASPVWREKDELLESVPGVGPAISGRLLAGLPELGSLDRRQIAALGGLAPWTRQSGRWKGKSFIGGGRADVRSALFMGALVAVQHNRTLKAFYERLIAAGKEKMVALIAVARKLLTILNAILRDGEPWREELEAHA

SEQ ID NO: 113718 - protein, 345 aa, unidentified
MAMLADDVEWVIGVDTHKEAHTAAVVDRLGGVTETLEFPADPAGYRRVLAGVAERGGLRLWGVEGTGSYGAGLTEFLCSAGEHVVEVERPARPLRRNGAKSDTIDAVRAAREVLSGRDLIDPRRRGEREAVRVLLATRNGAVVARTKALNHLHALVVTAPDRLRSRLDGLTSSELTRQAARLRLRADLPVEDQATIRAMRACARRMLVCEQEAAELEAEIERILADQVPRLLAEPGIGPISAAAIYLAWSHAGRIRNDAAFAALAGVAPIPASSGQTTRHRLNRGGDRQLNRALHTITLSRLACHPETKAYATRRLAEGKTSREVHRCLKRHLARRIYKLLEHTP

SEQ ID NO: 113719 - protein, 346 aa, unidentified
MKVLKQVLGVDVAQKELVVTLGRMHDDLSIELYAHKVFKNTEHGFAALLSWVNKLVDHTQKVRFVMEATGVYHQKFAYYLEERQYEISVVLPNKISSYMRTLENKTITDKTCSEAIAQFGLERKLDLWKRPNNIYIKLQQYTRERDQVVVERVVVKNQLHAESAQGEPNERSLKRLNARIKFLNEQEKEIKQDIEICLKADKELNQQIDNICTIPGVGRLTAVIVLAETSGFELIRNKKQLVSYAGFDIKEKLSGTSVKGKPRISKRGNRNLRKAMHLPSLSAAKYDDHFKNVYTRIVSKHGIKMKALIAVQRKLLEMIYILHKNKSPYDKNYGDIKTNRVQMHVA

SEQ ID NO: 113720 - protein, 293 aa, unidentified
MKKCIRFVGLDDSKQSIEVSVASEGRDGEVRDYGAIPNTPEALKKLVRRLGRPGDLYFVYEAGPCGYGNYRELLGLGANCIVAAPSKTPRRSGDRIKTDRRDANTLARLHRAGELTPVWVPDEETEAMRDLTRAREDIKYAQTKARQHVQSFLLRHGRRFPGRSPWTKTHLRWLAEQRFPQPGQQIWLDEYVAAVEQASARVQFLESEIRELVSQWSLGPVVSAMTAHRGVSLIVAATVCAELGDLTRFDRARDVMGFVGLVPSLHATGSTRRTGAITKTGNAHVRRVLVEAA

SEQ ID NO: 113721 - protein, 327 aa, unidentified
MTNQTITHLGIDISKHTIDIGVKIKENYSHFCINNKEAELIDFFSKYVGKPVVIAMENTGKYNWCLQEVLQGLGLEFYVLNPLHLYKSMGLVRGKTDKIDAFRIADYIERNRDLHEPYKIPQKAVSQLKVLLNERDNLVKQKAKLKAQDKDLALLKIIDLEKSLKKMHAQQIKFLDQQIHKIENMINALIQSDNSLSNNYKLLCSIPGIGQVVAWYLLAKTENFTKIITARKLACFAGVAPFSKQSGLFKGRDKLSKFADKQLKKLLHLAALSTIRLENDLAHYYHRKVAEGKNKMSVLNAVRNKIIHIAYAVIKNQKMFENRLQVS

SEQ ID NO: 113722 - protein, 408 aa, unidentified
MKHHGWPSREGILTESYRFFVGIDWAWERHTICVLGSDGEVIDRRTIEHSGAGLTQLADVLEKLSSGDPFSVAIAIEMPRGAIVESLVERGFAVYSLNPKQMDRFRDRHTVPGAKDDSRDAFVMADALRTDLHLFHRVRLDHPDILRIRELSRSEEDVQQDQVRAENQLRSLLNRYYPQMLQLCPAVDQAWFWDLLEMASLPAQGAKLSKSRIEKLLRSYRIRRLDADEIHQTLSVPALQLAPGAAEAASEHVLLILPVLRLLDRQREEIARRMQLLLEKMSEDEQVVEHRDVKILLSLPGVGRVISATMLAEASQPLAERDYHAIRSYAGAAPITRRSGKRKMVVMRRGCNPRLRNALYHWSRVSSQNDPRRALRGVADRLLAVLIAMLRSGTLYDPNHQTAAMPLK

SEQ ID NO: 113723 - protein, 391 aa, unidentified
MIYAGIDVAKDKHDCFITNSVGEVLFKSFTIPNNREGFETLFQKIQSVSDDLTKVKVGLEATGHYSYNLLGFLLDKGLPTYVINPLHTNLYRKSLSLRKTKTDKVDAHTIASMIMSDVDLKSYSDTSYHNEELKSLTRYRFDKVQERAKLKTSVSRLICILFPELEKLVPTIHMASVYALLSEFPSAHAVASAHLTRLTNLLSESSHGRYGKDTAVMFREAARNSIGSNMPAKSLELKHTIKLIQELTSEIDEIETEIKSIMDEVNSPILSIPGINYRMGAMIIAEIGDFSRFDSPDKILAYAGMSPSTYQSGQLDNCYSHMEKRGSRYLRYALYNATKYVCHWDESFGTYLAKKRAEGKHYNVALSHATKKLVRTIYAMEKTGQSYSSAS

SEQ ID NO: 113724 - protein, 403 aa, unidentified
MNNVAGIDVSKGKSMVSVLRPFGEVVAKPFSIGHTGSELKELADYLKSLDGETRVVMEHTGRYYEPVARFLHEEGIFVSAVNPKLIKDYGNNTLRKVKTDKADARKIARYGLDNWAELRQHTPMDTIRMQLKTLNRQQSLYSKTKTMMKNNLIALLDQTYPGVNALFDSPVREDGSQKWVDFATTFWHVDCVRNMSLTAFAERYRKWCKRHSYNFNQSKAVEIHGGARDLIAMLPRDALTKTMVRQAIDALNAVSASLERLKAEMQALAAQLPEYPVVMAMHGVGDSLGPQLMAELGDVTRFTHRNAITAFAGVDPGADQSGTHEAKSTRVSKSGAPELRRALFLVMDCLLKTQPQDDPVYRFMDKKRAEGKPYLVYMTAGANKFLRIYYGRVKEYLASLEGN

SEQ ID NO: 113725 - protein, 349 aa, unidentified
MRKLYVGIDLGCKTCAGAVRDSKGKVLETCGFPTSAENLIDFVSNLKGEVRVLIEECELAGWVYRTLLPHVHSVEVSDPRHNAWIAKGKRKSDPVDAAKLSELLRGGFYRAVHHPEEEEMATFKIAVQHYDQMTKTTTRLQNQIRARFRQQGMVFEGKGLYGASGRQKAIARVKSEAIAEILLQDFRLLDDAQKERAMARALVTKLSRNFPVIKRLERIPGVATISASRFVAYVQNPHRFNTKGLVSFSRLAVVKRESGESLIGREHLSKEGNGSMKALSRTVFNGVIRTRRMNGIKDYYLKSLRRTKNETHARLNTQRKILAVMNAVWRDETEYSDHLVTGNGAKRPL

SEQ ID NO: 113726 - protein, 415 aa, unidentified
MDVVHERVAALDVSKKDAKVCVRVPGARKGTFAREVTTWGSMTGQVLELREFLLDKNVTLVVMEATGDYWKQFYYLLEDALPVQLVNAAHAKNLPGRKSDVNDAQWLAQLAAHGLLRGSLVPPPPVRELRDLTRLRSKLTNDRSKEHQRLEKLLEDAGVKLSVVATDILGVSGRLMLGALCAGTAGPEAMAELAKGRMRSKIPELREALTGRFTSHHAFLTRLHLQVIDGFDAAIAELEARIEVVMEPFRPLIDLLLTMPGIGEKTAQVMVAEAGAVIDCFPSAACFASWAGLAPGSNQSGPKTKPARTRHGNTYLKGALGIAALSVSRSRGTFLSARYHRIATRRGPMRALVATEHSMATAMWHMLTQGVPYLELGGDYYTRREPERAKARITAQAEALGLAVTFSPIEPDTAA

SEQ ID NO: 113727 - protein, 425 aa, unidentified
MHSKHYSKQMEKRQRITDHTLVIGMDIGSEFNAACFMDKEGNILGRYPTIYNSRKGFDYFQTMLTKTRRKHRFTDVLIGMEPTGHYWRKIAFFAKEKGYDVRFVRTTAVKHQRELDESSSARSDIRDAYTIGNIVREGKYIDTVIEESVFRQLRTLAHARERILRYIVGSTHGLQAHLNDYFPELRQLFWSMKAKGLWRLLETYPFPEDVRDAGLAAVVTLLSKGTGKKRRIREQAAQVYQAAVESVGLKAITKADRARLAMYLEEIKRSDARRRLLEGEMKELLKEIPCAQYILSLPGTGKVGCAVFLGELGNPDYFGNPRQIIKYAGYDPKENDSGLRVGRKIISKKGRWLLRKCLFFMVLRLVHRSSFFKAYYEHKKKGFDRPLAKTEALCAVILKLIRVLFALMRDRRMFTEEMPRCEQAA

SEQ ID NO: 113728 - protein, 344 aa, unidentified
MQITTIGLDLAKNVFQVHGVDAAGQAVVRKSLRRSQMLPFFAKLPPCLVGIEACGTSHHWARELIKLGHEVRLMPPAYVKPYVKRGKTDAADAEAVCEAVTRPTMRFVPVKSPEQQAALSMHRTRDLLVKQRTQLINMIRGLLAEFGVDIPKGLERALLMARQIVDGKAPDVPIEAAKIVGTLSQQALDTHVRLREIDRNLAICLRGNDVARRLMTIPGIGPVGATALAASVTDPHQFRSGRQFAAWLGLTPLQKSSGGKERLGRITKMGDKYLRKLLIVGMTSLVRRARHNPATIDPRLADLLARKPTRVATVAMANKTARIIWAIMARGETYCVGHRPALAA

SEQ ID NO: 113729 - protein, 398 aa, unidentified
MSRNVWVGIDAGKIGHHCVVINDAGDKLLSRKVSNDETDVLQLVGEVAGLADGGRILWATDLNAGGAALLIAVLVEHEQELLYIPGRTVHHASAAYRGDGKTDAKDAAVIADQARMRRDLHSLRHRDETAVALRMLCARRTDLSADRTRAINRLRAQLLEYFPALERAFDYAHRRGALILLTRFHTPGAIRKAGPEMITAWLRKHGAYRPDVIAAQAMTAAQSQYTVVPGEQTGAAIVEKLARQVMALDAELDDIEQTITEQFRGHAYAPAIESMPGFGPLLGAEFVAAINGDLANYEGPDRLAGIAGLAPVPHDSGRISGNLKRPRRYDRRLLRACYLAAYNSIKTAPASRTFYDRKRAEGKHHNQAVLALARRRINVLWAITRDETVYQPIEVKAA

SEQ ID NO: 113730 - protein, 345 aa, unidentified
MGQKQSAATAPSVATQWIGIDVSKDTLDVCLLRAGGKEKHKTFANDAAGHLKLLRWVEHLAPGELYHFCLESTGSYSMGVAHFLAEASQRVSLVNPARIKYAGLAQGVGNKTDRADARLIADYCRKEEPALWRASAPEVRVLVALVRRLHSVQGLLGQEQNRLGAPELPREVQSSLRKMIRMLEAEIKRLQKQIKDHINGHPGLKADKELLLSIPGIGETTAHELLGELPDVTQFASAQSVAAYAGLAPREHSSGASVRKRTRLSKRGNSHLRKALYFPAVSAVQWNAPVKAHYERMREKGKGKMVCLGAAMRKLLMICYGVLKSRQPFDPNWQQKSGQSQIVAT

SEQ ID NO: 113731 - protein, 392 aa, unidentified
MVISVGIDVSKDKHDCFIVSSEGEVLADVFTIPNNLDGFRCLLQRLQACAAPQDKIKVGLEATGHYSYNLLGFLLDNGLTTYVLNPLRTNLYRKSLSLRKTKTDRVDARTIASMLLSDAGLKPYISTAYHNEELKSLTRYRFDKVKERAKLKSSISRLVCILFPELEKLVPTLHMTSVYSLLEEFPGAKQVAAAHLTRLKSLLEAASNGRYKRDMALEIRDAARNSIGSRMPAKSLELQHTIRLIRELDREIDEIEEQIQSIMGELHSPITTIPGLGFRMAAMILAEVGDFTRFDSPDKLLAYAGMSPSTYQSGQLKNCYPHMEKRGSRYLRYALYNATKYVCYWDPGFADYLAKKRAEGKHYNIAISHAAKKLVRLIFAMEKSRQPYCSAS

SEQ ID NO: 113732 - protein, 395 aa, unidentified
MDKEGEIIEKAYRFQNNFPCAQIFEDKIVAAMITGQFLSIKIATESTSLYHTHLIDFLAASDKLRQFEVEIIVFNPKTTTAFKKAYPDKDKTDSVDAFVIADRLRFGRLPEPYASNQNYLPLRRLTRYRCHLAESIAREKQYFLLHLFLKYSSYSSLKPFSNTFGNTSVSFILEDFFIDELAEKPLEELVEYVSKHGKNGFADPTAVAEALKQIARESYRIRPALASSVNLILTSTLANIRALEKSIKQVNNAIEEELKAFPNTLDSVPGLGPVMSAGIFAEIGNINKFPSHNALAKFAGLTWRQNSSGDFAAEITRMTKTGNQYLRYYLIEAANLLRMHNKEYSDYYSKKLLEVTKHRHKRALALTARKLVRLLFFLLKNNKLYQHSSGKVGVQ

SEQ ID NO: 113733 - protein, 366 aa, unidentified
MKKSSTVQVFGNEVFAEQKLTIGVDLGDRWSFYCVLDEAGKIILEQKVPTTPEAMKQTFSRMPQSRIALETGTHSPWASRLLTELEHEVIVAHAQKVQLITKSNRKDDRHDARTLARLARIDPELLGPVRHRSVQAQIHLTVIRARAELVSVRTALVNAARGLVKSYGERLPKCGTEQVSRELAAALSTELRDVLQPLLKEIESLNERIKEYDERMEKIAKEVYPEVSLLKQVKGVGTQIALTYVLTIEDPHRFLKSREVGCFLGLKPGRRNSGESEPQKKISKAGDRYLRTMMVQGAHYILGPFGEDSDLRRWGRKLSERGGKNAKKRAVVAVARKLAVLLHRLWVSGEVYEPLRNSQRAMQAVA

SEQ ID NO: 113734 - protein, 427 aa, unidentified
MDRDTVNWNERTAFVGFDWASDHHDVIIVNERGTIVEDFRFDDASEGWELFRTKLGSYANPAVAIETSSGATVERLLEAGCAVYPINPKAAKRYRERKAPSGTKTDRFDAWSLADALRLDGHTWRALKPDDPLTVELRLLCRDEIGLIRQRTALVCQLRAALGEYYPVALKAFDDWTSPSSWAFVEAFPTPEALHQARKRRWEKFLHVHKLYRPETYEKRLALFAEARAFCGSKPAAQAKSLLALALTAQLRALQSHLDKYRERIQALFAQHPDHELFGSLPGAGEKLAPRLLAELGDDRERFDSPQALQCHAGTAPVSYQSGQINKARFRIACQKLLRHTVHLWANLSREKCPWAEAYYRTKRAEGQSHACALRCLGQRWLKILWKMWQTRTAYDAELHQRNQLQHGSWVLQLMNPKTTGLAAGEA

SEQ ID NO: 113735 - protein, 454 aa, unidentified
MESYAGVDWASEKHDVRVADAAGEELLAATFAHDEQGLRSLCRQLVRLKVELVAVERPDGLLVERLLDAGLRVLALHPNQVAAARDRFRVSGGKSDGFDAFVLCELARTDHHRFRVLEPDSDRTKALRALTRAGEDLVGTRTALTNQLRAELDRFWPGPLHLFSDLVSRISLAFLERYPSPADARGLGEARLAAFLARERYSGRQKPAQLLAKLRRAAHGRVGELELSTRRQLVLTLVATIKTLNAQIKELERQIAIAIREHPDGAIFLSLFKGTVITAAELLAEMGDCRARYPSRDALAGDAGQSAVAIESGKRKAACFRWGCNKRLRGAFCTLADSTRHWHPWAHDVYASARARGHDHPRALRTLGRAWCRIVWQCWQDGVPYDPARHHALQRHVTVTIPTPSGPRPDTGATQRMAGAAVTRRVARRAERAALDGKPATAKPTARRAKRQGG

SEQ ID NO: 113736 - protein, 368 aa, unidentified
MDSPFQDGIECAKLEDQPTSVQPKGGVIMKRTTIGIDIAKNVFEIYVEDGATQGVERKRLSRKKLLPWLANRPPALVGMEACGGAQYWARELTKLGHEVRLMAPQYVKPWVQTNKSDAADARAICRAVQEPGMRFVRIATEAQQDVQAMHRVRSRLKGNRTALVNQIRGILLEYGVAVPQGVASLRNALPSLLAEERWSPLMRQFLTEQQAELTACEAQMAAVTVAITRASATQPVCQRLEQVRGIGPLGASALWLKLAGGAYQNGRHVAAALGLVPKHTGTGGKVRLGGISKRGDRYLRQLLIHGARAVVAQVGEKPDALSGWLRRLVARRGMNKAVVALANKNARVAFALMHGEYPYEVTKMCRVA

SEQ ID NO: 113737 - protein, 421 aa, unidentified
MTEHFQWFVGIDWASEFHAVCLLDATGAIREERTVAHTIEAVNEWLTTLLEQTGADPSAIAVAIETPRGILVDTFLERGLAVFAINPKQLDRFRDRHTVAGAKDDRRDAHVLADSLRTDPGAFRRVQLDAPIVLELRELSRAEDEWQRDLGRLTNRIREQVARIAPALLSLCPAADEAWFWSLLEIAATPAARQRLTRTDIRALLKRHRIRRLTSDEVWTRLRAADFVPAPGVIAGVQVRLDGLVEQVRVTYAQRQRCLKEIDRVLAALTEREPTAEEPCEHRDVEILLSLPGVGRLITATMLAEAARPLADRDYDTLRTHAGAAPVTKRTGKRFCVVQMRRACNERLRDAAYHWARCSLRQDARSRAYYAQLRRCGHTHGRALRSVVDRWFRILIAMLTHRTLYDPTRFSSCAGTVPVTA

SEQ ID NO: 113738 - protein, 354 aa, unidentified
MKKQDQYMGMDVHQATTVVAVVDAEGKMIVETIVKTEASAILRLIQGLSGPLHVTFEETTQADWLHDVVRHFVAEVVVCDPRHNKLLGEGSKADKIDARKLADLLRTGMVRPVYHGHEGTQKLKELVRGYETISIDTQRTMVRIKAIYRGRGIATSGRGVYQPNQHDQWLGLLREPGARQRMSWLFERLDHLRRLRRQAKQAMIEESRQHRAVQLLRTIPQLGAVRAALIVATVDTPHRFRTRQQLWSYSGLAVVTHMSSEYEMKEGRVVRSRKPVATRGLNRNCNRRMKDVFIGAATGGTQTEPYRSYLQGLEKKGIRKEMARLTLARKISSIALRIWKKGETFDPKKLNWTT

SEQ ID NO: 113739 - protein, 429 aa, unidentified
MNYTQNKKIMQVKVSTLVVGVDIAKNKHAARAFNFRGIEYDKAIFFENNEAGFKKLLHWVKKVSEKENKDNVIVGMEPTGHYWLPLEEYLRRKTDFLRVVVNPAHVKKSKSLDDNSPTKTDRKDAKVIAKLVIDGRYSIPHMPEKEYADLRVAMTHRERLVKDIVNLSNKIQQLIDKYFPEYQTVFKKWSGKASVAILKELFLPELILEKTAEEIVEIFKKGANRAVGIKRARKLKKAALNSIGIKEGGEFTQYELRNLLEQYELLNNQKELLEEKVEKLFNSMEEAKYMESVKGVGIITVAGFIAEVGNINDYDHPRQIQKLAGLNLKEHSSGKHLGQTRITKRGRPKLRALLYRVMLPILAKNEEFKQLHEYYTTRRKNPLKPKQSMIALACKLIRIFFALGQKHVMYDGQKLMNDIERNLDLQEVA

SEQ ID NO: 113740 - protein, 427 aa, unidentified
MTYRIAAIDVHKKMLAVVVADVAGEGEYQFERRKFGATPDQLHLLAQWLCQQEVEEVVMESTAQYWKPVWGALEQYWQPARQKREGARKMSGKLHLCQAKSNRGRRGRKNDFADGERLIKRLVAQELVLSFVPDAEQRLWRTVTRRKYQLTRDKVRFQNQLESLLEQAHIKLSSLVSDLLGVSARRMLKAIAEGETDPAALAALADYRLRATPEQLRDALGACGQLHGVYRRLLKMALEELKLMEEQIEQLEQEASELLQQHQNAVQRVAAVPGFGVDSAIQAIAEVGPEAAAFETYKNLSSWVGACPGEEESAGESKSTHSPKGNRTMRRLLNQAAHAAIKVKGSIFEMTFRRLLPRLKYQQAIWAIAHRLCRLLWKILHEGVRYEERGPAVSAKSKSRRAARMIKELKALGYRIEGGSLPAGTPA

SEQ ID NO: 113741 - protein, 339 aa, unidentified
MNKTNTIGVDLAKNVFHLHIQDSKGHVLQKLKFGRSQFQHFLATTPISQIVFESCSTSHYWYRRATHHGHQARLIHPAYVKPYLKTNKNDFNDAEAICEADSRPTMRYVNAKTVAQQDIPLLHRIRQRVVQQRTALVNQMRGQLLEYGIAIPNGISQVRSRLAGILEDGENELTPFARVLFSSLSQELYGVDDRVKTLDKEVKQLANEHPICQRLMEIPGIGPMIATAVISAIGNASNFKNGRELSAWLGLVPKQYSTGGQQRLLGISKRGDGYVRALLVQGAISAITRCKGRCDSQLVWARQLQATKGLQKAAIALANKMARIIWSIMARDRDYVMAM

SEQ ID NO: 113742 - protein, 317 aa, unidentified
MKIWVGIDVSKRHLDAVWVVDGKRVHKKVRNSKKGFAELLAEVPESAHFVMEATGTYYFNLALFLHQANRFVSVVNPAQIKYHIRSDLKRTKSDKSDATSIAKFGDEKNPPPWKPHEREVYELRQLVTLDAKLQKMKVQLDNMVEAFVETDFHSKEAINRANMMAKVLEEQRAKTKKDMEKLASKLFPEIVEILESIPGVGTASAISVLAGVGDFRRFETSKQLVSYSGLSPTIKQSGTSIHSKGHISRMGGAQIRGTLYMCAMNGLRCNEQCKTMWNRLKSNGKHGKVAMVAIMSKLLRIMWTLVTKNEKYRPEMA

SEQ ID NO: 113743 - protein, 421 aa, unidentified
MIEAVIERCAGIDVGRRFVVACVMVGEANAAPTHEIRKFLTLNKNLEQLRDWLHQNRCTHVVMESTGSYWKPIFHVLDDGQLKVVLANSEQVKNLRGHKTDRNDSRWLAHLLRHDMIRPSFIPPREVRELRDLTRRRKQLIGNAVDERNRVQRVLQEANVQLGTVLSDVFGSSGLDMIEALVNQEATPEQIAQLARKQARKKIPEIQAAVEGHHMTDHHRRLIRHSMRHLAFLEEEIAELDDEIARKVGSGSLQPAVELVESIPGIQKTAAAAIVAETGPDMTQFPTAPQLPSWIGVCPGNNESAGKRKSGKTTKGNPWARRALVECAWSATRKKESAPQRLYERLKPRTQHKRALVAVAHWIALRIHEVLSTGKPYQADRSSDLTPTQALRLARHHSRRLRHLHQWLKRPNPEHAEVLKA

SEQ ID NO: 113744 - protein, 319 aa, unidentified
MRVGIDVAKAELVVGVRPSGERWTVANDERGVRTLVERWRREAPELIVLEATGGYELLCVAALVAAGLPVVVANPRQVRDFAKATGQLAKTDRIDADILALFAERVQPEVRPLPDAEAQELEALLARRRQLLEMLGAERNRLGQVFGRGQRQVKKSLKGHIAFLERELRITDTDLGDMVRKSPAWRDRDDLLQSVPGVGPVLSLTLLADLPELGRLSRRAIAKLVGVAPLSRDSGTLHGRRFVQGGRASVRSVLYMGTLVATKRNSIVRTFYQRLLAAGKPKKLALVACMRKLLTILNTMVRTQQRWSADHQSGAPITA

SEQ ID NO: 113745 - protein, 403 aa, unidentified
MIFVGDDWAEDHHDVYVMSADGARLASRRLPEGLAGIRSLHEVIADHAGEPGEVVIGIETDRGLWVQAMGVAGYQVFAINPLAVARYRDRHHVSGAKSDASDAKVLADLVRTDRHNHRALAGDSLEAEAIKVLARAHQNLIWTRTRHTNALRSALREYYPAALEAFQDLHDRDALAVLGRAPTPADAARLSLSKIRSALKHAGRQRNIDVRAQEIAAVLRTEQLAAPAPLTAAFAATTRAAVGIIIELNHQIAELETELTTHFEAHPDADIYRSLPGLGVILGARVLGEFGDDPNRYTSAKSRKNYAGTSPLTVASGKKHAVLARRVRNRRLYDAIDQWALGAINNSPGARAFYDQHRAVGDLHHQALRALGNRLVGILHGCLRHHTYYSEHTAWAHRTTTAA

SEQ ID NO: 113746 - protein, 352 aa, unidentified
MGRPKHQVTSGEDLFVGIDLHKHRWHVTIRTVDLELFSASIPGTWEALQRVLARYAGHQVQAVYEAGYFGFRLHDRLVAHGIPCLVTPPSLVPKEYGNRVKTDRRDSSKLAHLLAKGMLKRVWVPSEEELYHRQVIRRRRQLVRDRVRTQSRIKAELRFYGIHLEEPRGRWTQIYFETLRSIRFGNRWMQESFNCLLEQYAFLSAQIDKQTQLLRELSETDLYRERVEILQSIPGIGVISAMEVLLELQDVSRFRRAEQLAAYVGLTPSQYSSADKVRMGRITGIGKSTLRSLLVEASWTLIRKDQAMREKYDRIKIRSGGKRAIVAVARTLLLRMRRMLLDGQAYALLKAA

SEQ ID NO: 113747 - protein, 323 aa, unidentified
MTALDATGRSLKSGAVVNQPAELQKWLRGFSEPVTVAVEACSFWPAFKEAIEAEVHAIRLVHPQRVKAIASAKLKNDRVDSQTLAHLSRCDLLPEAWMADRDTQARRQQVRLRISLGQHRAALKNQVHAVLHQHNLKTEASDVFGKKGRQWLNQAALPPAARTTVDTYCAMIDHLGQHIREQEKQLKALAGTDARARWLTTIPGIGVYSAMILLSEIGEIQRFRSPKSLYSYAGLVPRVRESAGHKSHGGISRCGSPRLRWVMVEAAHVAVRCCPAAKHYFERLRKRKHPHVARVALARKLLGAAFALLRDGECFDEAIFAAV

SEQ ID NO: 113748 - protein, 360 aa, unidentified
MADRITYVGLDVHKESIVVAVAACGARRGSTAGSRTHRLRWTVCCTSSAATAWRCGFATRRGRAVMAFTVECVVVAPSLIPKRAGDRVKTDRRDAASLAKLHRASELTAVWVPDCRHEAMRDLVRARLDAVHSLRRARQQLAGFLLRQGCHYGRSAWTKLHRRWLAGLSFEQAAHHIVLEDYIVAVEAAETRRDRLTAQIEAMLPDWTLAPVVAALQTMRGMALVNAATLIAELGDLSRFANPRQLMAYLGLVPSEHSSGASIKRAGITKAGNGAARRLLIEAAWSYRFPARLSRELLLRQESQPKPIRDIAWKGQVRLCARYRRLARSGKPANIVTTAIARELAGLVWAIAREVTIPAN

SEQ ID NO: 113749 - protein, 413 aa, unidentified
MLLFLGNDWSEDHHDVELQDAAGTVLARAKLAEGMAGMTRLHAMIGEHVGEHVGDGQEPTVLVGIETERGPWVRALVAAGYLVYAVNPLQVARYRERRGVSGAKSDPADAHVLADMIRTDHTQLRPIAGDSELAEAVKVLTRTHKTLIWERSRHTLRLRQALLDFFPAAIEAFADLTGPDTLQMLAAAPDPASAAALTIEQITAALAVAQRRNRAVKATQIAAALQAAHLGQPVQVVAAYAATVRAQVAILGVLNTQIKTLDKQVRTHFLKHPDAQIYLSQPGLGFVLGARVLAEFGDDPWRYANAKARKNYAGTSPITRQSGKRKAVIARWVHNNRLIDALGQQAFCSLCDSPGARAYYDRLRARGAGHRAALRQLGNRLVGILHGCLKTGTIYDETTAWSHRPETNLATVA

SEQ ID NO: 113750 - protein, 411 aa, unidentified
MDTLFPCCAGIDVHKANVVVCTRRADRPGKAREEVRTFSTMTRDLLALADWLAEQGVTHVAMESTGVYWKPVFNLLEGRFAILLVNAEHIKQVPGRKTDVKDCQWIAQLLQHGLLKASFVPPEPIRELRDLTRQRAQLVAEKASAANRIQKVLEDANIKLASVATDVLGASGRAMLEALIAGVTDPEELADLARMRLRAKLPELRLALQGRVTEHHRFLLRMHLDHIGHLEALIGRLSERIEEVTAPFAEAATRLETIPGVSQRVAETVLAEIGPRMEQFPTAGHLASWAGMSPGNHESAGKRRSGRTTHGNRWLRQMLVQAAWAASRAKGSYLAAHYRRLVKRRGAKRALVAVGHTLLVMIYQVLKKGVAYAELGSDYLDRLEPERLTRQLVKRLEALGHKVTLETSPAA

SEQ ID NO: 113751 - protein, 424 aa, unidentified
MENTLARKLKQVPEGYLVVGIDPHKKKHAAVAISQDFTTRAKYKFDNTKEGLETMLGWAKVEMVKSGCRGVIFAIETGGHYWRNIAYFLDERGIPSRFINAFTLKRRREGKDLNRRKNDYRDSEVAAQLLCTGEFTESKLLQGAYAELRAAHNAYRRLVKERTRIINLVKGLLDGLFPEFTQVFKDPCALTAMSVLSTCPVPSVIASMTEDEFVATIEAKHQGRRLMRRKLRTLHYSARTSIGIVAGARSVASEISFLAEKFDVIRRHIATMEMTLVELVDETEEGKYLLSIRGLSYIGVAGLLAELGPFRSYRNAKQMIKMAGSNPTESESAGKRKSNTPMSRKGRPGLRYCAWTSVIPMLRLNSDFRAWAKQRRERPAHANPLSGREVVGAALNRLLRLAFILVKKETFYQLPQPHLVKIVT

SEQ ID NO: 113752 - protein, 342 aa, unidentified
MQVSTIGLDLGKRVFQVHGVDAAGTIVVSKRLRRGEVLGFFGGLGPCVVGMEACGSAHYWARELAALGHEVRLMAPSYVKPYVKRGKNDAADAAAICEAVRRPSMRFVAIKTADQQGVLVLHRARELLVRQRTMLVNALRAHLAEFGIVARRGHGGVEELVEALAADGDGLPAPARAGLAALIRQLRTSEAEIKTLGREIDAWHRATPASRRLATIPGIGPITASALVATVGDGGQFESGRHLAAWLGMVPRQNSTGGRTRLGRISKQGDRYLRRLLVIGATALLRHGGRRAELGGDWVEELLARRPKRLVSVALANKMARIAWAVLTRGEPFRPRAVAGAR

SEQ ID NO: 113753 - protein, 384 aa, unidentified
MIVIGADTHKDSHTLAAVDAGTGRVRGSREIKAQDEGHLAAARWARGLDGERVWAIEDCRHVSRRLERALVAAGERVVRVAPHRMGDSRKGEREPGKSDEVDALAVARAVVKHGVDQFPVAYLDERAMEIRLLLDHRDHLVAERTRTVNRLRWHLLELRPELDRSLKRGALNQARVLDRVDHQLRKLPAGGRVRIAREQVARLRALNCQIDQVAGELAALVIAYRPKLLAEQGCGPVTAAILIGHTAGNEQFRSEASFARQTGTAPIPCSSGKRTQHRLNRGGDRQLNHALQIIAISRAQRDPATKEYLSRKEAEGKTTKGALRSLKRHLARHFHHLLAEPPLALQEDCGMADRLAPGLCQTSRPHRVDTTIVGAAPMPMQCIT

SEQ ID NO: 113754 - protein, 359 aa, unidentified
MNKNSMFFVGLDLGDKHSYIAILDQDGELIEETRLPSTKASFHQRFSTLPPCRVAMEVGSHSRWASYLLKELDHDTLVANARKLRAIYDNPRKGDRVDAEILARLARLDPELLSPIHHRSPQAQADLAVLRSRDALIRSRTLLINHARGIVKSSGARLPSCSANCFASKAAPAVPETLRPALSPILETISALTQQIREYDRKIEQLCQDQYPETKLLRKVSGVGPITALAYVLTLEDPKRFIKSRDVGPAIGLVPRRDQSGDHDPQLRITKTGNVFLRRLLVSSAQYILGPFGPDCDLRIWGLKLAERGGKNAKKRAVVAVARKLAVLLHHLWKTAEVYDPFYQSQKEEAGSAALPAVA

SEQ ID NO: 113755 - protein, 343 aa, unidentified
MKYIGLDLHKRNIFATVLDGDGKILSRATIRSKKEDINYYLKSQGSGETLSIAIEASYNWLYYYRILEGITDNIVVAHPLKTKIIGESRVKTDKIDSEALAYMLKADMLPRVYIPTRISMENKLLLRSRISLVRLRTSIKNKIHAIIDRNRDSYLSLEGKSDIFCKTGMAALRDIKICNPDYMILTSYLDLIDDINKKIKDIEAEIDKRVAPDKDMELLKTIPGIGRFISFLLKSEVDSMDRFSSKEKFASYAGLTPSVHQSGNKSYTGKITKQGNKFIRWALTEAAQVAIVHSEYFRYYYSKAKAKKGTNSAIVAIARRIAEIVYVILKEKREYIEKPIIYS

SEQ ID NO: 113756 - protein, 331 aa, unidentified
MGNVTTVGIDLAKNVFSLHGVDGSGAVVLRKTVSRARLMEVVAQQPACLIGLEACSGAHEWARRFEALGHTVKLMAPRFVAPYRKNGKNDGNDAEAICEAVNRPSMRFVPVKTLEQQAVLCLHRVRQGFIEERTATINRLRGLLAEFGIVLPQRASEVRRRAVESLELLPTHAAGVIRDLREHLGVLDARVKEYERSIEAHARDHAGAKVLQQRLGIGPMTASAIVASVGDVREFKNGRQFSAWLGLVPRQHSTGGKQRLGHITGRGDPYLRTLLVMGARSVLQRTSGEADPLSRWALAVRVRRGYHRACIAVAAKNARVVWAMLNQNARA

SEQ ID NO: 113757 - protein, 385 aa, unidentified
MTRTDLSVPVPTAARPEDSTLFAALELSGKSWLVATSAPGEAKISKRTVTAGDGLGLLALLSELCEKAERRLGWPVRVVVIQEAGLDGFWLHRLLEAKGLESHVVDPASIAVDRRQRRRKTDAIDVEGLLRTLMAWARGERRVCSMVRPPSPEDEDRRRLSREREALIAERIRHTNRIKGLLAGQGITGFEPLRPAHRDRLDALTTGDGRPLPPRLKDEIRRQLARLDAVIADIKAVEAERDALVGARPAVPEPAVLLLTLKGIGPEFATVLWLEALFRSFSNRRQIAAYAGLAPAPWQSGGFDRDQGIGKAGNPRLRKTMIQVAWLWLRHQPDSTLSRWFTARVGTARGRVRRIAIVAVARKLLVALWRFVTQGIVPEGAVLKA

SEQ ID NO: 113758 - protein, 372 aa, unidentified
MIVIGTDTHKRTHTCGAVDAFTAAARGELTAAARRGSFGKLLRWARALDPERVWAIEDCRHVSGAFERFLIARGERIVRVAPKHMAGARRSSRERGKSDSIDAFSVARAALKEGIENLPGAHLDGAALDIRLLVDHREDLIAARTADQQRLRWHLHDLWPELEIPAGALDTNKWLGKISRRLARAQQATRVRVARELVRQITARTTRARELEAELAALVESYAPQLLAERGCGPLTAAKLIGEIAGADRFATDAKLARTGGAAPIPASSGNTNRHRLDRGGNRQLNCALHRLAVNKANWDPDTAAFLARKQAQGQSRKEALRSLKRHLARRVWRLLRSAPAPKAFTPPDIPDRPKARETIPGAAPHPMACIS

SEQ ID NO: 113759 - protein, 344 aa, unidentified
MEHYAGLDVSVKETSVCIVDGAGKVIREVKIATEPEAIRAVLVDETFTIERIGLEAGPLSQWLYSGLAEAELPIICVETRHMKAALSAQLNKSDRNDARGIAHMMRVGLYRPVHVKTLASQKRRMLLTARQLLQAKALDIENDLRGTLRNFGLKVGTVGAVKFEARICELVADHPDLAAIVEPLLIARRVLREQLGVLHRRLLAIVRQDDVCRRLMSVPGVGPMVALAFRATVDVPARFKNSKAVGAVFGLTPRRHQSGEIDRIGGISKCGDAMMRRLLFDAAHVMMTRTIRWSWLKAWGMKIARHRGMKRAVVAVARRMAVIMHRMWADATEFHWTSTDAAAA

SEQ ID NO: 113760 - protein, 416 aa, unidentified
MGKQRDNACGADIHKNKIVATILSQSGTKIQADFGTTLPELLKFKAWLINNDCRIMAMESTGTYWIPIYSVLEGSIDIIVANPYMIKHIPGKKTDLVDSDWLAELCLKDLIVPSRIFPKEDRVLRSLTRSREGLVKIRTRLKNKIHRDLSSSHIKLSSVVTDIFGKSGTHILRGLLDNRSIDEIIESIPSRRVKKNADKIKESIENNLDSSQIFLIESSLDLMGSIQDNINRIDADLRKRTSSRLNDLKIAMSIPGIEFTSAVTILAEIGDYRDFRSPEQLASYFGIVPFVNQSADKLRTGCITKHGSKHLRWIMVQVAHAASKKIGSRLRKFYLRVKARRGANVAIVALARKILCILHHLLINQEMYEEPGVTKRTRPVKLDQPSSQSEFTAQEMIDILQRSGYEIRKIERGAFG

SEQ ID NO: 113761 - protein, 342 aa, unidentified
MYYIGLDVHKKTISYCIKDASGQVHREGTIGATGNELDRWMKTLPQPWTVAMEATIFTGWIYDHLLPHAAQVKVAHPLMLRAIAAAKKKNDRIDAGKIADCVRCDFLPECHMASTEIRDRRRTLRYRHLLVRQMAQMKNRVSGLLLETGVSHNKQRLHKVGYFRDLLSTNEDISESIRPLLRLSRETIVRLQKTDYGLVSSLQRDPLLAERIKRLRTIPGVGPITALTWALEIGDVSRFRSIKQAISYCGLCGDEKSSAEKVMRTPISKQRNKHIQRTLVEAAKLAPSQNHELAVVYEKEKQKGHANRATLAVARKMVAWLLAVDRRQRDFVPSEDRKNAAA

SEQ ID NO: 113762 - protein, 352 aa, unidentified
MSNVTSLAIDLAKNIFQLHGTDVKGNAILKRKIVRSKLTEFIANLPSCNIYMEACGSSNYWGRKFESFGHKVKLIHPKYVKPYVKRNKNDANDAAGIAAAARDPDMRFCNVKTESQQDIQSVHRIRSMLIQQRTALVNQTRGLLSEYGIITAKGITSIRKALPDVLGSNPNNMSALILTCITELKTNLESFDKKIIACDEKIEALFKSNDACKRIEKIPGIGILGATILASVLGNGSSFKNGRHFAAFLGLVPKQHSSGGKEMLLGISKGGDTYIRTLLIHGARSVLQWLDKKADLKNDKLRIWLNNLRSRTNVKNKTAVALANKIARIAWAVVHENAEYNANYRVVKNAKA

SEQ ID NO: 113763 - protein, 356 aa, unidentified
MKNYKLQDYVAKGKEIFVGLEDSKKTWKLAVRSDKMLIQQVSMEADYPVLIRYLRNKFPECTIHLIYEAGFKGFNLYDQLIADGIDCVVIPPHVVTEPKVNRIKTDKRDARRLAKVLENHDFKDSCYVPDKERREDRQVSRTLVALQKDVVRTRNRIRKFLDFHGIEVSFTGRWGRDEFRALTKLELSEPLRVSLDILLAQLEELWTHQVTLRAALRKLSQKERYHKAFTIAHSLPGIGRLTAIRLVLELGEDLSRFGSGKKIASFVGLTPSENSSGETEHRGRITGMGSGFMRAILIENSWIAIRKDPVLLAKFTRVWHASGNRKKGIVAVARMLIVRLRACVMSGTPYKIGIAA

SEQ ID NO: 113764 - protein, 424 aa, unidentified
MKVTYQTCCGVDVHTSFLVATIVKTTGGIEPSYQKKRFSTFNNSILEFKQWLLDNDCHDVCMESTGKYWVPVFNLLEDDINVVIANPKWVKAVKGNKDDTKDSKWIGDLFRLGLVKGSYIPCKKVRILREYTRYRYKLVSCRSSEKNRYQNALTVCNVALDSVVSDIFGKSSTSIIDYLLEQSGSSINHEEIASKLLRSLKSKEDAVIESVEGYQMTDAQKYRMRLVRAHMDYITAEINDVDKMIENMISSNTDFENAVQFLCTIPGVKRDSAITIISEIGTDMSQFSSSKRLCCWAGLTPGSNESAGKKKSVRITRAGVYLKPALVQCAHAAVKSDKSPYYKKKYESLVKRRGKKRAIIAIARMILTAIYQMLSTGEQWNPSDLYKIDMPVALVEKQKAKAIKQARKLLQREGLLPPDEPLAS

SEQ ID NO: 113765 - protein, 372 aa, unidentified
MFIESVDRIIPHEFDVFVGLDVDARNYHVTVLNWAGTVHQFTMSAQPKGLVSWRQQHLPQARVAWVYEAGPTGYGVYDALSQSGDVCLVTPPALLPRVPGRRVKTNRLDSLELAIRLRGGELTGLRVPTPRIRSLRHLTHQWLSLAQRVRGVKCQIKSLLLMEGRSLPEVGRGWSRAVGVALAALACDAEVQFVLQQRWRQLTVLHEEQLRLGRRIRAYCRADPDLAESLSYLMSLPGIGWVTGAHILARVGEWRRLKRPQELAKFAGLNPWEHSTGLRIVRGGISRSGDRHLRNLLIEAAWRATRVDPELRAFYERLRRRNPREQGARKAIVAVARKLTERIGRVLMDRRCYRPVAQRVEPRLLRQAPAPA

SEQ ID NO: 113766 - protein, 312 aa, unidentified
MNEIFVGIDVSKKTLDLYVHPLQQAMQFKNDQTGIEEMIQKLRPLNPKLVVLEATGRYGRPVTVELCYAGIPIAVVNPRKVRAFARAMGKLAKTDKIDAQVIALFGERVPLECYVLPPDDVQALTELIKRRCQLLDMRTSESNRQYDTQLVNVAKSIKTILNTINLEIEKIDKQIDALVKSSKTLKEKDNLLQGIPSIGKYTSSMLIAFLPEIGTLGKRKISSLAGLAPMNCDSGMFRGHRAITGGRPFVRTALYMATLSAIRCNPKIREFYERLIVKGKPPMVALTACMHKLLIIANAVIRDNKPWCINNS

SEQ ID NO: 113767 - protein, 372 aa, unidentified
MNYNTVYVGMDVHKESFTLCAYTIDAEKGSHFQRTEADYKNVLKYLEFLRTVYGNDANFICGYEAGCLGYTLYHQLTEHHVNCVILAPTTMLEQRSKRRIKTDRRDAEIIAKCLAQHNYSPVHIPTATDEETKEFLRMRDDHKLALKKVKQQILAFCLRHNYRYDGNSHWTAAHIKWLKSLNPDALYKEILDEYLLTYTTLSDKLERLDKRIEELASKDEYRESVKKLCCFIGIKTHTALSVLVEVGDFQRFASAQNFASYIGLVPGEDSSGDGQTRLGITKAGNRHVRMLLTEASQCYARGQIGFKSKELKSRQAGNSPQVIAYADKANERLRRRYYKMVLRKSKKHNVAKTAIARELACFMWGMMTDHIA

SEQ ID NO: 113768 - protein, 338 aa, unidentified
MTQHKIIGIDLAKNIFFLVEINHKGKNLSRKKLQRSRLLNYVANQSPCIIAMEACSGAHYWAREFEKFGHDVLLYPPQHVKNQRRKQKNDYNDAEAIAELALYQRVYPVQHKSIEQQDIQSLIRMRRLCVTERTRLINQVRGLVAEYGIVIPKGKAAFRQAIPEILEEVENQLSPILRELLSRQYERYLYIDEQILWFEEKLSQTVKQFDNAKRLMSIPGFGPLTSQAVAVWLGSGLQFKTGRDASAAMGLVPKQDTTGGNVILLGITKRGNTYIRSLLVHGARAALRRAKFKSDKLSKWMLELQERRGSNRAAVALANKLMRIAWAVIAKNEEYQPA

SEQ ID NO: 113769 - protein, 312 aa, unidentified
MTLYQNFIGIDIGKFTFVVNCHGQKSTNTFDNTSQGLKAFIRKHKQDLSDSLTVLETTGGYESLALKILLAKGYAVHRANTRKVKNFIRSFGNDFKTDALDAKALALYGKERSDQLNLYRPPSQEQELLYDLVTRRQDLTKLRAAEKNKIQGPKCQGVLKDSCQTMITFLSQQIKGIEDQITSLVHKKEHLTEKVQELQTIPGVGPVVATTLLALMPELGTLTRRQVASLAGVAPKANDSGTLKGYRRIVRGREIIKPALFMAAMAARNSHSDLGAFYTRLTGKGKKKMVALTALMRKIITIANAKLKPLTT

SEQ ID NO: 113770 - protein, 342 aa, unidentified
MKLTTIGIDLAKNVFQVHGADGKGKTVMKKQLKRAQVLPFFANLTPCRIGMEACGSAHYWARKLQALGHTVRLIAPQYVKPFVKRNKNDAADAEAICEAVTRPNIPAVPNKNAEQQAILSVHRDRKGIVQARTAQANQIRGLLAEYGIAIPQGISHIAKRVPEIIEDGETELPGSFRLLIQRLVDHLKELDRQVGELETEIQRWHRDNAASQKLAKIPGIGPMTASAMVASVGDAKNFKDGRQLAAWLGIVPRQHSTGGKSVLRGISKRGDTYLRTLLIHGARAVIRVAECKPTADPWLKSLLARRNKNVAAVALANKNARTIWALLTHDREYEAHYVRAAA

SEQ ID NO: 113771 - protein, 418 aa, unidentified
MVGDNLAEKRAAIKPDTLVVGVDVGKYTHVARARFPDGSFTRPLPVATDADGFRNLEEHIVQWQQQAKCADVMVGLESTGVYWENLAFWLEGRGYRVVQVNPLHVHQSKEMLDNSPGKTDGKDALLIADLVAQGKYLSFVMPRGVFAELRQLAGLRARLVVERTTYLGRLHLMVSLLFPEFGRVFGDLATKVARRLLYYFPTPEDVRSHTVAAMARRVRKDGGIRLRESKLVLLRERAAATVGVSEGQPALVMALRDTLTALDALDQRIGQLEARMAESLGQVDESQYLLSVDGVGPVSAAVILGETGGLRRYVSAEAILKLAGLNLFEVSSGMHKGARHISRRGRPLLRQILYFIALHHAQPGMPLYPHYARLVDRGTPKPKALVALSCRLVRIMYALVRDGRCFSVQIPQPVPQVA

SEQ ID NO: 113772 - protein, 454 aa, unidentified
MSRKRVPKRKNAVVPILNPDAAGIDIGASEIYVAVPADRDPEPVRMFLTFTADLRSLADWLQQCQVRTVAMESTGVYWIPLMQLLEDRGLEVYLVNAKHVKNVPGRRTDVSDCQWLQYLHSVGLLRASFRPAQEVCAVRSLLRHRDSLVEMATCHVQHMQKALDQMNLQIHHVISDITGTTGLAIIDAILSGERDAEKLAQLRDPRIRATSETIAKSLVGDYRREHLFTLRQAVALYREYQRKIVDCEAEMQQLMKNLGAKADPSSLPAPKESVKKCKVMNPARALALREEAYRILGVDLTTIPGVSVLHVQTILAELGPDFSKFRSAAAFSSWMGLCPDNDISGGKVLWSGTRRVKNRIALTLRLAAQSLQHSQSALGEFYRRMRAKLGAPKAITAAAHKLARIVYHLLTTRQSYDDSIFTKAEERYRRRAESRLKAQAQALGFTLSPATHLG

SEQ ID NO: 113773 - protein, 348 aa, unidentified
MNITTVGIDLAKLVFQVHGVDARGKVTLRKQLKRSQVVAFFAQLVPCLIGMEACGGAHFWARKLMEFGHTVKLIAPQFVKPYVKTNKNDAADAEAICEAVGRPNMRFVPIKNTEQQSVLGLHRARQGFVAARTAQANQIRGLLTEFGLVIPAGIRCIERKLPGFLEDAENGLSGASRALFARLLDHFRVLDRQVEELEREINTWHREDTASQRLQAIPGIGPLTASALVASVGDAKVFHNGRQFAAWLGLVPRQDSSGGKTNLLGISKRGDTYLRTMLIHGARSVLLSLKRHPDRAGGWLAGVAERRNPNIAAVALANKNARIVWALLAHGRDYKAGFRSASATAVSA

SEQ ID NO: 113774 - protein, 346 aa, unidentified
MTHFVGLDVSVKETAVCVVDEAGTVICEHKVLSEPDDIVTLLTSVGVDYGRIGIEAGPLSQWLVNGLAEAGLPVICVETRHMKSLLKAQQVNKSDRHDARGIAQMMRVGLFKPVHVKTLASQEQRMLLTARKLVQHKMLDVESDLRGTLRNFGLKVGVISTGKFEARINELVEGLPRLAAIVTPLLTIRRVMRQEFARLHKMLLDAVRHDPICGRLMTAPGVGAVVALTYRATIDQPQRFIHSRAVGAHVGLTPRRHQSGEIDYDGGISKSGDAMLRTILYEAAQVLLTQSRHWSWLKAWGTRVAQRRGMRRAIVAVARRLAVILHRMWTDGTDFRWGSEPIATVA

SEQ ID NO: 113775 - protein, 315 aa, unidentified
MDVLYHRCAGLDVHAKTIVVCALWGEEDHIQKEIETFSTFTKDLFRLLKWLEDREITHLAMESTGVYWKPVFNILEDYFDITLANAQRIKNVPGRKTDVSDAEWIAKLLRYGLIEKSFVPPAPIRELRDLTRLRKKWVGQLIAEKNRIHKVLECSNIKLGTVISDIFGVSGRKLLTRLMEQGYIEEADIDACLHGRMKGKKQQIQESLFGTLTEHELFMIRQSWKHIEYLESLIQEMDQRIDHLLQPYQQEVDLLMTIPGVKKETAAVIIAEIGVDMGQFPTPQRLASWAGVAPGNHESAGKRKSTRTVKGNPHL

SEQ ID NO: 113776 - protein, 485 aa, unidentified
MAKVKLSAFDRLRLGARLNRKERRDVEQRLSATDPGLEIVNRDAAGIDVGNESHYVAVPRGRDAQPVREFGSWTAALVEMAQWLMGCGIRTVVMQSTGVYWIAVHDVLQKHGLEVNLVDARGTKNVPGRKSDVQECQWLMRLHTYGLLRSCFLPAPEIHGIRTMWRLRDQHVKDAARCIQHMQKSLIAMNVQLHNALSDISGRSGQAIIRALLAGQRDAKTLAALRDPRCMASEEEIVHSLQGDWKPDVLFELQQAVDAYDFYRQQLAKCDEQLKQYMALLPARKVETVVSSAEPAATTDRSKTSRSRKPRKPKGNQPAFDLEAELERILGVNATTIDGINVITVQTVLAEVGPDLSAWKTEAHWSSWLNLAPKRDVSGGRVIRHIREHRTNRAGNAFRMAAQTLLHAHSYLGARCRYLRAKLGGLKAVKAMARVLACLYYRLVTKGQRWVDQGIEEFNRRSEQRELAVLQRKAHKHGMHLVPTS

SEQ ID NO: 113777 - protein, 426 aa, unidentified
MAETVIDMYSRAAGIDIHQSLAVVSAIVPSEDGSQCEFVRGEFNTFTEQGLRELVEFLRPLSVEVVLMESTGVYWMSPYDALLEAGFSVVIVNAREIKGMKGRKTDRNDADWLARIAKQGSFHPSFVPGREARGLRSLARYATSLRFVLAGEKNRLGKLFVAAGYRLNTVFTDMYGAGGMICVRGILDGGKPEEIIGSLPRTGRYKHTKEEMLLALGGKFEEGDLFAARRILKHIDFLDSELGDCVGELMRIVREKDAKKFDLLQTIPGVDALAACLILAELGGGGLEAFDSADALCSWAGLAPGQNESAGRRKPGGTRKGNKALRRVACECAGAAAKTRDTTLRSKFQSLLQRGKGYKKAVMAIARKVMVYAYYVLKNDLPYVDPKIDYQKEHATKNFRRFIGQLRHCMSEYDIKIIHKATGEVI

SEQ ID NO: 113778 - protein, 353 aa, unidentified
MHTHQKSSDPVATIGLDIGKNTFHIVGLDKRGTITLRIKLSRSQLVRRLVNLPPCLIGLEAGSGSHHIARQIQSLGHDVRLIPAQYVKPFLKGHKNDYRDAEAIAEAVQRPTMNFVAIKTPEQSDLLSLHRVRSRLVRQRTAIINQIRGFLIERGITVRQGPGPLRKVLPEVLSSPPEALSPRLLHLISELDQDWRHLDDRLEVLSGEIESLSENDAACQRLMTVPGIGPIISSAVVAAIGTGSGFKQGRDFAAWLGLVPKQESTGDRTKLGRISKRGNKYLRTLFVQAAHVVLERRPAAAMRALWPWIAQASKRLAHRNLLAIALANKLARIAWAVLARGRDYEPRITPNAP

SEQ ID NO: 113779 - protein, 355 aa, unidentified
MSSEKYIGLDVHQATISVAVVDSQGKVVMESILETKASTILEFFAGLRGSLFVTFEEGTWGAWLYDLLKPHVTEVLVCNPRKIPLLKQGNKSDKIDARKLAERLRLHDLKPVYHGETGVRMLRELARSYLTVVKDLSRVMNRLKALYRSWAIPCAGRDVYYRRHRSQWLEKIPEAGARRRAEQLYEQLDMLQHLRQQARRELLAESRKHTITAKLRQIPALGPIRSALAVALIQTPHRFRSKRQLWTYSGLGLETRDSGEYHYVGGQVRRRKKQATIRGLNKDYNHDLKGLFKGAATRASVQPGPFQEFYQRSLAKGIKPTMVRLTLARKIAAITLTLWKKGEDFDIDKLNSQAT

SEQ ID NO: 113780 - protein, 475 aa, unidentified
MNLKGTKKKNQVSNANIFEQQELLKKIEVVRENLTASTWHELETKGKFDKNAKLSFICDDMLILGCDVGSETHYLRAIDTRGRELSKSAFSFSNNVDGFSKAKEWAVKIAAEYDKKQIVLGLEPTGHYWFCLATWMISNGISVVQVNPYAVKQTKELEDNSQLKDDAKDPKLIANLVKDGNFGMPYLPEQLYADLRRLSMFRDQLNEDRIRSINRLHRELKIYFPEYKEALGKTEGTFSLELLKQAPFPDDLAALKEDEIRQIWHNAKLRGRGYSRAGEILEYAKASVGIREGKETGKLVVQWFVQKILELDAELALIETQINQKCLEIPHTDKVLEICGIGENTLSGMVAEMGDISRFDDVKEIQKLSGLGLVASSSGKHKGETRISHRGRKRLRYWLFQAAKSAVAHAEEFKKLHVYYTTREQNPLKKMQSLIAIACKLLRIIFTILKKGIKYDPRKMLKDIRRESRQESLAA

SEQ ID NO: 113781 - protein, 309 aa, unidentified
MKQSVVYIGIDVAKAHLDVAWAGTFRRLPNERSGHAVLVRWIKQSATPVQLICEASGGYEQGLLESLEKSEVKVTLVQAVRVRQYARAAGILAKTDQMDAKVLAAFGSAMQPPPTPPLCAEQKRLRQYEAQRRHLSRVLVAEQNRLAQLSCAELRTLSRGLISKIKKQIETIDTRIGDLIAQDQTLREKAQKLTAIGGVGVRTAALLLAQMPELGQLNRRQAAALAGLAPFNHDSGSIRGKRAIFGGRRALRSGLYMAALSAARFNPILSRFYRRLRTKGKPHKLALTAVMRKLLLALNQTLKPIPSLA

SEQ ID NO: 113782 - protein, 344 aa, unidentified
MITIGIDPHKSSLTAVALRPSGEAAATIRLAVSGDTVARLRAWAGQWDQRQWAVEGAAGLGRGVAQGLAAGDELVVDVPAQLAARARLLNTGHARKTDSIDAASVAMVALHHPGLHPVRAEDHSVVLRLLSERRDDLAEERTRTVNRLHAVLRDLVAGGAKRNLSAEQAAALLRGVRPVTAVEEQRKALARDLVGDLRRLDAALQRNAADIASAVAVHGTSVTQVHGVGPVLAAKIVGHTSAVERFPTRHHHASYCGTAPTEASSGKQRHHRLSRAGNRQPNRALHLVAVCQIRTSGPGHDFYQRKLAESKTPAEARRALKRRLSDTIYRHLTRDQQARTTTTA

SEQ ID NO: 113783 - protein, 348 aa, unidentified
MDIYIGFDISLQSTHICAVNSDGNLVREGTAPSEVEALHAWLHEHGKSWQVKRIVFETGQLSTHFYHGLRSAWPVICIDARHAHGTLKAQRIKTDKNDARGLAQIARTGWYKAVHVKSDHSQSLRALVAGRKQLVTLRLAMENHIRGTLKTFGVKLGAVTTAAYAAKVRAAVTEKDPRLQSAMNALLDARQGLLEQQRALDKQCIAIARNDLVTRRLMTVPGVGPITALTFQAEIDDPLRFKRSRDVGVHVGLTPKRYSSGEIDISGGISKCGNSALRTLLFEASVTMLTRHGRWNRIKAWGVRMAQRKGFKAASTAVARKIAIVMHRMWIDGSDFAYGEPPVAAAAA

SEQ ID NO: 113784 - protein, 344 aa, unidentified
MAMYYIGADVHTNNTELAIEQRGRIVARYSVPTSIPAISAVLSSIQGKKILAMEEGPMAGWLYRNLNEKVDQFVVSEPRRNKLITCEGDKDDRIDSGKLAVLLRGNYLKAVHHTCDSHRAHLKHWVNLYHDRVRDAVRDINKIRACCRMHGVRIPRKVVRNPVRRRAWLSELDNSVLKAQLHMLWIGYDATKEQVKIAKKQFSSYARKYPIIKSWSALPGIGIIRAATIFAHLDTPWRFKNRAKLHRYCGVGLVRITSGKDKKGKPKPPRLKLPWAVNRRLKNAVMGAAITAIERGDNAFKDYYKRMVSNGITPANARHSVARKMVSTMSAMWKTGNEYDEKLL

SEQ ID NO: 113785 - protein, 387 aa, unidentified
MESAVHFQRDHFLLGKVPNKKTAEFTVVKRKGRHMKQIINSSKKVYCGIDFHKNTSTLCALSQDGKQIEPLITVKTKLLVQYLSNKKEWVIGIEVTGGANDMAERLKECGHEVILINSNQFRGIGIGGKKTDQRDAVALANALRLGFIPEVHLRTKRSREIKSLLTSREHLVQARVDAINHIRGTLREYGITINAGVESFYSDAFGKINELSNEQIKRALLLIFERIKNLKNEEKQIEEDLQFFTKDDDKIEKLQSIPGVGPITALMMVAVVDDITRFKNSKLFAAYLGLVPKVSASANMRMMGSITRSGSEMLRRYLIHGARAWMRYSPKDDVNRIWAERLKERRGMNKATVALAHRIARICFAVLRDNTIYKPRLRKENTNEKVA

SEQ ID NO: 113786 - protein, 322 aa, unidentified
MSVAVLGIDIAKQKFDVALLLEGKTKHKACKNSAEGFETLRLWLEKQGIQKVHACLEATGNYGEDLAIYLHEAGHTVSIVNPARIKGFGQSELIRTKTDKIDAALIARFCLVMTPGPWSPPSPEIRALRALVRRVDSLVDMRSQEKNRISTAHESVCLLIREHIAYLDQEIKKIRQQIADLIGQNPNLKQKKDLLDSIPALGKVTIPAILAELDDLNKFNHVSELVAFIGLAPKETLSGSSIKGKPRLCKIGHARLRKALYMPALVSIQCNPVMIAFYNRLKDKGKNGKVIVCAIMRKLVHVIFGVLKSGKMYDPNFKPISA

SEQ ID NO: 113787 - protein, 346 aa, unidentified
MTIVEDTRAITGGVDTHADMHVAAALDPIGGLLGAGEFPATTAGYARLLGWLGGFGTVALAGIEGTGSYGAGLARHVTTAGIRVVEAGRSDRQDRRRQGKSDPLDAVSAARAAQSGRARGAPKGRDGAVEAIRALMADGRSARSERTQTINQARALIMTGPDDLRARFARHTAAGLVTELASLRPRPGDTVGYATRIALRELGRRAEFPGGQLGRLDELIVPLVTARAPGLLALYGVGPDTAALLLVAAGDHPHRLRSEAAWAHLCAAAPIPASSGKRTRHRLNPGGDRQANHALWRIVITRMSSHAPTRAYVERRTAEGMPEKEIIRCLKRYVAREVYRHLRAAG

SEQ ID NO: 113788 - protein, 354 aa, unidentified
MNSAKYIGMDVHKESISIAVMNHSGKIVMESVIETKASMILQFIGGLRGDLRMTFEEGTWAAWLYDLLKPHVTEVVVCNPRKTALLKDGSKSDRIDARKLAELLYMNKLNPVYHGEHGIRTLKELARSYLTVSKDLTRVMNRLKALYRSWGIPCAGTEVYSPRHRAEWLRKITEIGVRRRAEHYYQQLDSLRLVRQQVRRDLLVESKKHKPWKLLRQIPGIGPIWAALLIALIQTPHRFRTKRQLWTYSGLGLETHDSAQYRVLGGQLQHSKTVTIRGLNKNHNHDLKAIFKGAALRATIAAGPLHNFYEGLLAKGKKPTMARLTLARKIAAITLIIWKKEVRFDAEHLKPQAA

SEQ ID NO: 113789 - protein, 337 aa, unidentified
MQLPEQSPEPLNALVFTRKGQPMSHSSFVGIDVSKDSLEVHILPSEDHFNVSYDQEGIEQLIQRLRPLQLQVIVMEATGGYEKRLAVEISLAGLDKLQILNPRNVRDFARSTGRLAKTDSIDAKILALFSRTFQLTGKSLPSQAQDQLKALDKRRKQLVNARASELNRLHQAANARVLASLKRIIAVLDDEINDLDQDIHQLIKQNPVWYDKAQCLKQVKGIGDVTAFAILASLPELGLLNRRQIASLAGLAPINRDSGIFRGKRMICGGRADARKSLYMATLVATRFNPTIRAFYLKLTSAGKPKKLAITACMRKLLIILNAILKNHIQLKTVVCS

SEQ ID NO: 113790 - protein, 417 aa, unidentified
MEDLEFFVGIDWGSESHQVCLMDRQGSVLGERAFRHGGAGLAELANWILDATGAQPHAVGMAIEIPHGPVVETMMERGFMVHSLNPKQLDRFRDRFSPAGAKDDRRDARTLGDALRTDHHAFRHLNPAAPEIIELREWTRIANDLTGDRTRLVNRARQQLWRYYPQLLKIENDLTKTWIRELWGLAPTPDKARRIRVKTIASLLKRHRVRRINAETVLERLHEPAVAVAPGTTEAAVAHVEVVFAQLTVVGQQLARAYHEMDRLVTALSQTEASPEHQPEITAQRDVEILNSLPGVGRIVLATLLAEAHDPLLRRDYQALRCLSGVAPVTRRSGKSLIVVRRLAAHNRLQDAVHHWASVAVQHDAVSKTKYAALRSRSHGHARALRSVADRLLCVACAMLENQTMFNPDSSRHSRAA

SEQ ID NO: 113791 - protein, 341 aa, unidentified
MNEITVVGVDLAKHVFQVHGVDAAGVVVVRRSLRRHELLGFVASLPGCVVAMEACAGAHHWARQFQALGHQVRLIPPSRVKPYVGRQKNDAADAAAICEAAQRPAMRFAAVKSEKQQALLLDHRARDLLIRQRTMMVNALRGHLMEFGIVAAKGPAGAQALMTALDGAAGLPEVPDVALPALRVLAAGVRGLTGQIKEIEQRLKAARSEDEQVRRLMSIPGVGLITATVIAATVPDATLFRSGRDFAAWLGLVPRQRSTGGKTRLGRVSKMGDRYIRRLLISGAMSAIYRCKRGTGFATTWLGRMLARKPVRLVAVALANKIARIAWALMARGDSYRPASV

SEQ ID NO: 113792 - protein, 350 aa, unidentified
MIIIGCDYHPGFQQIAFVDTDTGECSERRLEHREEAEKFYRDLGGQGAAVRLGMEASGHARWFERLLGELRFDLWIGDAAEIRTKRVRKQKTDRQDAELILRLLLEDRFPRIWVPRGENRDLRQLLWHRHRMVQARTRIMNQLQAVALNEGLRCKKRLWRDAGREQLEAFELAPWASRRRRDLLELLDQLTPTIAELTQAIEQEVEKCPEARRLQTHPGVGALTALAFVLIIGRADRFQCGKQIASYLGLVPLEESSGQRRRLGHITKQGNSLLRFLLVEAAQVTVRSDPEWRSKYFHLAMRRGRKIAKVAMARRLAVRMYWMWRKGWDYEQLKKFGSHAGQPGTGDGVR

SEQ ID NO: 113793 - protein, 376 aa, unidentified
MGQHSETFIGIDTSKLRNAVAVAEGGRGGEVRYLGEIDTTDAATRKLVAKLAEKHARLVFCYEAGPTGYGLYRLIKSLGHAVVVVAPSLIPSKPGDRIKTNRRDAEGLARLLRAGELTSVWVPDERHEAMRDLSRAREAAVDDLKSKRQQVSSLLLRLGLHYAGKTTWGKAHRNWLSSQKIAQREQRFVLEELLGAERQAQDRIDRLDAAVRAAVPEWSLCELVTALQAMRGIDIVAAVTVLAEIGDLSRFASPRELMGYLGLVPSERSTGDSIKRGGITKAGNRRARRVLVEASWSYRHPPRVGREKQAKVDAAPEAVRAIAWKAQTRLAARFRALGKKGKRPTIVVTAIAREMCGFIWAIHRAMTDAVPTAAKR

SEQ ID NO: 113794 - protein, 345 aa, unidentified
MKIIGCDFHPSFQQIAMCDSETGELQERKLSHGDGQAERFYRELVGPVLIGIEATGNSQWFLDLVGRLGYEIQVGDAAKIRASYVRKQSTDKRDARHLLTLLLEERFPQLWTPSAAMRDQRQLLRHRDKLVEIRTKVKNSLQHLAMNRGMQKKSRLWTRLGMEQFQQLAMPGWAGVRREDLSHLLKQLNCQIETLDRAVEQAAHQHPRARLLMSQPGVGPVTALAFVLTIGDVTRFAGSKQLSSYLGLVPSEHSSGSKRRLGAITKQGNRFLRKLLVEAAQTAVRKDEGFRKEYQHRCRRRPKGVAKVAAARKLAVRLYWMLRSNLSYPEIVRVESNPRVPLGDV

SEQ ID NO: 113795 - protein, 393 aa, unidentified
MICVGIDVAKDKHDCFILSSEGEVLADVFTISNNAEGFDTLLQTIHRCARPEDKIKVGLEATGHYSYNILGFLLDKGLHTFVINPLHTNLYRKSLSLRKTKTDRVDARTIAAMLMSDVDLKSYTDTAYHNEELKSLTRYRFDKVKERAKLKQSVSRLVTILFPELEKLVPTLHMASVYALLSEFPGAKQIARAHLTHLKALLNDASKGRYGRDMATELRDAARCSVGSVMPAKSLELQHTIRLIRELNTEIEDIESAIQTIMGEMQSPITTIPGIGFRMGAMILAEIGDFSRFDSPDKILAYAGMSPSTYQSGQLSLSGTYSHMEKRGSKYLRYALYNATKYVCLWDSTFEAYLAKKRAEGKHYNVALSHAAKKLVRLIYAMEKSRQPYNSVA

SEQ ID NO: 113796 - protein, 412 aa, unidentified
MRSMTSACNRPIAIDESLTCSSIVLDAIEQWARSLRQRFEGRPVAVSLEIAKGPLVYALQKYDFLVLFPVNPATLAKYREAFTPSHAKADPTDAEIALEILIHHRDKLKALRPQSASMRTLEQLVEQRRRLVGDKNRITNRLTSALEQYFPQALDCFEDKDTVLFCDFLARWPTLREAKHARKATLAAFFRDHHVRSATTIEERLRAMKDATPLTEDVAVITPNRLLVQVLVEQLRVVLQAIARFDAEISVLSKTLPDYSLFSALPGAGTALIPRLLVAFGEQRDRYESSADFQMYTGIAPVTESSGKKRWVHWRLRCPKFLRQTFVEWAAKTITRSFWAGAYYRQQRAKGCSHQAALRALAFKWIRILYRCWQTRTPYDESTHLNALNRRGSPLLRSIAGSKNLLTAHLRV

SEQ ID NO: 113797 - protein, 333 aa, unidentified
MQYTHILGIDISKATLDLALSCNQANASMLNRRFANNLSGYRALLAWLKEEKVNLTHILICLENTGIYHRPLAAFLHKHHAFVCIETPVSIKWSQGLARGKSDKLDAQRICTYAFRYQDKAQPYVPKNETLAQLADLLATRERLMDARKSLLAPIDELRDVGLKEESEMLYKACQKSLASLSQEIKAIEKDLQSIVEDDPELKENYQRITSVRSIGLLTAIYLLIYTHNFERFDNAKQLASYAGVVPFEYSSGTSIRGKHQVHSMANKTLKAALHLCALSSIVHNNEMQLYYQRKLKQGKNKLSVINAIRNKLLHRVFACVRDQRMYTYKHVA

SEQ ID NO: 113798 - protein, 412 aa, unidentified
MERVRDRVAGLDVHRDTVTAATRVVDWATGEIVKDHQQFSTTVAGIAELGRWLLDSGASTVAMEATGVYWKPVFYGLEGLFDELWVCNAAHVKNVPGRKTDISDATWLADVVAHGMVRASFVPPPPIRAVRDLTRYRKTQVDARGREIQRLEKVLQDASVKLTSVASTVWSKSSRKMIDALIAGERDPEVLAGLALGKMKAKRNELIDALASNWRPHHSVLARRIVAHIDFLDASIAELSVEIGGGVAPFSDLIERWCEIPGVGQVVAEIVIAETGATMAAFPTAQQLCAWAGVAPASHESAGKRRPAGTRPASRWLRRALVEAARAAARTKNTYLAAQYRRIARRRGANKAAVAVAHSILTIMWHMATTGQPYHDLGADHFDKRKDPEQEARQLIARLKELGYQADLKPAA

SEQ ID NO: 113799 - protein, 419 aa, unidentified
MSKKKLFLGTDTASQENHFALVDSEGHAVIKDFRLPNSLPGAEALVKKLLDLRSQILFDELLIGTEATNFYDWHLLEYLAQSLLKEQIKLTFYRLNARLLHNFKKSYPYKGKDDRQDSRMIAERLRIGNLKEPYIPCNPFMPLQRLTRFRLHLVQAIVKETSVFLQNLSLKFSSFQTLKPFSNSLSKTSTAAILEFKSSEDLIQTPLPELVSFLMKQGRNRFPDAEKVAAALKQVARESYRLRPELGPTIDLILSTIYNNIQALRKSLKEIDHAIDATVQAFPSTLSSIPGFGPVFSAGILSEIQDIRRFPAHPQLAQFAGITWSRYESGNFKAEETKLVKQGNKYLRYYLIEAANSVRVHAPEFQSFYQRKYGEVTQHCHKRALVLTARKLIRLVHALLRDGRLYQPGQEVRLTSNAV

SEQ ID NO: 113800 - protein, 351 aa, unidentified
MMIIGCDFHPRFQQISFLLEETGECGQRRLMHTAEAVEYYRSLCGTPVRVGVEATGSYGWFRRLLSELGHELLVGDATQIRASNPRRQKTDKRDAEHILGLLVEDRFPAIWQPPAENEQLRQLLLHRSRLVRLRTRVTNQLEGMAKNEGLLLPGGWSNKRRKAIEALPLPGWYGERRKDLLALLDRLEERIAPLDKAVSQAAANNAEACLLMTHPGVGPIVSLAYVLTIGNWQRFPRGKQVGSYLGLIPSEESSGDKRRLGHISKQGNTLVRWLLVEAATTAQRYDASWHRQYLRLSMTKHHGVAKVAIAHKLAVRLYWMLRSGEDYQHVRERGSTARQSECPGGRSRAAD

SEQ ID NO: 113801 - protein, 337 aa, unidentified
MIVVGVDVHKASLTAVAVDEVGRPVAEQTVADGEMLLNWAASLSEERLWALEDCRQLTRQLERTLMNAGEQLVRVPPKLMAPSRRAGRIRGKSDPIDALAVARAALREPRLDHPRVGEERLRELKLLVDHRDDLVDERRRAQQRLRWHLHELDPTLAIPAGALDRAVWLDRLARRLARQERTVLVRIARELVGRCRSLTRTILELDRELQGRIEKTAPTLLALPGCGALSAAKLLGEIGPIERFQSDAQLARHAGVAPLEASSGKHRRHRLDRGGNRQLNCALHRIAITQARMHQPARAYLARKQADGKSRREALRCLKRQLARTVYTTLNNEPPLT

SEQ ID NO: 113802 - protein, 348 aa, unidentified
MSEAYDGPQVVGMDLHRRRSVLVRMTADGRKLETARITNSPAELRRVIARAGVRPQVVLEATYGWYWAADTLAAAGARVHLAHPLGVKAFSYRRVKNDEKDAADLADLLRMGRLPEAWIAPVEIRELRELTRYRIKVVRLRTSCKDQVHAVLAKLGIEVTCSDIFGVAGSAWLDGLELPQPYAGKVASLRALAGELTAEITLLEAAVADLLAHHDGYHAVRALPGIGPVLAAVLVAEIGDITRFNTPARLCSWAGLTPRHRQSDVKVTRGHITKQGSPLVRWALVEAIQHVPAGHLLRQRKDNILARRGDQAKHIAKIAIARQLLTWVFYAMRDGQVRDLAPATGKAA

SEQ ID NO: 113803 - protein, 377 aa, unidentified
MATTRTVLRDQLTAKPGDLYMSLELGDKHWHISIGGERRSVSHYIVEAGHTEEVADCIAKAAARLHTARVHSCYEAGRDGWWLHRWLTELGVDNIVVDPASIEVNRRARRAKTDRLDADKLLAMLVRHHRGERVWSVLREPSPSDEDARRAHRELQRLTHERIAHTNRISSLLVLHNLRPRIVIGGRDWPVWWNEHREQVPPTLRAELEREAVRLKVVKEQVRAIEAARARELAEGKQPLVAQLVRLRAVGAKGAWVLVKEVFGWRHFANRRELAGSLGLVPTPYASGDSEIEQGISKAGNRRVRALLVELAWSWSRLQPGSALTQWFNRRFAGAGKRMRRVGIVALARRLAIALWRYLQTGEIPIGARLKPTGSGI

SEQ ID NO: 113804 - protein, 338 aa, unidentified
MKVTLIGIDLAKSIFQVCGVNQAGKLVFNRQIRRARLMEFLVQHPDATMAMEACSGSNYWGRELQQRGFQVKLIPPQHVKPFVKGNKNDRNDAFAITEAARRPNLKYVEPRTLVQTDMIQVHRVLDRMVRQRSALINQIRGFLNEYGVVVSRGKERLLSAMPDLLEDADNGLTPSSRTLFQALYDDWRQMNEAIDRIEKALKGQAKADEAAQRLMKMKGVAERIATATIAHVGNGHGYHSGRHFAANLGLVPREHSSGGKQKLGGITKRGNRYLRRMLIQGAWSVVRNADNSEDRMSRWARQLIERRGKHKAVVAVANKMARIMWSMLYHQTEFRANG

SEQ ID NO: 113805 - protein, 336 aa, unidentified
MGEITTIGLDLAKSVFQVHAVGADGKTELRRQVRRAQMLAFFGTLAPCLIGMEACAGAHYWARELTGLGHDVRLMPPSYVKPYVKRGKTDAIDAEAICEAVTRPTMRFVPVKTEDQQAALMTHRVRDFLVRQLTQVTNAIRAHLGEFGIVAPKGVHNVERLLAMAEDAALPESARQPMQVLAEQFRDTRRRIDAITADIKARTQTDTVARRLQTIPGIGPITSSAIAASVPDVANFKAARDLAAWIGLTPKPHSSGGKERLGKITKMGNRYIRRLLYLGALAQITARSRKPAGEDWLWKMLQRKPVKLVAIALAARMARTVWALLKTGESYRVMPG

SEQ ID NO: 113806 - protein, 340 aa, unidentified
MKLFGAIDLHSNNNVMVLIDERDEVVYRKRLANDLTLIIEQLSAYQPSLEGIVVESTYNWYWLVDGLMAKGYQVHLANTAAIQQYNGLKYTDDDSDARWLAHLFRLGVLPQGYIYPREQRPVRDLMRKRSQLVRQRTTNLLSIQNLYTRNTGQALSANRIKELQVEDIDGMLSVSDLTLAIKANLAVLRSAQEQVQILEQAIEERVKLRPEFSFLKTVPGIGQILALTIMLETGDVQRFSTVGNFASYCRCVGSQKISNGKRKGSGNTKNGNRYLSWAFVEAANFAVRYQPRIKSFYQKKKAKSHGVLAIKAVAHKLCRACYYIMRDRVPFDVSKAFGQK

SEQ ID NO: 113807 - protein, 345 aa, unidentified
MIAIGADVHKGRCVFARMEEDGKVKMLEPIECTREAWLKRLAELPPQAEIALEVSTSGYFAMSVMEEAGWRERAHWVHTAGVDSLRKQKSDRLDARKLARKLGANAADPLPEAWFPPAPIRQLRMLARQRCRIARLRTLTKNRLSSLLQMHGLRPPASIISGAGREWLQRQKLPEPVQQCFEQTFRLYDFLSSERQTSEKNLADFAAQFPEIQRLATIPGIGHILSALIWGEIGTLERFPSADALVNATGMVSRLYQSGEVSLQGSITRQGSAWLRWALITAANCVTRSRGPLGRRYWSLRRRKRPNVAKTAVACSIARCVYGVLKHGEPFQAERWGRRSGKLEP

SEQ ID NO: 113808 - protein, 426 aa, unidentified
MWDAKRRVLKIKSLKHGIIQDKRGNVMRAVFGIDVSKTSSEVAILVNGEKVHGYTILNDAFGFNRLLGDLKTVHNPEIIFEATGVYSRRLQAFLEEYGYAYTRLNPLEAKKQLDSLRVRKTDKIDAEKLAKSQLVHNRKPTYVQEEVYQHLRDLSRFYQNLTEDLVRAKNRLHKVLQITFPELENLLSTPTGEQYWNLVMAFPCKEFVLRLSQSDLCEIIRHSTSKRISEKRIAYLTDKLIKLAKQSFCAVKKTSPMLEEVRYYAQELLRLSERRQVVLNDMVALAQPLPEYDILRSIPGIAETTATSIIGELGDIRRFQSSNQINAFIGIDLRHYESGNFLAKEHITKRGNPYARKILFKCIHNIASASHTNPCHIADFYEKRKRQSTIASTKPHTIASIHRLIRTMYYLITHNKLYDYSLSQNR

SEQ ID NO: 113809 - protein, 359 aa, unidentified
MNATTVAVDLAKNVFELVAADEHWHVVERARLTRTQFQRWFHNRDVALVVMEACGSAHHWGRVLQQQGIEVKLLPPRYVRAYVKRNKTDAADAAALLEAVRCADIVPVRIKSVEQQALQSLHRVRSAWVATRTARINALRGLCREFGILISTGARLGVEQITRVLVDPHSNVPAMLRETLKLLVEEIRLLEVRIAQLERELSEAAKLSPACCTLLTVPGVGLLTATALVASTGGAVQHFKDARHFAAWFGLTPREHSSGSSRYLGRISKRGDRYLRTLLTHGARAVLRAACIAQRRGAALDPLRRWGLAVQSRSNHNKATCALANKLARICYASMRDQQPYQSVRLAKKLERQTFPMPA

SEQ ID NO: 113810 - protein, 341 aa, unidentified
METQRHIGIDLHRNQFTCCVRLDNGRNYLTEWKLEDLPRFVKKLRPDDEIAVEVTGNTRLFRDAVAPHVARVVAVDPNQFKVISHSVKKTDANDARNLALYLEKDLLPEVRMKEKTQAQLASLTQTRDTLVKLRTSLKCKVNNILSAHGINLEKEALSSEKKLREILAMKFDPMVGIELEVIVEEIRSLNQKVARLEKTIAGEGSKLKGYRNVTSIKGIGPLSGSILLSVIGDIDDFDDEGKLAAYFGIVPRISNSNETERTGRITKRGSKLGRTTLVQCALIAQRYSPYLKRYYEKIKTRRGTGKAIIALARKLLGIIYRTLKNKWVFEDFPNFVLAEAA

SEQ ID NO: 113811 - protein, 330 aa, unidentified
MSDPIEVESAPIKKLQMIGVDVAKQKLDVSVDDNTALTIDNHEESFKNLLKIIPENGSACFVMEATGGYERKLVAFLQAREIAVAVVNPKRVRDYANAMGAYAKNDRIDANMIRHYAQTAYDKKRLQLRESLTEAARRRESLLRRRNQLVGQRSMEKQHLESATDKDTVRSIKRIMKQLDKEIEKIEAMIQTDINADEHLKKSMKQLLQVPGLGDVTVLTLLTQLPELGKLSNKEISALVGLAPYARDSGKKTGRRAIFGGRTQIRSTLYMATLSATRFNKPIRLFYQRLLAQGKLKKVALVACMRKLLTILNSMAKTGSEWNPDFANQA

SEQ ID NO: 113812 - protein, 454 aa, unidentified
MGKPRVVPDEDHEVVYERVAAVDVAKASGVVCLRAPDPARPGRFTSRIWDHVPATRAAIEAVGRELLAHRVQMVTLESTSDYWRIWYYVLESLGLAVQLVSPSQAKNLKGRPKTDRLDAMWLARLTQWGMLRPSFVPPAAIRRVRDFTRARTDLVAERTRCLQRLEKLLEDAMIKITSVAKDGMKAKSVVAMVAALAAGQRDPHALADLAKGPLRAKKDALAEALDGMFDSHHGVIARMLLGQVAFLDQQITQMEDQAIAALAEVQESWGVDASGQTGPGCGVTPGSPVLAAAHRLAEIPGLSLWLAIVIIAEVGLNMAAFPTPAHLISWMGLCRSAAQSGTRHGKGKPKKGNSYARAAAGQAAIGAARTATFLGERYRRIARRRGKAIAQAAVARSIMIIVWHLLADPQARYRDLGPDWHATRINRDKKIRNHLRGLQALGVTVTITEDEQVA

SEQ ID NO: 113813 - protein, 367 aa, unidentified
MREGTTYVGMDVHKRTIAVAVRYPGGGRDERTIPHEARAVSRLARKLKREAPGEISCAYEAGPCGYGLQRDLQEQGLKCQVIAPSLIPRKPGDRIKTDRRDARMLAELHEGGLLTEVHPPSPEDEAVRDLCRTREDAKEDEVRARHRLSKFLLRRNLRWGRKNWTIAHQQWLRGLRLEHPADRAIFDAYCIALDQATERVRMVDLALKDWALIEPYATPVAWLRCFHGIDTVSAMTLVTELHDFRRFRRPRELMSYLGLIPSEHSSGGRTQRGGITKTGNGHARRILIECAWHYRHSARVSRTLQKRREGQPARVIAIADKAHRRLSDRYRRMTARDKEHNKVVVAIAREWVGFLWATLAVEEQTTV

SEQ ID NO: 113814 - protein, 403 aa, unidentified
MNNVAGIDVSKGKSMVSVLRPFGEVVAKPFSVGHTGSELKELAGYLKSLDGETRVVMEHTGRYYEPVARFLHDEGVFVSAVNPKLIKDYGNNTLRKVKTDKADSRKIARYGLDNWAELRQHTPMDTIRMQLKTLNRQQSLYTKTKTMMKNNLIALLDQTYPGVNALFDSPVREDGSQKWVDFATTFWHVDCVRNMSLTAFAERYRKWCKRHSYNFSQSKAVEVHAGAQDLIAMLPKDALTKTMVRQAIDALNAVSASLERLKAEMRTLAAQLPEYPVVMAMHGVGDSLGPQLMAELGDVTRFTHRNAITAFAGVDPGADQSGTHEAKSTRVSKSGPPELRRALFLVMDCLLKTQPQDDPVYRFMDKKRAEGKPYLVYMTAGANKFLRIYYGRVKEYLVQLENS

SEQ ID NO: 113815 - protein, 366 aa, unidentified
MKKTSTVRVNGNMIFKGHKLTIGLDLGDRWSFYCVLDEAGQVILEQKLPTTPEAMKQTFGKIPRSLIALETGTHSPWVSRLLTELGHEVIVAHAQKVQLITKSNRKDDRHDARTLARLARIDPALLGPVRHRSAKAQLHLTVIRARAELVSARTALVNAARGLVKSYGQRLPKCGTYQVSRELAAGLSNELRDVLEPLLKEIESLNERVKEYDERMEKLAKDVYPEVALLKQVKGVGTQIALTYVLTIEDPYRFAKSRQVGCFLGLRPGRRNSGESEPQKGISKEGDRYLRTMLVQGAHYILGPFGEDSDLRRWGRKLAERGGKNAKKRAVVAVARKLAVLLHRLWVGAEVYEPLRNSQKAMREVA

SEQ ID NO: 113816 - protein, 418 aa, unidentified
MTATHSIAPTLLVAIDISKHRHEVLIGIPGKTRRRRLTVMNTLEDFERLCAALASYDLPVRIGFEATGNYHRPLAHHLGRAGFDLKLVSSVGLARTREALHNSWDKNDPKDAQVILHMLEIGAVQFFHDPMVVGTSDIQELSKTHEIVSRSKTELWHRILTHYLPLYFPEAERFHRSSRTDWFLAFLEKYPSPHMISVMSRDDFIADAWDVVGRKVSKERLLSDIYATAGGSVGLPVHPDSDALRMFRLVLAEGRGLVRQRDQLEARAVELLSDLPDYQLLTTIPGIGPINAMTILAEAGDLRRFRHHRQFLKFCGMDLATVQSGMFRGQSRISKYGNARLRRTLWMAGQTAVLKRTNSFRDKFERYIAKDRHNAHLRRKAYTAIAAKMARTVHAVVNHGEPYRPFFEGVSPGGRTSL

SEQ ID NO: 113817 - protein, 356 aa, unidentified
MEKIGSVVDLPSVEEVILGVDTHLDLHVAVALDQLGRRLGKITVPTSTRGYARLLRWAEGLGTVGCVGIEGTSSYGVGLVRYLQCAEIPVVEVERPKRRHLRRNGKSDSIDAEAAARTVLAGEAAGEPKSGDGQVGMIRTLRSARQSAVKARSQAANQLQALLVTAPEELRHSLRKLPTKALVSTCARFRPVKEPDDVRTATKIALRSVARRHEALSEEIAELDERLDRLVARTSPGLISLPAIGTHHAATLLCVAGDNPRRLASEASFASLCGVSPIEASSGKVVRHRLNRGGNRDANRALHMICVVRMGSDRRTQQYVARRTAEGKSKREIMRCLKRYTAREVYRVLVQPTATS

SEQ ID NO: 113818 - protein, 342 aa, unidentified
MYYIGLDVHKKTISYCVKDVSGRVHQEGKLGATRCELDLWMRTLPQPWTVAMEATIFTGWIYDHLHPHATQVKVAHPLMLRAIAAAKKKNDRVDASKIADCLRCDFLPECHMASTEIRDRRRTLRYRGLLVRQMVQTKNRISGLLMETGVTYNKQRLHKVGYFRELLASNEEVNESIRPLLRLSRDTIARLQKTERALVSSLQRDPLLTERIKRLRTVPGVGPITALTWALEMGEISRFRSIRQAISYCGLCGDERSSAEKSIRTPISKQRNKNIQFVLIEAAKLAPRQDHDLALLYEREKQKGNANRATLAVARKMVAYLLAVDRGQRDFVTAEDGRCDAA

SEQ ID NO: 113819 - protein, 340 aa, unidentified
MRLIGCDLHASQQSIAMLDRDTGAVMETTLNHEGEAVRAFYASIPPPVVVGIEATGSMGWFLRLMEELAIECRVGHPTAIRKAETRRQKHDRRDAALLLQLLVEDRFPAIWMPSTEYRDLRSLLLHRHQWVRMRTRVQNALHAIALAHGVRRGHTLWNRDGQALLASLPLAPYTADRRSELQALYQHLQAHIDRLDDRVQHVANERAQATMLMTHPGVGPVTALATEVFVGDPARFLDGKALASYVGLIPREHSSGRRQRLGALSKQGNPFLRFLWCEAATHAVRRDLDLQRFYRRKAVQKGFAKARIAAARKLGIRLWVMLRDQIDYAEFCRRGLARQS

SEQ ID NO: 113820 - protein, 445 aa, unidentified
MTTLAGVLVVPSVSCLPGTSDLRPSAFLLFEKVLAIMITGIDTFHDSVAGVDTHTDTHTIAAITATGQHLATETFPATRPGYIKLTEFLRNHGVGTVGVEGTNSYGAGLTRHLIDRGYLVMEVLRPTRSIRRRDGKSDPVDALAAARQVLTGEALSTPKDSTGPVESLRALQIARNQLVSTTAKLITTIKSLLVTAPENIRARYVTMTNHALVTALAQCRPSSDLRDPRNGVLISLKSLATTYRTLRAQCDDLETRIAALVSVINPHVSNIVGCGPIVAADLIISIGDNPERIHSEAALAHLCGVAPLPASSGRTNRHRLNRGGDRRANSALYRIAVVRMRCDQRTKDYVARRIAEGLSKKEIIRCLKRAIVREIYRVICTKRSTPQPRDLRRDELKELRIAKHLTQAVVADSLGCAPARISDIEIGKRPLTELASAYEKFLESA

SEQ ID NO: 113821 - protein, 431 aa, unidentified
MLKINPLSTLYVGIDVSSKSNYVCALDFYKNKYINSSFANNQPGAEELALKILECLKEHPDITTIVAALESTSVYSIHIANYLSSCEELMRFKPYVFVLNPKCTANYKKSYIGLGKSDPIDAFVIADYARAGNIESEPWRGSQFLALKRLTRHRLHLVECMTREKTYLVSNLYLKFSELQMLEGDDQPFCDIYGATSSSVLMEYFSPEEILDSSEEDLIAFLAKKSRNRIKDISKTVDLLKKAARDSYRLDKALYEPLNVSIASSFNCIETFKREIKVIDNAIEKEIKGLNPNAFIILQSIDGIGPVFAGGIIAEIGDITAFHSSDALAKYAGLTWKSNQSGDFDGEDTPMIKAGNRYLRYYLGEAANSMRKLNVEYGTYFRKKYNEVPKHQHKRALALTSRKFVRLVYGLLARNQLYSGVSLDTSIKDSN

SEQ ID NO: 113822 - protein, 345 aa, unidentified
MEKITTVGIDLAKSVFQVHAIDSSGQVIVSKAVKRTGFVALLAKFPACLVGMEACASSHHWARELTKLGHDVRLIPPSYVKAYVRRQKNDAADAAAICEAVSRPSMRFVPVKSEEQQSALMAHRARALLVGQRTALICAVRAHLAEFGVVSATGPRNIAPLLSILADETDTRVPAMARGALGPLVEQLKTLGTQIEVLDRQILDWHRANAISLRLAAIPGVGPLTATALAASITDPTMFKSGREFAAFLGLAPRQSSSGGKEKLGRISKMGDRYLRSLLVVGATAVLRHAKAKASPSRIWAEQLMIRKPFKLVAVALANKTARIAWAVMARGEDYRTTESVAVAA

SEQ ID NO: 113823 - protein, 390 aa, unidentified
MQVMHPVCCGIDVHQKSIVCCILDGPLTSNEPKKYQTSFGTTTKELKAALDWLLEHQVTHVFFESTGQYWIPLFNIFSDSDLELVLANPQHIKNVPGRKTDVKDAEWIAQLGRCGLINQSYIPSQEVLQLRYLTRYRLSVKQRLTQIKNHIHVILQRGNIKITSYLADIFCKTGQALLTLFINGEVINEDNVESCIHGRIKASTRQLIEAMEGKLSTVDRFLIKECMEEYKLQKKISDELNKEINEYILDHFPEEYQLLLTIPGISDNCCATILAEIGPNVDAFKTDKKLASWAGMCPGSNESAGVKRSSHTTQGNKYLKQALVMSVLSVQRAKEETFSLFYQRISSRGSKMKAIIACGHKMLRIIYKILQSHQPYNSQKALGLRQQTNA

SEQ ID NO: 113824 - protein, 365 aa, unidentified
MHELTHIGLDVHKETIAVAVLRPGESECDECVIANTPAALRKLFARYPDRAALRSCYEAGPTGYDTHRLLSSLGVPCEVIAPSLIPRRSGVRVKTDRADARNLARLHRAGELTAVRVPSPPEEALRDLVRAREDLKSDRRIARQRIRSFLLRYGRRYPAPGARWSFRFEVWMRALTFEEPAAQAAFDHLVSACSVRDAQLAAIDRQIEEAALCGPLAEPVARLRAFRGLDTLSAVTILTETCDFRRFPTAASYMAFTGLVPSEHSSGAARHQGSITKAGNAHVRRVLVEAAWAYRHRPAVRGAHAKRLEGQPPEVAAYSWKAQCRLSSTYRKLAAKKSPNKAAVAVARELSGFVWGAMTGRMDAA

SEQ ID NO: 113825 - protein, 343 aa, unidentified
MTISMLGIDIAKNTFQLHGADNSGKAVHKKRLSRRELVEHVANLLPCTIVMEACGGANYWARVFQGSGHAVKLISPQFVKPFVKTNKNDANDAQAIVEAASRPSMHFVPIKQVEQQDIQSVHRIRTRIVKNRTALINEIRGLCLEYGVVLIPGAARVRSSLCVAIADSDNELTPSSREFLQDLYEELVDVEARVKNLNTKIRQLCRQNENCQRILKIPGVGELTATAIVAAVPDPGEFRNGRHMSAWLGLVPRQSSSGDKQRLLGISKRGDRYLRTLLIHGARAVLSHYKDRDNDYTRWVGRKKATLSHNKAAVALANKNARIIWSMLNTGEEFNDGAQATAA

SEQ ID NO: 113826 - protein, 331 aa, unidentified
MKNYFIGIDVSKMKLDVALHSTEGRLNCNHIVIENNGKGFKDLLTWFKKMGINHQEVLICMEHTGIYADKVVDFFETKGIAYSLQSALHVKKSLGLVRGKSDKVDAFRLSEFCYEKRATIKESQKPSQNIIVLKHLFTERRKLVGTRAQYKQIRSEIAIYQGKGFVKRKERIIKNLQRDIDEIDQEIIEIIKSDSEIYCNFLLLISIIGIGNVNAVGAIVYTNNFKNFSDPRAYACYIGVAPFPCSSGTSIHKRKSVSKMGRLQLKADLTQAARSAILYDPQMKAYFKRKFNDKKGAESNYGTVLNAVKFKLICRMFSVIRRQSAYIKFAF

SEQ ID NO: 113827 - protein, 341 aa, unidentified
MGSFIGVDTHKDSLSCSAVDEVGREVESVHAVNDGRGFCKIERFAQRVEATRIGIECSGSFGLALAQHLLAAGFDVREVPGQLVKRDRRSLSKGKSDALDALLIARVVAREDSLPPPPLKGLTHDLKALVDHRETLLNEATRHRNRAHAFLTQIRPGYSRAVPALTSARQLDAALDLVDGDPSVRATVLRDALKRVAELDSTAHTLEKQIGALVKASGTSLTQIVGVAAITAGRILGELRDVGRLSGQAAFGALTGTAPVPASSGKTDRWRLNRGGNRQLNRAMHTIALTQSHHDPRARAYLEQKRAAGKTDREAMRCLKRHLARVVYRRLAADRALIPLT

SEQ ID NO: 113828 - protein, 422 aa, unidentified
MSEVTFPRLVSRGCGIDVHQKVVVATIDGEGLTKETREFETFTSSLTEMRDWLEGNGITHVAMESTGVFWVPVFTVLEKSIPNVWIVNARHIKYVPGHKTDRKDSDWICKLLLAGLLKPSFIPPLEQRNLRELTRRRRQLVQEISSEKNRMMRLLEQCNIKLKSVMSHMDGKVATQLLGKLCNGEEVTMEYINSVYHGRLNATPEELYKACQGKIDNDNLFLMYVIKAHIYEMEKLVVQLSERISAKLSSQRAILDMLKAVPGLDLRTSENLVAEIGFDMSKFPSAKHLGSWAGLCPGNNESAGKQKSGRITHGNKQVKAVMTEAAWASTRTKNTFYSERYHRIAARRGKKRALIAVAYSMLTTVYNILANNVTYNELGAEFVTWLIEKKRKKYLTAELTKLGYEVQIVKKQTPLQTEGCST

SEQ ID NO: 113829 - protein, 394 aa, unidentified
MGRHPREVVGGLLAFEDDALGARFTTFIGGTDVADGIRWVGLDVHARESTIAVFDQGTGEVVVSRVVGYPHELIGRLVEIPVPTRMVYEAGPTGYGLVRRARAVGIEMVVCAPGRTERPPADRVKTDKRDAIRLARLLAAGELTLVMVPTREHEQLRDLVRCREAIRVDLMRARHRLGKFLLRREIYYQGPAKAWSRAHRQWLAGLRFADRASQLTIADYLHAHDVLLARRERIEGELCELADGSPWRETIARLRCLRGIDTLSALGLCAETGPLDRFDHPDSLAAYLGIVPSEHTSGQRRRQGQITKAGSSHARRLLIEAAYHYQRHPGIGRQLERRQRGHPPEIINLAWRAQRRLNARWRQLKHARRKPNGVIAVAIARELAGFCWEIATLP

SEQ ID NO: 113830 - protein, 457 aa, unidentified
MARKRKNGTKSPPEPLVIHPDAAGIDIGATEIFVAVPADRDENPVRRFPTFTQDLNALADWLQRCRIKTVAMEPTGVYWIPLFQILETRGIEVCLVNAHHAKNVPGRRTDVSDCQWLQYLHSVGLLRASFRPAQEICAVRTLLRHREGLVQMASGHIQHMQKALDQMNLQIHHVLSDITGVTGLTIIEAILGGERDPQVLAKLRDWRVRASEEIVAKSLVGDYRHEHLFTLRQSVAAYRQCQQLIAECDQEIHRELETLPSKTDVSQAPLPPAKSAPKKRKFGEPDYDLRAQHYRILGVDLTQVPGMSSLIIHTVLTEVGPDFSKFRSASAFASWLGLCPDNDISGGKVLWVGTRKVNNRAAKAFRLAAYTLHHSHSALGSHYRRMRAKLGSPQAITATAHKLARITYHLITTGQTYDESVFARDETRYKKRAEVRLRAQARALGFQLVPVETRLVP

SEQ ID NO: 113831 - protein, 326 aa, unidentified
MSAAQSFIGIDVHQHSLSAAVCGARVRDFGHDAAGVAALLAWAVPRLSGAVRAVCESSGPYSQKLAWLLAAQGVELAIVPPKRVRANAVALGRASKTDRIDAAVILDFAMHTAPRPSSLPAAAEARLAQLLAQRSACQQEARRWLNRLHALTQLPTATDDVRATPQRIATLLLAEAEQLRRALHALIKGESALAADYALLMGIPGIGPETALLLLARREILRTRSAKQLTAYAGLAPAHKQSGTSLHGRSHLPYDGDNELRRMLYMAALSAARVNPPLVAFYTRLRSEGKPTKHAHCAVARKLLLQAQAILCSGQPYDPHHSPTRD

SEQ ID NO: 113832 - protein, 311 aa, unidentified
MTNDSIGIDISKDFLDAHRLSDGAAVRFSNTPTGFRALSTWLGDDMPSLVVFEATGPYHGRFERAFSGKLPLVKVNPLQARRFAQACGTRVKTDAVDARMLAYMGSALALEPDHPLDEKQYELKELFSSRGGLMKDRTRLINRLQTQTLALVKRQTKARIDQITRQLKVLQQDINTRVQDCPSRARANTILRSIPGIGEVAAATILIEMPEIGTLDKKRAASLTGLAPMTRQSGKWRGKATIQGGRKHLRDALYMPALVTARHNPDMCDKYKAMIKQGKPQKVALTAIMRRLIELANALVKADREWVQNGT

SEQ ID NO: 113833 - protein, 400 aa, unidentified
MNAVGIDVSKGKSMVAIMRPFGEVVATPFEIKHTEIELKKLVCILEKLPGETRIVMEHTGIYWQPIAKALHDAGLWASVVNALLIHKYGNNSIRKGKTDKLDAVKIANYCLDHWLDLDRFTLIDPIRQELKTCHRQYDQYIKLKVNLKNNLITLLDGTFPDLNTLFKSAPRDVDGHEKWIDFAIKFWHRECVCGCTEKSFTNQYRKWCTKAGYRFNEAKAASIYAHAAAQVNTLPMSDAIKRLVILAASQLNTIIETLSVIQNEMLTLASKLPEFPVVMKMFGVGPVLGPQLIAEIGDVRRFHHKQSLVAFAGVDAPPCQSGTFESKNRHISKRGSPRLRKTLFQIMSTIIQHAPADNPVFQFLDRKRQEGKHYYVYMTAAANKFLRIYYGTVRAYLEDT

SEQ ID NO: 113834 - protein, 296 aa, unidentified
MVRAIGMDVHRDFCEVAIAEAGAVRSAGRIATRPASLELFAASLAPTDVVALEVTGNAGEIARILEPHVARVVVVSPHDTGISRARAKTDRLDARALAKLLAAGELDAVWMPDEWTRAMRRRLARRDQLVRARTRAKNEIHAVLVRRLQGRPPVTDVFGVRGRRWLSELELPADESETIAGCLRHVDFLDAEVAALDRAIASEALRHRDVLRLMTVPGVSVITASTFIAAIGDIRRFPSARNLIGYLGLDPRVRQSGPSPARHGRITKQGSASVRHVLVEAAWVTVRAPGADARVL

SEQ ID NO: 113835 - protein, 403 aa, unidentified
MNAVGIDVSKGKSMVTILRPFGEIVSSPFEIKHTSSDVHSLIKLIHSIEGESRVVMEHTGRYYEALAHQLSAADLFVSAVNPKLVKDFNNDSLRKIKSDKADSVKIARYALDKWQSLEPYSITDELRAQLKVMNRQFHFYVKQKTAMKNNLIGLIDQTYPNANTYFNSPTRSDGSQKWVDFVSTYWHVDCIRKMSLNAFVEHYQNWCKRKKYAFNKSKAEEIYTKTKELVPVFPKNEITKHIIRQAVDQLNSTSVTVETIRTLMNETASKLPEYSIVMQFKGIGPSLGPQLMAEIGDVTRFTHKGALTAFAGVDPGVNESGSYAQKSVPTSKRGSSNLRKTLFQVMDVLIKTMPQDDPVYQFMDRKRTQGKPYYVYMTAGANKFLRIYYGRVKEYLSVLPDPS

SEQ ID NO: 113836 - protein, 409 aa, unidentified
MRYYLGVDWADQTHAVWVVDERGTKVALRTVPHTAEGLSAWGRELDEWRAQGIELWAAIERPEGRVVDFLLDHGVVVYPVNPKALDRARDRFRQSEAKSDPFDARVLADFLRTDHLHLRALQPSSEAAQELKLLTDDYQRQIRQQTRLVNQLTTTLKAYYPRGLEVAELTTALARAFLQAYPTPATLTALTERQWQRWARAHRLSETRTQELWVVLQRPQLPVPPHVVRAKARLMQSLVAQLMVVMEGVGAYRAAIEDFFARLPAAQWIRTLPIGDHGITAPTLWARLGDAPGRWESFRHLQAQAGTVPVTIRSGKQQVVRFRFACDKSLRYVIDHVAFLSLRWSEWARAYYDEQRARGHPYRQALRALSAKWLKIIFVMWERQVPYDEQYHLAMMTRQQLRQRQTKVA

SEQ ID NO: 113837 - protein, 349 aa, unidentified
MEIVKQVLGVDVAQKELVVSLGRIFNDLSKEVYAHKVFSNKASGIMALLKWVKKNSLENVDVHFVMEATGVYHEKLAYFLDEKGYSVSIVLPNKISNYMRTLETKTITDKTCSHAITLFGLERQLDTWQRPKAIYKCLLQLTRERDQIVAERSMVKNQLHAEQVEALPNLRSIKRLKQRIKFLNQQEQEIKNDIDVSLEEEKDIQAQIKNITTIPGVGKLTAVIVLAETNGFELIRNKKQLSSYAGFDIKEKQSGTSIKSKPRISKKGNRHLRKAMHLPSLSTVKHDENYKEVYKRIVSKHGIKMKALIAIQRKMLELIYTLYKNKTSYCKEYIETKRGQLMEVAPLTN

SEQ ID NO: 113838 - protein, 391 aa, unidentified
MVCVGIDVAKDKHDCCILDSDGTIRADCITIPNNMDGFKQLLQTIRDCIKKSDKIKVGLEATGHYSYNILGFLLDNGLPTYVINPLHTNLYRKSLSLRKTKTDRVDARTIATMLLSDVDLKSYTDTAYHNEELKSLTRYRFDKVRERAKLKQSVSRLVTILFPELEKLVPSLHIASVYALLSEYPGAKQISEIHLTKLTNLLATASKGRYGKDKAIQIRDAARTSIGSVMPAKFLELKHTIKLIRELTSEIDEIEVSIQKIMDELNPPILSIPGVGIQSAAMILAEIGDFSNFESPDKILAYAGCSPSTYQSGKLTNCYAHMEKRGSRYLRYALYNATKYVCHWNPVFAEYLAKKRAEGKHYNVALSHATKKLVRLIYALQKSGKAYLVAA

SEQ ID NO: 113839 - protein, 320 aa, unidentified
MYSIGLDVSKSTINCYISNGEIDLVITNDEKSLNQFYLKLKKIYKKDIDKIVFIFEPTGSYSSLLKSFCTKKSIKAFIVNPKQSHNFAKAIAQRNKSDKIDSQVLSKMISIATNSDIKVPVYDENIENIKDYMSYYKFVVKELVQAKNILEAMKHNQTNKYILNSLEKKINTFQKESLKIIEKIKEIISQDQFLLQSFNNIKTIKGVGDITAIVLLHLFLKYPAANQRQIISLTGLEPIAKSSGSSIKSKPKISKAGSKLYRGTIFMSALSAIRFNPKIKEFYNRLKENGKQSTLAQVAVMRKLIIIAHSLYKNNQEYIN

SEQ ID NO: 113840 - protein, 354 aa, unidentified
MIIIGADYHPGFQQIAFVDSDSGEFQERRLQHREEAEKFYRELAAQRMEVRVGMEASGHARWFERLLAELQIELWIGDAAEIRTRRVRKQKTDRQDAQLILKLMLKNDFPQIWVPSWENRDLRQLLWHRHRMVQARTRIMNQLQAVALNEGLRCKKRLWRKHGRQQLESFRLAPWASRRRRDLLELLDRLNPTIAELSQAIEQEAEKFPEARCLMTHPGVGALTALAFVLIIGRADRFQCGKQIASYLGLVPLEDSSGNRRRLGHITKQGSSMLRFLLVEAAQVTARSLPEWRSKYFHLAMRRGRKIAKVAMARRLAVALYWMWRKGWDYERVKKFGSHAGQLEPGHGVQSNTE

SEQ ID NO: 113841 - protein, 313 aa, unidentified
MAKLTQASIFGVDVSKEELVVWDWLNERQLKVANDPAAIRAWLSGLSGPVQLAVEPTSSYHLKLVEQAHQMGFEVFLVNPRQLSHYRQAVGGRNKTDPDDARLLARFLAHERAQLRPYTPSSREAQQLWSLLKRRAVIVTSQQALRQSLSSIKLTAEGLWSQLAALLRRIDQQMLALIRKLGWWEDYQRCLSIPGVGPLNAAALVSVFHRGAFASADAFVAFIGMDVRLRESGTYKGKRKLTKRGEAEVRRLLYCATQPALAYRPFATYHARQLDKGLAKTAAKVVLARKIARTAFALMTKQQSLNGETSAAC

SEQ ID NO: 113842 - protein, 395 aa, unidentified
MHESWRGIELGKVFTFSNSREGFEAVKAWMQHLQDKYRKSDVIVGIEPTGHYWFDLGAYLEDEGILLVMVNPYAVKQTKELDDNSQSKNDRKDPKVIAKLVTEDWYSAPYTPDGVYADLRIMVTNRKRLIREMTQIKNRFARWFAIYFPEYTDVFGDYEAQSSMLLLKKVCTPEAIVELGAEKINQIWRDAKLRAVGMKRATTLCETAKRSIGLKKGSSAARYEMKLLLEDYEYKKAQLDAVMEEIEKLCRKIPESEQMLAIKGIGVITAAGFLAEVGDVRRFESPRQIQKLAGLSLRENSSGKHKGQTTISKRGRSNLRAVLFNAVIPLIATNPEFKSLHEYYTTRANNPLKKKQSVIAISCKLIRVFYAILANGVTYDPQKMLSDIHRQPQAA

SEQ ID NO: 113843 - protein, 311 aa, unidentified
MNDTIGIDISKDTLDTFWLSKRKHKQFANTKTGLRALTSWIREAEVPLVVFEATGIYHRLLETSLAEHDFSFARVNPRLARRFAEGTGTLAKTDRVDAAMLARMGSLLELQADKPKSEMLHNLKGMTTARQALIKDRTAARAQLATATHPLLKKQATLRLRQVERDIAQIDAAIETTISVDKTLSQKAEILISIPGIAKVTAFAMLIEMPELGSLSGKQAASLAGLAPISRQSGKWQGKERIQGGRACLRRAIYLPAVVATRFNPDMKAKYHELIAKGKCKKLAITAVMRKLVVMANALLRDGRKWTETRA

SEQ ID NO: 113844 - protein, 396 aa, unidentified
MEPRDHGMEHQADVYPQLRLIRPGVMVWTAPYGIECARMRLLISQTREPSVKQIIRIGMDTSKHFFQLHGVDAAERPVLRRKLRRNEVLAFFAKLPPTVIGMEACGAAHYWARELRRLGHEVKLMAPQHVKAYVKRNKNDGRDAEGLCEAMSRPTMHFVPVKTEEQQAALMLAGIRERLIARRTQLSNAIRGYAAEFGLTAAKGLDKIEPLLSRIAQDETVPALARDLFAIQGQDYAQLQVELKAIEARLRAWHRANTDSRRLAKIPGVGPIGATALVMKTPDPRAFPSGRHFAAWLGLTPKDHSTGGKTRLGKITRAGDERLRSVLVAGATAVIQQAKHGRGHPSPWLIALLKRKPPKLAAVALANKIARIAWKLMVTGESYDGARMPGASASAA

SEQ ID NO: 113845 - protein, 306 aa, unidentified
MNQDSTLYVGLDVHKDSITVAYAMGLDEVELFGKIGTTQMEVDRLCKRLQSKARHVHVVYEAGPCGYGLNRRLVEKGFDSMVCAPSLIPRKPGDRVKTDRRDAFKLVRSLRAGDLSAVHVPSVEDEAFRDLARAWSSARDDLKQARQRLKSFLLSHGVQYSGRANWGPAHRRWLSTLSFNSAWQQLAFNEHRRTIEDRLAQCERLEVALREAVAGWRFYPVVLALQAMRGIQFTSAVGLVSELGDLSRFDHPRQLMAWLGVTPSEHSSGSKRRQGSITKAGNSYARKLLVESAWSYQHPARVSKDK

SEQ ID NO: 113846 - protein, 423 aa, unidentified
MPYRIAGIDVHKKMLAVVVADVECEGEYEFERRRFGSNPEQLQLLSEWLIEQQVEEAVMESTAQYWQPVWGALERYWRPICQTREGAGAMSGKLHLAQAQSNRGRRGRKKDFPDAERLVKRLVAQELVLSFVPDPEQRLWRTVTRRKLQMTRLHVRMQNQLESLLEEAHIKLSGFVTDLLGVSARRMLQALADGETNPAAVAALADKRLRATPAQLCDALGACTELNPVYRRLLKMALEELQFLEQQMGQLDQEVANLLRPHEDAVKRLAEVPGLGVDSAQQIIAEVGPEVATFPSDKQLCSWVAVCPGDNESGGVNYSHRSPKGNRQLRRILNQAANAAARTKGSIFEIVYRRQVTRMGHNQAIGVIAHRLCQLIWILLHRKVRYEERGPAVTERSKRVRTLRMIRTLRNLGYRVEPFASPA

SEQ ID NO: 113847 - protein, 348 aa, unidentified
MKKVIAGMDLHSNNVMIGIMDMDGKRLASRKMPCELKEVVKFLAPYKKRLERVAVESTYNWYWLVDGLQALKYPVVLANPAGMEQYSGIKHADDTNDAFFLAELLRLNILPTGHIYDAQLRPVRDLLRRRLGLVHQRTSLMLSFKSLYTRTTGQEMALSRLKGLEVKEAQKLYEHPANQLIAGMQIKHIEQLTESIEKIEKAVMGCARELPYYAKLETLPGVGRILAMTITMEVGEIKRFADPGRFASYCRTVEAQRTSNSKKKGENNSKCGNKYLAWAWVEAANFARRYDEQCRKWFDRKAAKTSKVIATKALACKLAKAAWYLMAEGTDYDPRRMFGQPPAAKMKT

SEQ ID NO: 113848 - protein, 359 aa, unidentified
MKTNVKKNKINFKGKMVSIGVDMHKRSWQLTALVDGEIVLTISLSRPTYDAFEKALSQFKGNYVRIVYEAGPGGFDLYDRLTADGIECIVTPPSLIPTQSGSRVKTDKKDSLKLATLLESNMLKKVWVLSPEQRAHRQLVRTRRQIVNHRSDVMRQIKSLLLFYSIEVPFSSRQQWTGPFIRWLHDVDCGNEYLNRSLKALVDLFDYLSAEKRRLTHEVVQLGRHKNYVQRVTLLKTIPGIGCVSAMEILVELQDITRFQTADELAAYLGLTPSQYSSGEHIRMGHITHAGNDRVRTTLVESSWILIGKDPHMRCIYEGIKQRRGGKKAIVAVARNLSIRIRRMLLDHVAYEIDFKKAA

SEQ ID NO: 113849 - protein, 338 aa, unidentified
MDHYVGIDLHSNNSYTAIIDNDNKKVFKKKTKNDLRLVLHALKPYRDQVKGIVVESTYNWYWLVDGLIEEGYKIHLANPSAIKQYTGLKHSDDVTDAFHLANLLRLGILPTGYIYPKEERPVRDLLRKRTQLVHQRTLQIQSFQNLVSRNLGKSMKGTAVKKLSEDDVEHLFHDKHLVVAGKVSIATILFLAEKIKQLEKTLHKVAKLKDEYRLLMTVPGIQKILALTIMYETGPIERFAKVGNYASYCRCVGSRRLSNEKVKGKGNRKNGNKHLCWAYVEAAHHALWHYEYVERYYQRKMAKTNLIVARKTIAHKLARACYYIIRDQKEFDPTRVFV

SEQ ID NO: 113850 - protein, 375 aa, unidentified
MKEKLRFLGLDVHAETIAVAIAEPDGEVRSLGTIPNRLESVRKLIKKLGPAEKLRVCYEAGPTGYVVYWQLAELGVKCDVVAPTLVPVKAGDRVKTDRRDAEKLARSHRSGDLTAVWVPDEGSEALRDLVRTREAAKQDQLRARHRLSKFLLRSGRRPPTGIRPWTRPYLIWVAQLRFTQMAQEATRIDYLHEVEHMRERVERLERAITEAVKLASPALQQVINDLQALRGIADISAVTIAAELGQVSRFDSARQLMGYCGAVPSEDSSGKRTRRGSITKTGNAHLRRIVVEAAWSYHRPPCIWYGLRKRQESISEEAKEIAWKAQHRLHKRYMRLAAAGKDKRKITTAVARELLGFIWAIGTRAETVARQRIAA

SEQ ID NO: 113851 - protein, 363 aa, unidentified
MKKLTRPVQKVNAPVLGLDVHQNLIAYCLLDRAGDEVESGSVGGSPQDLDELLAQLVFDRRMHVSFEACGGILWIFDALVARVGRQRVHVAQPRRIRAIANSQTKNDANDAWWLAYLTHEGRLPESFIPTGELRELRIATRERIATVRARTKVQVRLRGHLRQMGVRLPTVKITAKKGWAVLQELSAETPGTLGLVLRTLLQRFEDLEAVVAAWDEEIERLADGLPAVRTLREHVPGVGIALAATIASESGPLERFRSPKAFSRYTGLTPSDRSTSGRQIHGGITREGNANLRWALTQAAMGCLRARRGAPMAAGNWIRAKEKRMGSKAKSRVAGARKLAEQIWRLFHLGECFDAQRPFGAAT

SEQ ID NO: 113852 - protein, 429 aa, unidentified
MNYNTQNAKIASITEKTLIVGIDVGSETHYARAFSWRNYEYSKKPFAFSNDEAGFSSFKDWMDDIAEKHGMKVVIPGMEPTGHYWLNLGAYLQEQGMKPVHVNPHHVKKSKELDDNNPSKNDRKDPKTIAGLVNEGRFSYPYIPTGIYAEIRNLSNLRIQTQEEITRIKNRIARWFSIYFPEIKDVYRNPDAVSGLMVIKQAPLPCDIKELGVDGVNKIWRDARLKGAGIKRATTLVTAAEHSIGNTEAPRSARKEIRNLLNDYEIYKNRMDELMEEIKETLSEIPYIDKLMEINGIGIKTVSCVIAEVGDIGRFDNPKQVQKLAGYAIVADSSGKHNGASRISHRGRKRLRYALYEAAISVIGKNKEFKEIHSYYRTREKNPLKKMQSVIAVACKLIRIFYTILTKGVDYDGQRMLADIVRPEMQLAA

SEQ ID NO: 113853 - protein, 457 aa, unidentified
MSKTGRAKGKKVVFEEQSRYVAGIDLAGHADHYVCGPRREDGEANIQHFGTTTSELGRMASWLIEQKVVSAAMESTSVYWIPVCEMLESRGIEVVLVDTREVKMVPGRKSDVQDCQWLQRLHSCGLLRGSFRPPQNICAIRTLIREKASLVADRSVCLHRMQKSLDQMNIRIHHAVSDLDGVTGLAILRAIVKGERDPRKLAALRDKRCRKSEAEIAEHLTGNWRTEHLFNLRQALMSYEFIAEQIRDYDQQILVLFREERQDDSDLPPEHQDDRKAKSMKRLGEEPLRGALFQMVGADLTVINGIRPETAAVIISEIGLDFSRFPSEKHFVSYVGLAPRLGKSAGKNVRQKRCGRTSRVGAALRMSASSQRHAKSELGAYFRNVARRQDAKTAIKATARRMAILVYRLIRYGKAFIDRGAEFYEAQSRAKKIKNICRLINSLNLNDSEINFLVNPT

SEQ ID NO: 113854 - protein, 328 aa, unidentified
MQGKVSSERTAMATVYVGIDVCKEWLDIHLHPLGRSFRVANDTAGLRRLKRELDALGQMPRSALRIVMEATGKLHRAALRSLHADGFYVSVVDPLRARLFAKACGFLAKTDRLDARLLAIMGEALKPAQTPPPDQALEALQELVNARAAATSERTALSNRMKTAVTAFLRKELARRLAALDTHIARLDGEIERGICAEPEMRRHADILISIPGIGAVTAASLIAGLCELGACSGKQAAMLAGLAPLACESGERAGHRAIRGGRPAPRNAIYMAALSAARHNPDLARFAERLKKAGKPNKVVLVAVMRKLIVLANTLITKNRSWTPNPP

SEQ ID NO: 113855 - protein, 430 aa, unidentified
MEIVYPRACGVDVHKSFIVAVICISESIKPRYIKKRFSTFNNQLIQFRDWLIENNCHNVCMESTGKYYIPVYNALEGHIPNVVVANPKWVKAIKGEKDDNKDAKWIADLFKFGIVRSSYIPEKDIRILREFTRYQYKLVNIRSSEKNRFQNALTVGNCKLDLVFTDVFGKSASSIVDTILSDEPYTSEDILSKVHGRCKASSDDILSAVEGTNLNQYQKARIKIVQKHMEYVDSLLDEVQHHIDMMVESYENYIQLLMTIPGVNRKSAIIIISELGIDVSQWSSARKLAAWAGLAPGHNESAGKKKSVKISKAGIYLKPCLVQVAHAAVKDKTCSYYAEKFGRISKRRGKKRAIIAIARKILVAIYHILKTGEVFNPSDMADVETTKEQRIAYITNNFRNAFNQLSRTGLSEKEILSIIIKKSNNSPQTE

SEQ ID NO: 113856 - protein, 342 aa, unidentified
MNQYAGIDVSLECSSVCVVDASGKILREAKVASEPEALIAWFHSLGFSLERIGLEAGPLSQWLFAAMKAGGFAVELLETRHVRKAFEAMPVKSDRNDARGIAQLMRLGWFRPVHCKSLSAQDTRAILTARKLVQSKLHDVENSLRGILRGFGLKVGKTTGREFAGRIEELVAGHSHLQLIAKALLAVREVLRKEFAAFEKQVHKLARSDARTRLLMSTPAVGPIVALTYASAIDDPTRFKSSKQAGAHYGLTPKKHQSGETDYTGRISKIGDGSVRTALYEAAHVMLTKPLKGCSKLKSWAMRIAKRAGMSKAKVALARRLAVIMHRMLADGTPFNAAAAAA

SEQ ID NO: 113857 - protein, 394 aa, unidentified
MKLVGIDVGKNSHHFCVMDKENGEFNVTPTSFSNNKEGFDFLINSLKPYSKKSILLGMEDTGHYHVALLKFLLSNGYTVALINPKTTDLTRKMEGGITKNDKLDTITICDVLDTPERKKQYRITKVDRFDFYEQRQLTRHHHDLKEELNVYCNRLQKSIDLVFPEFNTLFSSKYGVVYMNLLKTFGNAEIIASTDIRTIRKCFEIKGRGNRISLTPEKLKECAKNSIGISSEVETIQIKHLVSQITLIKEQIAEIDKKIEEFSITNNSPILSIPGISHFSGTSILAELGDIGNYSKPSQIIKFAGVAPYHYESSQYNAQHTGITKKGSKYLRKTLYQIILPVIKYNPVFKKYYLLKISQGKGHRCAQGHCIRTLLRIIYHLLETGQSFDPALLR

SEQ ID NO: 113858 - protein, 416 aa, unidentified
MTDPKKSSTFERYLAIDAHKHYVVVGGLNAQLEIVLPARKMDMERYPQWAKENLTPRDCLVIEASTNTWDLFDVTAAVAGKVMVAHPLAVKLIANARVKTDKQDVFRLARLLAGGLIPEVWVPPEPVRELRTLIAHRRRLIQMRTMTRNRLHSLAHRHNLTLPEGGAFADKNQDWWKGLSLSPVEKLRLQQNLALLEFLEPEVKAVDAELARLSCCDPWKEAVPYLVQLPGFGLIVAMTILSAIGDIQRFPTSKQLVGYSGLGASLHQSGETNYSGHITKQGRKELRYALVEAAWGAVTSSPYWREQYQKLSHRMATNKAIVAIARRLLVAVWHVLTERAADRRADPDMVASKLMVWSWKLNEVQRGGLTSRQFVRYGLMRLKIGQEIDCIKRQGNRPIASVEEVLERLPELNLNI

SEQ ID NO: 113859 - protein, 365 aa, unidentified
MKRIRHIGMDVDKEGVDLAVFDSDRTQPTLEKRILNDPKKIAGEMKKLQEGGYELRTCYEDGPCGYEIQRLMDRLGVSCIVVAPGLVPSRPTDRVKTNRRDAQKLGRMLQAGALDPIHVPTPETESVRDLVRCREDVKDDLVRRRHRLSKFLLRHGRVYRQTPWTMKHARWLKSLSWELPALKETFEQYLYAVREVEERLRRCDERIAEYAQQEPWKVPVGRLRCFRGVDTLTAMGLLTEIEDFRRFPNARNFMSFLGLAVSEYSTGNTRRQGGITKTGNGHVRRLLVESAWAYRHKPVVGYPLRQRRKGQPEWLITDADRAMSRLHRRFHRLTNRGKRSTVAVVAVARELAGFIWASQVDRRAA

SEQ ID NO: 113860 - protein, 313 aa, unidentified
MSQNTMTTIYAGLDIAKLNLQLHLASRSHDLPNTVPGHRRLLKLLATQPGSQVVCEATGGYEREVVAALQAANIPVSVLNPARARHFAKASGQRAKTDKIDAALLTAYGHALQPKPTPPRTALEQQLTELVRRRHQVVEIIVGQRQQADQLVLPALRRQAQSLVRRLERDLAQIEDQLKELRREVAPLHERLQKLEAISGVGTITALGVLAELPELGTLNRRQTAALAGLAPFTRQSGRWQGLRAIGGGRAPVRRALYMAALVAARCNRQLKEFYQRLRAAGKPAKVALTAVMRKLIVLMNHVLKNPDFVLQN

SEQ ID NO: 113861 - protein, 379 aa, unidentified
MPSENTVHVAIELSVSSWVMAARLPGTDKSRLHRLEGGDTAALLRIVADLRLQAAAKLGSAAEVACCFEAGRDGFWLHRLLTAHGIAAYVLEPTSILVNRRARRAKTDRLDAEGMLRVLATWLAGDRQVCSMVRVPTPDEEDAKRPHREREQLVADKLRIDNRIEALLFTQGIRGRPSLRSWERDVMALRTGDGRALPPLLRTELDRLRRRLILVLELIRELEAARADALEKAEAADTMVGKITALQRIRGIGENFAAVLTREVFYRSFGNRRQLASYVGITPMPYQSGGMDRDRSISRAGNPRARTTMIQLAWLWLRYQPDSALATWFRERVGQLQGRTRRIAIVAMARKLLIALWRYVETGVVPNGIALRPESAAAA

SEQ ID NO: 113862 - protein, 418 aa, unidentified
MKKHSKSSQRSEPSLKRTKARGPVQRDAKEVLAEVLGKLTGKLDGSGVSTSAKGNRRGNTVGPNRDRLTVGVDLGDRWSQYCILGLEGETLAEGQLRTTQEDVREFFQALTVARVVMEVGTHSAWVQDVITEWGHEVLVANPRLMEGSKRRKRKSDRIDANKLARLGRVDPQSLYPIRHRSREVRQDLVVLRARDALVSVRTELINTTRGLVKSMGTRLPGCSSPSFADKVKDAIPVEVREALLPLVQLTEMVNDCIARYDQKIEELAREKYGHTTLLRQVKGVGPITSLAYVLTLEDPQRFSSSREVGPYLGLVPKQEDSGDSQPQLGISKAGDRMLRRLLVGSSQYMLGAFGPDTDLRRYGLRLCERGGKNAKKRAVVAVARKLAVLLHHLWVTGDVYEPLHHTGAETRTAQATAA

SEQ ID NO: 113863 - protein, 348 aa, unidentified
MIWIGVDAHKRLHEAVAISESGVVGSRRIHNDPPQWAQLLEWATQWPQRVWAVEGAWYLGRGLAQFLAEHGEEVHEVNGRWTAQRRRGMRRPGKSDRLDAHSVAQLLREERATLPRVYAEDDELASVQLWSRLEAELTEDRTRLLNRLHDLLLLCDPRYATALPDLTTQAGIAAARAYVAPGARAVAREREQAVRVTAEQVALLDAQIRDLRRKLERASKSSFRALRAIEGVGALTACTIVAELGAPRPGFGDEQLAALAGVAPLEASSAGVTRHRVNRGGNRRLNLALHRIVLTQARMYEPARSYLARRRAEGRTDREARRALKRLLCRRIIQAWRACFDQPLAAAA

SEQ ID NO: 113864 - protein, 438 aa, unidentified
MSPPEIRDYSKEATIKGRRLDFSLGNKPRAWRLADASCRLIIVVESTVLEYGNSPETKVAKHKPYQGVGMEQRANGREKVIYAGVDYHKSSFTVAYLDRLTGVLSTRKYKTEEIGKFKEHLKNFQENGYGVRAAVETLTGVTYFTEEIRNYVEELVYVNTNRFKHILKGVNSAKNDRIDAETIAIYHEMGLLPTVYIPTRKEKELRMKIKERDSYVDMRRDVMNRLHSILLEYGIKTNKRELTTKKGIERIKEETKEKVPPSMQGMIWRYIETIEYLTQKIRETEEDIKGFIENEEEFKERVELLKSIPGIGDIVAISFISSICDEKRFENGDKVAAYLGLVPRVRSSGDNERNGRITKKGNSRMRNKIVQAARALLNSKSDNSIKRFYKGLLKRGVDKKKALIATARKLVKVMFAVLRERRQFVDFVDDKCNLCVVG

SEQ ID NO: 113865 - protein, 404 aa, unidentified
MAKYHIGVDVGKNHHHISTRDLLMDTYYKTFSISNDREGFLEFASALEKISPNKDDFLIGVEACGPYSTTLSYFLLSLGYELMEINPFRAGQFRKAQGKKAKTDRIDARSLAAILSLDNHKPLSIPDPILDNLKELTRFRADLVKERAFMLNQLRETLTILFPEFNKVFRQLDSASSLALLIAFPGPKHIISAGEEKVAQCLSNASPHRMGKGMARRILEAAHGTVGVLQREPALGIKISILGERLLVLQSAVDKVENEITILFHNLPYKPEDFPLGHIPSLATIISEIGDVNCSPTLKQFLSHFGWCPRTFQTGNHRLEHPRMSHAGNKYLRRLIWMLSIVAIRNLPRYRTYFERRVKEGKAKMHILVAIGRKLLSVFYAILKKGIPYNPNWEENRQFALARH

SEQ ID NO: 113866 - protein, 401 aa, unidentified
MSYNTFIGIDISKDSFCVCAIDINKNILFESSFTMDRDGFEGLIKRLNDFPKESIIIGKESSGCYHVNLFSFLVNQGFKCCVINPLLISNFMKMSLRKTKTDKKDAKTIALFLHMFHESISDNHIISSEFRDLAREREHLAQEIARIKNDIEKLLSVTFPELEKKVNIFSRSILRLISYFPSAYRIRMASRKEIKMAMEIERGRKTDISLEEIIELARASIGSYHPGKELILSQKASLVVFLIDKIKEIEEMLKDMCKKSELSGDMDILTSIKGIGDVTAMQLLCEMGDIKRFSSCRKLIAYAGLDPTVYQSGRFEGKSKLSKRGNRHIRRVIWIMTTMVIRFNEVFGAYFRKRRNEGLPYKKAVIATAHKLIRVIYSMLIHKRYFSYDGLQNVVYERGNS

SEQ ID NO: 113867 - protein, 339 aa, unidentified
MHVTTIGLDLAKNIFQIHGIYEDGEVAFNRALRRAQVLSFFEKLEPCLVGIEACGTSHHWARELIKLGHNVKLISPAYVKPYVKRGKSDAADAEAICEAVTRPTMRFVEVKTPEQQAILAIHRTRDLIVRQRTQTINMLRAQLAEFGIVLPQGIYHALQFAKDCLNGEQADLPEVAGDVIFELCDQLLFLHSKILRCSRQMTQIAKLEKRIALLRTIPGVGPITASAIVATVGSGRQFNNGREFAAWLGLTPLNKSSGGKERLGHISKMGDQYIRRLLVLGMISRIRSIRAKPEKFDPWFTDILSRKPSRVAAVAMANKTARMIWAVLTRNEPYKVRAV

SEQ ID NO: 113868 - protein, 395 aa, unidentified
MYFLGIDIGKRTHVASLMSEEGKVILKGFSFPNTTEGADSLIERLSKYSETPADFIVGMEATGHYWLSIFSYLHESDFLIHVVNPLQTDGWRKGTEIRKRKNDIIDSVLIADLMRYGSFVETVLSDENVFSLKQLSRYRTYLVGTASDFKRKIIAVLDQVFPEYASIFSKQGIFGKASKELLLEFSSPIELEEISAETLAQYLAELSRNRIKPEKADQLKQAASNSFGVKFAQEAFTFQLRSMIEQLKFIESQVKETEKEIKRIMSNLDSVILTIPGIGPINGATILGEIGDIRKFSNPKKLVAYAGIDASVSQSGQYEATHNVMSKRGSPYLRKALFSAALVASRCDPVFRAFYQKKISEGKHHLTALGAVSRKLCYVIHAILTKNEPYKIVSD

SEQ ID NO: 113869 - protein, 343 aa, unidentified
MQVSTIGLDLAKNVFQAHGVSAEGKVVLKKQLRRGQVLSTFAKLPPCLVGMEACAGAHYWARELRKLGHDVRLMPARDVKAYVKRDKTDAADAAAICEAVSRPSMRFVALKTPEQQGRLMQHRVRDLLLRQRTQTINALRAHMAELGLVAATGRQGLGLLLAILADAKDERLPQDARASLQLLASQIAALQAQIDTLDKRLHAQHRQCPASRRLETIPGIGVIGATALAATITDPKAFKSGRDLAAFIGLVPRNNSSGGKQRLGPISKQGDRYLRRILVVGAHSILKQARTRPDKHPWLARLMARKPGKLAAVALANKTARIAWAVLARGESYRAPTAPAAAG

SEQ ID NO: 113870 - protein, 501 aa, unidentified
MKTKRRKAKLQAGIRSISVTSNEAEQKLEIMRPDAAGIDCGAQEHYVAVPVDRVSAGQPTVRSFSAFTEGLDAAVDWLKECRVTTVAMESTGVYWIPLHQKLEAAGIEVYLVNARHVRCVPGRKTDVKDSQWLRQLHRFGLLNASFRPEDITCRLRSLHRHRDNLVSSSASEIQHMQKALQQMNLHLHHVVSDITGLTGLRIIDAILSGQRDPQELIKLRDKRVSKSTPQQMQAALVGDYRAEHLFVLSQSLQAYRFHQARIEECDRQTEPLLEKLAQQVEAASARLKPLKGAPQEERLPVPRNEPKTGTSASGQLNKAKRKHKPIANEPKIELAGLLERICGIDLTQVVGLNVLSVLLIVSEIGIDMSKWRSAKAFCSWLGLCPGNKISGGKVLDSRTRQVVNRVADALRLAAQSAGRTETCLGIFYRRKQAHLGAPKATTATARKLACLIYHLLKYKQPYQKLDPAIYQLRLQKSALRKLQNQAITLGYKLIPTANVPA

SEQ ID NO: 113871 - protein, 344 aa, unidentified
MSKLPSDLSTVTTVAVDLAKHIFQVHGCDAAGKVVVAKALRRKELLPFFAALGPCLVGLEACGSAHHWGRALLALGHDVKLIPPAYVKPFVKRQKNDRNDAAAIYEALFRPGLRFVAVRSIDNQAMLMQHKVREMLVAQRTQLFNGLRGHMAEIGVIAAQGARNMRSLGALIHEGHPDICDMVQQSLMPLVMQINHLDEAIRDIDTAVAAQAKADPVASRLMTIPGIGPVTASALVATIGDPSGFSGPREFAAFLGLVPRQHSSGGKERLGRITKMGNGYLRKLLVVGAHAVLVHQARHNDPLRAWARKLLETKPFKLVAVATANKLARMAFALMRQDTSYRAA

SEQ ID NO: 113872 - protein, 354 aa, unidentified
MASRKQKRPVTGGVDTHKKTHHAAVVDQVGRVLGTEQFDATEAGYRALLAWMRRFGDVVKIGVEGTGSYGAGLARYLTSAKVELVEVDRPDRKARRRNGKSDPLDAISAALAALSGRANGVPKTRTGPVEAIRVLRVVRAGAVKARTAALNELHGLIVTAPETLRAALRQLSAAKLVAHCAAFLVDPTRLIDPEHATTAALGALARRIQDLNAEIKQADKQLKNLLATTAPRLCAVRGVGPQVAGQMLVTAGDNPDRLRSEAAFAHLCGVAPIPASSGNTERHRLNRGGDRHANSALYMLVLSRLAHDPRARAYKERRTTQGKTNKEIIRCLKRYAAREVLTALQADFATLNHS

SEQ ID NO: 113873 - protein, 469 aa, unidentified
MRVGKMESGKKAKRKRKRKSIDGYPVLEPNAGGIDVGAREIYVSVAPDRDEESVRIFATFTEDLERMADWLIRVGVTTVAMESTGVYWIPVFEILEQHGIRPCLVDARHLKNVPGRRTDWHECQWLRFLHSVGLLRAAFRPESEICAVRALMRHRSELVQMAAQHVQHMQKALTQMNLQIHHVISDLTGVTGLAIVDAIIAGERDSKELAKLRDFRIKADEETIRKSLVGNWRAEHLFTLKQSRQLYQTYQQQIVDCDEEIQRLTTAFSSRVDPSEKPLPADRKHNKVGRKRNKDIDPKSCFDMRTETYRLFGVDVTQIPGIGNMALSLFTELGRDLSKWPTSSHFASWLALCTDNDISGGRVLWQATRKLKNRAGQLFRLAANSLHHSPTYLGNYLRRMKAKLGAPAGITATAHKIAIVFYTLVTKQIEYDESVWAEREAERQKRFEAKIKRQAKKLGFQLVPIQQNV

SEQ ID NO: 113874 - protein, 351 aa, unidentified
MVVIGADVHKRTHTFVAVDDVGRELGSKTVPATTPGHTAAVQWGRENFSGEVIWGIEDCRNLSARLERDLLSAGQKVVRVAPKLMALQRAGGRARGKSDPIDALAVARAVLREPDLPVAAHDAVSRELKLLVDRREDLVVQRTSIVNRFLGRVHELDPAHSPKKRSLDRAKTQKALADWLATLDGLLAELAADELADIVRLTATINALTQRIGTAVQAVSPTLLALPGCGELTAAKLVGESAGITRFTSEAAFARHNGTAPIPAWSGNTAGRMRLNRTGNRQLNAALHRIAITQVGMTSSAGQAYYRKRLAGGDSSAEALRCLKRRLSRTVFNRLHADQKSRHPTNHQAAA

SEQ ID NO: 113875 - protein, 361 aa, unidentified
MKKHTQDLIAEVPRGCSQVGITIGIDLGDVWSHYCTLNEDGEVVDRGRFRTNPSSVDKWFTDLPRVRIAMEAGTHSIWISEQLQELGHEVIVANVRELRAISHSDRKSDQVDAEKLARFARLDPKILRPIAHRTVAQQEALTLIRARNLIVPLRTAAVNAVRGLAKPCGYRLPASSTLCFAKRCMAVLPPGLVQALGPVLEQIADMTLKIKAYDRAIKKLTETEYPETMALTKVYGVGQLTALTYVLTLGSKERFQRSRDVGCYLGLRPRRSQSGERDPQLGITKAGNVYLRSLLVECANHVLGRHGKDSSLRDWGLHLASRGGKQSRNRAIVAVARKLAVLLHRIWVTQEPYVPFYAAAA

SEQ ID NO: 113876 - protein, 351 aa, unidentified
MKTCGLDVHKDSVFCAIYNGKEYSAVKEYDTTTPRIGQPGEYLRCEGVEKVAMESTSTYWVPIWDILLEMGFELMLVNPFLIKQMPGRKSDVKDAQWIACLLHKGMLRGSMIPSPVIQQLRIYSRKYTKLQEQKTRSLQKMDRIMVMCGFRIGSCMSNLGTKSVMNIITALIEGESAPAELCKLVYGSTVNKKSGKLYEALTGNLKEHYRQQLEWEKQEYDLFEKQTGQCLAQMRRICKEHYSAEMELIVTIPGVSEISAMIIIAETGGDMSVFENSGKITGWAGLRPRNDESAGKYKSTATTILRLRSVTEGNKYLRSVLVQASWAASRIKNGFIIKRLTIRNQYIFTTP

SEQ ID NO: 113877 - protein, 337 aa, unidentified
MSKQSENNTIQRENNEPNFVGIDVAKDELVVHILPTNQKLVEPNSKEGIKKLVAHFKEIEPQQVVLEATGGLERELLTNLIANGIPAVAVNPRQARDLAKGLGELAKTDAVDARILAQFAQLQCFPTRPIPSCETQEMNDLVTRKEQLIQMRTMETNRQHRAKQKTIQKSIERVIKMYAKEIATIDVRITELIADNPDWSEKDKILKSVPGVGAKTSQVLISALPELGTLNRQEIAALVGVAPFCDDSGKRSGARHIKGGRANVRSALYMAALSAIRWNKTIKTFFDRLIAEGKKFKVALVAAMRKLISILNVMVRTKTCWKANETLGEEGGNRAKN

SEQ ID NO: 113878 - protein, 414 aa, unidentified
MEYALIQVLPEIPPGGVCAGIDWASAEHAVCVVDMAGKVIDRFTAVHGKAGIAALIARLRKAGAGEAAIERGEGALVAALLAAGLTVVVIGSRQVRNLRSRYRSSGGKDDHFDAFVLADTLRTDRARLRPLVTDSPATAALRAAVRARKDLVAHRVSACNQLRAHLASAFPGAAGLFSDLDSPLSLAFLAAFPSPAQAAALDEQSLAAWLRACPVRGNPAPPAVLLARLAAAPAAVPADPAAQAAVTTVLAAAAAGLAARIKDLEAQIAVQLAAHPDGHIFTSLPRTGTLRAARLLAETGDCRARYPDPQSLAALAGVCPVTRRSGTYLSHGFRWNVNRQLRDAYCDFADGSRHASDWAARTYTAARDRGKDHPHAIRILARAWITVIWRCWQDSTPYDPAKHHAAGNRPGQTG

SEQ ID NO: 113879 - protein, 353 aa, unidentified
MCKGMKNFSIGIDVSKEKFDLTVKKVYYGTKQPEFLHYDVYENNPTGFRKMLKVLEKVTGRADKSEWLFCLETTGAYELHLCNYLYAKGYDVWRESALQIKLSNGIAKSKNDQVDSERIADYAIRYMDKMVIYEPEDEKLRTLKSLFLFRERLVKEKRSKQTSSQEIKCTHVMNDEMRWMQTRSQQDIARLNKEIKECEDHIRSLIASCEEIEKNYQHVMSIKGMGIVTTTALIVYTHNFERITSARKASSYCGVAPFYAQSGSSIYYEKNVSNYSNPQLKGYLTQAAFIATRYNEDIANYYNRLRASGKPTGICVNNVRNKLLRITFSLVQNDCNYEENHEWKRSQSLKEAA

SEQ ID NO: 113880 - protein, 386 aa, unidentified
MQTLNDLSRSLITLEPASTLIAVIEMSLSSWLVAGIVPGIERQPLKKLAVDESALLRLLHRWREEAEKAGCRIERIVVAFEAGRDGFWLARWLKTRSIEAHVIHAASVAVSREHRRAKTDRLDAELLKRAFLGWLRGERDHCKVVAIPTLTEEDAKRPSRERQSLVGEQSRIVNRMKASLIRLGIHGFNPKLKRAAGRLDSLRTPEGEPIPPNTLAELRRDMERRRFINNQIRQIEEARLKHFEQAPNDGPRAMVRLLARVIGVGIETADMLVHEVLSRNMHDRRAIARYAGLTGSPDESGRKRREKGLARSGNGRVRRGMVQLAWRFLTYQKDSALAQWYRARTENALGARKPMIVALARKLLIALWRFVRQGVVPDGVVLRPAQ

SEQ ID NO: 113881 - protein, 412 aa, unidentified
MREPQEIEDREHEQAVLRVAAVDVAKASGVVCTRVPREGGRGFVTKVWPVEATTGAILELADHLTGLAVEKVVLESTPDYWRPFFYLLEAAGLDVALVDARDVKNAPGRPKTGKLDAVWLAKLAGWGMLRPSFVPPPEIRVLRDYTRLRIDLTRERTRHWQRLEKLLEDALIKITTVASRIDTMSVRDMVEALIAGQRDPHRLADLARGKMKAKRAALVRALDGRFDDHHGELAAILLAQIDALTGQINTLTTRIEEVVSQIPAAQGVNEDGTTGPHAGRGPDAPALPAIDRLAEIPGISRDAAQVIIAEVGLDMSRFPTAAHLVSWARLCPRTLQSGARERPGRTAKGNPYLKGVLGNAAAAAGKTDTFLGERYRRLARRRGKLKAVVAIARSHVRQLEALGFTVSIAQAA

SEQ ID NO: 113882 - protein, 435 aa, unidentified
MAEETISWFAGVDWGSERHQVCLLDARGTTVGEREFPHSGEGLAELGDWLLSMASAASTVAVAIEVPHGPVVDALIDRGFVVYAINPKQLDRLRDRFSVAGAKDDRRDAYVQADGLRTDRRLFRHLQVADPRLIELRAWSRLAEELQAERVRLSNRVRHQLWRYYPQMQKLTNDLAAPWFLELWTIASTPAKAGRLRKSTVERLLKQYRIRRIDAETVLRILREPAIKVAEGVAEAASIHMRSLVARLRIVNRELREAERKLDEVCTAVSEIEQTSGESLQRRDVAILRSMPGIGRINLATLLSEASGPLSRRDYEGLRTLSGAAPVTKRSGKSLIVVRRYAAHVRLRDTVYHWARVATQRDPKCRARYTALRKRGQSHGRALRSIADRLLALACVLLQRQTLFEPAVWPTYHVTGHYSKRAKTSCGHGEVSASA

SEQ ID NO: 113883 - protein, 346 aa, unidentified
MTNQTSQATISTIGIDIGKNSFHVIGFDERGAIVLRQKLSRGQIAVRFANLPVCLVGMEACVGSHHLSRRLQALGHDVRIMPALYVKPYLKGQKNDFRDAEAIAEAVQRPTMRFVQTKTVEQLDLQALHRLRTRLVRQRTAVINQIRAFLLERGFAVRQGPNPLRRALPEILAKPGDELSPRMIQMIDGLCNDWHYFDHRIDDLTGEIEALVKSDDACQRLMTIPGVGPLTASAMVAAVGDGSAFRRGRDFGAWLGLVPRQMSTGDRTILGGISKRGNKHLRTLFIQGAWAVLMRAKNWHKYSFGGWLEAASKRLHPCVLVVALANKLARIAWSVLNRGRAYEASL

SEQ ID NO: 113884 - protein, 379 aa, unidentified
MGESTTIVAFDQHAATTVAAVLLPGQRTPALHPMTSDLGELRRFVRRLGASGAVRCCYEAGPCGFELQRALVADGVPCDVIAPALIPRRPGDRIKTDRRDAAQLAVLYRAGALTAVHVPTDQEEAARDLLRCREDIRADLLRARHRLSKFLLRHGRRFTGTKKAWSKKHDTWLRAQMWPLDALDQTHRAYLRAVDEAVARLRAVERDLQALLTLEPLRARVERLRCFRGIDDLTALTIAAELGDPRRFPSAPSTMAFVGLVPSEHSSGTKKARGAITKTGNAHLRRVLVEAAWHYRHHPFVGHGLRQRQRGAPEAVTQRAWAAQQRLHRKYRVLAARGKPKPHIITAVARELTGFVWAVLTQCSDRPTDERRTLGASMR

SEQ ID NO: 113885 - protein, 385 aa, unidentified
MAPPRMPEAVIGLDVGKLSHWACVATRDGEILLSAPVANREGDLDSLFGRFPDALVVVDQSRNIGALALARAKAAGMSAAYLPGLAAHGAARLFAGDAKTDERDAMVIAKTALGIPDALLPVGDPGPTVAAARALAAQRNFLTCENTRSKNRLRSILLESCPAFEALVDLSDGPQLRLMASLGGAWSVADAEPRRAAALTRGAVRGKIEALVRSTASSTRPDAAAIAAEDRAVRLLARRISENSAEIDVITAEISALLEGDDTYRCLLTVPGIGPKTASELAISIDIEDFPSHDRLASYCGLAPRNRQSGTSISSVTASRQGNKRLKNLLIFSCNCLTRTEGRWGDYYARCRERGMPHGKALKALARKRLKVIYAIMRDRVPYAA

SEQ ID NO: 113886 - protein, 349 aa, unidentified
MLYIGIDHHKFHSVFTCVDKNGTIIKSKKISNNKDDIEKFLSEIPIDDKFEAVLEAGRNWGPMFDTLEEFDSIEKVFLANPYKTRAIADARIKTDVIDSKVLADLLRANLIPSLWIPPKDIREIKNIARFRIYLVRLKVKLKNRIHNIIDRTHLEKPQISDLFGRYGRNWLENVEMPEKERGLLNYHLELYDYVVEKIKEIERWLENLMEDDEDIKLLRSIPGIGKVFAIIIKLEIGDINRFSCPEKLHSYSGIVPTTYQSGKRVYHGRLIKQSNKYLKWAFIEGSVSAIKNSVYFKKHYERVSSKKGVQAGIISTARKMATVVFTILKEKREYSEIRGCARPSSQANA

SEQ ID NO: 113887 - protein, 377 aa, unidentified
MFFVGLDVHQKRSSFCILDQNGKKVKEFDVLGGWDILIEEIARVPRPFAICFEASTGCGWLFDRIAPLAGRIEVAHPGQVRLIFRAKKKNDRIDARKLATLLFLNQVPKAYIPDAQVRAWRGLVEFRHATIVKRTQVKNNIRTLLKGCGIQKIAAPAKTAENPQTPRKGSACASGQRGLWAKKGLAVLRELELPTLEDRLRRDMLLEQLDQFNGQVKRIEKELDKIAADHAGVSLLRTIPGVGARTAEAVLAYVDKPHRFERNKQIGAYFGLVPCQDASADVNRLGHITRQGPSTVRGLMVEAAWQAKLRSPTIKAFYEQVQQGKKERGKIALVATAHHLLRVMLSMLKSGEVWHEEGEIQKAPPVEASVQTALAVA

SEQ ID NO: 113888 - protein, 361 aa, unidentified
MNTTIVAVDLAKSVFQLAVADAAWRVTEHHRLTRSQFERWFINRNVSLVIVEACGSAHHWARWLNSLGIDVKLLPAAYIRAYVKRNKTDAADACALLEAARCADIAPVKVKSIEQQALQGLHRTRSLWMGTRTSRINALRGFCREFGISVAAGSRNGLEQISRVLADPHSAVPNLIRGTMKLLVEEIRLLEARIAQLERELTELAKQSPACTTLLSIPGIGLLTATAMVAATSGNVQHFRDARHFASWFGLTPKEYSSGSTRYLGRISKRGDRYLRMLLTHGARSVLRAASVAQTAGRQLDGLRQWALTVQARSNHNKAACALANKLARICYATLRDAEPYTGMVTRMKKKMERTAYAMPA

SEQ ID NO: 113889 - protein, 349 aa, unidentified
MIYVGLDLHKSFSVVTMMDAQGKEMLKQRKLANDGGIVRLLHEFDQPVTVAMEATRSWYWLYDLLEENGMEVKLSHPLKTKAIASAKVKNDKIDSRILAHLLRADLLPLSYVPSKPIRMQRELLRYRASLVKIQTGVKNRVHAMLAKNNITHDFTDVFGKQGRAFLSSLSLPEIYRMALDGYLSVLGELEQQIKTVNKKIVVSARDDEGVKLLMTIPGVGYYGALLIKSEIGDIGRFPSAKQLCAYAGLIPSTYSSGDTTFHGHIVKQGSKWLRWITAEAIGHCITKPGHLQAFYWRLERRKGKKIAKVATERKLLEWIYHMLKERRTFEEMEMIASNRGEPVQLSGLK

SEQ ID NO: 113890 - protein, 346 aa, unidentified
MKRLMAGMDLHSNNVMAAVVDEDGRRLVHKKLECDLKKVAEFLAPYKEQLEKVAVESTYNWYWLVDGLSAQGYPMVLANPVKIEQYSGLKHADDTSDAYFLAELLRLGILPTAHIYDAQLRPVRDLLRRRMSLVQQRTALLLSFKGLYARTTGQSLKLGQVKAMTDAEVKRLYEHPANQLIGQLQKVHIKGLTESIYKIEAVIGKVATALPSYKKLQTLPGVGVILGQTITMETGDINRFKTAGQFASYCRTVDARRLSNGKKKAQNNQKCGNRYLAWAFVEAANFSRRSNPKCRQWFDRKAAKTSQVVATKALACKLAKAAWFVMSQQLDYDPNRMFPELAQKTK

SEQ ID NO: 113891 - protein, 334 aa, unidentified
MEKVTTLGIDLAKSVFSLHGVDEKGQVVLRRTVRRDQLVKVVAGITPCLIGMEACSGAHEWGRRFQELGHTVRLMAPKFVVPYRKSGKNDGNDAEAICEAVSRPSMRFVPVKSAEQQALLAMHRVRQGFVVERTATINRLRGLMSEFGVVLPLRSIMVRRQGAAAAENLPELAHRAIGDLLDQLRVLDERIDGYDREIEAQAKLCEPAQRLMKIRGIGPTTALAIVATVGNAREFKNGRQFAAWIGLVPGQYSTGGKTRLGHISKRGDAYLRNLLVQGARSVLHTAATHRDPVSRWALELQPRCGYYRTLVAIANKNARIVWALLAKNESLRTV

SEQ ID NO: 113892 - protein, 340 aa, unidentified
MTITTVGIDLAKNVFAVHCVDQNGKTVLVKSRVSRTALPGLIAGLPPCVIGMEACSGAHYWARLFRQYGHEPRLMAAKFVSPYRMACKSGKNDAADAQAICEAVRRPHMRFVPVKDESQQAMQCLHRTRQGFIEEKTATYNRLRGLISEFGVIAPQSTDALRHIVFEQKNSLPLQVQQCVDDLLEHVARIEDNIAEYDRILSRMAKTDHRSQRLMELKAVGPTTACALVASIGNAHDFKNGRQLAAWLGLTPSQYSSGGKSKLGRITKAGDSYLRTLLVQGARSVLIGAEKRTDLFSRWVCSLVERRGYWRAVVAIAAKNARLCWASLHYGDDFRLYSAS

SEQ ID NO: 113893 - protein, 420 aa, unidentified
MRHPKMQYTYVGIDSHKDTHTAVFIDCFFEKLGEIVFNNTSDEFGAFLSKAEKFKQDETTFMFGLEDVSSYGRALRIFLRGNNQPVKHVNAYLVAGERKNLTYTEKTDSIDAECAARLLISRFGSLPDAEEDEKYWLLRSLVVQRDFIMNSNVRLKTYLHSLLTQDFPQYHKFFYGIECKAAFAFFMKYPSAGTLKDVTAGELGRFLWENSQGKLSLERAEEILQATDTNATVHEIRNKSVQSTLKQYQYNMKELEKTENELAKVYGQFGTTLTSMTGLDIVSASQLLSCIGDIKKFSTPAKLAKYAGIAPKTNASGKKDSQHTNTRGNRELNSHFYQLAVRLIIVHESGRGTDNPECRATNLFFHEYYYRKISEGKTKRQALKCVQRRLVNIIWTMLTNNEEYINPPKLEVENPKKSKQ

SEQ ID NO: 113894 - protein, 324 aa, unidentified
MQVPLTAVAPPCIGVDVDSKRLNITRADAATLDTPVTGIANTAAASKAWLKTLPAGCRIGMEATGQYHRSLADLAVRAGHTVFVFNPAQVASYLRSLRSRGKTDVLDARGIARYVLNESAQCHPYVPPSPFHAKLAVLIARRHQIVKQRSSLHMSLGDLPGCSAQLKLLQDAFNRLLAGIDAQINAAFAAEHELQVQRRRLCTIHGFGPLVSAAVAARLSRLPYANSDAVVAAFGMDPRPRDSGEFKGLRRLSKHGNAEERRLIYLAAVSACNNPLFRAIRDKLLLKGMSAIQAHCVIARKLLRIAFAVWTSQQPFNPELIGTA

SEQ ID NO: 113895 - protein, 365 aa, unidentified
MKIMQWVGIDDHADKWTIAHYTGNEEKPTREFELVPDSKGYRSLLSYLKGLKGEVRVVYEAGPCGFEQYRRLKAAGVNCQVAAPTLTPRKPGEKVKTNRRDAAKLGRELRSGGLTMITVPEPEQESLRDLIRARQTIQKDVGRLRKQIIQLLLRYGHRFRDGQSWTKRFWVWLKAIKLTGSYSSFVLTDKIVELEHRIEQLARYDDEIERATQKPEYQTYVAAIRTLRGVETLSAMTILSEMGDLRRFAAAPQLMAAVGLVPSESSTGDKTNRYGITKTGNAHMRHIAVQAAWQYQRQATASAKIKARRKDQLPEVVAIAEKCEARLNRRFHRLTGRHKKSTVAVVAVARELIGFIWAIGQIVHP

SEQ ID NO: 113896 - protein, 377 aa, unidentified
MKESSTLFVGLDVHKDSIDLAVVDSPREAPVRHVGTTAGDLTSLDKALRRLISRGQPLHIVYEAGPCGFVIWRHLTAQGLPCDVVAPSSIARPAGERVKTDRRDAKLLARLARSGDLVAVRAPDTIDEAVRDLVRAREDAVREQRNARHRLKALLLRNGVAYAGRATWSAAHLRWLSTLKLAHAAQQIAFQEYLHAVTESTARIARLEQAMRETMPDWHLTPLVLALQAMRGIQLVAAITLVAELQDFLRFASPRQLMAYVGLVPGEHSSGPKRRQGSITKAGNGAARRMLVETAWHYQHSPRVSPVIAARHDGLPASITDIAWKAQLRLHGKFKRLLARRVLKNKAVVAVARELVGFVWAIGQEVQRSGWRGPSAH

SEQ ID NO: 113897 - protein, 440 aa, unidentified
MTKIVNPNAAGIDIASKEHYVAVPKDRTEQHTRSFPSFTRDLHELADWLKDCGVDTVVMESTGVYWFHLFTILEEQGFQVHLVNARHVKNVPGRKSDISDAQWLQQLHSFGLLRGCFQPDNLTRELRSYIRQRKQIIQDMSTQTQRMQKALEQMNIKVSQVIRDIHGKTGRAIIKAIIKGERSAHRLAENRDPRIQCSQEVLIKSLEGNWREEQLFNLKMAFDHYLFLEAQLQQYDAESEKVVQKMQNNSQPDTKKKAKTPPKYKHRPGFDVANYMYQILGVDVTQINGVSDVTVLTVLSETGVDLKNKFPSEKQFLSWTNLVPDNKISGGKVLSSTVRKRKNKAGQAFRDAASSLWRSSSPLGDYLRRKKAKSGSRQAVIATARKIASIYYTMVTNKVEFDSQKIQHNTGKYLSKKVRSLEKRLAQAKTNLAEFEVVTD

SEQ ID NO: 113898 - protein, 391 aa, unidentified
MKVTRIGLDIAKQIFELHGVDQRERVVLRKTLKRDRVLEYFAQLEPCKVALEACGGAHYWYREISKLGHTVRLLPTNKVKPYLDGNKNNAHDAAAICEASSRPSMRFVEPKTAAQQDLQALHRVRQVNVRHCTLLANQIRGLLLEYGITVARGLSALNRALPELLEYDEQRLSPMLKQLIAAQWRMLKLHRRQIEAYDRRIASIAKNDASCRALLKIEGIGPITATALVAVTGKGQQFKNGRHLSAYLGLVPGHSNTGNKTVMLPITKRGNRYLRTLLIHGARSALYAARNKDNSRSLWLQRLKSRRGNNIAAVALANKNARVAWAVLRFGQTYRPDMAHARPSSATPLQRLQRQPQGRLTLKPHGASSRVQNRHFPSPPPSGEGRAGKML

SEQ ID NO: 113899 - protein, 343 aa, unidentified
MTQYKRIGLDTSKAVFTLHGVDQHDRPMLRINLRRPQLLGFFSKLAPTEIAMEACASAHHWARELIALGHRVRLIPPQYVKPYVKRGKNDRNDAEAICEAAGRPGMHFVPVKSVARQAQGMVLKVRETLVGQRTLLINTLRGHAAEFGVIAAKGTWRVGPLLAAIERETTIPREAKDMASLLGRRIEDLDASIKELDAKLAAAHKANEVSTRLATIPGVGPVTALTLAIEIDPEAFGSGRHLAAWAGLTPKEHSTGGKQRMGGISRAGNERMRSLLVAGAMSVIRVAVRPESRQMTDWLRALLARKPRKLVAVALANKMARMAWALMTRGEVYRRSPASAAAA

SEQ ID NO: 113900 - protein, 302 aa, unidentified
MRIAVLGIDLGKNSCSVVGLDAAGEVVVRRRMRRETVIAFAHKLPGCVVAMEACCGAHHLGRILTGQGHQVRLMSPEYVRPYVKAQKNDDRDAEAIAEAATRPTMRFVTLKGEEQLDMQTLHRVRDRLVAERTSLMNQIRSVLLERGHIVPQGRARLAARLTEVLDGPAPALSARMTMLVSDMRALWQALDERIAAFDREFAEAAAQDKHARRLLTIPGVGSLNATALVAAVGDARTFARGRDLAAWLGLVPRQATTGGKPRLLGITKRGSRYLRKLLIQGARSAMPTLRKTDTRLGAWLPG

SEQ ID NO: 113901 - protein, 315 aa, unidentified
MTNTPVFVGIDVSKGQLDIALRPGGILSVPNNETGFAQIFERLKANPPTLVVLEATGGLEIPLTGTLAAAGVPVVVVNPRQMCDFAKATGKLAKTDTLDAQVLAQFAEVIRPEPRPLPDDQTQRLAALLTRRRQLVEMLTAEKNRLACTRQPIRKNLRAHITWLERALQQADTDITEAIRQSPVWREKDELLRSVPGVGPVLTTTLLANLPELGTLTHKQLAALVGVAPLNRDSGTLRGTRTVWGGRAQVRTALYMAAIVAARFNPVIRSFYRRLCAAGKAKKVALVACMRKLLTILNAMLKHHTPWHTDGTHHA

SEQ ID NO: 113902 - protein, 355 aa, unidentified
MLYLGIDQHARQITISLRDENGDVLLARQVSTQPAKINAFFQQLTRERLQDGDEFVAIVEVCGFNDWLIRMLYDYRCHKVILIQPYEKKQRKTDRRDAAALSELLWVNRDRLMQGKPVRGLRQVDITGTADQESRRLTTLRKDAGRARTRLINKVRHILRRHNLQWDMPTKTFPTKPAIAWLKKLVLPEIDRLEMNHLLADLALIQQRMQELEKVIAVRCGSSEDAVILSSLPGAGAYTAIALACRVGRVERFPRGNSLANYWGLTPGCCNSGEKSQRLGSITKAGSPMARWLLAQVTRNALRKDARLREWFKRIKRRRGANIARVAVMRKLATIIWHMLSKRQAYAACRAQAVT

SEQ ID NO: 113903 - protein, 316 aa, unidentified
MNTQDHNEINIGIDTSQSMLDIHVRPQGVFQAFENNPEGIRSAIRFIKPFKPTRVLIEATGRLEVAFFCAAHKAGLPVCVCNPIQVRNFAKSTGRLAKTDKLDAQDIAYFGEAIKPALTDLKPAKLRLLSDLLTVRSQCLDMSTMQKNRLLRMPKKVQPPIQRILKAIQKEIERIDKKLDKLVDAIPQWREQRDLLMSAKGVGKVVAYTLMSELPELGKLNRKEIAALVGVAPMNRDSGSYRGKRRVSGGRSKVRTVLYISMWSSIQHDPKIKATYERLLAAGKPKKVALVACMRKQLTILNTMMKNGTHWSEKLA

SEQ ID NO: 113904 - protein, 315 aa, unidentified
MTNHKKSKTVINVGVDVGKQFLDVCIYEKALHWQEENTADGIKRLLKRLAHYEVERLVMEATGRYEFNLAQAAYEKKIPVCIVKPLSVRRYAGAIDQLAKTDKIDAVLIAEFAAVVQPRVTPQKSKNLIAIKDLIARRRQLMGLRTQELNRIKIMGKAFEVSCKRIIRTLDAEIERMEKRLANHVEEQVEWTEKHTLLKSAPGVGNTLIYTLLADLPELGSLNNKEVAALVGVAPINRDSGKRRGKRRIRGGRHSVRTVLYMATLSVTQCNPVIKDFYKKLVAQGKHKKVALTACMRKFITMLNAMVRDECVWAY

SEQ ID NO: 113905 - protein, 411 aa, unidentified
MIKENFIYVGIDLHKETHTAVMIDCYNQKLGEITFPNRPADFPKLVTKVKKCNTDGKEVVYGLENAYGYGRALAVWLIDKGYLVKDVNTAISHRQAKHRGAMYRKSDSDDAKAIALATLNMLDKLPDACPNDAYWSLGQLVHRRDNIMKQRTRLVNQLHEQLCIAYPSYKQFFNDISRPTALYFWEHYPSRKYLKGKSVEDLRAELVPVSHNKCSTRTCEKILDAIAGDKVKNNAYQDARDMATLSIVSDLQHYDSQLAEVDKMLEQMYKMLGCTLTTIPGVNVITAVKILAEIGDIKRFSNANKLAQFAGIAPLHLSSSGKGKDVATKQGNRRLQATIYFLAIQMVQVSSKGTPRNSVVRAYYEKRKAEGKTSQQALICISRRLISIIYGMLKHGTEYRMPVVESAGENR

SEQ ID NO: 113906 - protein, 338 aa, unidentified
MGVHIGIDLHSNNCFVTVIEESGKVVYEKRLSNDLPLIVSELEPYRDHCEGVVVESTFNWYWLVDGLMEAGYGLHLANTAAIQQYYGMKYTDDKSDARWLAQMLRLKVLPEGYIYPKGERAVRDLLRKRSQLVQQKVSQMLSIQNLVSRNAGVHLNGNAVKTLTGWDVDRMLPDPLVARAAKSNLRVYRCLAKEIKGIEETVLARVKGNAGFENLLGISGIGKALGLTVLLESGDMARFPGAGHFASYCRCVGSQRLSNGKKKGKGNTKNGNKWLAWAFIEAANFAVRYNATVKRFYERKKARTNGVVAIKAVAHKLARAAYHVLKDGVPFQVERAFA

SEQ ID NO: 113907 - protein, 320 aa, unidentified
MERGGFVGIDVSGDRLDVAFRPGGERLQVSNDARGITRLTRMLERSQPELIVLEASGGYEVALLERLFAKKLPVALLNPRHVREFARASGRLAKTDAIDAEVLAHFAQVMKPEPRQMADPETRKLRALVTRRRQLIQMVTAELNRRRHSLEVVREGFVATIRCCKRQIAAIDKQLATLIQQTPKFRQKAKLLRSAPGIGGIASATLLARLPELGTLDRKKIAALVGVAPYNRDSGKIKGKRAIWGGRGDVRAVLYMSTLVAVRLNPSLREFHQRLRRAGKSPKMALTACMRKLIAILNALLKNELPFDGNLTSIVGAVSS

SEQ ID NO: 113908 - protein, 341 aa, unidentified
MMIIGCDFHPRFQQIAFVDQETGEYGERRLSHPGEAEQFYRSLAGRQVRIGAEATGNFRWFRRLMQELGLEFLLGDASAIRASCTRKQKTDKRDARHILTLLVEDRFPAVWQPPMENDDLRQLLMHRCRLVRMRTGVKNQLDSMAKNEGVLSPRVWSSKRRSEIEALPLPGWYAQRRSDLLGLLEELDERIKPLDKAVGEAAEGNAEARLLMTHPGVGPIVSLAYVLTIGDWRRFPRGKQVGSYLGLIPAEESSGNSRRLGHISKQGSTLLRWLLVEAATTAQRYDASWHRQYVRLSMTKHHGVAKVAIAHKLAVRLYWMLRSGEDYSNVMERGSHVGQSV

SEQ ID NO: 113909 - protein, 414 aa, unidentified
MEGEINKSCGLDIHKRFFIVTILSRSGEKQQQRFERDDDGILALKNWVTSEQCDFVACESTSDFWVPIYESLIQHLPVIVGNARDMKAFTHKKTDKIDSEVIAQLALNKMIQPSRVFPKRHREFRSYVRLRLTLVRKRTDIKNEAPAILSSEMLHLGDVLTDIFGKNGRAILSGISSGKNVDQIIESLSPNVRKKAVQIREVLDREISQSAAIRLQICLNLIKHLDEEIEILEREIFNYAYRNHKHEMEILMSVPGIGELSAATLIAEIGNFNDFSSGDKLASWLGIVPNVYQSADKYHNGRITKRGSKVARWILTQIAQAAARKKNSKLKEFFNRKKKSIGHAKAIIALARKIATIIWHLITNDEMYEDETGYQKGEVQKRKIVETEIFSVDERITIISGIFAIMGKEDREST

SEQ ID NO: 113910 - protein, 345 aa, unidentified
MSEVYAGRQFVGMDLHRRRSVLVRMSETGEHLETVRILNDRDVLAEVMSRAGESPEVVLEATYGWYWAADALAELGATVHLAHPLGVKAFSYRRVKNDQRDAFDLADLLRMGRLPHAWIAPPATRELRELVRHRAKLVAMRSQCKAHVHAVLAKGGIWVPMTDLFGVEGNLLLDKVTMPAPYRERIASLRRFIEAFDAEIDLFTALAQRRLTHDAGYTAIQQIPGIGPVLAAVFVAEIGDVHRFAGPAQLTCWAGLTPSHHESDTTVHRGRITKQGSRLVRWAAIESVKILPGTSRIGAVREQVAHRRGNRNIGAVAAARRQLELVFYALRDHHVRALHRSPHAA

SEQ ID NO: 113911 - protein, 316 aa, unidentified
MSKRSTDHAGIDTGKRRLDAALNKRGEELQVENGPEGHRRLSAWLRKHGVKRVGIEASGGYEMDVVAHLRRDGFTVVVFQPAQVRAYAKFHLQLAKNDKIDARLIAACTAAKESIHAAPDPRLAPLAAHLTFIDQIVEDIACCKTRLETCRDPRAQVYWKQEIARLGKLQKAEIALLEEAIRQHRDLAARLDLIASVDGIGLKTAIVILVRIPEIGRLSREQVAALVGLAPYDDDSGSRHGHRHIRGGRKRVRWGVYAAALPASLLHNPQLMAMYQRLRAAGKEHKVALVACARKLVIFANTEVARGTPWLPLGAF

SEQ ID NO: 113912 - protein, 475 aa, unidentified
MRQPRRSKSTMRRKKPGPFSLVNPDAAGIDIGSEEHWVAVPADRDDQPIRKFGCVTNEIYAMADWLRKCGVTNVAMESTGVYWIPVYEILEDRGFKVCLVNAKHAKNVPGRKTDVSDCEWLRKLHSFGLVRASFRPDAQTCRLRSYRRHRETIIQDMSAVIQRMQKAMIQMNLQLHKVISDITGVTGMNIIRAILAGERDPVKLAAMRDWRIKKNADQIALALEGDYREEHLFSLKQAVDRYDFHRQQLKECDQQIKACMEQFESKPDTDPDPVPEPTGKKRKVQGHQPEFDLSSHLKRITGVDFTRIPGLNTLTVQTIISEVGLDPKAFPTAKHFASWLGLCPANKITGGQIKSSKTRKVANRAATAFRLAAQALAHSHSALGSFYRRKRAQLGAPKAITAAAHKIARLFYSLWTNGGPYKDPGQDYYEEKYQDRVLKNIKRTAKQLGYEITLTPMAPPSASPELCAVPTTCSG

SEQ ID NO: 113913 - protein, 470 aa, unidentified
MLLTLFEEAGNGVKVMCVPIDYAKKDHVAMLCNGHGHILRKPFSVKNSLEGIEYLTKQVTRSCSHRQIDLKHVFFGGEDVGSYAENFVNTLRSGGWIVAGVNAHDAKEQRANMQASTDRLDLMGIASMLLNRRGNCSPAQSGIYRNLRTVVRHRRKLVAMSTEVKNRMHTVVDRLFPGFLDEKKSGICSFSKSSLYLMENRFSPHQIRRRKRKKLIEILDRCGTAKPESTAAKLQEYATRVLNTPNEYINTLQFSLAQHVKHLKCLQDSINQLEHEVAVWLAQTQGAFLTTFRGIGIVLAAGVSAEIGNPHEQKPLNNLVSYTGIIPKVKQTGGSEGKTYTGKVAKRCNHILKDYVVQSGNHMGLHGPGDLMADYKRREAAGQHADFGIGRRYLRTAMCLMRTSQIYMPERLRNTEVKPEERATYYLAIWPYLRGKWNKAGALKAAFGKDRPLGQWRCMVQELYEIKLKL

SEQ ID NO: 113914 - protein, 318 aa, unidentified
MVKHSIVTAGIDTAKDKLDVAIRGKDRIATFDNTTKDFKRLADHLAAEGVGRIGIEATGGYERGVTRYLQAQGFEVVVLQPLQVRAFAKMRLQHAKNDRIDAKLIADCTHLLDAHNKMPPEPRFDPLADHLTFIEQIEADIVRIKTRLEHTGEARLRRIYTADIARLQKRASTERRRLEAAVRTHADLAIRLDLVRSVPGIGAPTALSLVVRMPELGRVSREEAASIAGLAPFVHQSGKYEGQTHIGGGRGRLRRALYMAALPASSQWNPALVAMYDRLRARGRCHQAALVACARKLLIYANTVVQRATPWTPTNAPA

SEQ ID NO: 113915 - protein, 323 aa, unidentified
MAKQKQPKEVTFEEVVERGCGLDIHKKEIVATVNGTGITQETRTFQSTTRSLTELKEWLLTLRVTHVAMESTGVYWKPVLNILETGGFTIMVVNARHIKYVPGHKTDKKDSAWICKLLRAGLLKGSFVPCRSQRDLRDLTRYRRKLVQQQAAEHNRMIRIFEDANLKLSSVFSNIRGKTCTAVIDAVIAGETNPEKLSELCTHWKLKSTKEEIALAVEGKFTEHHIFMIRAIRTSISNIEAEIDHLDKEIERRMQPIEERIRKLCEIPGMSTNSLRELLAEIGVDMEVFPTAEHLTSWAGLAPGNNESAGKKKFTHQPRKQSY

SEQ ID NO: 113916 - protein, 370 aa, unidentified
MAPASTLFVGLDVHKETIAVAYVGEEREAEVVSLGTIGTRQKDIDALVRKLQGKGKRLHFVYEAGPCGYWLYRYLTKQNLKCWVVAPSQIPKKAGDRVKTDRRDAVQLARLLRSGDLSPVYIPSVEDEAIRDVVRAREDVLKDLKAAKVRLKAFLLRQDIRYEGRANWTAAHLRWLANVVCPTPAQQIVFQEYVRAVSEQTERLQRLEAELLPLVQTWRWAPVVAAIQALRGVQFLAAVTLIAELGDLTRFETPRQLMSYLGLVPSEHSSGERRRQGSITKTGNSHARRVLVEGAWAYRYPAKVSRHLQLRLAKVPKAIQDISWKAQVRLCKRYRRLVARGKNVNQVVVAIAREMAAFVWALAREVQVAH

SEQ ID NO: 113917 - protein, 380 aa, unidentified
MLNNLDEFDRLVSLLRSYQRPVRVAFEATGNYHRGLAYQLGSAGFEIKLISSIALARTREALHNSWDKNDPKDAQVILHMMTIGAEQFYHDPLMRGTNDIQELSKTHDMISRSKTELWHRILTHYLPLYFPEADRFHRSSRSDWFFAFLELFPSPHFIAAMSKEAFIEAAWDVVGRKVGKERLLADIYATSTRPIGLPVAPGSDAICMFRMVLAQGRSLIAHRNQIEARAVAMLKDNPDYQLLCTIPGIGPINALTILAEAGDLRRFQHHRQFLKFCGMDLSTIQSGMFRGQTKLSKYGNARLRRTLWMAAQVAILQRANSFRDKFERYITKDRHNPHLRRKASTAIAAKMALTVHAVVKSGEPYRPFFEGRIHSGRTLL

SEQ ID NO: 113918 - protein, 366 aa, unidentified
MRKISTMRATGNKIFKGHQLTIGLDLGDRSSYYCVLDEAGEVILEQKLPTTPEAMKQTFGKMPRSRIAMETGAHSPWVSRLLTALGHEVIVAHARNVRLIGESRRKDDRIDARTLARLARIDPQLLSPVQHRTAQAQIHLTVIRARAELVSARTALVNSARGLVKSYGERLRKCGTRQVGRELATGLSPELREALQPLLREVESLNEHIDEYDRRIAVMAKETYPEVALLKQVKGVGDLIALTYVLTIEDPHRFRKSRDVGCFLGLRPGRRNSGQSEPQMHISKEGDRYLRTLMVQGAHYILGPFGEDSDLRRWGHKLAERGGKNAKRRAVVAVARKLAVLLHRLWVSGEVYEPLRNSQKTMTAVA

SEQ ID NO: 113919 - protein, 352 aa, unidentified
MRTSQKAAGIIATIGIDIGKNTFHLVGLDKRGAIVLQQKVSRGQLERRLANIPRCLIGMEACSGAHHIGRQLAAVGHDVRLIPAQYVKPFLKGHKNDYRDAEAIAEAVQRPTMHFVAIKTPEQLDLLALHRVRSRLVGQRTGVINQIRGFLIERGITVRQGPMPLRKALAEILSSDTGVLSPRMVGLVTDLVQDWRRLDERIAAVSAEVEALAEQDDGCQRLMTVPGVGPIISSAVVAAIGNGTGFKQGRDFGAWLGLVPKQESTGDRTILGKISKRGNKYLRTLFVQAAHVVLARRPSAAMRGLWPWIEQASKRLHRNMLAIALANKLARIAWAVLARGRAYQPRTPVNAA

SEQ ID NO: 113920 - protein, 349 aa, unidentified
MTEDITETIGCDLGDKRSTVCVLKADGRMERPPSVETTQEGFRAFFTRPKAHVVIEAGTHSRWVNVLLEELGHRVTVANPRRVDLISQNDQKTDQADAELLARLGRADVELLAPIRHRGMEVQADLAVAKARDALVASRTKLVNVCRGVTKSFGVRLPKCSAASFHKQAWEEVPKELRPALAPLFRTLKALQEAIAKEDKTLGRLAKKYPDVEVVGQPDGVGLLTSLVFLQTLEDKTRFASSRSVGAFVGLRSKKSQSGNNDPELHITKAGDPFLRRLLVQCANYILGPFGKDSDLRRWGLELAKHGGKNARKRAKVAVARKLSVLMHRLWVTGEVYQPVGYGKKVKAA

SEQ ID NO: 113921 - protein, 345 aa, unidentified
MPIVGGLDIHRKQITFDYLDTMTGEVQRGQVRPADRLHLRAWLARFAGREDVAFALEGCAGWRYVAEELAAAGITAHLAEPADTAARRGRKRHAKTDKTDARHLRMLLAEGRLPECWIPPGHILECRALLELYNDLRRERTAWAQRIHAALFHQGAPALAEGALRTERGVAGLRAAAAAHLSPAGQLQVATALEVIEALEARLHAVRHQLLDAARHLAGAKVLAARLYGVGPVTALAITCWLAGKDRFSSSRQAVRFAGLDITVSSSDRKGPPGKLSRQGPPVLRWAVYEAGKAHARTSAPDHAYYAAVKDRKNSKRACLSEARKILRQAHHILSELGDDALAAA

SEQ ID NO: 113922 - protein, 344 aa, unidentified
MYFIGVDHHKQVSVMTVMDEDGKERKNGRVPNLRRDVERFLEDYRPFTAVLEAGRSSYVMADLLRELGGEVKIANALQVKAIAHARIKTDKRDSRMLAHLLRANLIPEVYQRRDGNRRAQRVIRMRAYWVCKQTEVKNKIRALLAQQREEVRLEVEKRESGLFSSKGLEFLAGLPLESREKEILKDLLQGYEEIQAHIKKSDGLVNALYGEMEEAARIDTVPGFAKTLSVLVAVEIADVKRFSRAADLHSYAGVIPSTYSSGERTYHGPITKQGSSWLRWAALEAVYPAIKKDLVLRTLYSRLARRKGPNVAKIAVARRLLTIIYRMLTERRDYIPDVMKQSAA

SEQ ID NO: 113923 - protein, 359 aa, unidentified
MQTRGETIDFSGQKIYAGFDVHLKSWSVTILTDESTHKTFSQPPEPEVLFQYLQRNFPGGEYHTAYEAGYSGYWIHNRLIDLGIHSIVVNAADIPITNKEKVQKDDKRDSRKIAKALRSGDLVPIYVPSSKTIEDRCLVRTRSTLVRDSTRNKNRIKSFLYFHGIKFPVAFENSRTHWSRRFINWLDAIEMKEYSSKLSLSLLVSECKKMRSTILTVTRSIRELSQTEAYLKQEKLIRSVPGIGSITAMIFLTEIETITRFGNNDQLHSFVGIVPSTNSSGENDKVGDITPRGHSILRSAIIESAWIAIRHDPALIKAYHDYCKKMESNKAIVRIAKKLLNRISFVLKNQQPYSLSVAK

SEQ ID NO: 113924 - protein, 417 aa, unidentified
MTQYAALMGIDWADTKHDICLIETATGQRETSILRHSAKTLDEWATALRLRFAGQPVAVCLEQSRGPLIFALMKYDFLTIYPVNPSTLAKYREAFSPSGHKDDASDAAYLAELLLQHREHLRAWHPDSEQTRTLGYLVEHRRRLIDDRTRISNRLTSLLKIYFPQVLEWFPDLRTELVCDFLWRWPALETLCKVRRETLLKFFRQHHSVRVETLQKRVEAIKVSQPLTTDRAIIKASIVMCQALVSQMRSTLLAIKEFDTQIAAICEVHQDFALFKSLPGAGAVYAARLLVALGSDRERWSSADEVAQLSGIAPVIERSGKSCRVRWRYFCPKFLRQSFHEYAGESVKHSFWARAYYEQQRGKGKSHQAAVRALAFKWIRIIFRCWKTRCAYDEVKYLEGLRKKGSSLLNYVANHPA

SEQ ID NO: 113925 - protein, 343 aa, unidentified
MWYVGLDVHARQSSFCVLDGQGRKILSRTVHGPYSKVVREMQSVKQPFSVCFEATSGYGWLSEQLARHAERVVVAHPGQLRLIFRSKRKADRIDAARLAKLLYLGEVPPAYVPDGRVRAWRGMIGLRSKLVARRVALKNRVRALLRSQGVESPRSLWSKAGLRWLTSLSWQSDFEALTRDLLLEELRSVKESIARAERLLKAEARRRPAVALLMTIPGVGIRTAEAIVAYMDDPGRFSRNNAVGAYFGLVPCLDSSAGKDRFGHITRQGPSIVRRLLTEAAWQAVRRGETMSAFYEQIRRGDPARKKIAIVACAHKLARCMHAMLRDNRPWQENPQKAALLAA

SEQ ID NO: 113926 - protein, 354 aa, unidentified
MKNQAIQYLALDVHQSTVVASLRDAEGKIIMRATVSTNAKAILALVGSAGPRVHVAFEEGTQAQWLHDLIAPHAERVVVCNTRGREGHGNKSDRIDADRLSEQLRLGSLRSVFHGAKSVHTLKELVRNYSNLVEDSTRVMLRIKALFRARGILTPGVSVYRASQRAEWLKELGGGARVRAASLLAQLDVLLELRPKAKAAMIVEARRQPGWKILRSIPFFGPIRVALILAIVGTPFRFRTKRNLWPYVGLAVVTRSSADQQFHGGKLQRRQKAPLTRGLNRNHNPLLKSVFKGAANAATGRPGPLREFYEASLARGVRDELAKVTLARKIVSLTLRLWKKGELWDPNKLTMQAT

SEQ ID NO: 113927 - protein, 347 aa, unidentified
MRFYNRQHRHYCGIDLHVKTMYVCILDAAGHILVHRNVKSSPEAFLETVAPYRDDLVVAAECMFTWYWLADLCAAEGIAFVLGHALAMKAIHGGKAKNDKIDSHKIVSLLRGGLLPQAYVYPAAMRSTRDLLRRRLHLVRKRGQLLAHIQNTRAQYNLPEFKRRLAYPANRDGIREHFADPSVRKSIDVDLVLIDQYDGLINDLELTIVREAKRHDADAFHRLRSVPGIGKILALTILYEIQDVTRFDRVQEFASYARLVKCAHQSAGKTLGTGGAKMGNVHLKWAFSEAAVLFLCHNAEGKHLLAQIQKKHGKGKALSILAHKIGRAVYYMLARGTVFSMEKFLHA

SEQ ID NO: 113928 - protein, 387 aa, unidentified
MPQLDDMSRSLVPFEQDTTLVAVIELSQSSWLIAGTVPGVERQPLKKMKLDEADLLRVLHRWRDEATRSGHAIKRIVVAYEAGRDGFWLARWLAKHGIEMHVIHSNSVAVSREHKRAKTDRLDAAMLMRVYLGWLRGERGHCRMVAVPTLAEEDAKRPSREREKLVGECTSAVNRLKAALARLGIRGFNPKLRKAAGRLEVLRTPEGEPIPPNMLDEMKRDLANLASLREQIKAIEQARLERLEQAPKSRTNAMVRMLASIVGVGIETADRLVNEVFLRNLRDRRAVARYAGLTGSPDESGLKRREKGLAKSGNARARRSMIQLAWRFLNFQKDSALALWFRSRTSGAKGANKKTMIVALARKLLIALWRMVTFGEVPHGVVLRHAA

SEQ ID NO: 113929 - protein, 350 aa, unidentified
MVTVGIDPHKKTHTAVIVEESGRQLGRALTIKNTPDAVAKLTGWLAKHAAGRAARFAIEDGRGLARELATALVIAGYPVVWVPVRLVLAGRRHGGQRGKSDPIDALACARATLNPDDARYLAAHRADEIGRDLRYLVDDRRTKITQRTSLINTLRWRLHELDPTVTVGSLTSLKGPRELATALDAGPHSVLREILIRCCQDLVRLTGQINQLERHITAAVSRICPTLLERPGVGPIVAATVIAELGDPTRVRTSAAFARLAGVAPIPVSTANTDHHRLDRGGNRRLNHSLHIVALTQARSHPAAQRLITKHQHKKGRKHGLRVLKRHLADAIYHDLITDLTPMTSQLTAA

SEQ ID NO: 113930 - protein, 360 aa, unidentified
MSSMPQPQPSDADEVILGVDTHKDVHVAAVLTALGVLLATSSFPTTAKGYRQLLAWARGFGALHRAGVECTGSYGAALSRHLSSEAVTVIEVNRADRGDQRRRGKTDTIDAETAARAVLSGRATAIAKSGDGPVEMVRMFKLVKASAIKSRGQAINQLKAVLVGTDPALRESMTGLSNPALFRRCAELNHPAPRDPASAAAFTLRLLARRILELSSEIDELNAQIATTIEARAPQLLQRYGVGPDTAAALLLAAGDNPERLHSEASFAALCGVSPIEASSGKMHRRRLNRGGDRQANSALYTITIARLRWDKRTQDYVQRRVAEGKTRREAIRCLKRYIAREVYHDITSTRAAPTARSAA

SEQ ID NO: 113931 - protein, 339 aa, unidentified
MHVTTIGLDLAKNVFQVHGITLDDEVAFNRPLRRAQLLPFFSKLNPCLIGMEACSSAHHWARELTNFGHDVRLIPPIYVKPYVKRGKSDAIDAEAICEAVTRPTMRFVAIKTVEQQSLFSVHRARSLLVRQRTQLINGLRGMVAEFGVYIARGLARVIGFAENILTGEVLELPDIANEVIHNMCEHLMALHARVHWYEDRLKQVAKEDARVRLLRTIPGVGAVTASAIIASIGDGHQFSNGREFAAWLGLTPANKSSGGKEKLGRITKMGDQYLRSLLVVGMTSLVRQTKSHPERASKWLTSLLERKPARVATVAMANKTARIVWAVLTRNEPYTPHTA

SEQ ID NO: 113932 - protein, 377 aa, unidentified
MSRDIKYIGRDVHKEAVVIAVLNSSGKLVMESIVETKASSILQFIHGLRGELHVTWEEGTWAAWLYDLLKPHVQQVLVCDPRRNALLKEGNKSDKIDARKLADLLRTGMLRPVYHGEHGLRTLRELGRSYRTISQDLNRVMNRIKALYRGWSIPCAGTQVYAPRYREEWLHKIEHAGVRRRAELLYQQLDGLQTLRRTLRPELLAESRKHKASKLLCQIPCIGPIRAARLIALMQTPHRFRSKRQLWTYSGLGIETRDSAQYRFVRGQLQHAKKPQQIRGLNQNHNHEMKEIFKGAATRASCGVGPLRGFYLNLLAKGMKPEMARLTLARKIAAIALTGSKILSSSCRNQCRFDSVAKGSECPDHSRSAGSLGLFAY

SEQ ID NO: 113933 - protein, 371 aa, unidentified
MEHTRFVGLDIHKERISIAVAESGRSCAVEYLGEISNDPVAIGKLCDRLERPSKTLAFCYEAGPCGYGVHRQLISLGHRCDVVAPSLIPTRPGDRVKTNRRDATMLARLHRAGELTPVWVPDADHEAMRDLIRLRSVVRQIVSRARQHLQGFLLRHGRKHGRGTAWRMAYRRWLSTLAFEHPAQQIAFQDYVDAVMDAERRLQRVEEQISGLLPEWNLRPVVDALQAMRGIALITAVVLVAEVGDFTRFANPRQLMAYFGLIPGEQSSGETTRRGGITKTGNAHARRALVEGAWAYRMKPRIGRHEVDRIEALPKVVRDIGWEAQVRLCARYRRLSARGKTANVVNVAIAREMVGFIWSIACTIQSAPKAA

SEQ ID NO: 113934 - protein, 348 aa, unidentified
MLADELDYVVGVDTHRDEHVLAAVAAPAGAVVGRQAVAANARGYRETLRFAERYAPGSRAWAIEGTGSYGAGLARYLAAHGETVLEISRTLRSERRLSGKDDTLDASRIARAALASETLALPRSGERREALRLLLVARRSAVDVRREALTQLRGIIVTAPDRLREELRLLPTGRLLARCSRLRRSSTDVDELATRLVLRSLARRIQAATAEAAELEHELLGHIHALAPALLDEPGVGPIVAAQLIVAWSHRGRLRSEACFARLAGVAPVPASSGQTTRHRLSRGGDRQLNRALHTVILHRRLHDPATKDYIARRVAEGKTTREAVRLLKRYLARHLHRLLEQQEPLMT

SEQ ID NO: 113935 - protein, 341 aa, unidentified
MQVTTIGLDIAKNVFQVHGIDATEKVVVRKQLRRGQLIKFFEALAPCLIGMEACATAHYWARELTKLGHQVRLMPAKDVKAYVKRNKNDSADAEAICEAVRRPTMRFVAVKSAEQQGRLMQHRVRDLLMRQRTQLINALRAHLAELGIAAAQGREGIKELLAIVAQDGGSRLPVDALASLIVLAAQLQAVQTMIGSIEKRVVGQHRSNEESKRLETIPGIGIIGATAIAAVVPDPKVFRSGRDFAAWIGLVPREDSTGGKQKLGPISKQGDRYLRRILVVGACSVLRRARQQPEKYPWLIQLLARRPFKVVAVALANKMARVAWALLAKGGTYRAPRLTAA

SEQ ID NO: 113936 - protein, 348 aa, unidentified
MNQVMTIGLDIAKSIFQVHGVDAAGRPVLRQRLSRSRVLEFFGRLPRCLVGLEACASSHYWARELIRLGHEVKLMPAQYVKPYVKRGKNDAADAEAICEAVARPTMRFVGVKTTEQQSIMMLHRVRLILMRQRTQLSNALRSHLAEFGIVSPIGREGLDRLLKIVADTDDARVPAEARASLDMLAAQLEGVKAKVLENDRRIISSARATEVGRRLLEVPGIGPVLASAFVASVADPAIFKSGRDLAAWIGLVPRQNSSGGKERLGGITKAGNRYLRQMLMVGAMAVIRYAQRNSARRPWLVQLMGRRPAKVAAIALANKTARTVWALMTSGERYRDPQVVQAAVLATA

SEQ ID NO: 113937 - protein, 355 aa, unidentified
MLMIGCDFHPGLQQIALLETETGRREDLRLTHDGDQVRRFYAALPHPVRVGLESSGYSLWFEELLEELGHELWVGDPARIRKAAPRKQKTDRRDAQLLLQLLEEKRFPRIWVPNRETRDLRQLLMHRHKLVAMRTAIKNQLQAIALNRGLQRRRKLWSEDGREQLQSFPLPPWTERRRNELLRLLDQWDAEIAELDTVARREAEARPDACYLMHHQAGIGPITALATVLTLGPVERFPSARKVASYAGLIPAEHSSGPRQRLGHLSKQGSPFLRFLLVEAAHTAVRLDPVFKRAYWRLVERRGKPIAQVAMARKLLTHLYWMLRQRARAMPSTSATASRGSPRLDMAAIERRYLE

SEQ ID NO: 113938 - protein, 329 aa, unidentified
MKKKVLYIGLDVHKNTIDAAIAPSRSNGKVRSYGKINNTVDALNKLIEKLQAKNVALRFVYEAGPCGYQIHRHLKSKKISCAVVAPSMIPKRSGDRIKTDRRDAINLVRLFRAGELTSIYVPSVEDEAIRDLIRCRYDIKQLERKTRQRLLALLLRHGYHYGGKKHWSKSFYTWLATIKFSHPAQQIVLQKYIDTAAECSERIKRIAEQIQAHVDLWSRARFVKAYQALRGVSLIVAATVVSEIGDMNRFENPKQLMAYLGLIPSEHSSGQSVRRGSITKTGNSHVRRVLVQAAWTYKLPARKSKYILKRQQGLPKTVCDISWNVPIQP

SEQ ID NO: 113939 - protein, 312 aa, unidentified
MESYNNFIGIDIGKFNFVVAQHGFKSVKEYDNTPIGINKFLKEFKKILPQAMCILEPTGGYEMKLLLTLCEKDYFVHRAHTRNVKNFIRSYGNEAKTDKLDAVSLSQYGFERSKSLSKFISPSKEMLKLYELVQRRRDLKQFLVAEKNRFKSPRTETVKNSINTMIELLTGEVELITGEINKLIEAEPGLREKKKILKTIPGIGDILANELLILLPELGKISRREIASLAGLAPISKDSGRMKGYRRTNHGREGIKPSLFLAAMSARNSHSHLKDFYEGLIKRGKSKMVALTALMRKIIVIANAKLKMHATT

SEQ ID NO: 113940 - protein, 423 aa, unidentified
MDKNDDSRLRFFRQLKSEIRGSADYLLIGIDVAKDRHDAFFGSSQGKTFLRKLSFDTTREGFEKLCLHAEVIRAQQGLTKIAFGLEPTADYHKPLGEYLIRKGHMVVLIAGSAVKKNRELLDGRWDKHDAKDAANVADLVSQGKCLFYEFPSPDLQELRSLLSLKRKLKKSEQSYKVRIRNHLIAQYFPEVDSYFTYGEGPAIVRWCLDPKELSCLPFEEFVRMVSSRNGGEKQHIRLREIHKKAGASIGCSAHPSVAFEAQTLLDALRQLHALIEETDKKIAEVCRRFPEYAFLLTIPGFGPDVSAKVLGAIGNPHRFQNHRQVLKTAGLDLSADRSGKRSEVTPVISKRGKADLRYGLYQAALVAPQRNPAFMRYFARKLEGRQREKGIGMKMRVKLAAKMLVIAWTLMKKKETFNPGCIG

SEQ ID NO: 113941 - protein, 353 aa, unidentified
MQIIAGVDCHKGTHAIAFVDAVGKVVHDLEIPANAAGYADAIAAARLLGEVVWGLEGTGVYGRCFAKALLAADMIVFEVPGIVTKRHRKHASQHGKSDRKDARAIAEAVLRDSERLPRFREFEEQEALRLRYDQRDRLVRERTMLINRIRSNALRLAIDAPRDLQTIASLRVLRAALDVVVNPGFVEEALVDEIRFSLATIERLNEQISRLERLMSPFVKRLAPELLELRGVSVIVAAGLIGHCGDMRNLRNADAFAMRSATAPISWSSGKSQVVRLNVGGNRQLNRLLHVIATVQLRAPAHPGRIYYDRKRSEGKTGRSALRALKRTLATIVYYRLRLCQTRMEHTSVPIAA

SEQ ID NO: 113942 - protein, 485 aa, unidentified
MAKRRMSTFERLESGRLNRKQRRELGRQVAVADPGLTIVHANAGGIDVGNESHYVAVPPDRDPNPVREFGCWTAALNQIAEWLQSCRIDTVAMQATGVYWIALYDVLEQHGIQVVLANAQHTKNVPGRKTDVQECQWLMKLHTYGLLRDSFRLAQEMESVRTIWRLRDRHVKEAGRAVQHMQKALTKMNIQLANVISDINGLSGQQIIAAILQGERDPWKLADLKHYRVRASREEVARSLEGNWREDVLFELQQAVDSYHFAHRQMQECDRKLEGYLASLPARMLDIPVQPEDTQAATPKKKTKKAKRPRGNQPHLDLKTELKRICGVDLTSIDGIDVMTALTIVSEIGTDVSRFQDETHFASWLGLTPAKDITGGKTIGRGKRKVKNRVAVALRTAATTLLKSDSYLGARYRSLRRKLPSFASAVKAMGRYLAVLIHRLLTKGEAWVDRGATQFERRHTEQELASLSFKARAKGFKLIPITEAS

SEQ ID NO: 113943 - protein, 400 aa, unidentified
MLSIGIDVSKGKSTVCGMKPGGEIVYTPFEVQHTREGMSELVSLLRGSGEEVRVVLESTGSYHCPVVAALLENGIFVSVVNSLRMKRFCSQSIRRVKTDQIDAMQIALYGLAYWQELQPTRLPEDTYRELQLLARQYYQMTSMLIKAKVDFNALCDQVLPGMQELMSDHAGRHKLSDFVLRYRHTTHILEMGETRFRKDYCKWAEKKGYRNCERMAVLIFATAQNGIPVLPNAPSTQIVITEAIRVLHTVEASRDAILTQMQALAKTLPEYSLVREMPCIGDTLAPRLIAEIGDVRRFHSKRALIAYAGIDAPPYQSGKFCANNRHISKRGNRYLRKTGYEVMQSYVMHKPANDPIFTFIEKKRGEGKSGKLAMVAGLNKFLRVYYGKVTELYRSLPAIE

SEQ ID NO: 113944 - protein, 415 aa, unidentified
MEDLGLRALYRRVAGIDVHRMLHVVTVLIEQADGAMQRHTREFGGFRRDCRALAAWLAELGVELVVMESTGIYWKSVYAHQENAGIAAWVVNAHMIKHVPGRKTDMADSEWLAVLARFGLVRASFIPPKDLRELRLVSRYRRKLSAMRASEINRLHKILDDGGIKLGGVVSDINGVSARAMVSALIQGQSIDQMLGLARGALKRRQDELGASLEGDLSARHLFVLGHIQAHIESLQREIDQIDAYLLSAMQPYAWAHQLLQTIPGIDAMAAAMILVEIGDDMGRFASPERLACWAALSPGNNESAGKRKSGRTRHGNSIIRFILCECANAARMTKSTLAAKYRSLMVRKSHKKAIVAVAHKMIRLIFVLLTRRQAYIDQAIDYAAMSAKKNAPRWIKQLKAIGRWPTPKPAAAST

SEQ ID NO: 113945 - protein, 408 aa, unidentified
MQVTFGIDVSKSTSTVCELIGESKNELTITNNRPGFIQLLHELTAFSKHPQIIFEATGVYSRRLQAFLEDYGYEYVVINPLKAKKEMNMGLRYNKTDKTDAYHLALIQRLYHHPINQLQSQTYKQLNALSRFYDQLTADLVMAKNRLYQALQSTFPEIENLFSSAKGKNYWQIVVRYPHCDLVRREDKKQLINWLMSLKGIAFKHALRTADKLIELAYQAYPVVSCSSIEVEQVQYYAHRLLNLSDQRENLIARMVKLAKSLPNHDLENLESIPGFAQTTAVRVLAELGDLRRFSNPNKINAFIGIDPGRYQSGEMDSNLSITKHGNAVARKLLYRAIGQIDNAAKTNPCHIADYYESKKLSSQTKGFKKIAIASIHKLIRTIYALIINDQPYDYNVATHNQKDFSRN

SEQ ID NO: 113946 - protein, 345 aa, unidentified
MKIVGCDLHTRYQQIAMLDQETGELVERRLEHANGEAKQFYESLSGSVRVGIEATGHTRWFERLLAELGHELWVGDAARIRASAVRKQKTDARDAALLLELLLSGRFPRLWRPSSEDRDLRQLLWHRQQLVWMRTSIANQLHALAMGEGLCKKKQLFTKQGRAELEALNLDPWASRRRQELLRMLDQLDVSLKQFDEAVNEQAAQSAEAVRLMTHPGVGPVTSLAFVLMVGPVTRFQRSKQLVSYLGLNPREHSSGGKQKLGSISKQGNPMLRGLLVEAGHTAARLDPELRRDYQRLRLRRGGSVAKVAIARKLAVRMYWMLRRQENYTQLVRMQGSSRGTLVQQ

SEQ ID NO: 113947 - protein, 381 aa, unidentified
MKSLIYVGMDVHKESYSLCTYLILSGEFIGETKMDAKPSLIKQYLNEMEKLLEDKGYEEIEFITCYEAGCLGFSLYKELVKLGINCKIVAPTTLHKSADSNVKKNDRKDAKMLARNLAYGTCSFVHIPDEIDQETREYIRMRMAHKREIKRIKNMINSFCLRNGHKYEGNYWTDKHISWLKHLELNDFLKSILVEYVDTYDILMTKLDRIEGKIEEISLSERYKESVDKVSCLKGLTRQGALTIISEIGDFSRFNTTNELCSYLGLVPGEHSSDGKGPSLGITKLGNTVVRNQLVESAKSITLGIKWIKSKRLKQRQKGMPLDIISYADKASKRLFDKYHSLISRGVHCNKAVIAIARELACFVWGMMTNNISERKVGTAN

SEQ ID NO: 113948 - protein, 320 aa, unidentified
MSQTNFTILYAGIDVAKATLQLSLEGAAYGLANDAKGQARLLKLLTAAEKSRPGCRVHVILEATGGYEAALCGALHAAGRILSLIQPSRVRHFASAKSEHAKTDAIDAAVLVAFGEAIAPAPTPPPSPAQSHLSVLVNRRAQLVETRTTELNRADHYTDKLLRQQSRALLALLERQIAQCERAIAAQIQADETMKARTERLQQVPGIGPIVAAVLQAQMPELGTLQAGEAAALAGLAPYNRDSGPWKGTRHIRGGRAPVRCALYMAALSTVRHDRILREFYTRLRAARKKPLVALTAAMRKLVVLLNRMLHNPQFQLAPP

SEQ ID NO: 113949 - protein, 352 aa, unidentified
MTVTIVETRAEIRAITGGVDTHADVHVAAALDSIGGLLGVKEFPATAAGYSRLLSWLGGFGTVCLVGIEGTGSYGAGLARHITTAGVRVVEVDRSDRQDRRRQGKSDPLGAVSAARAAQSGRARGASKGRDGAVEAIRALMVAKRSAAGERTQTINQARALILTGPDDLRARFTGHTTAALVAELASLRPRPGSTVGYATRIALRELGRRAEFLDGQLERLDELIGPLAAARAPGLLALYGIGPHTAALLLIAAGDHPERLRSEAAWAHLCGAAPIPASSGKTVRRRLNPGGDRQANHALWRIVFTRLGSDPATRAYAERRTAEGKSKKEIIRCLKRYVAREVYPHLRTTIG

SEQ ID NO: 113950 - protein, 326 aa, unidentified
MTLSHLTDNIFVGIDVGGTGLDVAWHRGDSAHYANRPDAIATLVERLRTGPEVTRIVLEPTGGYEKPLVKALRQAQLPVEIIHTTRFQAYRQLVGVKAKSDTSDARLLASYAAAPDEVRGRKAGHVELPEDAIRDALSELASRRDQLKHMIHAETCRLGTIRMAELRQMIMVHLEAIRAEDKQVHRMMLELVRQRDDLRRDQRLLKTIKGIGEKSALGMLALVPELGLVNKKAAAALIGVAPFVRQSGTMTAPARIHGGRAAVRSILYMAAITASRHNPVLRPFYEKLIAKGKPPKVALIAVLRRLVVFANAVIRSGQPWKGATAS

SEQ ID NO: 113951 - protein, 410 aa, unidentified
MGLYCGIDWATKHHDVAVIDDDGRVIARGRVSNDAAGFAALLTLLAEAGDSAAHPIPVGIETDRGLWVGALRETGRVIYPINPLTASRYRARYAVSGAKSDATDAVLLANIIRTDPDAHRPLPADTELAQAIRVLARAQQDAVWARQQVGNQIRDLLKDFYPAALAAFDQLPEGGLARADARTILAAAPTPAQAAALTPARLRRLLVKAGRRRHLDRDVERLREIFTDTYLHQPPVVENAMGIQLSALLRQFDAAATAADELAEAAIAHFERHPDAAIITSFPGLGMLAGARVLAEIGDDRSRFADARGLKAFAGSAPITRASGKKTVVLHRHIKNRRLAAVGPIWALSSLRASPGARRHYDTRRAAGDWNHQAQRHLFNKFLGQLHHCLQTGQHYDEHRAFPPPLLLAA

SEQ ID NO: 113952 - protein, 304 aa, unidentified
MFGIGIDVRKATLDVVVHGEQFRQFSNDKRGFVRLIRWLKTWPIKQVVLEASGGYERAALDVLHAAGLPMVRINPARARRFAQGTGRAAKTDRLDATVLAQMAHLLPLTRYVPPAPWQQRLAEFAQCRRHLVQMRVSEMQRLRRLVDPDLIAMKQRHIAQLSDDLKQLDKAIAEQLEGQPGWKNIGTLKGVGPILISTLACELPELGSLGSKAIASLAGLAPMNRESGTWQGQRRISGGRAVVREALYMAALTAIRYEPGLRAFYAGLKAKGKASKVALVAVMRKMLVILNARKRDAEVALGCP

SEQ ID NO: 113953 - protein, 441 aa, unidentified
MMHPKMQYTYVGIDSHKDSHTAVFLDCFFEKLGEITFENLPSKFGAFLAKAEKLKVGGTTLLFGLEDVSMYGRLLAVYFRDNGQKMKHVNALLVAKERKNRNTTQKTDSIDAECAARVLLSKLDQLPDAAPDDKYWILQSLVTRRDFIVRANISLKNHLHSLITQHYPNYKQWFPVLDSQTSLAFLARYPSPSTLEGATVESLAAFIRKASDGRVGAGLRHTARAQLILDTLQDTTMPFQKMRDRSVTSTLRQIDVNNQEIQQLEQDIESFLGHFNCTLTSMNGIETVTAAQLLTLIGDIRRFPTAAKLARYAGIAPVTYASGQFGKQHADSRGNRQLNSTIYLLAVRLIGSSAGKIVNHFTHGYYHRKLAEGKTKKQALKCVQRRLVNIIWRMLMYNEVYVNPPLVDKVDDNAAKAADKPAGRATDKATSKATDTAIDSN

SEQ ID NO: 113954 - protein, 348 aa, unidentified
MTSLTDVVDVVIGVDTHVHTHSAAAVDAHTGAVLEEITVNATAEGYEELVEFVAEYPLRAWAIEGTGGHGAGLTRHLQCGEEFVIELDRPERAKRRNGAKSDPLDAIRAAREALSRPRLGTPRSGGDRQALSVQLVTRRSAVDAATIAQRQLFSLVIAAPEPLRARFYGQKVPAMIKTAASLRINASWDTETAITATMLRTLAKRSLSLSKEAAEHQRAILAIVRSWRPDLLAQLGVGPIVAAVVLCAWSHPGRIHSEAAFAMLAGVAPIPANSGQTTTRYRLNPYGDRQLNRALHTVVITRMTCHQPTRDYRDRRTAQGKTSPEIKRCLKRYVARDLYRLLEQPTTT

SEQ ID NO: 113955 - protein, 441 aa, unidentified
MGHDVEEVDAEGDEQVLERAGAIDVAKASAKVCVRLPGAKRRITKVWDVGATTKAIVALADELAELEIERVVLEATSDYWRPFFYLLEARGLCVWLVNARDVKNVPGRPKTDKLDAIWLAKLNERGMLRPSLVPPREIRELRDYTRLRAELVEDRTRHKQRLEKLLEDSMIKLSTVASDIFGKSGRAMLEALIAGERDPEVLADLALGQMRKKTAALKEALTGRFDHHHAELARMLLDEIDALTEKIERLTTRVEELVSKIPEANAPVDPETGEIGSKGLPVLERLDEVPGIGLRAAQVIVAELGLDMERFPTASHLVSWAKVSPRTIQSGPRSRSGKVGKGNPYLKRVLGEAATAAAKTDTFLGERYRRLVRRRGKQRALVAIERSLLVVVWHLLADPNARFIDLGSDFYERRVNKERRTRDLVRQLMALGHQVTLNPAA

SEQ ID NO: 113956 - protein, 356 aa, unidentified
MTNGSGSQKVQVVVGVDTHKDQHVAVAVDQLGARLCEHRVATTTQGYADLERWSRGLGEVNAFGIEGTGSYGMGLARFLSSRGYTVVEVNRPDRSARRRKGKSDPTDAEMAARAVLAGIARATPKAGVDQVEMIRMLKSTKNSAVKARTQAMNQMQALIVTAPADLREALSGDTGNKLVVRCAHLHPGELVTPTAVAKHTLRTLARRCHLLTVEIEGMETELMRLTAQVAPALLEAFGIGSDTAATLLVTAGSNPERLTSEAAFAALCGVSPIPASSGKTNRHRLNRGGDRQANAALYRVVVVRLRYDQRTRDYMQRRTEEGMTKTEVIRCLKRYVAREVFGILPKLGRMSSDNRA

SEQ ID NO: 113957 - protein, 347 aa, unidentified
MLTVGVDLGKRKSQFAVLEADGTILVERQLPNKRDLVRKFFQGLPKPIQVGCETCVNSYWLVDLLESIGIPIFVGHALHMKLIAHARIKTDKLDARVIARLLQSNFFPAIVIPPREVRQARELLRGRVKLSRSVAQMKNRLHGVVTRAGIDYTESNLFGPGAEVWLDSLNLGPAPTYLAKTYWYAMKDLIRRLKDLDMEIQSQVCLAEPWASIVQRLATAPGIGEFSAMLLALELWDIKRFPDPKHLASYIGMVPSVHQTGQTLRGGSITKQGNRYVRWILVQDAWAAIRSCSRYRGLYEHYARRQGRTRAVIPVARQLLTDVYDMWRQGITYEELIQKKLAESKRA

SEQ ID NO: 113958 - protein, 429 aa, unidentified
MNYNTQNAKIASITEKTLIVGIDVGSETHYARAFNWRNYEYSKKPFAFSNDEIGFAAFKEWVNDIAEKHGMEVIIPGMEPTGHYWLNLGAYLQEQGMKPVHVNPHHVKKSKELDDNNPSKNDRKDPKTIAGLVNEGRFSYPYIPTGIYAEIRNLSNLRIQTQEEITRIKNRIARWFSIYFPEIKDVYRNPDAVSGLMVIKQAPLPCDIKELGVDGVNKIWRDARLKGAGIKRATTLVTAAEHSIGNTEAPRSARKEIRNLLNDYEIYKNRMDELMEEIKETLSEIPYIDKLMEINGIGIKTVSCVIAEVGDIGRFDNPKQVQKLAGYAIVADSSGKHNGASRISHRGRKRLRYALYEAAISVIGKNKEFKEIHSYYRTREKNPLKKMQSVIAVACKLIRIFYTILTKGVDYDGQRMLADIVRPEMQLAA

SEQ ID NO: 113959 - protein, 401 aa, unidentified
MLFAGIDIAKHDHVIGAVDERGRSLSKPMAFKNSQAGFEKLAAYLGGLSDDKADVMVGMEATGHYWLACFCFLSEQGYDVAVINPLRTDAMRRFRNGGRVKTDAIDCAVIADTLRCGDFEPSRLADEKMMSLRQMTRLQQAMTESAADLKRQIIVALDQVFPEYGTLFSDMFGETSRAFLKRCPTPEECESIDIRTLTNLLDRASNGKLGREKAASLKKAAKGSCGIRLANDAFSFQIKMLAKQIEFIEEQISEVDAKIKALLDEVEPLILTVPGVSYKLGAQIVAEIGDVKRFKNAAAIVKYAGINPSKNQSGTFEGEVNHITKQGSPYLRRALYLAAMAQLKCRAPLYDYYLKKRGEGKAHREALIAVARKLVHVIYAVLSKQEPYDPAYSSSSESKTL

SEQ ID NO: 113960 - protein, 466 aa, unidentified
MSTTPPRAQRRRQGGTALKRKVPLPPQLKQINLNAVGIDIGSEEHWAAVPPGRDREGQDVRRFEAFSGSLCALADWLKQCEIETVAMESTGVYWIALYELLVERGFEVLLVDARRVKNVPGRKTDVLDCQWLQELHTYGLLRGAFRPADQVCILRSYLRQRAMLVAYASHHIQHMQKALEQMNLKLAHVVSDITGLTGMGIIKAILKGERDPVELAKLRDPRCKNSEATVARALEGHYRQEHLFSLQQAVELVEFYQKQIAACDCQIEACLQQFEDKNPETPLTARSRKHRRSGVGFDARSYLYRMTGVDLTQIDSIEANTALTVIGEIGLDMSRWPTEKHFGSWLGLAPGSKVSGGKRLSGRTKPSANRAAAALRMAAQSLNQSQSALGAYFRRLKARLGAPKALTAAAYKLARILYRMLKHGAGYVDQGEAIYEERYRDRLLRNLKRRAAELGFQLTPTSSSTG

SEQ ID NO: 113961 - protein, 339 aa, unidentified
MESFVGVDLHRKVSQLAALREPKPASQVRFPNNTVTVEKVLKKLPQGSKIALEATGSWWWFVELAQKTGHEVVMSHPKQTKAIASARLKSDKVDALMLAKLLKADLLPTVWIPPATQRYVRELLTHRARLVRQRTAVINEVHALYAKRNIDPGMIFHRVRPPAFMAKELSGYGPRIVEEDAELLAFFNRQLRGLDNELQKIAEEDVESKRLMTIPGVGSLSAVAVNCWIGTIERFSKAKKLSSYFGLAPRVRQSGDRERHGHITKEGNRMVRSLLIQAALWHIRLGKGACRKHYLGVLKRRGKQIARVAAANKLLGIMFHMMKERIDYQEFLRRGSSAQ

SEQ ID NO: 113962 - protein, 356 aa, unidentified
MSGAYEGRQIVGMDLHRRRSVLVRMTDTGEQLETVRISNDPEYLRQVMARAGEAPEVVLEAAYGWYWAADTLAELGAQVHLAHPLGVKMFSYRRVKNDQRDAADLADLLRMGRLPEAWIAPPPTRELRGWVRHRAKLVGLRSSLKCQVHGVLANAGVWVPMTDLFGVAGQQLLADLSGGERLSVESRSRLDSTLRVIAALEFEIELFAKLVNGRLRTDPGYRTIQQIPGIGPVLAGVFVAEIGDITRFTRPQQLASWAGLTPKHHESDTTVHRGRITKQGSRLVRWAAVEAVQRVGGHTRLGQHRDRVAARRGRNIGVMAAARELLTLVFYGLRDHHIRALTTPAATSTPAPASVA

SEQ ID NO: 113963 - protein, 350 aa, unidentified
MDKELYIGVDVSKQTLDLAYYDGESIDWKKAHIKVSNNNAGFKKIGSWVAKVSKGFDIVLFCMEYTGLYTQNFRLWLEEKHYIYRMVEPRKMHRFEPDLDDGLRSLDRIKTDELDSFRIAIYCEQNHRKILRNPSKLPSPVYFKLKRLLAERKQTVKQSVLYKQQLHDICAYDTDLSVERKNGQLKTLNDALKGIDNEIDMYIKEDADISKNFSLLTSIPGIGRVVALETIVLTENFMAIDNPRKYACYIGVAPFKKESGTSVRKGSSVSKKGFKQAKADLSIACLVCMQHIPNIRDYWERKRKEKCSGIVFNAIKFKMILRIFAVIKRGTPYVETDNYRNGKNKQPGVN

SEQ ID NO: 113964 - protein, 383 aa, unidentified
MNGPIYEQSVIVGVDAHKYSHTAAAVDAWGQEKGRLNFTNDSLTDCLAWLKTLGRREDVIVAVEDANSYGCHLVSALAEQQFAVRSVPAVLTERDRQHSTQRDKSDFRDAKRVAKVILAKYEETLPVIASLATSAELAAATELNLLLNERRDVVKQGTAIKNQLHSLLHQYYGDHYADGFSKAFNKQAIIFYQANLAQAISANSSSADQAGKALIAESILRRIRRLKLLQEQSAAILKQITKIGKTSEQVAALHENIHGCGLLTAGAIMAELVTIRRFGGRDKLAKYAGIAPTLKSSGSHHRLYTNPFGNRLLNKALHTIALSQIAVKGDDRGKRYYRKKLKEGKTKLWALRCLKRRLINLVFRVLKQAEAGIGIGSAEKMIS

SEQ ID NO: 113965 - protein, 386 aa, unidentified
MIIIGVDPHKRMHVASAIDPATNHRVAALQVEASLAGYRRLLKWADTFGERRWAVENAHGLGRHLAQWLLARGEAVEDVPSTATARVRELSRGGRRKNDVIDAAAAASVAALHGDANPVLPEDLTTVLGLLDERRTNVTTQRTRLVNQVHAVFRDLLPGGAPQNLTAATASRLLAGIRPVGPVEAARKQLARDLVSEIRDADQRLKLLTSHIAETVAATGSHLSEVDGVGPIVSGRLLARTHKMSRFPTAAAFASYAGVAPVEVSSADRVRHRLPRGGDRQLSHALHIAAVNQIRMPSSAGRAYYDTKIAAGKTEKEARRCLKRRLADHIWRLMIRDERDDAAGPGGQQGTTVQSSAAGSTPNTSSSDKSLPEPTTPDSTTSQTAA

SEQ ID NO: 113966 - protein, 434 aa, unidentified
MSKFFNDFVIGIDVSSEFSVVAMLEPNGSLIRKPFRIDHNPKGFNKLLEILKKEEERLKQKPIYFVESTGIFHLPLFFFLRSNDLKGFVLNPLSVHSTKNFDLRKVKNDAKDAESIARLAKFQEVKYSLVPEPQILALRMMSREYYAMSDMLTEMKNRLCTDLYLLFPGYLDVFGNPFGKASLEILKTYSSPRALSEVDSSELALMISKISRKTVSWANKKVNALLEITTQALSMPMEFDILSLKIKTHVENIENFQNRLDGLIDQLKVMIQSPDFPAKERRYIELLEGMPGIGFLTAVTLIAEIGDFSKFHSPKAFVAFFGIDPSVNQSGKFNGDRNKISKRGTRFGRRVLFTAALASIRTTRKGDAINPVLRDYYHQKCENKKKKVALVAVMHKLLNYIFAVLRDEKPFALRSPKDHQSWRHTKETALKLVA

SEQ ID NO: 113967 - protein, 396 aa, unidentified
MAVYSKFVGMDVHKETIAVSVAEAFGGEVRYVGEFRNNPEAVTKLIRQLGKGETKLLCCYEAGPCGYVLHRQLLGMGVANLVVAPSLIPKKPGDRVKTDRRDSQTLARLLRAGELTAVWVPDENQEALRDLTRGREDLKHLERQAKQRLQAFLLRHGRIYEQEKKWSRMHFRWLEEVKFDQPVQQFVFQDYLDTVQMLSRRVEALEEQLEAAGVASGFAAVIEGLMALRGISRIAATTTMAEIGDLHRFRTAPQLMAYLGLVPSEHSSGATHSRGGITKTGNGHVRRVLVEAAWTYHHPARKTAHLQQKAKRAPERIQEIAWKAQVRLCGRYHLLESKGKLKVKVCTAIARELVGFIWAIGQAFPGPDPASPGPKTESQCIGSRTGNGGRTLGAPM

SEQ ID NO: 113968 - protein, 335 aa, unidentified
MGKNTLHMVGLDSCGAIVLREKVSRGRIASRLVNLPPCLIGIEAGMATHYVARELAELGHDVKQVPATYAKPFRQGHKNDFRDAHAVAEAVQRPTTRFVPAKTEEQLDLQALHRVRSRLVSGRTAAINQIRGFLLERGIIVRQGLRFLRQSLPDILATRADVLSPRMVRIVAELADDWRRLDERIEIVTDEIEALAKSNDSCRRVMTVPGIGPIISSAMVAAIGNGVAFARGRDFSAWLGLVPKQMSTGDRTILGRISKRGNGYLRMLFMQAARVILLRPANWPKHGFGAWLARAAQRLHPNILAAALANKLARIAWTVLAQERSYEARVTKAAA

SEQ ID NO: 113969 - protein, 419 aa, unidentified
MPLSTTLYVGTDISERVNRTRFYDEGGKEIGGRMESQNDLPGSRDLAAESVARAHRIGAKQILWGLEATNLFWWHLATFLTTHPELLAHGLRCYTFNPRQVKKFKESYPDIGKDDWTDAMVIADRLRFGRLPAECYLDERYQPLQRLTRYRRHLVTQLVREKNVALGYVYLKLSAYNTIERPLSDTFGVTSQQLLEGYLTPDEICAAPIEELASVLKEHSRGRVADPEKVAEVVKQAARRSYALPKPLVEPVNLILSSSLTTIRTLKAQLGPIEKAIATELRATPPQTLSTIPGLGPVFTAGIVSEIGDVGRFEREESLAKFCGLTWRRHQSGEFEGEERPLTKTGNAYLRYYMVEAANSVRLSCPEEFGSYYHKKYREATRHKHRRALVLTARKLVRLVHSMLRSGRIYQPGGPRKAR

SEQ ID NO: 113970 - protein, 341 aa, unidentified
MSNANSYIGVDLHKKTCFITVMNEMGKIKRQTEIKNEKETICEFFKRYNDASVAVESTMNWMPFYENLENMGFNVVLSNPLQTKAIAAARIKNDKVDSRVLADLLRTNFLPTAYLQPREVRDLKELVRQRMNYVDMRTQIKNQIHSVLFKSGISHSFSNLYGKAGMEFLKKLELREVYRRQLDWHLTALGNISVQIKEMSEVIEKTAKADFDCRLLATIPGIGYFNALLIKSEIGDIARFANANKLCSYAGLIPSTYASADKVRHGRITKRGSKWLRKALVDSITSGCRHEGRLAYVYRKLKKSKGTGKARVATARKLCHIIFAMLTDKQPFREFAPVKQR

SEQ ID NO: 113971 - protein, 316 aa, unidentified
MTEASGFVGIDVAKAELEVVVRPSGARWTVTNNASGLAQLQERLQALAPALIVLEATGGYEVAVVAALATAALPVVVLNARQVRDFARATGRLAKTDAIDAGVLAHFAEVVRPPVRPLPDAMTQSLQAWLMRRRQLVEMLLAEEQRRSRAPRPIQRQIDQHVRWLRAQLGAVEKDLAQTLRASPVWREKDDLLRSVPGVGPVLTTTLLGDVPELGQLNRKQIAALIGVAPLNRDSGTYRGRRAVWGGRARVRATLYMASLTAARYNPVIRAFYERLVAAGKPKKVALTACMRKLLTILNAMIARRTAWKPPATVSA

SEQ ID NO: 113972 - protein, 470 aa, unidentified
MVARGKGPIRPATSLPVVHPHAGGIDVGASELYVCVPEDAVSPGESPVRRFGVFTGELDKLVEWLQSCGVKTVAMESTGVYWIPPYQKLEAGGLEVVLANARHLRQVPGRKTDVKDCQWLQRLHSYGMLQGSFRPAEEYCRLRSLMRHRENLVAGCVQQVQYMQKALDLMNVRLHQVVSDLNGETGLRILDAILAGERDPKKLTSLRDERIKRSTPPEMEAALQGDWREEQLFILQQARETYRFVETQLARCDAQIEKVLQQIVVVAPRGPSLEPPPNPTAAPTPRKKKERGPHKTGHGLKRDLRAELQRICGVDLTQVIGLNVLSVLIIISEIGVNMSRWRSAKAFCSWLGLNPGNKISGGRVLSSRTPHVVNRVSLLLRTLATAVGRSETWLGIFHRRMKARLGPAGANTATARKMACLIYHLLKYQEQYIDVDTLIYAEKIQRIRLNKLRKTAHELGFELLPIKEAA

SEQ ID NO: 113973 - protein, 336 aa, unidentified
METKTKFIGIDFSKATFDATIYEGEHCKFTNDDQGFKEFLAWVETHIDGLSLQDCLFCGENTGNYSVRLSNFLYVHHCTMWLESALRIKRTMGLVRGKDDKIDSAYIARYAARNAEDAVSYEPCCKNIGELRRLFARRQLLVSQRTALMNAGKEANVLGEKSKYDRTLEKQNTKLITMLAKEVLRIEKMMLEVIQADERLSRQYQHITSIKGMGPINAIALISVTEGFTKYANDAKKLACHAGVAPFKKESGTSVNGGTHVSHLSNHILKPLLTQAALSAILYNRQIIAYYERLISRGKKSQVALNNVKNKLLHIVIGLIRKDEDYDIQYQPVPKI

SEQ ID NO: 113974 - protein, 344 aa, unidentified
MDQITRIGMDTSKHIFQLHGVNAAEAPVLRKKLRRKEMMAFFEKLAPTAVAIEACGASHHWARRLQSLGHTVKLIPPQLVKPYVKRGKNDAADAEAICEAMSRPTMRFVPVKTADQQAALMLVGVRDRLIRQRTQLINVIRGYAAEFGLIAPTGLCRVGPLLDRVKTDETLPALARELFEMQATEYAQLQARLEEIEDRLMAWHRAHEISRRLAKIPGVGPIGAAMLVMKTPAPEAFRSARHFAAWLGLTPKDHSTAGKVRHGVITRAGDEALRSVLVVGATAVIRQLRRGQCAPPSPWLVALLQRKPSKLVAVALANKIARIAWKLMVTGDSYRAPTSVSAAA

SEQ ID NO: 113975 - protein, 338 aa, unidentified
MNIVFLGIDLAKNVFQLCGLNQAGKPVYTKRTGRKELLQTLANIPACLIGIEASTGVFYWQREFEKLGHKVKVISPQYVKPFVRGQKNDGNDAQAIAVALMQPTMQFVPPKSPEQQDIQTLHRARQRIVNHRTATVCQIRGLLLDRGIPIGSAVSRARRAIPLILEDAENGLSSRMRRTIAELYDLFNDLGRRIHFFDKEIETVFRQSEACRRIAKVKGIGPKTATAVVAAIGKGTEFKNGRHFAAWLGLVPRQHSSGDRQVLMNMTKKGDRHLRTLFIHGARAVVRVATNNNDGHMNQWVNQLKERRGFNKTTVAVANKNARIIWSMLRNETGYQVV

SEQ ID NO: 113976 - protein, 354 aa, unidentified
MDHYIVSCDAHKRYSLFGTLNLSTEARTHSRVEHEPGAILAFLGKLPGGTPVALEAVGNWYWIVEEIEAAGCLPLMANAGKAKVMMGHVDKTDKLDADGLLTLLQTGTLPTVWLPPGAVRDARELHRTRMALCKDRTGLKNRVQATLAKYALSIDEETDIFTGKGRERLELTVQSLPPETGRCVQQELQVLDYLQKQIHAMEKRIRECVKLTPTMQLLKTLPGVGDILAIVIALEMGCADRFARAEQFCSYCGTVPKVRSSGGITRYGHTRQECNHYLKWAFFEAANVAASHRKARAWCDRHIVRLYERVRKRKGQGVAIGAVARHLSEAAYAVTLRNEPYREPNPGKGLPKQR

SEQ ID NO: 113977 - protein, 343 aa, unidentified
MEYYVGLDVSLKQTSICVVDQAGLVVREGVVDSDPEAISVYVTSRAPNAVRIGLETGPTSTWLWTELKRLGLPVICIDARHAKAVLKMQINKSDRNDAIGIARIMQTGWFKEVHVKDIDSHSVRALLASRALLVKIKRDLENHVRGLLKNLGLVIGRAKFNVFAVRAEELIEGRPELVAAIRPLLEARSAVEQQVSELDRKVMKLARHDTQVRRFMTAPGVGPITALAFKATIDDPTRFARSRSVGAYVGLTSRRHASGEVDWTGRISKCGDAMLRSYLFEAAGVLLTRVPKWSSVKAWGVRLAKRNGLRKAKVAVARKLAVILHRMWIDGTEFNWSKKEIAA

SEQ ID NO: 113978 - protein, 343 aa, unidentified
MQIRSVGIDLGKTTFHLVALGDNGKVLLKKKFTQKQLITFTANMQTSLIGMEACSGAHFLGRVLRAQGHDVKLIPAQFVKPFVKSNKNDFLDAEAIAEAVDRQNMRFVPIKTDDQLDLQALHRVRDRLITRRTSVINQLRAFLLERGLVFAKSPAKLRERMPEILENAEEDLTPRMRNLLALLWNEWKDLEQQVVDLNHEVELIASSDAACIRLRQIPGIGPLVATAIVAAIGNGAAFHKGREFAAWMGLVPKQYSTGGKAKLYGISKRGNSYLRKILIHGARAVVLRSKRERIAMGAWMTSLETRAPRNVLIVATANKLARIAWAVLSTGQDYRAVQEPVAA

SEQ ID NO: 113979 - protein, 366 aa, unidentified
MNVVVGVDAHKLSHTLVAVDPAGLKLGQKTVATTSAAHAEAVRWAAAQFGSGILWAVEDCRTMTARLEDDLLTAGQRVIRVPPHLMSRTRSSARERGKSDPIDALAVARTVLREPNLPVAVHDPISMELRLLVDRRDDLVSECTATINRLMGRIHLLDPGHPTPRNWKVQKAHRELRDWLITQDGLVAELARDELDDIMRINAVILGLRRRIERTVQPVAPALIALQGCGELTAARIIAEVANIDRFRSEAAFARYAGLAPVPHTSGSSTVRLRPTRQGNRRLNAALHRIAITQTIHDGPGRTYYQRRLAEGDSRHRALRSLKRRLARVVFNRLRGCPPVPDSPSVNSSSLPRVFGLPLADLQASR

SEQ ID NO: 113980 - protein, 352 aa, unidentified
MIVLGADTHKRSHTIAAVSATTGEVVGEQTVQVGAKGFATLVAWARGLGAERVWAIEDCRHVSGSFERFLIGRGERVLRVTTRLMAASRRNVRDRGKSDGIDAIAVARAALREGLDALPAAQLDGAELDLRLLVDHRERLIRQRVALNNTLQWHLHDIWPELELPGSSLFYGTWGPRIARRLARAEQTMRVRIARDELRRIRELSQTIKALQREIAGLVAQIAPQLLSEPGFGPLIAAKLVGEVAGAARFASDAKLARAAGVAPIPVSSGKTNRHRLDRGGNRQINAAIHRVAVTRLRCHPETQDYIARKRAEGKSTKDAIRCLKRHLARRLWHLLLEPPNPGAGHPHPSSS

SEQ ID NO: 113981 - protein, 385 aa, unidentified
MDHITNLPSPETDIRGDCATLFVSLELSRSTWVATSLAPGSKKMSKHTLAGGNGRELLDLLARLKARAEQRIAAPVKVVAIHEVGLDGFWIHRLLDANGVESHVVDPASIAVPRRHRRAKTDAIDGETLLRTLMAWQRGEPRVCAMTVPPSPSEEDRRRISRERAALLRERIRHTNRIRGLLFGQGIVNYNPLNKNRRGCLEELRTGDGRSVPAHLKAEILREIDRLELVLRQISQVEAERDEMLRPAEANSPAALLMRLKGIGAEFATVLYLEGLFRHFENRRQLAAYAGLAPSPWKSGSIDHEQGISKAGNPRLRTTMVELAWMWVRYQPDSALSCWFRQRVGSERGRTRRISIVALARKLLIALSRYVIHGEIPAGAVMKPV

SEQ ID NO: 113982 - protein, 332 aa, unidentified
MKYIGVDISKSTFVAAFPTTKGYVTKEFENTPRGIHKFIGMVPSDHVVVMEATGNYCYTLLLLLHQANRHMSLVNPKQIKHFARMMMTVTKTDAKDACMIAQYGEKMNPALYEIPSQTILILKQKRTVLTQLKKQHLSTKNLLEAIQVLPYADKSCIRSLEHTIGFIEKQIKALEGEITTLANTEYNMLMNRLTSIKGIGIAVATALIIATGGFTYFNNAKQFSRYIGVCPTICKSGTSININGHINRSGDQHLRSLLFVAAWTAIRHNSACREMYERMRSQGKPSKVALIAVSNKLIRQCFAIVNSGTTYIDGFVSDNPQYRGSVNSDHRS

SEQ ID NO: 113983 - protein, 369 aa, unidentified
MPVVRGERAARFTFGTPSPRGSIWRAFATVLWKPEQLIDFNSHLQGWETENMPELIHVGIDVSKDALEVACGPQSPTQCFTNDDAGHEALVNVLHVHRVDLIVMEATGGYEAPCACALQAAGLAVAVVNARQARDFAKAMGYLAKTDRIDAQVLAALAAVLANRADRQKLIMALPSDEQQRLHALVLRRRQLVQMLVAERNRLPMSHQAARVSIEALIKAIRKQIVDIEADLSSHIAHHHADLAGLLRSAKGIGPHTSMALIADLPELGKLSNREISALVGLAPFNRDSGKMRGKRMIFGGRTQVRCALYMATIVAMRHNRVIQRFYQRLLAAGKPKKVAIVACMRKLLTILNAMVRTGKQWDETFHFA

SEQ ID NO: 113984 - protein, 343 aa, unidentified
MGEVSTIGLDIAKSVFQIHGVDAGGAVVLRKRITRAKLLEFFAALPACLVGIEACPTAHHWSRRLQALGHRVRLLPPSYVKAYVKRSKNDANDAAAICEAVTRPSMRFVATKSEQQQSGLMLHRSRQLLVRQRTMLSNAIRGHLAELGIISAKGRNGTAELLEIIADEQDDRIPEAARFSLAILARQYAAIRAEIVAIEKRIHAWHRSSAESRRLEEIPGVGPIVATALVAEIGDWKTFSSGRSLAAWIGLVPRQHSTGGKERLGRISKQGNRHLRWLLVAGAMAVIRYARQRGTKRLWLARLMERRPIKVAAVALANKIARMAWAMMVRGERFKEPKLLPAA

SEQ ID NO: 113985 - protein, 347 aa, unidentified
MLADEVDYVIGVDTHRDEHAVAVIDRVGSVVAEAVTATNDAAFEQLLGQIDARAPRPRAWAIEGSGSYGAGLVRFLSDRGERVLEVHRLTRDRRSHAKTDAIDAVRAARTALSRDLQATPRVGGAREALRVLVATRRSAVDGRRVALQQLRAFLVTAPDPLRRELGQLSEARLLARCARLRTNANHDRADRALRLALRTCAQRALQARDETDMLDKEITSLVDELAPGLRDEPGVGPISAAQVLIAWSHPGRIRSEAAFARIAGAAPIPATTGQTVRHRLDRGSDRQLNRALHTIVLSRRQRQHPATIAYIDRRIAEGKTTREATRCLKRYTARHLYRRLNAITNSP

SEQ ID NO: 113986 - protein, 347 aa, unidentified
MGYFAGLDVSLEETAVCIVDDSGRIVCEARVASEPEALVAFFGACGMKMERVGLEACSLTAWLHAGLTQAGVPAICIEARQAKAAMGAMPNKTDRNDARGIAQIMRTGWYRAVHVKSPSCRSWRALLTARRMVLNKRRDVENGLRALLREVGLKIGTPSRKDFAFRVRELAADAPVLASLAESLLAVIEVMTREVERLTKRVLDEVRVEPTCRRLMTVPGVGPLTALTFRATIDQPDRFQKSRDVGAHLGLTPRRYQSGETDVQGRISRCGDELARTALYEAAHSLLIRSTKWSALRAWGMNIAKRRGMARARVAVARKLAVILHRMWADGSEFRWGKQAIAPTAAA

SEQ ID NO: 113987 - protein, 410 aa, unidentified
MKMAGIDVHKKVLMVVVVDTNTPEEKPVRRRFATMPSELQRFRMWLEEQGVEEAVMESTAQYWRSVWFELEAHMRLHLAQAFSNRAPRGRKHDFKDAERLVRRLMADELILSFVPSGEQRIWRSMTRMKLQLTRDRVRLQNQIECLLEEMRIKLSIVVSNLLGASGLRILHALANGETDPKKLAQLGGERLQCTEEQLVDALTGRAQPVHGEMLALQLQRLQLIDQQMARLNSMIAAAMKAHQDAVIRLAEVPGLGVDSAQQIIAEVGAQASTFASAAELTSWVGTCPGKEESAERNRSSRSAKGNKYLRRVLNQAAHAAVAKKGSYFQMLFRRLLPRLGYQSAVWAIAHRLCRLVWKILHEGVRYIEQGGEADPRTKKKRAQMLARALRKLGYQVTITPINQITATNEI

SEQ ID NO: 113988 - protein, 320 aa, unidentified
MSAAKRSPWLSIARDSQENPVNSRTPPRDVALINRLRKASVSHVCLEATGLYHLDLALALDDARLDLMVINPKAAKRFAQAMQTRIKTDAVDAAVLAEFARRMPFTPWQRPEAPALAIRACARRIAALNKLRTQTKSQLHAAQQTDTTPDFLIADLQHSIAQLGHLRQQVLALIAADQELQHIFDLLVSVTGIANASAIQLLGELLVLPDDMSAKPWVAMAGLDPCQHQSGSSDNKKPRLSKSGNRYLRIALYMPALSAARHDPNVRAYYQHLIENRGLKKLQALCAVMRKLLHAIHAMLKNRTPFDNRRFYSPTETGAD

SEQ ID NO: 113989 - protein, 460 aa, unidentified
MKKKPAGQQKGSAQKKTDWKALDIVHADAAGIDVGGSEHWVAVSPDRDPEPVRRFGCFTADLREMARWLIDKGVRSVAMQSTGVYWMPVYEVLEQHGLEVYLVNARHTKNLPGRKSDVQECQWLLKLHTFGLLNNSFQPTNEIRIARTLWRDRGNLVAAAASAIQRMQKVLTEMNIQLSNVLSDLSGVSGMKIIGAILKGQRDPRALAALARPEVKATAEDIAKSLEGNWREELLFVLEQEVELYRFYQEKIVDCDLQLRKHLESFGSTVDIQAQPIGPKPKGKKGSRNAPQFDLRTELYRITGIDWAQINGMDVLTAQTVIAEAGADLSAFPSEKQFASWLGLCPSNEQSGGKILNRRTPKVVNRATVAFRNAAATLLRSQSYLGAQYRRLRTRLGAPKAITAMARKLACLFYRLIKHGQQYVDKGSEYYETRYREQQIRSLAKRAQKLGLQLVIPKTA

SEQ ID NO: 113990 - protein, 440 aa, unidentified
MNEEDHTRLEEFRQFRREIRKSAEYLIVGIDVAKDKHHAFFGMATGKVLCKRLVFENNLEGFRKLLVQAEAMKVQEGLKKVVFGLEPTGNYHKPLGEHLIRCGQEVVLVSGVAAHENRKTLDGRWDSNDTRDAANVADLISQGKCLFYEFPVGVLQDLRNLLSLKRRLKRQEHGYRVRIRNHLVAKYFPELDRYFEQSEKTSLAVVRWCLDPSVIAGLEYPKFVEMVSSGQRRLAQENRLQAIWKMAVDSVGCEVGPAVEFEVQVMVEGLKQIREGIEDIEEKIYEVCSRFPEYEFLLSIPGFGPDVSAKVLGAVGDPFRFQSGKQVLKMAGLDLSAERSGKTSPSAIPVISKKGKAGLRYALYQAAFIASTKNHHFMIYYTNLLRGREREPGIKTKMRVKLSAKLLIIAWTLMKKKESFNPSYLRVEFQPFSAGAGRES

SEQ ID NO: 113991 - protein, 359 aa, unidentified
MQTQRKELNFEGQSVFVGLDVHLKSWTVSIFTEKLHHKTFSQPPKAEILSEYLKYNFPNASYFSTYEAGFCGFWAHFRLEELGIQNIVVNPVDVPTTQKDQKRKSDPIDSSKLGRSLRSNELKGIYIPRAETLEDRTMIRVRFTIVKDLVRQKQRIKSLLYLYGIEYPDEFQNVNTHWSKRFINWLKTVHLQYTTGTDALNLMIKEAEQQRLILLEATRKVRTLSKTERYAKNIELITSVPGIGLITGMMLLAEIEDIKRFDNSDKLAGLIGIVPDCHSSGLTEKKGEMTSRGQYFMRKGIIECSWVAASKDPALSLAYCNYCKRMEPNKAITRIARKLINRIFSVLKNEKKYEIGIVK

SEQ ID NO: 113992 - protein, 391 aa, unidentified
MIYIGIDVAKDKHDCFITNSDGEVLFKAFTITNNLDGFNELHQKIASVMDDVTKVKVGLEATGHYSYNLLGYLIDKGLPTYVINPLHTNLYRKSLSLRQTKTDKVDARTIASMLMSDVNLKSYSDISYHNEELKSLTRYRFDKVKERAKLKTSVSRLVCILFPELEKLVPTLHITSVYALLSEFPGAKHIATAHLTRLTNLLSEASKGRYGKDTAITFRDAARASIGSNMPAKSLELKHTIKLIQELDSEIDEIENEIKIIMDEINSPILSIPGINYRMGAMIIAEIGDFNRFDSPDKILAYAGFSPSTYQSGQLDGAYAHMEKRGSRYLRYALYNATKYVCHWDPTFAAYLAKKRAEGKHYNVAISHAVKKLVRVIYHLEKTKQQYIKAA

SEQ ID NO: 113993 - protein, 353 aa, unidentified
MKSRMESKMSSPVVIGVDIGKDVFHLVGFTADGKIAFRRRIKRLALKDVFEKLPPCIVAMEACLSAHFVSRTLRALGHEPRIIPAIYVKPFVKGQKNDYNDAEAIAEAALRPNLRFVQEKSQDQLDLQACHRVRSRLVSRRTATINQIRAFLIEQGIAVRAGPRALRKSLFPILENRKDEISPRTAKLIRGLYDDWCCLDERIETVTGEIEILSRSEAKCRQLMSVPGVGPLISTAMVAAIGSGEAFERGRDFAAWLGLVPRQYSTGGRSILGRISKRGSKYLRTLLIQAAKVLLMRPHNWVRYSFGPWLNAASERLHRNKLAVALANKLARIAWSVLRNDKAFDTHLEVAAI

SEQ ID NO: 113994 - protein, 336 aa, unidentified
MFQLGIDVSKKTLDLCLLREGVKGRVKTRKLQNDINAVSAVIAWLSKQHCKPEDVHIIMEATGVYHESLAYGLHKAGGRISLANPHRAREFARGMGMLTKNDRVDAYMLACYGVLKAPEPWLPPPEEVRHLSALLRRRDALVADSTREKNRLEKYLATDTPSVIAESVEAMIGQLNAEIKRLDRLIRSHLNQHPELKKDFDLLTSIKSVGYQLGLNMLVILRSHDFATAEQVAAFLGVVPVEKYSGTSVRGCPKLSKSGPPEIRSYLYLASLCGLRFNPLMKAMYERLCLRGKGKMCAIGALMRKLVHWCYGVLKTQKPFDVGYLPSYARSACKAA

SEQ ID NO: 113995 - protein, 345 aa, unidentified
MTEAYDGRQVVGMDLHRRRSVLVRMTEDGRKLETVRIENSPAALRAVIARAGEKPRVVIEATYGWYWAVDVLEAAGAEVHLAHPLGVKAFSYRRVKNDERDCIDLADLLRLGKLPEAWIAPLEVRGLREVTRFRHKLVGQRTSCKDQVHAVLAKAGIPVARSDIFGPGGGIWLDGLPLAQPYAGKVASLRALIAVLDGQIGQLEEQAAGMLAGERGYAAIRQLPGIGPVLGAVICAEIGGITRFGTPGQLCSRAGLTPRHYESDTRVIRGHVSRQGSRMLRWALVEAIQRAPAGTRPQQVKDAIIARRGDQARGIAKTAAARILLTQVFYSMRDGHVRRASSQAA

SEQ ID NO: 113996 - protein, 348 aa, unidentified
MRFYTKQHKYSCGIDLHARSMYVCILDEEGKTVLHKNRKATPEAFLRAIAPYREDVVVAAECMFVWYWLADLCAKEKIPFVLGHALYMKAIHGGKSKNDRIDSHKIAALLRGGTLPKAYVYPRKMRSTRDLLRRRNYLVQKRSELLAHIQNTNSQYNLPEFEKKIVLKANRDGVAEHFPDPSVRKSIEVDLELLDSYDRLLRELERYIEKSAKGHDVHSWYLLRSIPGVGRILGLILLYEIHDIRRFPRVQDFVSYCRLVKCPRESGGKKFGAKNTKVGNVHLKWAFSEAACFFIRDNEQAQHYLSRLVSKHGKGKALSIFAHKIGRAVYFMLKRKEPFNMEKFFAHA

SEQ ID NO: 113997 - protein, 385 aa, unidentified
MSQLNDLSRSLTSLEQDNTIIAVIEMSQSSWLVAGIVPGIERHPLKKLEPNEGELLRLLMRWRAEAIKMGCTITRIAVAYEAGRDGFWLARWLRAHDIETYVIHPTSVAVSREHRRAKTDRLDTGLLKRVFIGWLRGEPDHCHMVTIPTLAEEDAKRPNREREGLVRERTRIVNRMKSCLARFGVRSFKPTLRKASERLATLVTPEGVPLPANTLLELRRDMVRLRFIMDQIKEVEETRAQRLEQAPQEKSHAMVRLLARVIGVGIETADMLVHEILSRSLRDRRAVARYAGLTGAPDESGSRRQEKGLAKAGNARVRRGMIQLAWRFLLFQKDSALAQWYRTRTESAGKKRKTMIVALAQKLLIALWRLATIGEVPVGVVLRAA

SEQ ID NO: 113998 - protein, 353 aa, unidentified
MGHKYVGLDVHQSSTVAAVLDERGKSVMESILVTEAEGIRDFLKGLRGTIHVTFEEGTQAAWLYEIVKPVVAEVIVCNPRRNKLLAVGNKADRVDANKLAELLRCGQLKPVYHGTPAVRLLKELVHSYDSLVSDTTRVMNRVKAIYRGRAIGCAGRDVYYQRNREQWLEKLTEPGVRQRAMFLYQQLDTLRGLRREAKKAMLKESQRHRAYATLKQIPVLGPIRIAQILAKVASPQRFRTKRQFWAYCGLAVVTRSSADYHFVDGRAQKRGRPPMTRGLNPNFNHRLKYVFKSAALDGIHQAPFEGYYARLLVKGIRPEMARLTLARKIAAVTLTLWKRGERFDDLKVSEQAA

SEQ ID NO: 113999 - protein, 394 aa, unidentified
MILVGIDVGKNSHYFTIVNKQDGEVLLEPSKFNNDLDGFNLLLSSIKSYKKDDVLIGMEDTGHYHFTLMKHLLDKHYTVALINPVTTDLTRRANGSVSKTDKLDTYTICDILASNNIKKPYRISKVNRFDLYEQRCLTRHHHNLKEELNVYSNRLQKCIDIVFPEFNDLFTSKYGVVYNNILKTFTSAANIAKADIRSLRKCFEFKGRGKRISLTADKLKQAAKDSIGIDSISEVIQIRHLIEQIELINKQLEEIDKKIEEFSKQANSPITSIPGISHFSGTSILAELGDINNFSNHRQIIKYAGVAPLTYESSQFKAQHTSITKKGSKYLRKTLYQIILPVIKHNKIFREYYNLKISQGKSHRCACGHCIRKLLRIIYHLLTNNITYDPSLVR

SEQ ID NO: 114000 - protein, 310 aa, unidentified
MEQIYVGIDVAKDRLDVHVLPSREAFAVARDGEGLERLIERLAALKPALVVLEATGGYETVVASALAGAGLPLAVVNPRQIRDFARALGRLAKTDALDAQAIALFAERVRPEPRPLADAEAKALAELVQRRRQIVEMMTAERNRRQRLGSPRMRKSVDRLLAALQKELSALEADLDDAIRGTPAWREAEDLLTSVPGVGDKLARTLIADLPELGQLDRKQIAALVGVAPLNRDSGHMRGKRTTWGGRAKVRAVLYMAALVAAHHNPVLTGFYQRLLAAGKAKKLALAAVMRKLLTILNAILRDKTPWQTA

SEQ ID NO: 114001 - protein, 362 aa, unidentified
MTKATCLVGLDVHARQTHAAVLHLESGELGVSRLRMAPDEVVSFLAGLPAPVVAVYEAGPTGFGLARAAGTRGIDVRVVAPGSVPKGSGDRVKTDRRDAIRLVRLLAAGELRFAFVPTVEDEAFRDLVRCIEDARGDLMRARHRLSKFLLRRGERFEDAQAWSARHLRWLRALAFEDACSQASFADYCASVELLVGRRGTLLGVLEQQIPQCTHAPVIARLRCFRGIDTLSAAGLCAEVGSFQRFPRPALISGFLGIVPSEHTSDLKRRQGAITKAGPGHARRLLVEAAHHYARQPAIGPTLARRQDGQDPRVIEIAWRAQRRLHQRWQHLRGERKKPSGVVAIAVARELAGFLWEAATLDV

SEQ ID NO: 114002 - protein, 325 aa, unidentified
MNIIGVGVSKAKLDCAWLKTDSKIKAKTVNNTPEGWQQLVLWAQQNAGLEIGGLHFVMEATGIYHENLAAWLYDHGANVSVVNPAHVKHYAQSLGVQTKNDKKDSAMLARYGQREQPSLWQPAPAEVRTLKALLARLAAVEKDLQREKNRQEKAIVADTPDTVLKSITHMIGLFEAEQAALEKLIDEHIKKHKKLKDNKVLLESIPGVGKVISRQMLMVLGSHQFASASQCAAYLGLVPVQKESGSSLKGRPQLAKNGSPKIRAKLYMATVTATRYNPDIKAQYERLTGKGKSNMSALGAAMRKLVQICYGVIKHQQPYQPQVAV

SEQ ID NO: 114003 - protein, 414 aa, unidentified
MEDWPEATPVFLIIPREVFVMNCFVGIDVSKEKFDACGIGEQEEKIFSMTCSMNRVGFEKFIVQLPTDKTSFLLGMESTASYHIALFSYLAAKGYRVVIINPLLIANFAKRSLRKTKTDKKDALTIAQFLLREKEAFSLQISSSLVAELKDLARRRERLADHVTSLKADMKRLLSVIFPELEHITGVFTKATLRLLMKYPSAHALQRADLSDVADVFKSEIQGNRPRTTVKALMETAVSSVGVASPAKELALKQETSLLIHVQDQMEEVTKLLMSLLNERMKQDMDILCSIKGVGENTAINFLIEMGTEVEMYENDKKLIAASGLDPSTYQSGKYEGKSRISKRGNRHLRRVIWLMATRVIISNNIFRTYFYKRRKEGLPYKKAVLATAHKLIRVMFVMLSRKSFFVEGGIKYS

SEQ ID NO: 114004 - protein, 335 aa, unidentified
MESTKYVGLDVHTEATTIAVMKSAGKLIMESIIETKAITIRQFIQGLRGDLHVTFEEGTWAAWLYDLLKPHVTKVVVCNPRKNALLKEGSKSDRIDARKLAELLRNGSLSAVYHGENGLRMLKELSRSYLTISKDLGRVMNRLKALYRSWAIPCAGAQVYAPRYRSEWLSKITEAGVRRRAELYYQQLDALRFLRQQARKELLAEGRKHSATLMQTPHRFRTKRQLWNYSGLALETHDSAQYCIVEGQLQRSKKPQQLRGLNANHNHDLKDIFKGAAMRASTCDGPFRNFYETLLAKGMRPTMARLTLARKIAAITLIVWKKGASFDANYLKQAA

SEQ ID NO: 114005 - protein, 411 aa, unidentified
MIKENYIYVGIDLHKETHTAVMIDCYNQKLGEITFPNRPADFPKLVAKVKKCNTDGKTIVFGLENAYGYGRALAVWLIDKGYLVKDVNTAISHRQAKHRGAMYRKSDSDDAEAIALATLNMLDKLPDACPNDAYWSLGQLVHHRDNIMKQRTRLVNQLHEQLCIAYPSYKSFFNDISRPTALYFWEHYPSKKYLKGKSVEDLRAELVPVSHNKCSTKTCEKILDAVASDKVKNNAYQDARDMVTLSIVSDLQHYDSQLAEVDKMLEQMYKMLGCTLTTIPGVNVITAVKILAEIGDIKRFSNANKLAQFAGIAPLHLSSSGKGKDVATKQGNRRLQATIYFLAIQMVQVSSKGTPRNSVVRAYYEKRKAEGKTSQQALICISRRLISIIYGMLKNGTEYRMPVVENAGETV

SEQ ID NO: 114006 - protein, 362 aa, unidentified
MTGTLPVPGARRRRPQGEVVLGVDTHRDVHVAAVISSVGAVIDTEEFPTTTTGYRELLAWARRLGTVRRAGVEGTGSFGAALARYLLTQGVAVSDVNRPDRTDCRRRGKSDPVDAQNAARAVLSGRARAQAKSGDGPVEIARMFKLAKSSAVKARTQAINQLKAVLVSADPNLREQLAGLGNAELFRTCARLADEGQHDDDNGGGEAVLQATRTTLSLLAQRIGQLTEQIQDLERRLAHLAERHTPQLLTVVGIGPDTAVTLLITMGDNPERLASEASFAALCGVSPVERSSGSRRYRRLNRGGDRQANAALHRIVQTRLRVDPRTQDYYERRTKEGKTRREIIRCLKRYAAREVFHLVRPA

SEQ ID NO: 114007 - protein, 348 aa, unidentified
MIIIGVDFHPEFQQIASVDTDSGEFLEKRLAHREEAEKFYRALAGQKVRVGMEASGHARWFERLVGELQFELGIGDAAEIRTKRVRKQKTDRQDAQLILRLLLEDRFPRIWVPSWENRDLRQLLWHRHRMVQARTRIMNQLQAVALNEGLCCKKRLWRERGRQQLESFRLAPWASRRRRDLLELMDRLNPTIAELSQAIEQEVEKCPAAQRLATHPGVGPLTALAFVLIIGRAERFQCGKQVASYLGLVPLEESSGNRRRLGHITKQGNALLRFLLVEAAQVSVRSIPEWRNKYFHLMMRRGRKIAKVAMARRLAVQMFWMWRKGWDYEQVRKFGSHAGQPGHRDGVQ

SEQ ID NO: 114008 - protein, 385 aa, unidentified
MTKQLQDTGFIARNYEIFGGLDVDKKSMAVTFRDHGIMRKSLRLPYSASDLLNYTRKHFPGQRVAFVYEAGPTGFGLHDELTAASHPCLVVSPSMVPTVQRKRVKTNRLDSLKLAEGLRGGQLRGIHVPPPSYRELRHLVQLRDTQVAQLRATKCRIKSLLLYEGIPFPTANGKWSGPALRELEALPCNATVRFKLDQLIDALQFHFQSAAKVQKQIRYFCQNDPELRGCISFLVSLPGVGTITATHALARLGDWRQIKDVRQIAGFLGLVSSEHSTGDKENRGEITRIGDSRLRNKLIQCAWTAIRKDPELRAFYRRIYERQPRKVAARKAIVAVARKLTTRMYAVLKEQRPFVIRADSSIAPLTAEETGGPRERLDAAQNEQP

SEQ ID NO: 114009 - protein, 393 aa, unidentified
MRTKTKVTQIGWDSHRKFSKVTARDESHRVIWRQRVDHSDREAIREQLHAWPEGTPVILESTFGWGWISDELLEAGLDPHLANSRKVAAWRDARGLAKSDRVDADLLSELWSQPSRWWEVWLAPPEVREQREWLRYRMSLVAIQTGLKNRTHAILHRHGIVNEHADLFGAQGRRFLSFLAGPGDMRLPESARVMLKGYLQLLDHLRRQIARVTQEFRRQLVRTPEGQRLMTLPGIGQILVYTIVAEVGRIERFADGRHLAAYSLLAPRANDSARENEAEAPKGRHVGHAGRRTLKWAWIEASHGAVRRGGRFREIYDRRTNGGTRDRNRGYIAVAHELCRVAYAMWSKETDYREDRPARPGATILRTELSSGNGPARPPYGRCRRKRQLQTSK

SEQ ID NO: 114010 - protein, 343 aa, unidentified
MIYVGVDLHLRFCYMTVLDASGVILRQGRVLNDDENLRLFFTGLKGSVEEEQEIIVAVEACGFWCAFVDCVEPLVAQVVLVHPAKVKAIASAKLKNDRVDSATLAQLLRANLLPEAWKADVTTRDLRELLRMRTALGQDRTRYKNQIHATLHMHGERAPVSDLFGCAGRAWLATVSLRAAARQALDTSLRMVEQLDLEVHALDRQLQQMAKQDPDVRCLMSIPGIGAFTAMVLKAEIGDIRRFRDKKSLYNYAGLVPVIRESADHKRSGGITRAGSRQLRWVMSEAALTAARYSPSAHAWFTRLAQRKHPHVARTALARKLLGAVWALWTHGVCFDERIFAAM

SEQ ID NO: 114011 - protein, 416 aa, unidentified
MLFIGNDWAEDHHDIEIEDEGGRRLARARLPEGLEGITRLHALVAEHARADWAELPPEQVAGHVVVGIETDRGPWVTALAAAGYQVFAINPLSAARYRERHSTSGAKSDAGDAHVLAEIVRLDRDHHRPIAGDSDLADAVKLVARAHQSAIWERTRHVLRLRSTLREFFPAAVQAFEDLAAKDALALLARVPDPTRAAKLTRGPVVAALRAARRHHVEVKAEELLTVLRAPGLRQPPTLQGAYAAVVVGEVNIITALNAQIAGLQEVMAEHFGRHPEAEIYLSQPGFGVVLAARTLGEFGDDKNRYANARARKNYSGQSPITRASGKKSVVLARYATNRRLGAALHLQAFAALGASPGARAYYDALRGRNIGHHAALRQLANRLVGILHGCLKTGTTYDEDTAWQHHRSDAGNVAA

SEQ ID NO: 114012 - protein, 463 aa, unidentified
MRTDKKLWRNRKARKELARRLQSENPGLEVVHPHAAGIDVGNSAHYVAVRPDRDSQPVRRFECFTAELQHLADWLQSCGVKTVALQSTGVYWIPLYDILEERGFEVYLVNAQHTKNLPGRKSDVQESQWLLKLHTYGLLNNSFQPPSKIRTLRTYWRQRLQHVTGAATCVQRMQKALTQMNIQLANVISDLSGVTGQLIIRAIISGERDSWRLAELSHPRIQASRAEIAKSLEGTWRSELIFVLQQELEMYDTYQRRIAECDQQLQKHLAAFADTVTPPVKEELPAKKKKKQNKNNPHFHLADELQRISGVDLTRIDGVDVFVAQTVISEVGLDMGRWKTEAHFASWLGLCPDNRISGDKLLARGTRHVLNRAATALRLGASTLLKSQTYLGAQYRRLRSKLGAPKAITAMAHRLARLVYRMLKYGQQYVDKGAEYYERRSRQQQVHFLRKKAARLGLQIIPA

SEQ ID NO: 114013 - protein, 349 aa, unidentified
MRTSTIAVLGVDLGKNSCSVVGLDVTGRVILRRRLRREGVIKLAAELPACVIAMEACCGAHHLGRAVQGYGHEVRLMSPEYVRPYVKAQKNDDRDAEAIAEAATRPTMRFVEMKTEAQLDMQSLHRARDRLVGERTALINQLRAFLLERGIIVPQGRRKLEQHLNSMMGEGAAARMPISERTRRLILDMRMQWQSLDDRIAALDSEFKAHAETDERAKLVSTIPGVGPLNATALTAAVGDVRTFGRARDLAAWLGLVPRQETTGGKPKLLGISKRGNGYLRKMLIHGARAALPSLAQSETLIGQWLRGLLARAHKNTVVVALAAKLARIVWAVLRSRKSFDRQAAPAAV

SEQ ID NO: 114014 - protein, 416 aa, unidentified
MNAAGIDVSSRKSTVAVLRPFGEVVRFPFDVRHSAEDLAALAAQLKSIDGETRVVMEHTGRYYESIAKALHEAGLYVSAVNPLLIKEYGNNSLRKVKTDKADAMKIAKYALDNWSELRDYTPMDTIRYDLKTLNRQFQLASKQKTATANNLIALQEQSFPGIRKLFDSPVRSDGTQKWVDFTHDFWHVDCVRGGSQNAFTERYRKWCKRNHYLFSMEKAAEVYALAKSAVVMVQKTSVTKTLVQEAANQLTAISRSVETYRSEMNKLASQLPEYPVVMEMYGVGESLGPQLMAEIGDVRRFERKQSLVAFAGIDPAPSESGNYCSHSNRTTKRGSPYLRKTLFNIMTVHLQRAPADEPVFQFLDKKRAEGKPYYVYMTAAGNKFLRRYYGKVMAYFSTLEDLPPVNMDSTGLHRTE

SEQ ID NO: 114015 - protein, 430 aa, unidentified
MKSNTQNAKIEAITEKTLVLGIDVGSEMHYARAFDYRVIEYSKKPFKFSNTEAGFATFKEWVLDLKERHEKDKVVPGMEPTGHYWFNLGKFLQDNEMKPVLVNPHHVKKSKELDDNNPTKNDRKDPKVIAGLVREGRYMIPYLPEGVYADLRTASNIRFQLQAELTRIQNRISRWFNIYFPEYKTVYGKPDAKSGMLILKAAPLPEDILTLGIDGVNQIWRDAKLRAVGKARAKPLIEAAEHSVGSKEGAVSARMEIRMLLEDYESRNTRLQEVMVLIEELVRKIPMAEKLLEIKGVGIRTVSGFLAEVGDISRFNNPKELQKLAGLALVENSSGKHKGETTISRRGRKRLRYLLFEVAMSLVSKNQEFRELHNYYTTRRLNPLKKMQSLMAIAAKLIRVFYAMLTKGVDYDPKKMVSDIKRPAVYLQAA

SEQ ID NO: 114016 - protein, 445 aa, unidentified
MREETTAGSDPRIAPRLIVPMSLQLVIPRRVALQQSSPPLHQPSFILKEKRKFEKEKCMERHVCRFQTAPLNRGAHPSRLWFIDDRRLGRREPNMMLIGVDYHPSFQTIAFVMEETGECDEQDLNHSDGQAEKFYRDLKQRGICVRVGMEATGYSRWFERLLAELGFEVWIGDPAEIKTKRVKKKKTDREDARLMRKLLLENRFPRIWVPDPENRDLRQLLWHRHRLVQMRTRIMNQLQALAMNEGYRWKKKLFSEQGRALLEKLSLAPWASRRRQELLELLDRLNPTIEELTAAVEREALKRPAAQRLMTHPGVGPLTALAFVLIIGTWERFPRGKQIGNYVGMIPSEDSSAGKQRLGHVSKQGNSLLRFLLVEAAQAAARCNPDWRRRYIHLAMRRHKSIAKVAMGRRMAVRLYWMWRNGREYSPSLEFGSYAGQLGTGHGVK

SEQ ID NO: 114017 - protein, 382 aa, unidentified
MDNNKSVSTAGDEPASAEQGSKGVLKLGLDMHYRQVTVAMQQEHGPIKAVGKLSHEGFWAWVEKKHKEGWQIYSCYEAGASGYWLHRDLVALGVKNEVVAPKPTGQDRRQKTDRRDSAELLDCLDQYVRGKKTALSPVAIPSPELEQNRALVRFHRQLMADRGRYESRGKGLLCAQGIELRGKWWSTEAWKELKTHPRCKAWIEQQLRSWRGKLLALNAQQAEVRQRIEALAPQELPKGLGAYSAVALECEMKGIAHFDNARAVSSYTGLCPGIHSSDGRGKEGSINRCGNAAVRWNLVESMWRFAVWQPNYEPARQLRLALVKSKRAKKRLVVKAARQLAVDLWRLQTGRVTAQELGLVMQITSRKPGRRPRTGVQKERPH

SEQ ID NO: 114018 - protein, 315 aa, unidentified
METTTPTTEVTYVGLDIAKDRLDYTVDGIRCDHVPNTPSGHEKLLSVLAKLRGVRVICEATGGYERAVVAALLLAKHEVCVTNPGRVRAFAHAEGLLAKTDRLDALLLRRFGEKVQPRLHAPMDQAAITLRELLDYRRQVSEQLVAVRNRLELAGPVLRARLDGQVTFLEKELTATDRLIQDHIDHDDTLSRKAARLRELKGAGPVLAATMLAYLPELGEIESPQLSALVGVAPFARDSGRSHQARHVRGGRGLVRRVLYMAAVAATRHNHVLRAYYTRLVAAGKPKMVAVVAVMRKMLHVLNRLLADPNFVLVQ

SEQ ID NO: 114019 - protein, 333 aa, unidentified
MNQVRVHIGVDVGKEWLDVCYPDGKKDRIRNIKSCRTKLIGKASRLGAIISFEATGPYEEPLADECLAKGVRAVRLDAWGARRFAESQGRIEKTDRIDCEMIRDYAASLKAEKLHFIKPRSEAQKRLKKNVSVRRNLMKARAIVYNQLEYIRDRDSRRHLESSIAKLDGEIARIEAECDKAISDDERMKHLSDRFLKVKSVGPCLVRTVLACCPDIGDFNSKSIAKMCGSAPIDHESCTVRYKAKPKRGRPDLKKALYMAAVSASRCNHVLRAFYQRLVSKGKARKLALTAVARRIAILLNNIARYPDFVPAQDPKDIARAEIRKLRRPRKDA

SEQ ID NO: 114020 - protein, 384 aa, unidentified
MRTAKKSGPGPSHLLLTPDHAGNVVGIDPHKRTLTATVIDPCGGIVASEHFRVSGEGHRELEVWARQFGQIARWGIEGSASWGRHTAVFLTGRGCDVRDVCANRTPRSDRARQRGKSDTLDSERIAREVLAHPLLPRAFKRAGPEQGPDEPHQLLALWHNRRRSILTSRQHLVGEAEHLLCDLPLQLREQLPDTTAVRPRLAALGRRNRRRRYDAPTRLRLALLDGYRAQIGALDREEKEVVAKLRELVAASGSTLAELCGLDTRSVAELLVEVGDPRRFTEGGFARFNASAPLAASTAEGPGEPVRHRYNPGGNRRINAILHRMAVTQLRCEPRAQAIYANARARGHTKKEARRILKRHLSDVIYRRMTRDLASHSAQPLLAA

SEQ ID NO: 114021 - protein, 319 aa, unidentified
METPQVSFNQVVSRGCGLDVHKKVVVATIDGEGIKRQTHEFGTVTSSLKELRDWLLEHGITHVVMESTGVFWKPVYNVLEPSGLTVWIVNAAHVKYVPGHKTDKKDSAWLCKLLLAGLLKPSYIPAREQRELRDLTRYRTTLIQSNASNKNRIIRILEDANIKLSSVLSSTSGAVGTRLINKLCDGKEVTMQDVEEVYHKKLGATKEEIYEACQGFITAHHVYMLEIIQREIADTQRTVESLNNRIKKVLTPYENALELLKKVPGINSKSVEDLVAEIGLDMSVFPTEKHLCSWAGMSPGNNESAGKKKVQEQPRETSK

SEQ ID NO: 114022 - protein, 406 aa, unidentified
MSAYRFYVGLDWATEAHRVVVQDAERQGVAERTVPHEGGALEAFAAWLSELAAGVPRDVAVALESPRGAVVDILLANGFHVFALNPKQLDRFRDRYTVAGAKDDRRDATVLATALATDQPAFRRLAPEHPLVIELRELSRLEDELQQELQRLTNRLREQLHRYFPQLLQLVPAANEPWLWALLERAPTPSAAQHLSRAALRTLLTRYRIRRVDADAVRALLQSPALPVAPGTVQAAQRHLAVLLPRLRLAHQQRAECATLIEDVLERLGEQQEHRDVPILRSLPGVGRVVAATMLAEASRLLAARDYHGLRTHTGVAPVTKQSGKQWVVMRRSACNRRLRDAVHYWGQSVVRHDPRSRAHYDRLRARGHSHGRALRGVVDRLLRVLIAMLTTQTLYDSNRRLPIAA

SEQ ID NO: 114023 - protein, 451 aa, unidentified
MATVKPQVIDDEQHERVYERVAAVDVAKDSGMVCTRMPHPSRPGARQSAVWTVKARMAAVGALGRQLKRDGIQMVTLESTSDYWRIWFYVLEAAGLAVQLVNATQAKNLPGRPKTDKLDAMWLARLTEMGLLRPSFVPPAAIRALRDYTRARTRLTQERARCFQRLEKLLEGALIKLSSVASKLTTESAKDMIKAMIAGERDPHTLAALARTRMKAKHDDLVEALAGMFDDHHGELAQLLLDQAAFCDTRIGQLTARITASVAAMPAAWGVDADGTTGPDAGTGPDAAALPAVARLAEIPGVSPGLASSIIAETGLDMSRFPTAAHLVSWAGLCPRTSQSGPRTHAGKKNQGDSWLRSHLGIAAAGAARTSTFLGERYGRIARRRGKAKAQVAVARSILIIIWHLLSDPAARYTDLGAGYYQARLDTDRKIRNHIRQIQALGFDVTITKAA

SEQ ID NO: 114024 - protein, 361 aa, unidentified
MTTMTYPPSDARRVIGGVDTHKDIHVGAVLDENGRLLDTGSFPTAVAGYRHLWRWMCGHGDVVAVGIEGTGAWGAGLSRYLTAQGADVREVMRPNRQHRRRYGKSDEADAIGAARAVLAGEAVGTPKSQTGTVEAIRLLRIARRSAMKARTQAGNQIHAVIDTAPEGLRRRFVGRPIVDIVAEVAQFRRRHLPDTPFEAARLTLRTLGRRWQDLDDEITMLDDHLDATAPTLRAINGVGAQVATALLAAAGDNPERLRSSSSFAALCGVSPIDASSGRQQHHRLNRYGDRHANWALHVVIISRLRWHAPTKAYMARRLAQGRTKKMIIRCLKRHVIREIHRAITTDLDHRPEHDRASRIAA

SEQ ID NO: 114025 - protein, 357 aa, unidentified
MNTIGVDFHKRTSTFQVLNEQGEPVKRRKIENNTQTLREFIGSVPGPKRLAMEATRSWGLFYETTNDLVDQFCLGHPKKMVALTTAEIKNDNNDAMMIARLAHMGLLPKAYVSSLPMRELKGSLRLRGFLVNQRRGIRNQIQGLIDRNVWPSDRPASFKSPFCKKGLLWLSSLKLSEKERFILDESLNIFKELNDNIDNIDRFLQSQSVDVPGLAYLRSVPGFKSGGINAYRVLIEISDIARFNNSRGLLFYAGLIPREHSSGDKQRKGRLVKNANLNLRTALIESTFAAIRQDKALKSFYKTAKERSGSGAAIIATARKLACAIYYALKEQKKDDPTYLVPSATACHSSQPRLSGD

SEQ ID NO: 114026 - protein, 345 aa, unidentified
MTIIGCDLHSRYQVVAWVNQETGEILTRRLEHEDGEAKRFYSGLPRGARVGIEATFPALWFERLLQECGHELWVGDAAKIRASETRKQKYDGRDAEHILDLLVASRFPRIWTPSPAERDLRQLLVHRMKLVRARTAVKNQLHALAMSQAVCRKHKLWTAKGRAELEGLTLLPWASQRRKALLGMLDQLDAAIQPLDQAVEKEAQSWEDAVRLMTHPGVGAVVSLAFVLTLGPVGRFPNSRKVVSYLGLNPRENSSGGRQHLGAISKQGSSMMRWLLVEGAHRAVVYDPELRRAYQRLKFRRASGVAKVAMARRLAVRLYWMLRAQVDYAQLVRMSGSPSSAVVPK

SEQ ID NO: 114027 - protein, 340 aa, unidentified
MEIRTIGIDLAKDVFELHGVDGKGRVVLQRRLTRKRLLECLAKLPACLVGMEACGSAHYWARAISQLGHEVRLMSPQFTRAYLRGNKNDANDAAAICEAVSRPSMRFVPVKKQPQQDIAALHRVRAQLTKSRTALANQIRGLLDEYGIAVVRGIDRLRRALPVILEDEANGLSGMFRETLAEMAERLQWLDERCQRYERRMELVFRQDEGAKCLGQIEGVGPLIATALVAAVGNAREFKSGRELAAWLGLVPRQYSSGGRRVLLGISKRGDRYLRTLMIHGARAALRVAQRKCDPRSVWTSRIKLRRGPNVAAVALANKNARVMWALLVRGDNYRTLAAA

SEQ ID NO: 114028 - protein, 427 aa, unidentified
MAKVEHTSDACVLVGIDISKHRHEVLIAAPGKTRRRRLTITNTTDDFQRLIGILREYNMQVRIGFEATGNYHRVLMYHLGVAGFDLKLVSSVALARTREALHNSWDKNDPKDAQVILHMLQIGAVQIFQDPMVAGTNDIQELSKTHDAVSRAKTELWHRILTHYLPLYFPEAERFHRSSRSDWFLAFLEMFPSPHMISAMSKEQFIKAAWDVVGRKVEKTRMLSDVYETAKASTGLPVSPESDAIRMFRMMLAEGRSLIRQRNAIEDRAVELLADRPDYQLLCTIPGIGPINALTVLAETGDLRRFRHHRQFLKFCGMDLATVQSGMFRGRSKISKYGNARLRRTLWLAGQTAVLHKANSFRDKFERYIAQDRHNPDLRRKAYTAIAAKMARTIHAVIKSGELYRPFFEGTSPGGRTPLWRAVEAGS

SEQ ID NO: 114029 - protein, 320 aa, unidentified
MSKNTKFIGIDISKKVFDVWSEDLGHKQFKNNKEGFIKFSELLHVDNWCVMEYTGSYYQQLAIYFYENEIAVSVVNPLVIKRYIQMKMQHNKTDKIDARMLAFYAMEQGVSHWVPSPDYITSCKDMQTTITLYFRQSTALKNKLISLQDKGVKGKVITSLKRQIRHIQQEIKLLEQEIENLVRTEKQELVTNLQSIPGIGKKTAIMLIVTTNCFSTFDNARQVSAFFGLSRVETTSGTSIKKRSKISKRGNPVMRNYLFMCSFTTSYKNPQCKALYDRIVAKGKSKKLALIAVMNKLLKQAFAISKSGVRYNPEYKSIWS

SEQ ID NO: 114030 - protein, 402 aa, unidentified
MNAVGIDVSKGKSTVAIYQPGDQVVLKPCDFQHTQSGISSLIGIIKELEGETKVCMEHTGRYYEPVATWLSDAGFFVSAVNPILIRSFGDDSLRSPKTDKADAKKIARYTLDRWTRLKQYSHMDETRNQLKTMNRQFGFYMDQKTAMKNNLIALLDQTYPGANAFFDSPARSDGSQKWVDFVYTYWHVDCVRGKSLEAFTEHYKNWCKRKGYNFSTAKAEKVYRDSADLIAVFPKDANIRMLIHQAVDMLNLASMTVESLRTEMDQTAAMLPEYPVVMAMNGVGPTLGPQLIAEIGDVTRFVKRGSLTAFAGVDPGKNDSGKHSQKSVPTSKKGSPHLRKTLFQIMDGLIKRSPIDDPVYAFMNKKRAQGKPYYVYMTAGANKFLRIYYGRVNEYLSTLSED

SEQ ID NO: 114031 - protein, 372 aa, unidentified
MKVAGNAVGIDLGKKTHEDCFISPEGKKIRSNGKTDFNGIERLCEKLHKDDAVAMEACSLAFRIERTIREKVGCKVYILNPAKLAVIFMTNRKTDREDSMKLAKLLRSHEEDELPVVTPPTDEEMNRRKLISEYRSLKSKRTKEINRLHAIFEHNGFTQFVRKDMCVPKNRQNILPLLNGYEQAEGKRLEERLELLEKQIAALEQRIQEESEHDDKVQKLTTIPGIGNLTALTFVAYVGDVNRFENRHQVSNFIGFVPKVDRSCTINRLGHITKQGNPILRSLLVQAAWSCVRSKSGGALKEKYKYMSASRGIGSGKSIVTIARKLGELMYTLLKTEQVYEPKKFISPEQHCSSLAKDALFLQTRGLEEKTI

SEQ ID NO: 114032 - protein, 344 aa, unidentified
MKHYAGLDVSVKETSVCVIDEAGKTIREIKVASEPEALLAVLVDDALTIERIGLEAGPLSQWLCSGLAEAGLPVTCVETRHMKAALSAQLNKSDRNDARGIAHMMRVGLYRPVHVKTLASQKRRMLLTCRQLLQAKALDIENDLRGTLRNFGLKVGVVGTAKFEARIRELVADQPDLAAITEPLLIARRVLREQLGVLHRRLLAVVRQDEVCRRLMTVPGVGPVVALTFRATVDVPARFKNSKAVGAVFGLTPRRYQSGEIDRTGSISKCGDAMIRTMLFGAAQVMLTRTIRWSWLKAWGMKIARHRGMKRAIVAVARRMAVIMHRMWADGTEFRWTNPNAAAA

SEQ ID NO: 114033 - protein, 353 aa, unidentified
MTNTIIETIGCDLGDKRSEICVLDGEGNVKLRTSVRTTRDWMRAFFTRAAAHVVIEVGSHSRWVSELLRQLGHRVTVANPRRVKLISASDTKTDRHDAELLARLGRADVKLLAPVQHRALEAQTDLAVAKARDVLVATRTKLVNHVRGIVKSFGERLPKCAATSFARQTRPLVPDSLKSALDPVYEVLSRLDGQIKECDQRIERIAARCTDVNAVSQIPGVGALTGLAFVRTVEDKSRFAKSRMAGAFFGLRPRKSKSGDSDPQLRITKAGDPFVRRLLVNAANYILGPFGPDSSLRQWGLKLAERGGKNAKKRATVAVARKLAILMHRLWVTGEVYEPIGYQSRRQETAAAA

SEQ ID NO: 114034 - protein, 355 aa, unidentified
MNQEKYIGMDVHDATISAAVKNAEGKLLMECVLETKAATILDFIQGLRGTLALTFEEGILAAWLHDLLKPHVSRLVVCDPRKNALMRDGNQNDRADARNLAELLRTNQVKAVYHGKHGTRALKELGRSYLTLTKDSTRVMNRIKSVYRSWAIPCGGTSVYSRRHRAEWLAKLVEPAVRIRAEHLYQQLDSLEPVRQAARRELLGESRKHAAVKLLRQIPAIGPIRSALLVAILQTPHRFRTKRQLWAYSGFAVQTYDSGEYRMVRGKRQRNRERITVRGLNRNHNHDLKNLLKGAAISAIQRPGPLQDFYAALVEKGMRPSMARLTLARKIAAITLTMWKKGVSFDPKQLQRQAA

SEQ ID NO: 114035 - protein, 355 aa, unidentified
MTSVKYIGMDVHTESTSIAVRNSLGKIVMEGVIETKANTILQFLDGLRGDLRVVFEEGTWATWLYDLLKSHVTEVLVCNTRKNAVRKGSKSDRIDARKLAEQLYMNNVKSVYHGEHGLRMMKELARSYLTITKDLVRVMNRLKALYRSWGIPCAGTEVYAPRYRAEWLAKISEAGVRCRAERYYQQLDALWPLRQEARRDLLVESRKHKIWKLLRRIPAIGPIRAAILIAVMQTPHRFRTKRHLWTYSGLGLETYDSAEYRTVRGQIERSRKQATVRGLNKDYNHDLKDIFKGAAMRASTAAGPLRDFYDNLLAKGRKPTMARLTLARKIAAITLIVWKKEVRFDANYLKPQQAA

SEQ ID NO: 114036 - protein, 397 aa, unidentified
MYIVGIDIAKRKHEAAVIDGEGTVIIKPFSFTNNCSGYNRLLAMLTKAKLPLDEVSFAMEATGHYWLALFTRLQKEGFRVQVINPVQTNSIRSFYIRQAKTDPRDALLIAEVIRFGHFSESTLHPENIYELRELCRGRHAIVSMQADVKRKVVALLDQVFPEYETAFTNLFGDTSMAILQTCPTPKELSEMPFEELCHLIEVSSHKRFRMAKAQELQALARNSFGFAMAGDVFSTMIRLYAKHLDFLKQQVREMDCKIAEIMETLDTPITTITGIGPTLGAYILSEIGDISRFSSAAKLAAYAGIDPTMRQSGEYNGVRNRMSKRGSPYLRHAIWLAASSAVLHDPALKLYFQKKRDEGKPYMASVGHACRKMVSIIYAVMRDNKAYTPCIPNEISA

SEQ ID NO: 114037 - protein, 309 aa, unidentified
MNPNQKIYCGVDVSKKHLDAFIHSKTIRFANTVKGIAQLMKQAGEIHYVFESTGGYERLAAWHLLEEGRTVSIVNPGRVREYAKSIGQIAKTDRIDARIITRFAELVHPRETALPSADQRKLTVLVERRQQLLNMRTAETNRLDTAGEPDARKMIQKHCQWLENQIQGIEQAIAETISGNDELRRKAERIQSVKGLGKVSAATLLSVLPEIGTLSRQEVAALAGVAPYNRDSGTFRGRRHICGGRKRLRACLYMAALSAVRSNPHLKVFYNRLVEENHCPSKVALTAVMRKLIIAANSAVKNPDFLVAA

SEQ ID NO: 114038 - protein, 355 aa, unidentified
MESVKYLGFDVHQSTISVAVVNADGKLVMQSVIATHAATILDFIHGLRGTLHLTFEEGTHSAWLYDLLARRVARVVVCNPRQNALLKAGNKSDTSDARKLAELLRAGLLAPVYHGEGSTRTLQELVRSYAALTEDTTRVMGRVKALYRSQAIACAGKKPYGRRHRREWLSKLSEAGLHRRAERLYEELDALQGLRRAAKRELVLESRKHAAAKLLRTVPLLGAIRAALLIGRVQTPHRFRSKRQFWAYCGLALETRSSADYRFEDGQLVRAKKPVFIRGLNRNHNHDLKNLFKSAATTASVLHGPFREFYEGLLAKGMQPAMARLTLARKIAAITLSVWKKGESFDAEQLKPQAA

SEQ ID NO: 114039 - protein, 375 aa, unidentified
MSNHSEAFVAFDSSKLRNAVAIADSGRTGEIRFLGEIENSTTATAKLVRKLASKYERLTFCYEAGPTGYELYRQIKSLGQECIVVAPSLIPKKPGDRVKTNRRDAVSLAKLLRAGELTAVWVPDRHHEAMRDLTRARDTAVNDLRSKRQQISAFLLRQGLHYCAGKKTWSQAHLNWLARQKFEYLEHRLVFDENMTAVLQAQERLERLEQAIRAAVPDWSLAHLVTALMAMRGIDLISAATFLAEIGDLSRFQSPGELMAYLGLVPSEDSTGDRIKRGPITKAGNRRARRTLVECSWSYQHPPRVGKDKQAKVAAAPQAVREIAWKAQSRLNRRYRALVRRGKLKTVAITAVAREFAGFIWAVAREVTAARAAAK

SEQ ID NO: 114040 - protein, 342 aa, unidentified
MNKKKVTKQIVATDIGMENFYACYKIQHDDKSTVIKGTKLFSNSPSGIDEFYLWCKKRNKTPEAEPIFVMEATGVYYEELAYFLYHKKEKVSVQLAQKIKYFAKSCNLKTKTDKVDAKMIAEFGIEKNLTETDLWTPPSKDFKMIRDLAREHTSLKKAQTVSKSQLHALKHAHSSYDNVIKLKEQQIDFYEEQIKRVEKEINTLVKSDISLYSRIKKIGTIKGLGFITIIKVLTETNGFLLFKSIRQLVSYAGLDVIEKESGKYKGKTKISKKGNARIRSALYMPAMSAVQHNRTLKVFYNRINEGRTIKKQGLIAVMRKLLILIYTLWKKDEEYVENYQMT

SEQ ID NO: 114041 - protein, 283 aa, unidentified
MSIHGKGLIMNVTRMGLDIAKQVFQVHGVDEHNKVVLRKTLKRAQVLTFFANLPPCRIGLEAGGGAHYGARELTRLGHEVKLIAPQFVAPYRKSGKTGKNDRNDAEAIGEAVGRPNLRFVPLQSEEQQAVLTIHRARELAVSERPAWVNQIRGLLGEFGIVVAPGRERFEKELPMVLAELEKGLPVLARETLTNWAARLRAVNEHVTGYDQRLQPLARDSEPARRVMAVEGIGPVTATAVVTTVGDGHEFHSGRAFAAWLGLTPRPSSSGGKSRLGGYYPTQQ

SEQ ID NO: 114042 - protein, 390 aa, unidentified
MQVIDDRPEAASAIHTNLGAIFVSLELSQSTWLITSLSPGGGEKMSKHVVHGGDIAGLLERFARLQEKARARTGRTFPIIVIHEAGLDGFWIDRVLKNEGIESHVVDPASVATSRRRRRAKTDKIDGEALVRTLLAYKRGEPRVCAMVKAPTPEEEDRRRLCRERKVLITERVKHVNRLKGLLFLQGVCGYEPLRRNRRRRLDELRTGDGRPLPKHLKAQISRELDRLELLLEQIKVVETERDALLAAQQIAAPTSAAMLLAIKGIGPDFAAILWSEGLFRHFDNRRQIASYAGLAPTPWKSGSIDREQGVSKAGNPRLRTTLIQLAWLWLRHQPQSALALWFEERVVRNGGRLKKVTIVALARKLLVALWKYVTAGVVIEGAVLKGASR

SEQ ID NO: 114043 - protein, 356 aa, unidentified
MSEGSWVGLDVHARSVVVGVIDRESGEVRSLRVPPGCDQTVAWLQTLPSPVRAVYEAGPTGYRLARACAGAGISCVVAAPSRIRPAADRVKTDRRDAERLARLLRLGEITPVRVPTLEEEAARDLVRAREDARGDLMRARHRLSKLLLRHGLVYDATAWTRTHDAWLRRQRFDDGPLAIVFDECYGRMLDAKSRRDALDNAIAELAASEPYVDVVSRLVCLRGVSTLTAFALTVELGDWNRFRPGSLGPFLGLTPSENSSGERRRQGAITKAGNSHVRRLLIEAAWHQRSPSRRSVTLERRRTGKSLAVQAQAERSGRRLHARWHALEARGKPRTIVVVAVARELAGHCWALATME

SEQ ID NO: 114044 - protein, 328 aa, unidentified
MNSLCLSTDQGKLPVLGLDVAKKSIQAELRIAGKNVRFGFANNPKGFARLARILDQHNAPKIWAGLEATGPYSHALALWLHARAHRVSVLNPRRVKQYARSAGNRNKTDRLDAAVIADFLCAHHPAAWRPPRQELVELRALVRRREELSLMLQAEKNRLEGVASQVRCSLKRIIVILSAEKARVEKLIGQQIRSHKQLCRDHQLLCTIKGIGSLTAAILLAEMAAPGQVQRARQAAAHAGLVPRHEESGTSVRRNRGIGKEGNRYLRKALYMPALVAIKYNAPLRYFASRLRAAGKPKMKIVCAVMRKLIHIAFGILKHQQPFNPSLA

SEQ ID NO: 114045 - protein, 310 aa, unidentified
MENVVVGIDISKEQLDIHIIPSQDSFSVSRDSEGLGQLITQLSSLQPKLVVMEATGGFETIVAAALAAARLPLAVVNPRRIRAFAQALGYLAKTDRLDARIIALFGEAAKIEPQTVPDEAALALGELVARRRQIVETIGVERNRKRSLTQRRLLKGVDRILALLQKELSDLERDIDQAVRGTPAWREKDELLQSVPGVGSKVSSMLIAELPELGTLTRRKIAALAGVAPMADDSGKHHGRRHIQGGRAQVRSGLYMAALVAARHNPILAAFYQRLRAKGKTPKQALTACMRKLLVILNAIIRDNRPWQSA

SEQ ID NO: 114046 - protein, 390 aa, unidentified
MIYVGIDVAKNKHDCFITNSDGEILFNCFTIPNTMEGFLALYEKILLCSTDTKIVKVGLEATGHYSNNLLNFLISNNLAVYLINPLHSNLYRKSITLRKTKTDLIDCRILANMLMSESLIPYTSTSFHNEELKSLTRYRFDKVRERAALKNSIARLVSILFPELESLVTGLHLKVVYGLLSEFPGASYVARAHLTKLSNVVQSASHGKYTREQAITFRDAARSSIGSVSLAKSMELKHTISLINEFTAEIEEIELQIKNIMAEMNHPIQTIPGISYRMAAAIVAEIGDFSSFDSPDKILAYAGMDPSTYQSGQLNNSHAKMVKRGSKYLRYSLYIATRFVCLWDPTFAAYLAKKRAEGKHYNVAISHATKKLVRVMYHITKNNQAFRSAT

SEQ ID NO: 114047 - protein, 342 aa, unidentified
MSILTIGLDIAKSSFHLVWMNNAGKVLKRKQLSRKKVAEYFVNLPAAIVVMEACGSTHYWSRVITRCGHEVKAIAPQFVTPYRKGNKNDFNDAEAIAEASQRHNMRFVPLKSLAQQDIQMVHRIRERLVKNRTALSNQMRGLLAEYGLVIPKGVNQLKRYLPEFLEDAANELSADTRRYFAGLLEELKEMEQQIASADAELQRINKQQTVCQRLSTMTGIGPVVATAFYAGIGDGKAFSSGRHVSAWLGLVPSQHSTGGKATLLGISKRGNSYLRTQLINGARAALRHCENKTDKVSLWAQQLKARSNFNTATVALANKMARMAWAMLHYQEDYRLKYSDKM

SEQ ID NO: 114048 - protein, 345 aa, unidentified
MHYCGLDVAMKSSYLYVADSLGRKSASGEIPTSKQELKRRLRPYVKRGLKVAIEAGNQAMWIYEVLEGMGAEVTVVNPTKVKAIAESRRKTDKIDAKVLCELLRLDGLPHPVHMPGSETRELRGMLVARRQLISARTKLCNVIRGMLRQEGIRLPMRALSSRVGWDRLLGRRYRLTHIRPTIESYARSFAALSESIKELDCQLRERERNDERIERLKTIPNVGSISSLTLVAAVDDVHRFSSSRKIVSYSGLAPTVNASGERVVYGPISREGRSELRAVWVQVAHRMAHDRSAAARPLRRWFNRVALRRGKKTATVALARKLLTIAYQMLKEGEDYKPARIGAAA

SEQ ID NO: 114049 - protein, 430 aa, unidentified
MNYTQNEKIEQVTDTTIVVGVDIGSKTHYARAFDNRGREITKRVFIFKNDIEGFNSFNLWAETLKKENNKTAVLIGCEPTGHYWFAFAKYVKDHQKKLVMVNPFSVKKIKELDDNSPKKTDSKDPKTIAKLVVDGRYSIPYMPEGIYAEIRDLVYSRDRIIMKQHNISANRIQRWLAIHFPEYLGLYTRFDAASGLAVLEKAPLPKDVIALGVEGIRKIWHDKKMRGRGVTEDRAKNLVEAAHNSVGLYGGIGTRSELCMLLEEHQLWTSQLEAVNKVLEETIRKVQHVEKLLAIKGVGSVTIAGFIAEVGDIRRFKSPKQIQKYAGLELVENSSGKHKGRSRISKRGRRKLRKILYQVMIPLLARNKEFRTIYDYYVTRVKNPLKRRQAMIAVSCKLIRIFYAVLTKGVDYDRFKMMSDIHHERGVIAA

SEQ ID NO: 114050 - protein, 367 aa, unidentified
MKKVSTRAAAQSRNISQQKLTIGLDLGDRNSWYCVVDEAGQIQREQRVHTSGKALQEVFGTMPCSRIALEIGTHSPWISRLRSELGHEVIVANARKVRLIGESRKKDDRLDAQTLARLARIDPELLYPVKHRSAQAQADLTLIRARAGLVRARTGLVNTARGLAKSYGERLRGCNVRNMNPEKAEGLSPELQAALEPLLNAIESLSERICEYNERIEQLAQQSYPQTALLKQVKGVGTLIALTYMLTLEDPHRFRKSRDVGCYLGLQPGRRNSGRSEPQLHISKEGDPYLRTLLVQGAQHILGPFGIDCDLRRWGLKLAERGGKSGKKRAIVATARKLAVLLHHLWVSGEAYEPLHNSSRTTVAAAA

SEQ ID NO: 114051 - protein, 361 aa, unidentified
MRIIGCDLHARQQTLAMLDTTTGEVVTMTLKHEGNNVREFYSKLPRPVRVGIEATGSMQWFVSLMEELEIECLVGHPAQIRAAEPRKQKHDRRDADLILKLLAENRFPRIWLPSKELQDLRALLRHRHQWVRIRTRIQNALQAIALANGLRRGPSLWSQDGQSKIAALPLAPHTAYRRSELQAMYAKFAAEIEKLNQRVEEQACERPGARLLMTHPGVGPITALATDVFLGDAARFADSKALASYVGMIPSEYSSGGRQRLGGVSKQGNPLLRFLWGEAAAHAVRRDPELQRFYRRKLVQKGLGKSRVAVARKLGIRLWIMLRDEIDYNEFCRRGQKQQKSSEACAGMPDTGHGAKQSPAD

SEQ ID NO: 114052 - protein, 316 aa, unidentified
MGQILQDQPIFVGIDVAKKHLDIHVLPTGSSFTVTRDAAGLDQLLAFLRPLNPTLIVLEATGGYEAVVLATLGGAGLPVLAVNPRQIRDFARACGRLAKTDSLDAAIIALFAKCIRPELRPQPDEQTLALGEVAARRRQIVEMISAESRRRQQSANRKVQRRLDAHITWLQQELTDLDTDLDTAIRSSAVWCHNEGLLTSVPSVGKAVAHTLLAELPELGTLDRRKIASLVGIAPFNHDSGSHRGTRSIRGGRGVVRSKLYMAAWVATRFNPVIKAFYDRLIATGKPRKVALVACMRKLLTILNAVIRDQKPWQPA

SEQ ID NO: 114053 - protein, 420 aa, unidentified
MTRKDDSKVIRIVHPICCGLDVHKESVSACVIFPDSAGEEQYEIKVFGTFTDDLTRLREWLLSHACPVVAMESTGVYWRPVHNVLEEAVQVVLVNARDMRNVSGRKTDIGDSRWIAGLLRHGLLRSSFIPPQAVRQWRDLTRLRKKYVQSAGDYRKRTHKLFESANIKIDSVVSDLFGVTGRNLMQLLVEDRKALTLSDIQSCVRGKLKGKEVELFRSIQGFFTDHHRFILKTILATISMLEAQIDQLDRKIRFAMKEHGALLDRMKEAPGISDVSSFDILAEIGPTLDSFPTDTALVSWSGLCPGNNESAGKRKSGKSPVRKHHLKTIMLEVAWAAVKKKGSYFKDKYYRLKARRGAKKAIVAIAHRILLGIYHVIKDGVVFRDLGEDYLPRRNKSQKFFHLRKQALALGFDLVPQAAQ

SEQ ID NO: 114054 - protein, 368 aa, unidentified
MSRIAERAGLVTGGVDTHADVHVAAVVDQVGRVLGTRAFAADASGCAGALVWMRAQGELAKVGVEGTGSYGAGLARYLAGCGIEVAEVIRPNRQARRQRGKSDAADAVAAAVAALSGEASGMPKSRDGAAESIRALRVARAGAVKARTQAGNQLRDLILTAPEPLRQQLAGLPSGRQAEVAARFRPGDPACPAEGTKAAMASLARRHQQLTAEITRLDAMLDELVRHAAPDGFLAKRGVATQVAATLLVTTGDNPGRVRKEASFAALCGASPVDASSGKQIRHRLNRGGDRQANSALWTIAMTRLACDPRTKAYAARRTAEGKTKKEIIRCLKRYIAREIYNALCRHQRPSKAPAPQAKQDLSATALT

SEQ ID NO: 114055 - protein, 341 aa, unidentified
MEQFAACIAIDWSDAKHDVCLVEASTSQKASFVLKHTPEELAAWATALRTRFAGRQIAVCLEQSRGPRIYALLPYDFLVLYPINPATLAKYRQAFSPSRAKDDPRDADYLLEWLLHHRDHLKAWRPDNAKTRTRQYLVEHRRRLVHDRTRLSHRMTALLKAYFPQVLQWFDDIRTTLVCAVLLRWPTVEVIKKVRPSTLERFFHEHNSVRQETIANRIAAIKEAVPLTTDQAVIRSSVLMINAFATQMKTTIAAIRAFDDEIEQLCRTHEDYHLFTALPGAGTVYAARLTAAMGTDRNSWPTADARLCFSGVAPVVERRGQSTRIRWRYFCPKFLRPSCHA

SEQ ID NO: 114056 - protein, 341 aa, unidentified
MKKFIRIGVDLAKNYFQVHALVSDVGPRVTRKLRRSKMHEFFSQIEPSLIGMEACGSAHYWARELKAMGHEVLLMPPAYTKPYVKRGKNDAVDADACCEAMSRPGMRFVPVKSAEQQATLMLHKTRDLLVKQRTMSVNALRGHLSEFGIIAAKGIGRVDELLDLVESDTTLPNAARASAKVLAQALEGLDKAIDDLEDEITNAQAQNEMTRLLYKVPGIGKIIASVIAASVPDPSVFKSGRDFTAWLGLTPRQNSSGGKQALGAITKQGNRYIRKLLVLGATSLLNVVGKRKGALRDWIVGLLAKKPARLVTVALANKLARILWAMMKTGESFRAEIFAKA

SEQ ID NO: 114057 - protein, 397 aa, unidentified
MIAVGIDISKAKSTVAVIDSDGTVLASPFTMAHTQPEMEAFVTYLKGLGEPTTILMEYTGHYHYPVLKKLQDEGFPVCIVNPYQMKKYGDVEIHKAKTDKKDALRIAAYALEKSYKLVPYSSMEQKYEDLKFLSRQYSQRITYVAKLKVQLIALLDQTMPGITRILPLNSRNPEKCALLLFIKRFKSFDEIQRIGKARFLASYDVLAKKASERSASSKGLSIYELAVDSITTRGEDPYIWLSQNQCVDLLSATQNAADEIISQMRNIAETIPEYKVLRAMHGVGDRLGPIILAEIGDVHRFHSGKALNSYAGNDAPPYQSGQFESRNHHISKRGSSALRKACYEVMQALKLTKPQDDPVYLFMLKKEQEGKPFNVAKMAGVNKFLRIYYARAMELYK

SEQ ID NO: 114058 - protein, 477 aa, unidentified
MDVQVNEVPVRRLAGIDLGVASEHTVRVLDGAGQKIAAARCVPSRESLLAVEARALAGTPAGTRLEVVLEPTGPAWFPVARFFAARGHKVFRVSSAKAADLRKFYRRHTKSNGIDADTLARLPLADPDGLTELTLAQGDAATLDRRVRSCDRLTQQAARHKTRIKALMRQLLPMTPLTADLGKADLAILGRYGDPRALLDLGLAGLTALISQASHGQQGQARARAWISAAQQAIDLYGPADPAMPYADLAAEVATEVRLLNAIETELQDHAAAREDAYRTADSGQIARTLPGLAEIGGPAMTAVMGHPGRFATGHHFKSFLGLAPRASETGQTDRKGEPMTKAGPSLGRATMIRAADTARKLDPQLARIYYTQMTERGANHLKACCVVAGPLALRLHAAMRRGAPYQLRDTDGTPVTPGQARQIIAAKWTVPDDVRKRRRSRKNKGRAPQQASKPVQRGGPPGPGSRPGHISVKPAP

SEQ ID NO: 114059 - protein, 351 aa, unidentified
MPRTTTVHAVTTIGMDMGKNTLHMIGLDSRGAIVMREKVSRGRITSRLANVPSCLIGIEAGMATHYVARELAALGHDVKQVPPMYAKPFRQGHKNDFRDAHAVAEAVQRPTTRFVPAKTDEQLDLQALHRVRSRLVGERTAVINQIRGFLLERGIIVRQGLRFLRQLLPDILAKRTDVLSPRMVRIVADLASDWRQLDERIEGVTDEIETLAKSDDTCRRVMTVPGIGPIISSAMVAAIGSGGAFARGRDFSAWIGLVPKQMSTGDRTILGRITKRGNGYLRMLFMQAARVILLRPASWPKHGFGGWLARAAQRLHPNVLAAALANKLARIAWTVLAQERSYEARVTKAAA

SEQ ID NO: 114060 - protein, 465 aa, unidentified
MTVGKMFWRNRKERKEWARRLQSEEPGLDVVHPHAAGIDVGNSAHYVAVPPNRDHEPVRRFECFTADLHRMADWLQGCGVKTVAMQSTGVYWIPLYEILEERGFEVYLVNARHTKNLPGRKSDVQESQWLLKLHTYGLLNNSFQPVSEIRVLRTYWRQRAEHVRGAATCIQRTQKALTQMNVQLANVISDISGLTGQAIVRAIVAGERDTRKLAALSHPRIQASQEEIAKSLEGNWRPELVFVLQQEVDMYDTYQKRIVECDQQLQKQLTSLTGVTPPGIGQAQKPKSKPPAAKNAPRFDLGSELQRATGVDLTRIDGIDVMVAQTLVSEVGLDMSRWKTESHFASWLGLSPDNRITGDKVVRRGTRRVVNRAATALRQAANTLLRSRSYLGAQYRRFRTKLGAPKAVTAMAHRLARLVYRMLKYGQAYVDKGTEYYEERFRQQQIQLLRKRAAKLGLQLAEIPA

SEQ ID NO: 114061 - protein, 314 aa, unidentified
MADQNTVVGIDVSKDRLDVHILETEEAFSVENSRKGWKRLRKRLLGLDEPAIGMEASGGYEKGVADDLALTGFAVYVLNAGQVRAFARGVACHAKTDPLDARIIARCLTASLETARPWAPDPDRSRLSALVSYRQALVAERTELKGRLDKTSQPTVQRLMRHQLGVVKQSLLVVEKEIAAALKETSELRDKAALIGSAPGAGPVLIATLLAQLPEIGRIDSRALCALVGVAPFDRQSGTSRWSGRCLGGRSYVRRVVYMATRSAVRGSNPALAEFYARKRAEGKPDKVAMVATMRKFLLMLNAMIRDEQPWKAA

SEQ ID NO: 114062 - protein, 525 aa, unidentified
MAARSSRSRSRRALDDSLQKPRGSIHARVQEVGPEHFGIVCVDCAKARSKWLLADFYGKVVMPPTEVAHNRVELDFMTSQVRRACQEHGLCDVLVAIERTGRYHHVVRDAFRRGQFETRIVHPYTSKRFRQPADPDNKTDDKDLAAIHRATTTGFALIEPQLDVSWQTLQLLARHRRDLVHKTSLLACQIREHLDAAWPGYGALFSSLWESKIAFPLFRNFTSAQALLEAGGTGICAWLRGQKIYFKLPSIETVLSWAQQAAPGEATALVHRRLALVDFDDHQRKTMEILTLERELSFYLSQTPYVLLLSIPGINVVWAAEFAGEMGPIEHYLNSRSITGRAGLFPSRYQSDQVDHPNGRLARRANRRLRGVLLGIGDTLIGCNHHFSVLAARWRALGKDPRDSHVKIALRFARIAFSMVAGRQVFRHPCVRERHTILDKLLAFHREHGTPWDQTLADLHRTMKHVPPKEYAVEAKPLAEQLHNLRRPHPGPRGPQRLGDILAIVLARLGVGLVQSQEPGEPNPT

SEQ ID NO: 114063 - protein, 402 aa, unidentified
MIYAGIDIAKSSHVIGAVDERGKDAAKPMQFANSAGGFGKCAAYLEGLGAPAEEVLVGMEATGHYWLPLFSFLHAQGYDVVVINPIRTDAMRRFKGSSRVKTDLVDCILIADTLRLGEFRPSKLGDESMVELRQLTRLHQGLKESVADLKRQVIVALDQVFPEYDSIFSDTFGESSKAFLRKCPTPEECRGVRVDALGNTLSRASRGKLGREKAEEIKGIAKESCGIDRGTRTLSFQIKLLVEQIDFIEGQIEEVEARIEEGIETTEPLILTIPGIGHVLGAQIASEIGDIHRFRNASAVVSYAGINPSVSQSGKFSSSENHITKQGSPYLRRALYLAATAQLRLSTPFRDYYDKKRADGKSHREALIAVARKLVHVIYAVLSKQEPYRPDAVNANPASRSE

SEQ ID NO: 114064 - protein, 379 aa, unidentified
MKILALDLGKHKSMLCRFDTETNKDTYAKVDTTPAAMHDLFVKEQPGQIVFEIGTPAGWLHDLCVTLGIRVDVVNPNDERWSWKKVKLKTDKTDAQKLAKLAQMNELPTVQMAPRDQRQHKKLIAYRHALIQRRTAHRNLLRSTCEAEGILLPAGHKAWTEAGIEIIRGHAKPASQCKMTNFWRGIVHEELSAHDSVSEQIDRIEKMLEKTAKKDEHIIRLQTIPGVGPRLAEAVVAVIGDPHRFASVKEVGSYVGLTPRLKESSTMSRMGRISKQGNSLLRSLLVEVAWISTRYNEELKALRERFKHGSKTRNKIATVALARKLLTICWAMMRDKTTWDPSKLTSRAKAAVQGVEEAASIVSQNAQGIAAAQPALATG

SEQ ID NO: 114065 - protein, 316 aa, unidentified
MAKLVTKITLGIDVAKDQHVVCNWTTQKTSPLPNQRNTIKTWLGTFSEPLRIAIEPTSHYHLMVVEEALALDHEVYLINPRQLVHYREAVNRRNKTDIQDAWLLARYLEHEWAQLRPFTPQEPRAQRLWALILRRATVVQSRQQLQQSLAEVNLSTRGLMTQFQQLLERIDRHIQALIVELGWWLDYQRCLSIPGVGPSNAAALVATYHRGAFSGADAFVAYMGLDIRVRESGQFRGKAKLSKKGEPELRRLLYCASHASRCHQRFADYYQRLIDKGLSRIAARVALARKLARISFTLMKTQQTFSTQEKTYCLGP

SEQ ID NO: 114066 - protein, 373 aa, unidentified
MPKYSTAFGMDVHLRSTTVCALDADTGETVTRRFPGNPWGEIAGWMDGFPGPSLAAYESGYLGFAPQRELAGLGVECVVAAVSKIPRSAADSASKNDRNDAARMAKAILAHDISPIWVPSPEVEGIRDLAGAYDGATARLATAKQRLLAFLAKRGFVYGGTTPAGNPRKYWTYDFLRWLDKVRPEDDGGVRTLAALRNEVEAAAEARADLLSEYRAAVDASPIAAEVAALQSIKGCAFALAAAFSAEVGDFTRFRSGRQVTAYFGLAPSQRSSGDSVRLGGISGAGNALVRKLAVEGSWCYAAARHQPKLMPRDTGVPLEIRVHGRKGSERLLRRREEMLERGMPQAKANAATAAELVRWLWALGMMCREGAE

SEQ ID NO: 114067 - protein, 346 aa, unidentified
MPIVGGLDIHRRQITFDYLDTETGQVRRGQVSPADREHLRAWLARFAGREDVAFAVEGCTGWRYVAEELAAAGIAAHLAEPADTAFARGRKRHAKTDKTDCRHLRMLLAEGRLPECWIPPGHILEARALLELYHDLRAEHTAWVQRIHAVLFHHGAPALGEGTLRTGPGVAALRAAAAEWLSPAGQLQVATALEVLEALEARLHVVRHQLLAAARHLTGAKVLAARLFGVGPVTALAMTCWLAGAGRFSSSRQAVRFAGLDITVSSSDRKGPPGKLSRQGPPVLRWAVYEAGKTHARASAPDHRYYAQVKDRCNGKRAALSEARKILRQAHHVLAELGDDALAPAA

SEQ ID NO: 114068 - protein, 432 aa, unidentified
MRRQVYSLRRLSAKEFARIVEQLGAGPVAVGIDVSKRELVLMLRRQDATFLGPYCAANPEQIPQIVQLLRQVGSRGAFQVAMESSGTYGDPFRQALSDAGIELRRVEAKQSHDYAEVFDGVPSQHDGKDAAVIAELCAIGKSRRWEYEPVSEKDSRMQLAVEWLDAQDRIRRLWLGRLEALLARHWPEATSVMELRSGTLLRALAHYQGPAALAADDKALEKLLRWGGTWLKKDKAQALIDSARRTLGVRQNAVDQERLGRCAKAAREATLQINRCRGELRQLAKGNRVIEAQAKAVGVATACVLWTRLGDPHDYPSAGAYRKAMGLNLSEQSSGQYKGLPHVSKRGDPLVRRWMHMAALRLIARNTPVARWYRDKRRRSSDNHRCAITAVVRRLAIALHRVPVGGREFDPARLFPGHAAAQAPQTTGGLMS

SEQ ID NO: 114069 - protein, 457 aa, unidentified
MTRRKHSRPARDIAPVHPHAAAVDIGATLHVAAVRPGCDPEPVRTFGTFTTDLHRLADWFEQCGVETVAMESTGVYWIPLYEILDQRGFEVVIVNARDAKNVPGRKTDVSDAAWLQRLHEYGLLRASFRPKGEIATLRSYLRQRERLLDQAAAHIQHMQKALTEMNLQLHHVVADVTGVTGLRILRALVAGERDPDTLAAYSDPRCKAPAETLRAALVGNYREEHVFALGQALELYDIYQAKVAACDQRIEAVLERLKAANPPPAAALPPARPRRRQANEPGFAVREALHAILGADPTQIDGIGPSLALTLVGECGTDLSAWPSAKHFTSWLSLAPHNKISGGKVLSARTRRSGSRAAALLRLAAVAVGRTATALGAFYRRLAARVGKAKAVTATARKIGVLFYNMLRHGMDYADPGASAYEARYRQRVLSNLRRRAKSLGYVLQKADPASAAIAVS

SEQ ID NO: 114070 - protein, 341 aa, unidentified
MKKFIRTAIDLGKTYFQVHGLESEGGQSISRKMKRSKMREFYEQIEPCRVGMEACGSGHYWARELVAMGHEVVLIPPAYIKPYIKRGKNDAVDAAAICEAMSRPGMRFVPIKTADQQAVLMLHKTREMFVKQRTMSVNALRGHLAEFGLIVAKGIGRVDELLALAQSDTELPQIAKSAVAGLAQHLEGLDQSIEAVGDEIARAHKQNPTSRLLDEVPGIGVLIASVIASSVPDPGVFKTGRDFAAWLGLTPRQNSSGGKEKLGSITKQGNRYIRKMLIVGATSVMRVAGKRKGALADWINALQAKKPKRVAAVALANKLARICWAIMSTGEGFRVDTYVKA

SEQ ID NO: 114071 - protein, 425 aa, unidentified
MNTQIESSYTAYIGIDWADSKHDICIQPAGSDQREFSQISHQAEKIEEWAHSLYQRFGGKIAVAVELAKGPIVYALQKYDFFVIHPVNPTTLAKYRKAFNPSGAKDDPTDAELALDLILRYPDRFQPLNPQSVEMRKLAFLVEQRRNLVNDKSRTTNRLRNTLKQYYPLALEWFDRVDTLLFCDFISRWPTLTQLKRARRTTIEKFFHEHNMRFAHVLQTRLSAMKEAKPLTLDEAVIDPHKLKAEYLVELLRVMLKGIRRYDDEIAELAPQHPDFSLFNALPGAGPSLAPRLLVAFGEQRERFASAAELQKYSGVAPVTERSGKKSWVHWRWQCSSFLRQTFVEWAAQTINKSFWAGAYYYQQREKGCTYQVAVRALAFKWIRILYRCWETRTPYNESLYLKALQRRGSPLLKQFPIAEKTLTE

SEQ ID NO: 114072 - protein, 343 aa, unidentified
MNVFIGLDVSLASTAICVLGPQGKVVEELEAASEPEALVRAMTSLPYAVDAIGLEAGPLSQWLSKGIEEAGLDVVLMETRLVKAALKAMPIKTDRRDAQGIARLLQMGWYRPVHRKSVSSQEIRALLTARKSVQQAIINLELSMRGVLRNFGLKLGHVTRIRYEARVRELVEQNEILSVSTEALLRARAQLRAELAEMDATIADLAKQDDVCRLMMTMPGVGRIVALTVKSAIDDPTRFARSKDVGPWVGLTPKRTQSGEMDIVGQITRAGDRALRTALYQAAMILMHRGSPNWLQAWALRVAHRRGSKRALIALARRIGVVLHRMWRDGTPFRHAQSSPATV

SEQ ID NO: 114073 - protein, 462 aa, unidentified
MSRIWAGTDCGKTHHHTLVLDSEGETLLSRRVANDEPELLRLIGDVLDLAGGRQVTWALDMAGGGPGLLIALLVNHGQELVYIPGIAVNRASDSYRGAGKTDARDARVIADQARMRRDLQPIRPGDDAGIELRLLTERRVDLVADRTRTTNRLKGLLNSMFPALEGVLDIGTSGALHLLTGYQTPAAIRSTGLRRLTTWLRNRKVRSPEALAAKAVEAAERQHTAVAGESPIAMMVHTLTKEVIALNEKIAETDKLIEGRFREHELAEVIQSLPGIGTVLGAEFLVAVGGNLDAFPTPDRLAAFAGVTPAPRDSGKISGNLHRPQRYHRRLQRVFYTSALVSIRFDPNSRKYYDRKRAEGKRHVQAVLALARRLDHRAQQIGTRRGEVVLGEGVQGQTVWCGHRADLLRGFDTSKISRWPFIYAGPIPMPEQTPGSGQTRTSLPWTQPAASIAQPSAVFDLN

SEQ ID NO: 114074 - protein, 315 aa, unidentified
MTTKSETYVGIDVSKDRLDLAVLEEKRIEQYTNTERGIKELVDEMKALKPALIVVEVTGGYERAVVKALFEAGLRVARVSGYRARQYARAKGLLAKTDPLDAMNLADYGKHVQPRVYEAKSEEGQYLAGKLARRRQLGEMVQAEKNRLRLAYGDIGPSIERVIKFLQGELKQLEEEIRAYLDANPVWLEQEQLLRSMKAVGPVTAATLLAELPELGKLDGKQIASLVGLAPINQDSGKRSRYRKTGKGRPSVRNVLYMAALTGLRYNPVIKKQYDGLVLRGKVKKVALTACMRKLLTILNAMVRDQKPFGYATMS

SEQ ID NO: 114075 - protein, 346 aa, unidentified
MTIVEDRRAITGGVGTHADTHVAAALDPIGGLLGVREFPATALGYAGLLGWLGEFGPVALVGVEGTGSYGAGLARHLAGAGVRVVEAGRADRQDRRRQGKSDPLDAVSAARAAQSGRASGAPKGRDGAVEAIRALMADGRSARNERTQAINQARALVLTGPDDLRARFARHAAAALADAIAGLRPRPGDVPGYATRVALRELGRRARFLDAQLGRLDELIVPLVAGRARGLPALHGVGPDTAAMLLIAAGDHPERLRSEAAWAHMCAVAPIPASSGKVSRHRLNPGGNREANHALWRIVITRMSNHPATRAYVTRRTAEGLSKKEIIRCLKRYVAREVYHYLRPGS

SEQ ID NO: 114076 - protein, 338 aa, unidentified
MSYYVGIDLHSDNNFIGIIDKKDCRILSKKLPNDLDMVLNTLKPFKRKIKGVVIESTYNWYWLVDGLMDKKYKVHLANPSQMQQYSGMKYTDDKWDSFWLAHMLRLGILPEGYIYPKDIRPIRDLLRKRMMLVQHRTSYILSLQSMVNRNTGRKLKGSEAKKLGEGELNIMFSDKHLVMSAQSNCNVMEFLDGQIDAIEKAVIKEVKLRYPFEKLLTVPGIGNILGITIMLESGEINRFQSVSNYSSYCRCGSSKKVSNGKKKGENNKKNGNKYLAWAYVEAANFMKRYCPQARSWHQRKVSKTNQIVATKALSNKVARACYFIVKDQTDFDSKMLFR

SEQ ID NO: 114077 - protein, 367 aa, unidentified
MKKHTTVKQSLSSTDLSTCTTVAVDLAKQVFQIAGENALGQVLYEERIKSREAFHTFLRQLPPTIVVLMETGPGAQAWARQLQAQGSLARILPAQLVAKHRSGAKNDRNDAQAILRAGRDSKIAAVPIKSATALAMQALHRARQGYVRRRTAMSNQMRGLLMEHGITLAQGDAAINQTLPRVLEDATQPLPDMLRELVDELLGEWRQLGERINVLSDRLENAANEDKTARRLMSVRGIGPIIATALLAKQTDPERFANARQFAAYFGMVPEQNSSGQRVRLGRMSKRGDSYVRSLMVQGAHAVLRHLRPDSEQPDDRRLQRWQERLGRKEAAIRLANRNLRIVWVLLQNDQTYRSQPADGRPAAPSH

SEQ ID NO: 114078 - protein, 344 aa, unidentified
MNYYAALDVSLRSVHLCVIDDGGELIRETKLSSEVTDIIAYLDALDLDVSVVGLEAGTLAQYLTYGLQSAGFEVVCMEARQVKAALSAMRNKTDKNDARGIAQLLRTGWYSPVHIKSMKSHQVRALLSSRRAVLDKCIDLENEVRGLFKIFGIKLPPKLGHGSFDAAVRGIIETDTTLSHSLLPLLDARLVLYHCFRELDNRTRHMAHADPVCLRLMSAPGVGFITALTYKSGVDDPYRFKHSRTVAAHFGLTPRRFQSGEIDIDGHISRCGDRNVRCTLYTAANALLTRSSKWSPLKAWGMKLAKTRGHRRAVIAVARKLAVILHRMWLDDVPFRWSPEAARS

SEQ ID NO: 114079 - protein, 349 aa, unidentified
MPEQRVSYTGERVYVGIDVHKETYTVTCVCRKQIVKTATVPAEPASLAASLLQWFPGATLTSAYEAGFSAFVLHRALTQVGITNIVVNPASIAVAANDKVKTDRRDSKRLAIDLADGRLRGIYVPTEAEELARLLPRTRAQIVEHRATLARQIKAKLHQFGLIAPSSRRVISNRYLREIATWPLPPELGVSLTLLAEQWRFAPRQLIEMRRLLRDQAKAQQETEKVYRSVPGIGAVVARTLATELGDMTRFANERALFSYTGLTPSEYSSGSSVRRGHISRQGSSRVRHLLVETAWRALPRDEVLQEIFDRIAATRGKKRAIVAIARRLTGRIRACFRQGTTYAVGTYA

SEQ ID NO: 114080 - protein, 393 aa, unidentified
MVCVGIDVAKDKHDCFIISSEGEILADVFTIPNNAEGFDTLLQAIRRSTRPEDKIKVGLEATGHYSYNILGFLLDKGLDTYVINPLHTNLYRKSLSLRKTKTDRVDARTIAAMLMSDVDLKPYTDTAYHNEELKSLTRYRFDKVRERAKLKQSVSRLVTILFPELEKLVSSLHLASVYALLIEFPGAKQVAGAHLTHLKAILSDASKGRYGRDMAVTLRDAARCSVGSVMPAKSLELQHTIRLIRELDAEIEDIETAIQSMMDEMQSPITTIPGIGVRMGAMILAEIGDFSRFDSPDKILAYAGMSPSTYQSGQLSLSGPYSHMEKRGSRYLRYALYNATKYVCLWDPAFAAYLAKKRGEGKHYNVALSHAAKKLVRLICALEKSQQSYRNAA

SEQ ID NO: 114081 - protein, 366 aa, unidentified
MGAIYIGVDFHSRQQTICYLKTETGELVITELKHQDKEQVGAFYQQFQGQVIIGLEASGYSFWFEALLERLGCEVWLGDATEIRRRARWRQKSDRRDAELIWDLMVHDEFPRLHQPAAESREVLRMLRYRQKLIKLRTMSKNSLQAIALQAGLAKGKQLFTRVGQEQFQALPMSPVLQWQRDHWFELLKPLNQQLLETMVWCKAQSKDDVNIQRLRTHPGLGLLTSLCLQHTLQPISRFRNQRKVVAYAGLDPVVRSSAERALHLGISKGGSRMLRYLLVEAAHTAIRYDEDLKRFYQRLVERRGRPKAKVATARKLLIRAYIMMRDEIDYAEFRRRAVAARLARTGQGPTTVPVVLIGQSASPGA

SEQ ID NO: 114082 - protein, 316 aa, unidentified
MQTFLNVGVDVAKDAVVVACAAQSFPAHSVANQRVPLLAWLESLPAGSRIGLESTGGYHELLADLAHAQGYTVFLLNPLDTKHYARAMGNRAKTDRVDAELIARLIAQEHTRLRPYTPPTANQRKLDQLIRRRAKIVRIKSSLKLTMGNLSGFTTELKAVLLKLDALITRVDAAMSAIAACSPQHVEAQQHLQTIVGVGPVVGMALANTLERVPFRNADAFVAFTGFDPRANDSGHKIGRRRLSKRGSGELRRLLYNAAMSAAKTKVWRPIYEHYRTQGWSTTAALVIIARKIARAAWSIHHYHSAFDPNRITKNA

SEQ ID NO: 114083 - protein, 455 aa, unidentified
MDTRIIGIDLAVKGAHKAVVLDQASNTFVSKLLTFHTDPADLDRILDAARAGASEDIRVIAVLEATGMAWYPVGLYLQGHGVEVYRVNGQQVAALRRVYQRHAKSDRIDARVMARLPLLYPERLHRCHFPSGPQMVLQRACREVARLKGQVVASKNRILATDQFAWLGWLDILPPYEAAAFWVRAHYYDPWLVLEVGESGLAQAWQAVAPEQPADITWISALVQRAERVIALYGDPNCIDYAQLQASLQREQARLSQAEEQAHQLRLTTVRPLYRQLHPERHLESIQGVGQDSAAVYIAFIGDILRFPSLRNFRGWSGLIPFSRQSAGAQARGLRITKAGPDLVKATAFLDAQVARLWDPQIAAIYYNQMMALGKHHLQAVCACATHLLDRVYVVLRENRPYELRDVDGTPVDKHEARRICLEQYRVPDEVRRRNNYRVRRARKEKRLERRNKQR

SEQ ID NO: 114084 - protein, 350 aa, unidentified
MSNNRFAAADVHAATTTFAVLDDRGKFVMETVVETKAESLLWVVKSITGAVHLTFEEGTHAAWLYDLLRPHVAELVVCNPRKNRNDSGNKSDRIDARQLARWLRSGDLSPVYHGQDSTRVLKELVRGYENLVADSARTKNRLKAIYRSQGESTSGGDVYKLEQREEWLSKLRSSGLRSRAEWLYSQMESLGDLREEAEKAVLCEAKKHRPCSLLKSVPGIGPIRSATIVAHVATPFRFRTKRQFWSYCGLAVVTRGSSDWEIDGEELRRSRRSVATRGLNRNHNRHLKDVFKGSVRDARVFRPHFDSLVESGMRESMARLTVARKIAATTLAIWKKGEKFVLSKAVIKSE

SEQ ID NO: 114085 - protein, 408 aa, unidentified
MNPLFVGIDVSSKNNVAYLMKPDGSRHSSFSVQNNLGGAKLLSERIVSALGSMQLSNVVIGLEATSIYGDSLVYALREDGNLGRFQRKIHVLNPKQVRKFKEAYPDLPKNDWVDAFVIADHLRFGRIAKEVYMDDYRYQALRTLTRARFDVIQNLTREKQRFANYLFLKCSGIAQKKDIQNTSATTIALMERFETVDELANADLNELTVFISEAGRGRFADPDATAKAVQAAARGSYRLPKTVNDTVNQTMAVSIASMRALKEQVKVLDKAIEQQFEIIPNTLTSIPGIGQVYSAGIIAEIGDVHRFSSQASVAKFAGLVWHKNQSGDFEAEHSQMIKSGNRYLRYYLLEAANSVRRCDSEFRRYYDLKFKEVNKYQHKRALALTARKLVRLVFRLLKDNRLYIPPES

SEQ ID NO: 114086 - protein, 320 aa, unidentified
MKMGRVSTKACVCAGIDVGKASLAYAVAGANGPLCCANTTERRARMIAFLASQNVRRVGMESTGSYHFEAADDLRAAGFEVVVLQPMQVKAYARFRLQRAKSDPIDAVLIAQCTAAADTLREAPDPRLAPFAEHLTMIEQIEDDIARAKVRRERYRDPRLKQMIEDEIKQKTALKRVELRSLLKAVRAHKDLARKLHLLHSIQGVGDRTALALVVRMPELGSLSREEAASLLGVAPFIHESGRYKGQRRTGGGRARARTSLFAAAQAAARQWNPALIALYDRLVEAGKPHTLAIVACVRKMIIYANTVLAQDRPWEIRPR

SEQ ID NO: 114087 - protein, 480 aa, unidentified
MIRSVGIDLSRTGSHQVRCLDEQARPCDSFSFDSTLEGLENFEKRIFSNGDTPTIIFEPTGLAWIPMAVYLRARHPECQMVKARLQKVAALRRYLRSYTKSDRVDGVTLAKMPFIDAEQLDEAYLPPAEYHSLQRLTRQRERLMKSITIRKNRIGSIINGYLPDLRKAFSDEWSDRARLFYRQRLNPFTVVRDGKSALETFLVSVKAKGAQTESNRVYQACQKLAEFYEKSKAAGMINEDFFDDLQEEIACELRLMETEEAEVERVSGRIEELYRHLHPSDYLRSIPGIGVRTAQVFLAIIGDPHRFRSQSAFANWTGVVPGARQSAGTEGKGLRMTKAGPSMMKRALFQAGDIARRYDPQLAHLYYREMVHHGKTHLQAMGAVMSHLGARIMAVLREGRPYELRDSQGKPITKKEAMELIRSAYKVPEETRQARRRRKPNEGRLTGRRTREAAKAPQSGPLIPPQKTVYCGEELQSIAN

SEQ ID NO: 114088 - protein, 346 aa, unidentified
MLIIGCDYHPSWQQICWMDTETAETEERKLEHASGEAERFYRGLAAPALIGMESTGNCEWFVEMAAEAGHDVWVGDAAKIRASDSRQQKHDRRDAALLLKLLLEGRFPRLWTPSGEEKDLRQLLIHRHKLVRIRVQVKNELQHLAMNQGVMRKSKLWSKAGEKVLLGLPLRPWASRRREDLMKVKAMLNGQIDLLDQAVAKAADQNERARLLMTQPGVGPITSMAFVLTMGDVSRFQRGKQVASYLGLIPREYSSGGKQRLGSISKQGNRFMRMLLVEAAQVAVRRDPGMRNEYLHRCRSKAKGVAKVAAARKLAIRLYWMLRTNTGYPEVVRVESSSRVPLVSAS

SEQ ID NO: 114089 - protein, 344 aa, unidentified
MGTIIRVGVDLAKNVYHIHAVDENEKTVWQGKYARNTWLKAVMKRVPYTAVIGMEACGSSHYWARELIKAGYTVKLIAAQFVKPYVKTNKNDKVDAEAICEAINRPNMRFVSVKTSEQQDIQSMHRVREELIAQRTARVNQIRGLTAEYGIIAPVGISNLRKYIPCWLEDAENSLSFQFRELLQLLYEDLISLDERIDKVTDKIKLNLSGNPVAQRLMKVIGIGPLVCSALLIDLGDGMSFKRGRDFSASLGLVPRQHSTGGRERLLGISKRGNGYLRKLLVHGARAAFRYIKDKTDALSLWVKKLSITKHPNVAIIALANKLARISWAIVAKNVEYDASHAAA

SEQ ID NO: 114090 - protein, 381 aa, unidentified
MTTAVTHKTHVHTTEATLFVAFELSEKTWKLGFTMGHGQKPRERNVTARHQERVLDEISLAKHRLGLPETAPVVSCYEAGREGFWLHRFLLAHGITNHVVDSSAIEVSRRQRRAKSDGLDVRKLLSMLIRYEQGEHQVWQVVKVPSVEAEDQRHLHRDLETLKRERASTTTRIQGLLSSQGIQVSTLAKLPEQLDTLRLWDGTAIPPGLRRRVLRVYAHHTFLNEQIAAIEAERRAQLQTSSDASIDQIRQLMLLKGIGINGSWLLVMEFFGWRAFKNRREVGGLAGLTPTPYQSGGSAREQGITKSGNPHVRWMITELAWSWLRFQPESALSVWFRERFGDGGKRLRRIGIVAVSRKLLIALWRFLETGVLPEGAVLKEG

SEQ ID NO: 114091 - protein, 430 aa, unidentified
MKSNTQNAKIKAITETTLVLGIDVGSETHYARAFDYRGIEYSKKPFKFSNDEAGFVTFKTWILDIKEKHGKDKVVTGMEPTGHYWFNLGKFLQDNEMKPVLVNPHHVKKSKELDDNNPTKNDRKDPKVIAGLVREGRYMIPYLPEGVYADLRTASNMRFQLQAELTRIQNRISRWFNIYFPEYKTVYGQPDAKSGMLILKVAPLPEDIMTLGIDGVNQIWRDAKVRAVGKARAKTLIEAAEHSVGSKEGEISARMEIRMLLEDYESRNTRLQEVVALIEELVKKIPMAEKLLEIKGVGIKTVSGFLAEVGDISRFNNPKELQKLAGLALVENSSGKHKGETTISRRGRKRLRYLLFEVAMSLVSKNPEFRELHSYYTTRKLNPLKKMQSLMAVAAKLLRVFFAMLTKGVDYDPKKLVGDIKRPAVYLQIA

SEQ ID NO: 114092 - protein, 386 aa, unidentified
MQASTAATLTIGDYGTIFVAIELSQKTWLVTLHSPDKDKISRHRLEGGNHAELLALIGRVRERAARALGGVPAMVSCYEAGYDGFWLHRLLLAAGITNYVFDPASIAVDQRARRVKTDRIDGEKMLRTLMAYLRGEPQVVRIVRVPSGEQEDARRASRERNRLIKEQTAHTNRIKALLRLLGMAVGNPRRRNWLSWLATQRDWQGQAVPPQMLSEIRHEYARLMLVRERLDALATTSAQADPPPAAAQMAERSELLLRLKCLGPAFATTLTHEVFYKDFRNRREVGSYFGLTPSPWQSGGIDRDQGISKAGNPRARCAAIELAWLWLRHQPDSVLTQEYRRRTLDASKRIKRVAIVALARKLMVALWRYLTTGLVPDGAVLKIVKA

SEQ ID NO: 114093 - protein, 268 aa, unidentified
MVDADGRIVREAKILSEPDALIAWFGDQGAMERIGLEAGPLSQWLHAGMVKVGLAVELIETRHVRAAFKTMPVKTDRKDARGIAQLMRLGWFRPVHCKSLAAQEVRALLTARKLIQGKLHDVEMSIRGILRGFGLKVGPTTRCTYAGRIRELIAGHSTLETIASSLLKVRDALVQEFAGFERTLRAIARQDDNALRLMTTPGVGVLVALTFVAAIDAPERFRSSRAVGPHFGLTPRNINPGRPIIAVASRRSAMAACEPRSTRRPTSS

SEQ ID NO: 114094 - protein, 329 aa, unidentified
MKKNFIIGIDVSKSKLDVHCHGQLKQLMVSNDTTGYKKLLRWIKKEVTKELVTVMVVMEYTGIYTYNLEKFLFNNQVDYVRRPALDIMRSAGMKRGKTDKADARMISQYGWYRKEELTAMKPVSRNHQQLQQLMSHRDKLVGDKASYVVRIKELKEQLAADLNKKVFESTEYIVEVLEIEIKEMNKMIEELVKTDDSFENNYRLLRSVTGVGFVTAVHMIIATENFTRFKETRKFACYCGVAPFEHQSGSSIRGKTRVSHLANKKLKSLFTTAAFAAIQHDAELKAKYEQKLKEGKSKMCALNVIRFKLIERIFAVIKRQSPYILSQAV

SEQ ID NO: 114095 - protein, 342 aa, unidentified
MSEVTTIGLDLAKSVFQVHGIDASGKPVVRRQLRRRQVLAFFKKLPPCLVGMEACATSHYWAREIAALGHEVRMMPARYVKPYVKRNKNDAADAEAICEAVARPTMRFVPIKTPEQQSVLMLHRTRALFVRQRTALINALRAHLAEFGIVAGVGRNGLEKLLEVIADEQDERVPPAARDSLLALRDQLVMVRQQILEADRRILAWHRASEVSRRLAEIPGVGPLIATALVAAVPDPHAFRSGRDLSAWIGLVPREDSTGGKHRPGHISKAGDRYLRRLLVVGALSVIRRAKQTDCKRRPWLAALLERRPTKLAAIALANKIARIAWAMMAHGTCYQEPQPTT

SEQ ID NO: 114096 - protein, 365 aa, unidentified
MIVIGADTHKQTHTCAAAMAGTGELVGEHTAAARKPGFHELLDWGRSLDDQRSWALEDCRHVSGSFERFLIAHGERVVRVPPKLMGASRKGERAAGKSDAIDALAVARAALREGPGTLPAAHLDERALEVKLLLDHREDLVRSRSEDQQRLRWHLHDLWPELELPAGCLDRVVWLDRVARKLARAEQGARVRIARELVRAIRERTRRAAALERELSALVRAQAPALLELPGCGALTAAKLLAETAGVQRFQTDAKLARLAGVAPVPASSGNRQRHRLDRRGNRQLNCALHRMAVTQGRLHPPARDFLARKQAEGKSRMEALRALKRHLVRAVWQALRAMEASDAHNTLDGTYGPNLRPGSALVLT

SEQ ID NO: 114097 - protein, 323 aa, unidentified
MNKDIKYFGIDISHLVFDVTDSDGNYYQFKNNEFGFKKFTKLLNNKSHCVMEATGYYHYQLAYHLLESGIKVSVENPLSVKRFIQMGLSKVKTDKSDSKLICAYAEQVELKLWQGNSKEEIECLQIVRTLSVYTKQSTMLKNKLHGEAVLGNPSKLVVTSLKRSLRQLIKEIKTLEDKLLILVKQSHQDLFTRLKTIPGIGPKTAIMLVVLTGGFDRFTSASELCSYAGLTPVIRQSGSSVKGRPRISKMGNQKLRNLLFMCSFNACKYNKACRDLYERIVAKGKSKKLALIAVCNKLLKQAFALAKSGLIYDGNYKSTLVKN

SEQ ID NO: 114098 - protein, 343 aa, unidentified
MQSISTIGLDIAKSVFQVHGVDAAGQVVLRRQLRRRYVLAFFQKLPPCLVGIEACASSHHWSRELQALGHTVRLMPPAYVKPYVKRQKNDVTDAEAICEAVTRPNMRFVPTKTVEQQSCLMLHRARHLFIRQQTAVINSIRAYLAEFGVVAPVGRRGVEQLLEVVADTADCRLPEVARACLAALGSQLRALKAQILEFDRRIMVWHRSNATSKRLDTIPGVGPALATALVASIAEPRAFRSGRDFSAWVGLVPKQNSSGGKDKLGSISKQGDRYLRSLFTAGALAVIRYAKIHGTGHRPWLTGLLARRPTKVVAIALANKLARMAWAMMARNERYKEPAALAA

SEQ ID NO: 114099 - protein, 428 aa, unidentified
MNTTHTTDFAATIGLDWADRKHDLWIGTAGQVKAEHLRLDQTPEALHHWVVKLRERFPNQRVAIAIETSRGPVISALMAYDFIVLFPVNPKALKDYRAAFCVSGAKDDRTDAMLLEELVRLHRDKFTALEPDTELTRKLAGLVENRRHLVDERTRLVNQLHSTLKTYFPLALELLEDQMNTLLAAEFLMRWPSLEAVQKEKPKALRAFFYKHNSRNAKRIEQRIQAVPTAQPLTTDRAIIEPACALVSARAGMLRPLHKALQGLDKAIAKAMEEHPDAAIFRSFPGAGPALAPRLLVAFGTNRKRFGSAAEVAQFYGIAPVVQQSGNCKTVHVRYRCPKFGRQTFHENAACAFKKEPWARAYYQAHKNKHDDKHHPACRALAFKLTRIYFACWRDKKTYQPDRYLQALQKNGSPLHKALKPQSLPSCE

SEQ ID NO: 114100 - protein, 427 aa, unidentified
MNYTQNQKISQITPSTLIVGIDVAKEKHVARFQDDRGLEFGKRLIFENRIHGFQTLLDWVNHIQKENHKDHVIFGMEPTGHYWLNLAYFLKAKGYDVVLVNPMHVKKSKELDDNSPTKNDTKDARVIAQLMKDGRYSVPNLLEGVYAELREGVKLRDQLIKQLMIIEGRIENVIQRFFPEFFDVFGDWKGKAAFYTLRMFPFPSHIQKLSPEEVLQKWKPYVQRGVGLKRATRLIEVAKKSVGIETGIQFAKRELDCLLDQYELYKKQLAQLDEELEGVVESIPGAKQMTNIPGLSHTTIALFFAEVGDLTKYNHPQQLVNLAGLSLREHSSGKYKGQTRITKRGRRRLRKALYLAIRPLVAHNPVFKALHHYYTNRPDRPLKKQQSLIALCCKLLRVLFAIGKKQCEFDGLKLLKGLPQIKALQAA

SEQ ID NO: 114101 - protein, 385 aa, unidentified
MTIQVQVPKFMPRDYDMFAGLDVDKKSMAVVFLDHAGSQRALRMAHSATPLVNYVRKHFAGKRVAFAYEAGPTGFGLHDELVRQAYTCVVAAPSKVPRAPSERVKTNRLDSRKLAENLRGGQLKGIHVPTPVYRDLRHLVQLRDTHVRQLTSSKLRIKSLLLYEGIRFPDPQEKWTARALRELQTLPCSQTVRFKLDDLLETLHFHFQAAARATKQIRQHCLHDPELQQSIDLLLSLPGIGWIVASHLAARLGDPQQIKNGKQIAGFLGIVSSEHSTGEKENRGEITRSGDSRLRSKLIQSAWTAIKKDPELRDFYRRIYQRHPKKVAARKAIVAVARKLTTRIYVVLKEQRPYVVRPDSSIAPLTAEETVGPRDRLDAAQNDQP

SEQ ID NO: 114102 - protein, 465 aa, unidentified
MSEDTEVIAVGKAKPQVIEDDEHQRVFERVAAVDVAKASGMVCVRGPGADGRRRASRVWEVTAVMGAVTGLGRELARDGIEMVTLEATSDYWRIWYYVLEMCGLAVQLVDPSQARAIKGRPKTDKLDAMWLARLTEWGMLRPCFVPPAPIRVLRDYARARTDLVHERTRCWQRLEKLLEDALVKLSSVASKLTTVSARDMIAAMIAGERDPAVLAGLARTRMKARHADLVAALDGMFDSHHGDLAQLELDQIAFLDQRISWAEDKITAVLAGIPAAWGIDADGSTGPDAGTGPDAAVLPAVRRLAEIHGVTVLTAAQIIAEIGLDMARFPTAAHLVSWTGLCPIDSQSGRRHGKRKGHGNTYLRGYLGQAATGAASTDTFLGERYRRIARRRGKARAQVAVARSILIIIWHLLADPTARYTDLGPDYAASRTSRDKKIRNHLRGLRALDLTDQEILTILTAHQAA

SEQ ID NO: 114103 - protein, 339 aa, unidentified
MNCVGIDVSKGKSMIAVMRPFGEVVVSPFEVRHTANELSELAGLLKSLDGETRVVMESTGNYHAPVAWLLHGAGLYVSVVNAMLVHDYGNNSLRRGKTDKKDAVKLANYGLDHWLTLPRYVPEADTRLMLKTCYRQYQQYSKVQTMLKNNLISLLDTAFPDANRLFTSPPRTDGSEKWVDFVATFWHCECVCGLSKKAFTAKYQKWCRKHGYNFSQDKALDIYASACGRFGVMPKTNTAKLLVEQAISQLQTTSAALAALKQEMQSLAASLPEYPVVMGMFGVGPTLGPQLIAEIGDVRRFHSKKALVAFAGIDAPPYQSGQIDVRSRSISYQSPYPYG

SEQ ID NO: 114104 - protein, 346 aa, unidentified
MEQVTTIGLDIAKSVFQVHGIAADGTVVVRRQLRRGQVLPFFEKQAPCLVGIEACATAHHWAREIGARGHEVKLMPAKYVKAYVKRNKNDAADAEAICEAVSRPTMRFVPVKTTEQQALLMLHRTRKLLVRQRIRLVNAMRAHLAEFGIVAGVGRNGVDRLLKLIEAGDTRLPAPARDCLLALRDQLAITRQQIIESDRRILAYHRESELSRRLEEIPGVGPLIATALVASVPDPHAFKSARDLSAWIGLVPKQSSTGGKERLGHISKAGNRYLRSLLMIGAFSLIKRAKLGKGRHRPWLLELMARRPIKVAAIALANKIARIAWALMTRRTRYREPEVKLTPQAA

SEQ ID NO: 114105 - protein, 402 aa, unidentified
MKASKQYLWFCGIDIAKQKHVACIVDRNGKALLKPKSIRNDTEGFQQILNDLKQTGKDGAVLVGMEATGHYWYSLHDFLTRNGYDVAVLNPIQTALQAKQAIRKCKTDKHDAFHIASLLRTDQYKAAVVPDELAMTCRLLTRLKYRIVKQVSMTKQLVHSRLHPAWPEYEGLFSDIFGATSMKLLKTVSTPKELLESDIDDISEIIRKASRGKFGSVHTQKILQSAQNSVGMQRGHYGISTGIRLLLEQIEMFGPVREKLDAEIRRLATQLPQYLFTLPGASDLTIVSLYGEIGPIEVFAKPSQLVAFAGLDPKVFQTGQYDAPRRQVSKRGSPYLRKTIWMMAHQAVCREGDLRDFWRRKRRQNKHHLAAVTATANKLCHIIWRIMTDRRDYIPKGYNPKS

SEQ ID NO: 114106 - protein, 334 aa, unidentified
MQGKIPSVRAETAVYVGIDVCKAWLDVYLHPTGRGLRFSNDKEGLKLLCKELAGAGVGLVAMEATGKLHRLAHRMLSRAGYPVAVVNPLRSRKFAEALGQLAKTDRIDAQLLAIYGACLSPGATPVPAKILAELQELVMARQAAGANVYRERQALPHADETALKNRHAAAESKVLKRLLQRQIEACARAIEGLEAAIKPLLESDPALQRRYGILCSIKGVGPAVAAMLAACLSELGLLSAPKIAALAGVAPFDDDSGDRRGQRRIMGGRAHVRRALYMAALSAARCNPDLKAFYERLRANGKAAKLALTAVMRKLVALANTLIREDRHWTPEHA

SEQ ID NO: 114107 - protein, 404 aa, unidentified
MSLSSPNFRTPSIFVGLDVHKKTIAIAAIPGAGGAFVLEREVSATDLTALRKALTRLSATATVYCCYEASSAGFHLHRVLGQWGFNCQVIAPSMIPVLPGQRRKNDRLDARRLAEFYRSGLLTAVHIPTPEEEAVRDFVRMREATRRDLMRARNRALKFIRRKGIVYTAGGHWTVAHWAWLGKICLPIKIDQATLAEYLSRVDVLTAQVRELDRRIEELAKTEPYREQVRILCSFRGISTHTAMVLATELGDIRRFPNPRSLMCYLGLIPREHSSGERTRTGGITKSGNSHCRHVLVQASWSYRFRPSKGIGKTCRSPLAKRLEGAPPWLVEMSWKAQKRLWKRYNDLCLSRNSCIAVTAVSRELAGFIWAALWRSYNEPGHLNSGLPEAGFLPPETAALQAVG

SEQ ID NO: 114108 - protein, 345 aa, unidentified
MPIVGGLDIHRKQITFDYLDTVTGQVRRGQISPADRVHLRAWLARFTGREDVAFALEGCTGWRYVAEELAAAGIAAHVAEPADTAFARGRKRHAKTDKTDSRHLRQLLAEGRLPECWIPPGHILECRALLETYHDLRAEHTAWVQRIHAVLFHQGAPPLGEGTLRTEQGLAALRAVSAAHLSPAGQLQVATALEVIDALETRLHAVRHQLLDAARHLAGAKVLAARLYGVGPVTALALTCWLAGEGRFSSSRKAVRFAGLDVTVWSSDRKGPPGRLSRQGPPVLRWAVYEAGKTHARSSAPDHRYYAQVKDRCNGKRAALSEARKILRQACHILTELGDDALSAA

SEQ ID NO: 114109 - protein, 457 aa, unidentified
MPQPKRSRSRTGLSAVHPAAAAIDIGATMHVAAVGPDRDTEPVRTFQTFTDDLHRLADWFARCGVKTVAMESTGVYWIPVFEILEQRGFEVMVVNARDAKHVPGRKTDVSDAEWLQRLHEYGLLRPSFRPQAEIAGLRAYLRQRERLLDYAAAHIQHMQKALMQMNLQLHHVVSDITGVTGMNIIRAIVSGERDPNVLASHRERGCHASVETICQALVGNYREEHVFALSQAIELYDVYQTKVAACDRQIEVILKRLKKSATPPASKLLPPKHRSRQPNAPSFDARAALHAILGVDLTQIHGLGPYLALKLVGECGTNLTAWPTAKHFTSWLGLAPHNKISGGKVLSSKTRRTSNRAASLLRLAAVSVGRTDTALGAFYRRLAARAGKAKAITATARKIAVLFYNTLRHGMSYADPGATYYEERYRQRVLGNLQRRAKSLGYVLHQAERDPVQTVVS

SEQ ID NO: 114110 - protein, 331 aa, unidentified
MFPVGIDVSKNTLDLCMLYDGIKGRIKTRNIQNNRHSVENILRWLRLQHCGPEDVHVVMEATGVYHERLATELHDAGFYVSLANPHRSREFARGMGIMTKTDKVDAYMLACYAFLKNPHRWEPPAPEIRYLGALLRRRDVLLGDALREENRLEKYLSTDTPADIISSCRRMAQSLREEVSNIERQIKVHIKASPALRRDYTLLTSIKSVGPQLGMHMLVVLRSHDFSSAEQAAAFLGVVPIEKRSGTSVRSRPRMSKIGPPQLRAKLYMSALCGKIYNKRMRNIYDEMCLRGKPKMVAIGALMRKLVHWCYGVLKTGIVFNDEGLKQVLST

SEQ ID NO: 114111 - protein, 339 aa, unidentified
MAILYVGIDLAKNVFAIHGVDEHGKAVLVRPSVPRARLHQLVAALPPCTIGMEACSGAHHWARLFAQHGHTARLMAPKFVAPYRMSGKRGKNDAADAQAICEAVQRPTMRFVPVKSQDEQARLCIHRVRQGLVEQRTATINRLRGLLSEFGIVLAQKAATVRREAAAHLEDLPGWANTAVGDLLSELHRLDERIGEYDRHVVHMAREDERSQALMQLSGIGSTTASALVSTIGNARDFKNGRQLAAWLGLVPGQYSSGGKVRLGGITKAGDGYLRTLLVLGAKAVLAAARNKHDRLSRWAMALEVRRGYWKAVVAIAAKNARMAWAVLAKGETFKPLEA

SEQ ID NO: 114112 - protein, 353 aa, unidentified
MSGAYEGRQFVGMDLHRRRSVLVRMTEAGERLETVRISNDPEYLREVMTRAGEAPEVVLEACYGWYWAADALAELGATVHLAHPLGVKMFSYRRVKNDERDAADLADLLRMGRLPEAWIAPPTTRELRGWVRHRAKLVGLRSNLKCQVHGILAGAGVQVPMSDLFGPSGQRLLATASLATESRSRIDSLQRLITALDFEVELFAKLVAGRLRDHPGYQAIQLIPGIGPILAAVFVAEIGDITRFRQPEQLASWAGLTPKHHESDTTVHRGRITKQGSRLVRWAAIEAVQRLPGHTRIGQVRDRVAARRGRNIGVVAAARELTELVFYGLRDHHVRALTRSAPAHPPARTPVPA

SEQ ID NO: 114113 - protein, 363 aa, unidentified
MIIIGADYHPGFQQIAFVDTETGDCGEQRLQHREETEKFYRDLAAQGMKVRVGMDASGHARWFERLLAELNIELWIGDAAEIRTKRVRKRKTDREDARLLLRLVQEDRFPQIWVASWENRDLRQLLWHRHRMVQARTRLMNQLQAVALNEGLRCKKKLWREHGREQLQSLRLAPWASRRREDLLKLLDQLNPTIAELTQAIEQEAENCPEARRLMTHPGVGALTALAFVLIIGRAERFQCGKQIASYLGLVPMEDSSGERRRLGHITKQGNALLRFLLVEAAQVTVRTIPQWRSKYFHLAMRRGRKIAKVAMARKLAVRLFWMMRQEWNYEQVQKFGSHVGQPENRHGVQENTELLTGASRSS

SEQ ID NO: 114114 - protein, 419 aa, unidentified
MSKQPVELAAFIGLDWADEQHAVCLQEAGATRREALKLDQTPEALQAWIQQLRARFGGRPVGIAVEQARGALIYALMHVDFLQLYPVNPQTLAKLRQAFYPSGAKDDPGDAELLLEVLLKHRDHLRVWVPDNVLTRSIQLLTEGRRKLVDERTALTNQLTAALKMYFPQALDWFGDLHTARACAFLQRWPSLPQLQGATTSSVRKFYRKQGYRGDDKLKQLIQNIQQAQPLTEDPAVVLSSAMMVHSLVKQIPSLTESIQDYDRQIASLFKEHDDSTLFGSFPGAGPTLAPRLLAAFGSDRNRFEYAAEVQQLSGVAPVTEKSGKACWVHWRWACSKFLRQSFHEFAGQSILKSVWARAYYQQQRQRGQSHHAALRALAYKWIRIIFRCWKDRTPYDEATYLKSLQLRGSNLASALKTT

SEQ ID NO: 114115 - protein, 362 aa, unidentified
MIVVGIDPHKRTHTAVAVDRATGEHRGELTVNAREQGHEELLRWARGLDLERSFALEDCRHVSGPLERFLIARGERAVRVAPKLMGENRRSSRSYGKSDAIDALAVARAALREPGLPEADLAGAELEVKLLADHRDDLVGEANRTINRLRWHLHDVDPTFEVPRRRVGSRAWMERLARRLARLEQTSRVRIARRQLRRLRSLAREIKEAEAELAALVRAHAPELLELPGCGTLSAAKLIAEVAGVERFASDAKLAMLAGAAPLDASSGRQQRHRLNRRGNRQLNLALHRIAVTQARLHPPARAYLERKRAEGKSRREALRCLKRHLARTIWRTLRASSSERMLPISPNLREMKMPAAALALT

SEQ ID NO: 114116 - protein, 372 aa, unidentified
MGWMPLSPLTASRCAILVVSKHKLKERASMEEVSIIGVDLAKNVFQLHGAGADGAVVFRKKLSRQQFARFMADHPACDVAMEACPSAHHWARELTAHGHRVRLIAPHYVKPFIKRQKNDAADAEAIAEAATRPTMRFVEPKTEEQQARAVAFRAREQIVKQRTEAINALRAHLYEFGHVAPEGVGYIPRLAKVVDDPGSGLPDLARDICRMVLEQIDLLSSRLAAVSAKLAAASKAAAMPRQLQTMPGVGPITALAVETFAPPMEQFRRGRDFAAWLGLVPRQHSSGGKQRLGKTSKMGQRDIRRLLVTGAMAVVRWALRRGAPQNPRLERMLERKPPLVAAFALANKMARGIWAMLTRGEGYRDPVIASAA

SEQ ID NO: 114117 - protein, 430 aa, unidentified
MEIIYQKACGVDVHKSFIVAVICDSTSIKPQYSRKRFSTFPNSLIDFRNWLSANDCQNVCMESTGKYYIPVYNALEGYISNVVVSNPKWVRCIKGEKDDNKDAKWIADLFKLGIVRHSFIPSKNIRVLRELTRYLYKLTNMRTSEKNRFTNALTVGNCKLDMVFSDIFGKSSSAIINTIISQNQYSDKDILKNVDKRCKASEEDILNSINGISWVDAQKERMLLIQNHIDYLNSTIKSLKEIIDIVVKPYEDYIKFLCTIPGVDRNSAISIISEIGTDMSQFSSHYRLVSWAGLAPGCNESAGKKKSVKISRAGVYLKPALVEVAHAAVTDKDCDYYAVKYKQISKRRGKKRAIIAIARKILVTIYHMLSTGEVFNPSDLSKVETSDKDRIKYTKNNFMQSAKQLLSLGLTSEEIILLVNSQNSNLTPIT

SEQ ID NO: 114118 - protein, 281 aa, unidentified
MEPKQWVGIDVSGKRLEVFVRPIQRILKVANSPAGLATLVSELLGIDPALIVIEATANWHLAAVAALSGAGLPVAVINPRQARNFARATGQLAKTDPIDARLLAHFAEAIHPPVRVLPDEQTQELAEWVQRRHQLVEMLTAERNRLRAMSGSARADIETHIDWLEKRLVRLDEELERLIADNPVWKDLSALLCSVPGVGSVVSATLIANLPELGSLSHKQIAALVGVAPLNRDSGQTRGHRTTWGGRAPVRTMLYLACVVGIRFNPIIRRFYQRLNLTTLL

SEQ ID NO: 114119 - protein, 345 aa, unidentified
MQISVLGIDLGKNSCSVVGLDAGGHVVLRRRMVRDGVLKLASKLPSCVMAMEACCGAHHLGRTLAAMGHQVKLMSPEYVRAYVKAQKNDDRDAEAIAEAATRPTMRFVELKTADQLDMQSLHRVRDRLVGERTALINQLRAVLLERGITVPKGRHKLEQTLIELLDGPEGTDSRLSPRMCMLVAGMRAEWLELDRRITAYDEEFAAAAKTHAAVRRLASIPGIGVLNATALVAAIGDARAFARGRDLAAWLGLVPRQATTGGRAKLLGISKRGNKYLRKLLIHGARAAMPSLLTSTTPLGRWLRVLAERKHKNAVTVALANKLARIAWAVLRRGEAFDMTKLARA

SEQ ID NO: 114120 - protein, 427 aa, unidentified
MICAAVERCAGIDVGKKWLSVCLMLGALNGEPRIERQRFGVNVAALQGLRDWLLKEGITHVAMESTGSYWKPIFNVLEGSVKVCLANAQEVKMRKGHKTDEKDGWWLAHLLRHAMIHPSFIPPQPIRELRDLTRRRVKLNGVGTAEKNRVQKILEDANIKLGNVLSDVFGTSGQLMLDALLKGEAKPEEIAQFAKGRAQKKIPDLIAALEGHQMSGHHRKMIRYSLKHMQFVEEQIADLDKDIAEKIHEAWLDRPWELLQTVPGVQERSAANILAETGADMAQFPSQRDISSWAGVCPGNNRSAGKNRSSRPTGGNPWLRSALTECAWAAASKKNCFLKEKFWRMVTKSKGQKNSALVAVAHTMLQLGYEVLRSGKPYRDRQVPPLSGPQKQRLIRQHVRRLGKLGVRVHSNRPGPSKTEAQDRSTK

SEQ ID NO: 114121 - protein, 415 aa, unidentified
MDNIRVCAGLDVHEETIVACLRVRAPRGPKVKRETRSFSAFADGLQALREWLMAAKCERCAMESTGVYWMPVYEVLEDSGIELFVGNAAHLKAVPGRKTDVKDAEWIADLAAMGLIRKSYVPTAEVRELRKLMRYRRGVVRERATMCNRIIKQLELSGIKLAAVASNVLGKTGRRIIDALAKGRATPQQMAELAVGALRKKMADLARAVSVELDEDSRWILGRQLERLGEIDREVEAIEARIDAKLKPHQELRTLLTTIPGVSDIVAAVLIAEIGPTVDAFRSEHALANWAGLCPGNNESAGKRKRAPHGSGNEYLRSTLVDAAHAAVRKKHSYYKAKFHKLMARRGYKRAVFAIAHKILRAVYHIINKRVAFQDLGELYLDKLDTRRTARRALQTLRALGFEVVISRQPEGVAG

SEQ ID NO: 114122 - protein, 406 aa, unidentified
MKRRQEDWFGPHELYLGVDVGKSFHWAVGLDQEGEIRISRRVENRLDDVDALLEEAGDAALVVVDQKNNIGSLVVRRCRAKGIDVGYLPGKSMKSAREMLPGTAKNDRIDAEVIAQAGMSLRCAVLPIADTDDLGASMSLLSSQLAYATRRATMARNRLHAVLLESDPAFEAAADLSAAWTLDVLAAFGGAAGIAAAGRRSYGAACARDGDTREARDAFWNAACASAGSCSHPASADLVVREPADEIATADAERAELSAGLEGMLSEDETYQCLLTIPGIGPKTAAALVASIDIGLFKGDSKLAAYCGLAPKDRDSGTSLSSVTSTRAGNKALKNLLIFSCNSLVGTKNRFGRYYDRCVARGMRHNKALKAVARKRLRVIYAVMRDRVPYIEPSADGDVEKSSSAA

SEQ ID NO: 114123 - protein, 392 aa, unidentified
MLYLGIDIGKNNHVATLIDSQAKPLFKGFSFTNTTDGGESLLVLLLKHIKLTTDIEIGMEATGHYWLSLYSFLVSKGYAVHVINPIQTDGWRKGIEIRKRKTDKIDSFLIADLLRYGDFVETSLSDENIMSLRNLSRFRHYLVGSIGDLKRKAICILDQTFPEYQGVFSDTFGQTSSELLLHFQSAEDFVSITAEQLEAALAGVTMKSFAKNKLTQISELAAKSFGLKFCRDSFSLQLKLLIEQIRFIEAQVSDVEAEIETLLAKLNSPITTIPGVGTVTGAAILSEIGDIRRFSNPSKLVAFSGIDATVIQSGESSGTYKMSKRGSAYLRKALFQAALVASNNDPVFKAYYQKKRSEGKHHLTAVGAVARKLCYTIHSILKNNTSYLVQHP

SEQ ID NO: 114124 - protein, 393 aa, unidentified
MICVGIDVAKDKHDCFILSSEGEVLADVFTIQNNAEGFDRLLQTIRRCARPEDKIKVGLEATGHYSYNILGFLLNEGLDTYVINPLHTNLYRKSLSLRKTKTDRVDARTIAAMLMSDVDLKSYTDTVYHNEELKSLTRYRFDKVHERAKLKQSVSRLVTILFPELEKLVPSLHLASVYALLSEFPGARQVAGAHLTHLKAVLYDASKGRYGRDMAVTLRDAARCSVGSVMPAKSLELRHTIRLIRELDAEIEDIEAAIQSMMDEIQSPITTIPGIGVRMGAMILAEIGDFSHFDSPDKILAYAGMSPSTYQSGQLSLSGTYSHMEKRGSRYLRYALYNATKYVCLWDPTFAAYLAKKRAEGKHYNVALSHAAKKLVRLIYALEKSRQPYHIAA

SEQ ID NO: 114125 - protein, 408 aa, unidentified
METVTWVGMDVHARSTHAAVVIAVTGELRRARFGGGAEPVVAWLGGLPAPVRACYEAGSTGYGLARAAQSAGVAVGVIAPSKTPRAPGERIKTDRRDAELLVRLLMAGQLHPVAVPTPRVEALRDLTRARDRIRGDLLRARHRVSKLLLRYGRVWPSDRGTWTQEHHHWLRRQRFDDPNLELAYLDALAAVDALMRRRDLLDQRLLVAAQDADVAAAVARLRAFRGINTLTALALHAEIHDWHRFGRPGRLAAWIGLVPSLYQSGESAQSGAITKSGSRHARRLLVEAAWHYRRRPGRGVTLTRRQEGVDQHTIDIAWRCQHRLYRLHTRLRDRGKPANVATVAAARELACFLWDAMREYQPPTTTAARASAEPSRLAGTPAATMRRRLRPRAFLDPRRPATKQGHLG

SEQ ID NO: 114126 - protein, 422 aa, unidentified
MLAIGIDWATRTHVAVLMTKPGEVLARVTFDDTYEGYLHLLDRIRAYAAELKTDEVAFAIERKDLRLVDFLLANNFTGYLIDPNRMEGYRLRYCSSGAKSDDRDSFVLADVLMKDRDQLTPIKTESDAIQRLKMLLADRAGFVTDKVVMTGRLQTCLREYYPAALELFADVTGLTALAFLEAYPTLERTKNLDDQTLRDFLKAHHALTRKRMQSMLAALVKPAIPVPAVIVEVKHKTMLGLVAQLQAVQKIIDRCDADIRAALAENPETKRFDGLPGAGPIVSGTLYVIFGDDRTRFVNADEVQSYVGTAPRTIQSGESRLVGFRFRCHRDYRAVITRWAFSSLRQAQWARRYYNQKRREGKTHYHALRCLANTLLKIAFTIWKHQTEYDENRYLAQIARHRMSNDSLADIRGHFQPPTQEA

SEQ ID NO: 114127 - protein, 427 aa, unidentified
MGTERTSIERFRQLKKEIRGSEEYLIVGIDVAKDKHHAFFGTATGKTLLRRLVFENNKVGFEKLLTHVEAIRVQHALSKVVFGLEPTGNYHKPIGMYLIRLGFNVVFVSGSAVKNNRALLDGRWDKHDTKCAANVADLISQGKCLYYESPSATISDLRDLLSLRKRLKKEEHSLKMRIRNGLIAKHFPELDRYYNRCESENLAIVRWCLDPRTIVNMEFNRFFQIVTSRERGTAQRRRLFAIWNMAWDSIGCVTHEACEFEAKLLVEKLKQVRAFILETQQMIETVSRRVPEYRCLLTIPGFGPYISSRVIATISNPYRFESQNQVLKMAGYDLSANRSGKNSDKAVPVISKKGNGDLRYALYQAALVASTRDCDIILYYTKMLRGRERERGIKTKMRVKLAAKLLVIAWTLMKKKESFNPGYLNIE

SEQ ID NO: 114128 - protein, 405 aa, unidentified
MNAVGIDVSKGKSTVTIRRPGDVVLMPPCDIPHTQSAINCLIKHIQSLDGETKACMEHTGRYYEPVATWLSDAGIFVSAVNPILIKDFGDDSLRTPKTDKADSKKIARYTLDRWAKLKQYGSMDKTRNQLKTTNRQFGFYMAQKTAMKNNLISLLDQTYPGANDFFDSPARSDGSQKWVDFVHTYWHVDCVRSKSLNAFTEHYRSWCKRRGYNFSADKAEKIYHLSSDLIAVFPKDDITKMLIRQAVALLNTASETVESLRLKMNELASTLPEYPVVMDMNGVGSTLGPQLMAEIGDVTRFTHREALTAFAGVDPGKNDSGQHVQKSVRTSKKGSPYLRKALFQVMDSLIKRSPADDPVYAFMDKKRAQGKPYYVYMTAGANKFLRIYYGRVKEYLSTLPEKEGI

SEQ ID NO: 114129 - protein, 385 aa, unidentified
MAQFEDLSRCLAAFDQNSTLVMVVEMSQSSWLVAGLVPGVARQPLKKLEPDGAALLRLVQRWRSEAVKAGRMIDRIVLAYEAGRDGFWLARWLRSHGIESYVIHPTSIPVSREHRRAKTDRLDAAMLLRALLGWLRGEPKHCAMAAIPTIEEEDAKRPGRERESLVSERTRIVNRMKGALARLGIRGFKPELRKAAQHLAGLRTPESTPIPANTLDEFRRGMARLAVIHEQIKAIEVARREHLAQAPDSGPPAMVRLLARVLGIGVETADMLVYEILYRKLRDTKAVARYAGITGSPDESGAKRREKGLAKAGNARVRRGLIQLAWRLLLFQPDSALVQWYRARIAGGARKTSMIVALARKLLIALWRMVNTGEIPDGFVLRPAV

SEQ ID NO: 114130 - protein, 349 aa, unidentified
MVIVGIDALKRTHTAVAIDEAGRKLGEKTTRMTTTEANLELLRWADGFGSERRFAVEDCRHLSRRLEADLLAAGEELVRVPPKMMAHARDAARTYGKSDPIDALAVARAAWREPDLPLARLDGPTRDLRLLVDHREDLVRDRVGQINRLRWHLHELDPAWDPTPRALVRFKHLEAVEARLETLEGTVAWVARDLVRRIRELTVDVNDLERRITAIVSELAPALLALPGVGALTAAKIVAETADVRRFRSKDCFARHNGTAPLPVWSSNKVRHRLSRAGNRQLNAAIHRIAITQMRIHDDAKVYLERRLAMGNTKTEALRALKRKLSDVVFRALLVDAETAAEAPFSAAA

SEQ ID NO: 114131 - protein, 408 aa, unidentified
MQVTFGIDVSKSTSTVCELIGESKNELTITNNRPGFIQLLHELTAFSKHPQIIFEATGVYSRRLQAFLEDYGYEYVVINPLKAKKEMNMGLRYNKTDKTDAYHLALIQRLYRHPVNQSESQTYKQLNALSRFYDQLTSDLVIAKNRLHQALQSTFPEIENLFSSARGKNYWQIVVRYPHCDLVRREDKKQLINWLMSLKGIAFKHALRTADKLIELAYQAYPVVSCSSIEVEQVQYYAHRLLNLSDQRENLIARMVKLAKSLPNHDLENLESIPGFAQTTAVRVLAELGDLRRFSNPNKINAFIGIDPGRYQSGEMDSNLSITKHGNAVARKLLYRAIGQIDNAAKTNPCHIADYYESKKLSSQTKGFKKIAIASIHKLIRTIYALIINDQPYDYNVATHNQKDFSRN

SEQ ID NO: 114132 - protein, 323 aa, unidentified
MTLTIVEETRAITGGVDTHADTHVAAALDPIGGLLGVREFAATPVGYTGLLGWLGGFGTVCLVGIEGTGSYGAGLARYIAAAGVRVVEVDRSDRQDRRRQGKSDPLDAVSAARAAQSGRARGAPKGRDGQVEAIRALMVAKRSAAGERTRTINQARALIVTGPDDLRGRFARHSADHLVTGLASMRPRPGDVVGYATRIALRELGRRAQFLDGQLERLDELIIPLVTARAPGLLSVYGVGPNTAALLLIAAGDHPGRLRSEAAWAHLCAAAPIPASSGKTVRHRLNPGGDRQANHAPAPTRLPAPTSNAAPQKESRKRRSSAA

SEQ ID NO: 114133 - protein, 340 aa, unidentified
MEGLYAGSDLHGNSNFLGIIDAQGKRVFKKKLPNELVLIRQALQPFQGELVGIAVESTYNWYWLVDGLMEEGYKVHLANPSAIQQYVGLKHSDDKHDAFWLAEMLRLGILPEGYIYPKEERPVRDLLRKRGHLVRLRTSLVVSLQNILSRNLGRKVDVKDVKALREDRVSLLLEMSEDLALAGRVSKEAIDHLTRQIYRIEWAVQKKIALKEEYRYLLTLPGVGKILALTIMLETGPIGRFETVGDYVSYCRKVPSQWISNGKWKGSGNRKNGNKYLSWAYAEASEFARRLYPEPRAYYYRKMQKTNAAVAHSALSNKLARAGYYVMRDQVPFRPEKLFG

SEQ ID NO: 114134 - protein, 320 aa, unidentified
MMAQNDLVVAGIDVAKDKVDVCVRSLSLKRTFASTAEGRRELTSCLRRHKVGKAVMEASGGYEREWAKALRAAKIEVRIVDPKRVRSFAQSAGRLAKNDTIDAEMIAWFAETFDEARGQAYDAAREQLHQMVNARQALKDMQAKLENQGEHALPATVQRIHARIIKTIAVELVKIEAAISAMVQATPRFTELAEIIESVPGIGRTTSAALIAAMPELGQANNKIVAALLGVAPYDDDSGRRRGERHIKGGRRRTRNVFYMACLGAATQHNPVLKAFYNRLVAKGKEKKVALIACMRKLISILNIMIKRRQKWDANRYAVS

SEQ ID NO: 114135 - protein, 351 aa, unidentified
MIWVGVDAHKRLHQALALSDHGEALGERTIANTPEAWAELLEWAKGLGPERIWAVEGAWYLGRGLAQHLARSGERVHEVSGRWTARRRRGMRRPGKSDRLDARAVVQLLREEADSLPRVYAEEDPIATVQLWSRLQAELTEDMTRLVNRLHNLLLFCDPGYETKLPRLTTTAGLEAVRAYVAPGQGELVRERERAVRQLAEQLTLLSEQDRELRRKLERASRARFSPLTQIEGVGPIIACAIVAEVGRPRPGFGEERFAALGGVAPLEASSAGAVRHRLSRLGNRRLNMLLHQIVLTQGRVYPPARAYLDRRRAEGRSDREARRALKRHVARRVFHALQQCFRPTLEAVAA

SEQ ID NO: 114136 - protein, 326 aa, unidentified
MNCNIGIDISKAKIDVAWLRDAATLKVKTKVFANNRDGFTALLDWLKSQTDQPLENCFCIMEATGIYHEPLAFWLHDHGVKVTVANPAHVKNFAKGLGTIHKTDKKDSVILARYGDMVKPAPWQPEPQNIRELKALLARAEALNEDLQREENRLEKAEFSTGSDHIIPSIQGMIEHIKMELDKLNHKIDDHIDKDDKLKADQELLLSIPAIGKVTSRLMLAVIRSRAFNNAGECAAFLGVIPQLQESGICRGRTTLSKKGNPMIRAKLYMAAVVAGQYNPCIIKQRERLLNNGKTKMQALGAAMRKLVHICFGVLKTQTQYKPQAA

SEQ ID NO: 114137 - protein, 414 aa, unidentified
MLFVGDDWAEDHHDVEVLDEAGRRLGRARLPEGVAGIDRFHALVGRFADPDDESGAGQVLVGIETDRGPWVAALVAAGYRVFAVNPAQAARFRERHAISGAKSGTGDAHVLADMVRTDAHQLREVAGDSALGEGVKLLARAHQSLIWERTRHLLRLRAGLVEYFPGVLAALAAGGLDLGDRDALELLATAPDPDTAAGLPAEQITDLLSRGARRGDLPARAEAITAALGAPQLTQPPVLAGAYAIVTRSLVAVLTSLAEQVTELESQVGAYFGQHPDAEIYRSQPGLGVILGARELGEFGDDPHRYTSAKARKNYAGSSPITRASGRKSVVLARHVRNRRLADALHAQAFSALRASPGARAYYDALRARGIGHHAALRQLSNRLVGILHGCLKTRTLYDEHTAWAHHQDQQKVA

SEQ ID NO: 114138 - protein, 391 aa, unidentified
MICVGIDVAKDKHDCFILNSEGEVLADVFTIPNNMEGFNCLLRRIQVCATVQGKIKVGLEATGHYSYNILGFLLDSGLATYVLNPLHTNLYRKSLSLRKTKTDRVDARTIAAMLMSDVGLKPYTDTAYHNEELKSLTRYRFGKVKERAQLKQSIARLVCILFPELEKLMPTLHMASVYALLDEFPGARQIADSHLTHLKSVLYDASRGRYGRDAAVSIREAARGSIGSVMPAKSLELRHTIRLIRELDAEIEEIESVIQRMMDELHSPITTIPGIGTRMGAMILAEVGDFSRFVSPDKVLAYAGLSPSTYQSGQLTNCYAHMEKRGSRYLRFAIFNATKYVCHWDATFAAYLAKKRAEGKPYNVAISHAAKKLVRLIYALEKSREPYRLPA

SEQ ID NO: 114139 - protein, 337 aa, unidentified
MKYSAIDLHSNNSVVVVSDEVDRVLVRRRLPNDAATILALLAGHREELVGVVIESTYNWYWLVDALQAAGYRVHLANTAAIKRYEGLKHSGDEDDAAYLAHLLRLGILPSGYICPPATRAVRDLARKRMQLVRSRTAQVLSVENMLSRETGAGMRSRAVQQLTAQAVEGFGFNQDVKQALCANVAVIKTLNREIDKLEQRLHQCVRLRPEFHLLTSVPGIGPTLATLIMLEVGTIERFAAVGNFASYARCVDSARISNGKKKGQGNVKNGNAYLAWAFVEAANFAHRYCAEARRFYERKKARTNGVVATKALAHKLARACYHMLKEQKPFDVKRCFA

SEQ ID NO: 114140 - protein, 343 aa, unidentified
MKITRVGVDLAKNVFQVHGVNRAGRCVWKRQLKRSNWLQVLTEVLEPGCEVGMEACGGSHHWARELRSRGFVVKLVSPQFVKPFVKSQKNDANDAEAVCEAISRPSMRYVPIKTAEQQDLQAMHRIRDTLMRHRKAKANQIRGLVAEYGIVAPKTIVPLRKAIPDWLEDAENGLSDNFRALLFGLWEDFQQLEQRVKGIDRQIEAVSNTNADAKRLKQLRGVGPLVSTALVAQFGDGRQFTRGRQAAASIGVTPRHAGTGGKNQIYGITKRGDPYLRSILIHGARAVVSQAKRRDDTLSRWLTDLADRTHTNVAAVALANKTTRMAWAMLRNGTDYDPELARA

SEQ ID NO: 114141 - protein, 410 aa, unidentified
MTLFCGIDWAESHHDVAIIDDTATVVAKARIGDDAAGFARLLDLLAQAGDTAENPIPVGIETDRGLLVAALRATGRAIYAINPLSASRYRARHQVSGAKSDAADAVMLANIVRTDAGAHRPLPADTDLAQAVRVLARAQQDAVWGRQQLGNQLRSLLKEFYPAALDAFAGLPEGGLARRDARTVLAAAPTPALAARLTRARLRTLLAKAGRRRNVDHDVDRLHGIFRSQRLRQPPIVENAMGIQFSALLSQFEAACAASDDLAEATRTHFERHPDAEIITSFPGLGPLAGARVLAEIGDDRARFADPRGLKAYAGSAPITRASGRKTVVSHRHIKNRRLAAVGPIWALSSLRASPGARRHFDTRRAVGDWNHQAQRHLFNKFLGQLHHCLRTRRLYDEHQAFPPPLTIAA

SEQ ID NO: 114142 - protein, 391 aa, unidentified
MIYVGIDIAKDKHDCFITNSDCEVLFKSFTISNNRDGFETLFQKIQSVSDDLTKVKVGLEATGHYSYNLLGFLLDKGLPTYVINPLHTNLYRKSLSLRKTKTDKVDAHTIASMIMSDVNLKSYSDTSYHNEELKSLTRYRFDKVKERAKLKSSVSRLVCILFPELEKLVPTLHMSSVYSLLSEFPSAHDVASAHLTRLIHLLSESSKGRYGRDIAICFRDAARSSIGSHMPAKSLELKHTIKLILELTSEIDEIEAEIKTIMDEINSPILTIPGIGYKMGAMIIAEIGDFSRFDSPDKILAYAGMSPSIYQSGQLDNCYAHMEKRGSRYLRYALYNATKYVCHWDESFGTYLAKKRAEGKHYNVALSHATKKLVRTIYAMEKSGQAYINAA

SEQ ID NO: 114143 - protein, 376 aa, unidentified
MREKLRFSGLDVHAETIAVAIAESGGEVRSLGTIVNREDSIRKFVKKLGSPEQLRACYEAGPTGFVLYWQLIQLGVDCAVVAPSLVPQKPGDRVKTDRRDALKLARSYRSGDLTAVWVPDEASEALRDLVRQREAAKQDQLRARHRLTKFLLRTRQRAPLGLRAWTDRYIRWLAQVRYTQPAQEVTRLDCMNEVEHMSARVKRLEEAILEVVKLAPQSMQVLIRGLQALRGIAHISAVTIASELGNVSSRFESARKLMGYSGAFPSEHSSGNRIRKGGITKAGNAHLRRIVMESALCYRHPPRVGEKLRKRHEGVPAEILEIAWKAQNRLHKRYMKLAMAGKERNKVTTAVGRELLGFIWAIGVKAERASQQSIAA

SEQ ID NO: 114144 - protein, 317 aa, unidentified
MNKIISTGIDVSKDKLDVALLDQGQVGQLGQFENNVKGIRELIKLLKHKGATSAPLIIESTGEYHLSASFMLQKDGFKVNCINPLITKQYERASIRGAKTDRVDALRLAKIGILENNLPVFQSSRAQLKAKKYASLLAILEHQAQALKQSMASVEKNQALFSMRAKSKRLARILTLFKEEITDLKSDLADQLPDSWQECANATKGVSRAELGILHALLAGHEFSPKDKLVAFLGLDVRKRQSGSWQSREHLSKRGSPYGRKVLYQIAWGLMMHNPKYKQYYQSLRKRKKPYLTAMAALSRKFLRNFYATVLKPEMNG

SEQ ID NO: 114145 - protein, 359 aa, unidentified
MQTKVNEKLFDGQSIYIGIDCHKKNWTVTILGEQYEHKTMSQNPDPDILASYLKRNFPGADYSAVYEAGFNGFYPCRKLRQLGIHCNVIHAADVPTRQKDKLQKMDPVDSRKLARSLRSREFEPIHIPDQSLESDRALVRQRFRVMRDVTRTKARIRSLLFQFSISVPDQFTLGQTRSWSKLYINWLKGLHTEHESLKQTLDNYIRIGELQRKELLDVNRQVRSLSQTDAYRGNYNLLISIPGIGFLTAMTFLVQIGDIRRFERLDDLCDYVGLVPMMHGSGERMYTGKLINRGRKELKTMIIEAAWESVRLDPALMSKFNELTRRMNKNKAIIRISRKLVSRMRYVLINQEPYRLGII

SEQ ID NO: 114146 - protein, 352 aa, unidentified
MKPLKYIGMDVHKAMTVIAVLDNTGKVLAEAIIETKGSTVLGFFKSQRGALHVAFEEGTQAAWLYDLINPHVASVVVCNPRKIVRQGNKADRVDAKLLAELLRTESLKPVYHGEKSTRAVKELALSYISVVEDGTRIKNRVKALFRGRGIECNGTGVYNPDERRNWLAKLDSPAVCARAARQWQELDLVERLSEEASKDLVAEAQKHAATRILRSVPGIGPIRAAVILGVAGTPHRFRTKKQFWGYCGLAVVTRTSAEYELVNGRVCRSKKRPLPRGLNNNYSRPMKTVFKGAAKTVAAGVWKSRFEAMVAAGTPESLVRLTLARKIASITLAVWKKGERYDQRKLKTMHAA

SEQ ID NO: 114147 - protein, 370 aa, unidentified
METLTTYVGLDVHKETISVAVAESGDRGQARYFGKIANSAQALSKLAAKLSRKGRTLRFCYEAGPCGYGVHRHLTGLGHDCAVVAPSLIPRRPGDRVKTDRRDCLGLSKLDRAGELTAVWVPDAEHEAMRDLVRARGAAVRALRRARQQLSGFLLRHARVRTGKNWTLAHRRWLATLRFEPPAQQIVLEDYIQAVEDAQARRDRLTAQIEALVPSWSMAPVVQALQAMRGVALVTAVTLLAEVGDLTRFHSPRQLMAHLGLVPWENSSADKIRRGGLTKAGNAEARRVMVEAAWCYRLPARVSRCLLDRLAGLPQDVRDIAWKGQVRLCARYRHLRAQGKDAPLVTAAIAREMLGFIWAIAQVVAPRKAV

SEQ ID NO: 114148 - protein, 349 aa, unidentified
MTEQRLSYIGERVYVGVDVHKETYTVTCVCQRQIVKTATVQADPASFAVSLLRWFPGATLYSAYEAGFSAFVLHRALTKTGITNIVVNPASIAVAANDKVKTDRRDAKKLAIDLADGRLRGIYVPTETEELARLLPRTRAQIVEHRATIARQIKAKLHQFGLITPASRRLISSRYLREIAAWSLPPELNVSLTLLAEQWRFATRQLIEMRRLLRDQAKAQEEIEKVYRSVPGIGEVVARTLATELGDMTRFANERGLFCYTGLTPSEYSSGASVRRGHISRQGSSRVRHLLVETAWRALPRDRVLKEIFDRIAATRGKKRAIVAIARRLTGRIRACCRQGTTYAIGTYA

SEQ ID NO: 114149 - protein, 473 aa, unidentified
MIKSVGIDLAGIGEHKVRCLDERAQLCDGFSFETTTAGLEKLEERIFSDGSNPIIIFEPTGLAWLPVAVYLKARHPDSRLVRVQAQKVVALRKYLNRSSKSDKIDSLTLAKMPFIDPEKLEEIYFPPGKIYAIQRLARQRRRLENEIAGRKKRIGSIVDGYFPGIRSSFSDPWSAHARAFLRSRLNPLSVVRAGEKALHTFLTKTRKHCKVDAFVESHGVYLTCREVATLYKASSSVGTIDGDFFSALQDEISRELRLMEMEEAESAAIAKRLEQLYLEVHPSDNLRTIPGVGDITAPIFLATVGDPARFRSQSSFANYCGIVPGASQSAGSEAKGLRMTKAGPAIMRWALFQAGGIGRAHDPQLACVYYREMVHNGKTHMQAMGAVMSHMSARILAVLREDKPYDLRDMDGRPVTREEARRIILSKYQVPEEIRRERRHRKTPGNYKLQKTLREMLVPRTYEAAEAPQPVVT

SEQ ID NO: 114150 - protein, 403 aa, unidentified
MNAVGIDVSKGKSVVAIMRPGGEMVYKPFPVKHDSDGINALIKCIKSVDGESRIVMEHTGRYYEVLARKLSEADLFVSAVNPKLIKDFDNSSLRKVKSDKADSIKIARYTLDKWKELKQYGVMDELREQLKTMNRQFNFYTKQKSAMKNNLIAILDQTYLGVNKFFDCPARPDGSQKWVDFATTYWHADCVKKMSLNAFIAHYKKWCKRKGYGFSKVTATKIYEVTKSIVSVLPKDETTKLIVKQAIDELNATSRTVENLRTLMNDTAAKLPEYPVVMAMKGVGPTLGPQLMSEIGDVTRFHSKGALTAFAGVDPGVNESGSFEQKSVPTTKRGSSVLRKTLFQVMDVLVKTKPSDDAVYQFLDKKRSQGKEYYVYMTAGANKFLRIYYGRVKEYLNSIESQE

SEQ ID NO: 114151 - protein, 386 aa, unidentified
MEHYVGLDVSLKQTAICIVDRTGKVQREGIVSSDPAAIAAFIKSYAPNVVRIGLETGPTATWLWTELRKQGLPVICIDARHAKAALKMQINKSDRNDAVGIACIMQCGWYREVRVKDLGSHATKALLVSRALLVKIKRDIENQIRGLLKNLGLVIGQAKMNVFAVRAAELADNRPSLIAAVEPLLKAREAVERQIADLDRNVLRLARNNEQVRRFMTAPGVGPITALCFLATIDDPTRFKRSRSVGAYAGLTTRRYASGETDWTGRISKCGDKMLRSYLYEAANVLLTRVASGRRSKPGASGLRSEAGYAKPRLPSPESLPSSCTGCGSKVPNSSGHQRRLLVNLRSRTTEFPLTSGNQCPCRDAGVGAIAPGFAMLVKSKTRFTH

SEQ ID NO: 114152 - protein, 388 aa, unidentified
MNVGTDKSEPLTAIHTDLGAIFVSLELSRSSWLITSLSPGGREKMSKHSVRGGDFAGLMERFAQLQEKARLRTGQSFRIIVVQEAGLDGFWIHRALQNEGIESHVVDAASIATSRRRRRAKTDKIDGETLVRALLAYKRGEPRVCAMVKAPTPGEEDRRHLCRERKALTAERVRHVNRIKGFLFSQGVSGYQPLRRDRRQRLEELQTGDGRAFPQHLKALINRELDRLELLLKQIKTVEAGRDALLAVKQTAKPAPAAMLLDIRGIGPEFAAVLWSEGLFRHFENRRQIAAYAGLAPTPWQSGAVDREQGVSKAGNPRLRTTLIQLAWLWLRNQPRSALSVWFHERVSRNGGRLRKTTVVALARKLLVALWKYVTAGVVIEGVTMKVA

SEQ ID NO: 114153 - protein, 340 aa, unidentified
MEQVATIGMDIAKSVFQVHGINAAGAVVMRQRLTRTRVLGFFAKLAPCLVGIEACGSAHYWGRELSRLGHEVRLIAPSYVKPYLKRQKNDAADAEAICEAVTRPNMRFVPVKSSEQQSIMVLHRTRSILVRQRTQLSNAIRGHMSEFGLTAAVGRNGLQALIKVILDSGDARVPDEARACLLMLVEQLGPINAQILESDRRIIASARSTEVGQRLMGIPGVGPVLASALVATISDPKSFASGRNLAAWIGLVPRQNSSGGKERLGGITKQGDRYLRQLLVVGAVAVVRYAVRNGARRPWLVQLLARRTPKVAAVALANKNARMAWAIMTSGERYREPVAA

SEQ ID NO: 114154 - protein, 373 aa, unidentified
MRADRKRGKVKVGKMNSIVAGIDLGDRESLATVLSPIGDVADRFTFPMNEEGYAFFASRVPKHARVAFESTIMAYPISRALRMHGYSDVTVAHPKTLAWIVRSKRKNDRVDSLKIAKLHMAGMLPESHLLDRDDQIVRDLLVQRVKLGVEIGRLKNSVIGYLKREGIYDSLPPTGDNFSLKRRHAIRSLRFHDKRDLILGTMMDRLRFLERQCTPLEDSVRENAKLSDDVRILMTITGVDYYLASLISSFIGDVERFPSDDHLASFFGIVPTSRDSADVKRRGRMSKDGSSIARWALSIMVDTVMHHNQPIRDYYTSVKKRTGSGKLAHVSTMRKLTRMLYHMLKTKQHWKWENPRLTERKMARLEMDGGDGS

SEQ ID NO: 114155 - protein, 404 aa, unidentified
MFYAGIDWADQKHDGLVLDEAGRKLGSIRVPHTPEGLDKLDAWLSSALSGQDKEQMACIIETNHGLLIAFLLEQGWPVYPINPRTVDRKRSASGAKTDAIDAYVLAKTGRADFADLHRLTPDSEKVAELKGLTRDQDSLIHMQTRLVNQLTACLKAYYPVALDLFAKLQQRSTLVFLQTYPTLEAAQTASVEQIRQLLKSAGHTTAENVAPKIFEHLHQPSLRANAVTTRTKSRLAVALIVQLQPLVEQIAAYDKEIEQLFLSHEDNVVFSSLPRAGKRLAPRLLAEIGDDPARYETAASLQALGGTSPVLFQSGNYSKPHRRLGCIKPLRNALHQFAWQSTLQEDWALAYYERKRAEGKSHSVAVRALSNIWVRIIFAMLTSHKPYTSTTFETARHLHASKAA

SEQ ID NO: 114156 - protein, 412 aa, unidentified
MTHPKMQYTYVGIDSHKDTHTAVFIDCFFEKLGEVEFSNLPASFDAFLQQAQAYLMPGTSFMFGMEDCSSYGLLLMKHLKGNGQKVKHVNALLVARERKNQNTTQKTDSIDAECAARVLISKFSELPDANHEDKYWVLRSLVARRNLLVRHRAATKHYLHSLLTQQYPNYRTFFEKIDCKTSLAFFERYPSPGTLQGVTAEELAAFLEIPSNRSVSMAKAKQILANIHDTATLHQDIRDSVVRSAIRQIVFSIDEVDKLEASIEAFLKEFNCTLTSMVGIDTVTAAQLLSCIGDIRRFSSPAKLARYAGIAPVTYASGKKDLQFSNQRGDRELNSLFFWLAVRVSNPMSANHRVMNSFFYDYYQRKMSEGKTKRQAIKCVERRLVNIVWTMLTNGEEYVNPPAYDLRQDLDA

SEQ ID NO: 114157 - protein, 354 aa, unidentified
MIIIGVDYHPEFQQTASVDTDTGEFQEKRLAHPEEAEKFYRAVAAQGVKVRVGMEASGHARWFERRLAELQIELWIGDAAEIRTKRVRKQKTDRQDAQLILQLLLENRFPKIWVPSWENRDLRQLLWHRHRTVQARTRIMNQLQAVALNEGLRCKKRLWREAGRKQLESFALAPWASRRRRDLLELLDRLNPTIAELTRAIENEAEKNPAVQRLRTHPGVGALTALAFVLIIGQAERFQCGKQVASYLGLVPLEDSSGKRRRLGHITKQGSSILRFLLVEAAQVTVRSLPQWRSKYFHLAMRRGRKIAKVAMARRLAVCLFWMMRKEWDYEQLKKFGSHAGQPEYRHGVPSNTE

SEQ ID NO: 114158 - protein, 499 aa, unidentified
MKKNQKARKKEVLNLLKKQKIRSIEQLDAYKLSCCHPHSAGIDLGSSENYVALSPAIAAEMDLPIVHTFGTTTPQHEACRDLLLRCGVTDVCMESTGIYWINLHYILTEAGIRVCLVNPRMFRMVPGRKTDVLDCQWLQTLHYYGLVRGSFIPEEHVRQLRTYMRLRGKLIEDRSSYVLRMQKALVEMNLMLVNVIDDVTGKTGMAIIEAILDGERDPKVLAAKRDGRCKHTQQEIEEAMTGIWKPDQLVALKTNHNLWLAVQKEIDSLDVEIGVLLQTFEDAPKREQEDKQAEGRNPAGAPQAEGQNPTDGQQPQTKKKKKTRPSKNDIKAGIDLEKELLRICGADLTSLTGIQANAALQIIAEVGTDLSNFPTREDFTSYLGFSPHNKITGGRIISSRTDRKKSSAAQAFKKVIPSIMQGKSSLSAFYHRLAGKKCKAVAITATCRKLAERYYDVITKGEDYIEYGEEKYKQIQKEKELALLHKLAKKHSIELKNIA

SEQ ID NO: 114159 - protein, 343 aa, unidentified
MAKDTLVAVDLAKSVFEVAVSHHPGQVARQMRYSRAQFPLVLAQLPPATVVMEACGSAHFWARRIQSLGHEAVLLPPHAVRPYVRRNKTDRTDTKGMLEAYRNEEIRPVPVKSVAQQTLASLHRVRSGWLAERTARINTLRGLLREFGILIPLGAHHAVPSAWAQIEDAESEIPDPLRPALAEICSEIRDLERRIKMIEHQLAALAPQTPAVAQLLTIPGIGLLIATALVAFVGDIRRFPSGRHFASYLGLTPRESSSGLRRRLGAISKRGDVYLRTLLVHGARSVLLAAKRRSPDRLRAWALARENARGHNKAAAALANKLARIVWAVWKHDQPFHSTPNPA

SEQ ID NO: 114160 - protein, 356 aa, unidentified
MIYTGIDDHKRYSVACTLDAQGQKVHEARIDGNVPAAFAAYFKKLGNPSEVVIEACWNWGVLYDLLEDTAGVAKVVLSHPAKNRIIADAQIKNDRIDAKALATLLRGDFVARVHVPSRDVRQRKNVVRQRLWLARVRTMIRHRIPCVIDRHPLLERPAVKDIFSKQGKAWMKRAPLPPADRTLLDDDLAIHALLQAQVDALEKIIVADNTANPLAVRLQTLPGVGKILAPVLALEIDQIARFPSADKLCAYAGLVPTTHASGGKISHGRMLPFCNRWLKWAFIEAAWVAVGCSDYFGTFYRKQRLRRKGANDAITIVARRMAIIAWKMLAQERDYTPQAPAATPATSMSPAALTKD

SEQ ID NO: 114161 - protein, 427 aa, unidentified
MSGRDYSKQVEKRQKIKKTTLVVGLDIGKEFNAMGLMNKEGEVIGRYPKIYNSRRGFEYFKKEVEDTKRRNGLKRVIIGMEPTGHYWRKIAFYAKEEGYETKFIRTTATKHQRELDESSSAKTDMKDALTIANITREGKYIDTVIEDGMMRELRTLGKLREKIMVGNTASRHRLGAVLDDYFPEIKRTFWSIKAKSLMAILERCPYPKDVLKMEEKEIEEIIGKSSRRKKEAKEKAKEIYKAAKESIGLKNIGEGDRYRLKVNLEGIKQTEKEIKEVEKQMEKILKKIPSAEIIQSIPGIGMITTAVFLGELGDPKYFKGAKQIIKYAGYDPQENDSGKSVGRKTISKKGRWLLRKCLYFMGLGVVNNNTFFKEYYDRKLTTKNRFGQDLRKKEALCAVVIKLIKVIFALLRDKKQFTEERPVFARA

SEQ ID NO: 114162 - protein, 355 aa, unidentified
MIGEKYIGLDVHQATISVAVMDSKGKVVMESILETQAATILEFFAGLRGTLWVTFEEGTWAAWLYDLLKPHVAKLVVCNPRKNALLKHGNKSDKIDARKLADLLRLNDLEPVYHGETGVRMLRELARSYLTIVKDLSRVMNRLKALYRSWAIPCAGRDVYYTRHRSEWLGKIPEAGTRRRAEQLYQQLDMLQHLRQQARRELLAESRKHTITAKLRQIPSLGPIRSALAVALIQTPHRFRTKRQLWTYSGLGLETRDSGEYHYVQGQLRRRKKQVSIRGLNKDHNHDLKGLFKAAATRASVQPGPFQDFYQRSLAKGIKPTMARLTLARKIAAITLTLWKKGENFDVAKLKSQAA

SEQ ID NO: 114163 - protein, 343 aa, unidentified
MDHFAGLDVSVKETSVCIVDDTGKIVREVKVASEPDALLAVLANPTYRLRRIGLEAGPLSQWLFSALANAGLPVICVETRHIRAALKAQINKTDRNDARGIAQMMRAGLYRAVHVKTLRSQKLRMLLTHRKLLQSKAIAIENDLRGTLRNFGLKVGMVGTVRFEERIKELVENLPDLAVLVEPLLIVRQTLREQFGILHRRLLAIVRDDEVCRRLMTVPGVGPVVALTYRATVDVPARFRNSKAVGAVFGLTPSKYQSGEINRTGAISRCGDEMMRMMLYEAAQVMLLRSAKWSWLKAWAMKIARNRGMKKAIVALARRLAVIMHRIWVDGTEFRWTREFAAA

SEQ ID NO: 114164 - protein, 399 aa, unidentified
MSGRAESEKGSDMQAIDCNQTLRSSHAAEAETIFVSIELSRARWLVTSLSPKTTKLSRHSVPGGDAAALLGLLRELRLKAERRSSASVRIVSIQEIGFDGFWIHRVLAANGIESHVVESASISVPRRHRRAKTDAIDGELLLRTLMAYKRGEPRVCAMVVVPTPEDEDRRRLSRERKTMVKERIEHINRIKGLMASQGIAGFEPMRAKAKERLDDLRTGDGRPIPERMKAEIRRELERLELLRKQILEIEAERDALLRPAETTTPSPGAQILKLRGIGPEFASVLWQEGLYRRFDNRRQLAAYAGLAPSPWQSGDMSKEQGIAKSGNARLRVTMIEAAWLWLRHQPKSALALWFKDRVRTDRGRRRRIAIVALARKLLIALWRFVTLGEVPEGAELKAA

SEQ ID NO: 114165 - protein, 458 aa, unidentified
MAPRPKGNPPKSKSSHPQSLHVLHPHAAGIDIGAREIYVAVPPDSCTDNVRSFPTFTEDLLALRDWLRECRVTTVAMESTGVYWIPLFQILEAAGIEVCLVNARHCKNLPGRKTDVQDSQWLQQLHTVGLLRGSFRPADQVCAVRAILRHRDSLVRGAGRCVSHLHKALTQMNVQLHHVISDLTGVTGLAILTAILAGERDPQRLAALKDHRIKASRDVIAKSLRGDWRPEHLFTLKQTHTLWQQHQSLIAECDEQIEALLKTFDSRVDVKAAPLPPARTSHKKAQRNEPQFGAREQCYRVLGVDLTTVPGFQTPTVLVLLCELGPEFAGKFPTAKHFGSWLGLCPDNRITGGKIYSVRTRDVKSRVAEALRLAAQSLHRAENYFGELYRRWRARLGSPKAITAMAHKLARVLWHLLKFKQPFNPEVFAKEEAKMKRKKLQRLHNMAADLNYQLVPQP

SEQ ID NO: 114166 - protein, 459 aa, unidentified
MKRDKRKAKRLPSQLAAVNLHAAGIDIGAQEHWVAVPADRDLQPVRRFGACTADLEAIADWLQQCGVTTVAMESTGVYWIALFELLEARGFAVVLTDAREVQRAPGRPKSDVQDCQWLQRLHTYGLLAAAFRPTEQVCVLRSYLRQRAMLVTYASQHIQHMQKALTQMNLKLQPVISDVTGVTGMTILKAILAGERDPQKLAHFRDRHCQHSEAEIARALQGNWRTEHLLALQQAVELYEFYHQQITTCDHQIEAHLQTFVDKSEGKELPHRPRKRKRRATEPRFEARTPLFRLSGVDLTAIEGIDENTALVLLSEIGTDMSRWPTEKHFASWLGLCPHHKISGGKVLSRKVRPSANRAATALRLAAQCLHHSHSALGAFFRRLKARLGAPKAITATAHKLARLVYRLLKYGEDYVAQGMEEYEQAYRARTLQNLVRKAKALGYKLLPTSDAASQGAPA

SEQ ID NO: 114167 - protein, 368 aa, unidentified
MDVHSTNYTLCVVEPKLEGDPDLLYETQVEPDSWYILDLIEKLKKKYKDDQLFITCGYEAGCLGYTLYHDLDNHGVKCVILAPSTMEMPGGKRIKTDKRDAYLIAKCLANGGYKAVHIPSDKDEDVRDYLRMRDDHRDLMTVLKQQINALCLRNGHKYTKSRWTGNHLKWLKELELSKTDRETLNEYMLTYQYLAEKLARLDNRIEELSSEEEYADKVKKLRCYIGINTYSALGLIVETGDFQRFAKGNIYSAYLGLTPGERSSSDDKNRLGITKAGNKHARTILVEAAQSICRGTIGAKSKALISRQRGNDPAVIAYADKANERLRRKYRKMMYHGKQRNVAVTAVARELACYVWGMMTDNIGTAAI

SEQ ID NO: 114168 - protein, 370 aa, unidentified
MKHSIIFIGLDVHKDTIDIAIAESDGSKEVSHYGKIDGDLAALDKAVRKLQSKGAELYFAYEAGPCGYDIYRHLTKQGFSCIVVAPSLIPKKSGDRVKTDRRDAISLARLYRSGDLTAVYVPREDDEAMRDLSRAREDAVNASRTARQRLGAMLLRLGYRYNRKTMWNATHFNWLSTIKMSHPAQQIAFQEYIHAIMECGERVNRLTEQIQKLIPEWRLVPVVKALQALRGVSLMVATTTIAEIGDLSRFANPRQLMAYLGVVPSENSSGKKEKRGGITKTGNGHVRRALVEAAQTYHYQARVSRVLLARQEGLPDSIRKISWKAQVRLCGRFRKLTGRGKPRNKVVTAIARELSAFMWAIAKEVPIQYA

SEQ ID NO: 114169 - protein, 316 aa, unidentified
MSQSERVIGIDVSKNLLDVAVVPETETWSVENDEEGIRTLIKDAKRLRPRLIVLEATGGLETAVVALLAAARLPVVVVNPRQVRDFAKSLGKLAKTDKIDAQILANFGEATKPEVRPLKDQQAQQLSALVARRKQLVEMLTAEKNRLMTAPEPVDSDIKAHIAWLEQRLNDINKDLRKAIKASAVWRAKEELLRTVPGVGPVLSVSLLAGLPELGKLNRKQIAALVGVAPFNRDSGKFRGRRSIWGGRAHVRAVLYMGTLTAIRFNPVISAFYQHLCAAGKAHKVALTACMRKLLTILNAMMKNHAPWQPNFKEAA

SEQ ID NO: 114170 - protein, 420 aa, unidentified
MKLVYSICCGVDVHKNVFVATIVSTDNLGISTYQQKSFSTINSDIERFHSWLIENQCYHVCMESTGKYWIPIFNYLEKDINLILTHPKYVKAIKGKKTDKKDSKWIADLFKFDLVRNSFIPPKDIRELREIARYRFKLVCMKASEKNRIQNCMTVSNIGIASILSDPFGVTATQIIGYLLSSDNFDEKKCRKLIKGQAKAKSDDIIEAIQGFNIGSDQALKMQLARGHLEYLDQLICKTEVELYVRIKPYWHFVEKISKMPGMTELSTTIILAETGVNMSVFESAKQLVSWAGLAPANNESAGKKKSVRISKAGQYLKPLLVQCALAAIKSKKNPYFAIKYQRIKKHRGHKKAIIAIARMMLVCIYHMLAEGTEFNPSDYAELMNPHLRQEKVVLNLEIALGYIQSLGIDTSVLNIPCND

SEQ ID NO: 114171 - protein, 398 aa, unidentified
MTESSDYESVQVFIGVDVGKDTHHAVAINRSGKRLFDKALPNDENKLRSLISDLKQHGQILLVVDQPATIGALPVAVARSEGVLVGYLPGLAMRRIADLHAGEAKTDARDAAIIAEAARTLPHALRTLKLADEQIAELSMLCGFDDDLAAQTTQASNRIRGLLTQIHPALERVLGPRLDHPAVLDLLQRYPSPEKLASLGEKKLAAQLCKLAPRLGKRLAADIAQALAEQTVVVPGTNAAAVVLPRLALQLITLRKQRDEVALAVEQRVLAHPLYPVLTSMPGVGVRTAARLLTEVACRAFASVAHLAAYAGLAPVTRRSGSSIRGEHPSRRGNKALKRALFLSAFAALRDPLSRAYYTRKMSQGKRHNQALIALARRRCDVLFAMMRDRTFYTPQAS

SEQ ID NO: 114172 - protein, 347 aa, unidentified
MNFYTQQHKHYCGIDLHAKAMYVCSLDQAGTILVHKNLPTTPEAFLRIIAPYREDLVVGVECMFTWYWLADLCSKEGIAFVLGHALYMKAIHGGKAKNDKIDAHKIAVLLRGGMLPQAYVYPAEMRATRDLLRRRCHLVHKRAELLAHIHNTNSQYNLPEIGKKLAYKANREGVEEHFPDPSVRKTIEVDVSLIDHYDQLLGEVELYITRSAKAHDGQTFSRLQSVPGIGQILALVILYEIQDIARFPRVQDFVSYCRLVKCAKESNGKRLGTSGKKIGNVHLRWAFAEAAVLFLRHNQPGKEYFAKLERKHGKAKALTVLAHKLGRAVYDLLTREHAFDLNRFVTA

SEQ ID NO: 114173 - protein, 368 aa, unidentified
MKEITTYVGVDAHKKDLFIAMLIGDAQRPVTWTVPNEPNAVRRLVRKLERDAPGPVRVCYEAGPCGYALQRQMTTPRVTCQVIAPALIPRKPGERIKTNPRDARKLAELLRAGLLTEVRPPTPEDEAVRDLCRARDDAREDLQRCRHRLGKLLIRRGLHYSGRNWTAGHRRWIDSLSWAQPAERVVVDDYLLAIEQLESRLSALDTGLAEVAETAPYRERVGWLRCFRGIDTLTAILILAELHDFRRFQSPRALMAYLGLVPGEDSTGEKHRRGRITRTGNALVRRLLVETAWHYQHRPRIGVALTRRRKGQPGRVIGIADKAQQRLCRRFRCLMEHHKPAPKVAVAIARELAGFLWAALQPAPTPAG

SEQ ID NO: 114174 - protein, 389 aa, unidentified
MKIYVGIDIAKLNHFAAAISSDGEIIIEPFKFTNDADGFQLLVSKLESFDKNSLIIGLESTAHYGDNLVRYLVTELYQVCVLNPIKTCQMRKNNVRKTKTDKVDTYVIAKTLMMQDNLRFVSFFDLDMMDLKALGRFRQKTIKQRTRLKIQLTTYVDQVFPEIQYFFKSCLHQHAVYALLKEAPSPKEIASMHMTHLANLLKVNSHGHFTKEQAKELRVLAQKSVGANDSAISIQITQTIQQIELLDSQLEKIEAEMTDIMKFNDSVIMTIPGIGYINGGMILGEIGDIHRFSNPNKLLAFAGLDPSVYQSGNFQAKTTRMSKRGSRVLRYALVNAAWNVVRNNATFKAYYDAKRAEGRSHYNALGHCSGKLVRVIWKMLTDNVEFNLK

SEQ ID NO: 114175 - protein, 403 aa, unidentified
MVRYHVGVDVGKHRHHVSIRDLSQDDYCKAFSFTNDRDGFIELIAILEKLSSERSDFLIGVEACSYALNLSYFLMAMGFTLVEVNPFRAGQFRKAQGKKAKTDKIDARTIAAILPLGDHKSLSIPDPILDNLKELTRFRVDLVDEKSTMIIHLREALSTLFPEYEKVFRQLDSAGSLALLAAYPGPEHIIGTGEEAVGRTLSLASPRRMSIGMARRIIEAAKCTVGVVQRQPSLGVKISVLAKRIAALQSTIRDLDRQITTLFNSLPCKPRGFPVGRAPSLATIISEIGDIHRYPTLKKFLSHLGWCPQSFQTGNYHLKHPKMSHAGNKYVRRLIWMLSIFAVQFVPRYREYFQRRVSEGKAKMHIIVAVGRKLLSALYAMLKSGMAYDPNWEENSRPALARR

SEQ ID NO: 114176 - protein, 322 aa, unidentified
MHTSHLGIDVAKAKLDCALRLTDAKIRHKVVKNTPEGFEQLLLWLRKQGAESIHVCMEATGMYWEAVAEYLAGLQEATVSVVNPAQIKAFGASQLVRTKTDRVDAKLIAQFCCERTPAPWQAPSAAEQALRALVLRLDALQNMHTQESNRLQVARPAVRESIAEHLAWLDGQIKTLIQAINEHIDNDPGLHDKRRLLESIPGVGERTVAVLLAFYADPTRFGNARQAVAFAGLDPRQHESGSSVKSKPRLSKIGHSFLRKALYMPAMVTLYRTTWGAVFRERLAHAGKPNMLIIGAMMRKLLHVAYGVLKSGEPFDSTMHGA

SEQ ID NO: 114177 - protein, 400 aa, unidentified
MRTVFGIDVSKARSDVAILVNGEKVHDYTILNDALGFSRLFHDLKQVVQPEIIFEATGIYSRRLEAFLKNNNFAYTRLNPLEAKKQLDSLRHRKTDKMDAENLARTQFVLNRKATYIQEEVHEQLRDLSRFYQNLTEDIVKSKNRLHRVLQVTFPGIEMALSSPTGEQYWNFVILFPHPLFILEKSRDKLEEDIRQSTSKRISQKRVEALANKLIHLAESSYPAVNENSSIVEQATYYAKELLRLSQVRKEVLDTMVEKAKILPEYEILLSIPGIAETTATSIIGELGDLRRFRTPNQINAFIDIDLRHYESGNYLAQEHITKRGNPYARKILFKTVHNIFSVSRFKPCHIADFYLKRKKQSPNASTKPYTIASMHRLIRTMHYLVVHNKSYDYTLAQSQ

SEQ ID NO: 114178 - protein, 322 aa, unidentified
MSVWVLGIDIAKQKFDAALLVDGKTKHKVCKNSLEGFEILMIWLEKQGIQKVHACLEATGNYGEDLAIYLYEAGHIVSIVNPARIKGFGQSELIRTKTDKIDAALIARFCLAMKPGPWIPPSPEIRSLRALVRRVDSLIDMRSQEKNRIGTAHKSVVLLIKKHIAYLDKEIEKIRKQIADLIDQNPDLKRKRDLLDSIPAIGKVTIPHILAEIDDLEKFNHVRQLVAFIGLAPKETLSGSSIKGKPRLCKIGHARLRKALYMPALVSIQCNPVMIAFYNRLKDKGKNGKVIVCAIMRKLVHVIFGVLKSGKMYDPNFKPNFA

SEQ ID NO: 114179 - protein, 355 aa, unidentified
MQRNNFNFKNQNVYVGIDVHKQNWQVSISIASGYEENYRMSSGNISELVTHLRNKYPDGNYYSVYESGFSGYSTHRALEKHGIKNIIVNAADVPTMQKEKVNKTDAVDSNKLSKALMKGLLTPLYVPTEDEESLRELYRLREDRVKKLGREKSQIKHFLHRNGIIVPKELEKASVYWSKAFVTWLENVETTQFKRRTLDFMLKEYEWHRQQLLSVTMELRKIMKTEHESELTLLTSVPGVGMITAIAMISEVGNFSRFNNERAFASYIGLSPTCHNSGEKESPGEITFRCNRRLRKAFIESSWVAIRRDNALSACFLKHKARMNSCDAIVRIARKLSCRVLSVMKTGACYTTGIN

SEQ ID NO: 114180 - protein, 334 aa, unidentified
MNEITTLGIDLAKRVFQVHGVDSRGVCVLRKQLPRGKLLSVLAQVPQCVVAMEACAGAHDWGRRIGVLGHRVKLIPPQYVKPFVRGNKTDRNDAQAICEAALRPGMPEVAVKSEEQQAVLAVHRMRELIDKQRKQLANQLRSVLAEFGEVMPCGIPTLLRELPERLERVPALLRGELREGQERLRELQRRSAELTRRLEQLAKADPLCTRLMRERGIGPMCASAYVASIGDPSRYRNGRQVSASLGIVPRQHSSGGKAVLLGISKRGDRYLRTLLIHGARAVIRHVPGKTDPLSEWLQRLIARRGVNCATVALANKTARRLWAIWRAELQGLPA

SEQ ID NO: 114181 - protein, 412 aa, unidentified
MDLVYARCAGLDVHKKTVVAGVRVPAPQGGQRRGEVQTFPTTMSGLKALADWLVAHEVTHVAMESTGVYWRPVYAVLEGLMTVLLVNPRHVKMVPGRKTDVRDCEWLAQLLECGLLRSSFVPPRPIRDLRDLTRLRKTLIRERGHHVNRIEKTLELANIKLGSVVTDLMGNTGRAILEALSLGIDDPDKLAACAQGLLRKKQAALREALVGQLTPHYAFLLQQHLSLIDALDVHIATLDARIAEAMAPFADAAALAQTMPGVATRAAQAILAETGVDMAAFPTADNFASWARLCPGNNESAGKRRPATTGQGATWLRATLQEVAWAAAKTKKSYYRALFHRLKARSDSKTAIVAVQHAMLVALWHMLKHRVPHQDLGADYFTRRDTERTRRHHVRRLEKLGYQVLLVKEEAA

SEQ ID NO: 114182 - protein, 345 aa, unidentified
MQPTNPMSATRSDSSDQAAIFVSLELSRAVWLVTALLPGGTQKMSRHQVPGGDLAGLLGRFAELQRKAHTRTGELARIVVIQEAGLDGFWIHRALVSEGVESYVVDPASIAVSRRHRRAKTDRIDGEALVRTLLAYKRGEPRVCAMVRVPTPEEEDQRRLCRELKTLVGERVRHVNRLKGLFFSQGIADYDPRRPNRRARLDELRTGDGRALPPHLKAVALRELEVIELLDRQIEAVNAERDALLASTNMEPAPSQAVQMLLGLKGIGSGFAGALWSEGLFRHFDNRRQVAAYAGLAPTPWKSGTIDHEQGGVESRQSPPACHPGRDGVALAAASTGIGSFAVVP

SEQ ID NO: 114183 - protein, 348 aa, unidentified
MKSCFENKEIYVGIDVHKKRWVVTVRTYDLELKTFSMQPVAEELEKFLVANYKEALLHIVYECCFSGFWIYDYFQGKGYDIIVTPTNRIYRDGSVVKTDKIDSRKLAFQHSRGLLREVKVPEIKIREYRSLFRIYDKEKIRQGQILRQVRSILEAKNHPLKRDKWNKEMIEKLRAVKFQEEIFNKKFSSLLSEYDYVKEQIRDTEKRIEEISEEKDLGERIKRIEKIDGIGKVSSVRLVVYLFDKKGRFESGEKLVHYVGLTPGEHSSGEEIIRQRTGLVGNKQLRSIIIQLAWVAVRKDGSLLDKFERVYKKSGSKQKAIVAVARKLMMKVYAITEKEEDYEINKAA

SEQ ID NO: 114184 - protein, 405 aa, unidentified
MTVYIGIDWGEKKHDVVCLNAAGAVITQFPIVHSAEGLLHLDSKLRQLAPSPEHLRIGLETAHTLLIDWLWECGYSQVYVIPPLLTRSCQRRYRQSGARSDRRDAYLIADLLRTDGQRLYPWHPDSALTLQLRAQVRWGLRLGRQQRRLSNQLRAVLLRYYPAALQVFGALDSQITLHFIQTYPTPQAAARVTWEEFAAFAQAHRYPSQRLLACFARLHARQPAAAPAVVQAYQPQAVHLATSLLDTVRTLASVRREVTALFRQHPDHPIFASLPGTGELLAPALLAKFGDDRARFPQASALQALAGTCPVTEQSGQRRRVSFRQACDREFRQIAQQWAKCSIEHSDWAASYFHEAQQRGQSASHAYRCLANRWLAIAWTLWQRRQLYDEAYHLQQRAARCRPRS

SEQ ID NO: 114185 - protein, 368 aa, unidentified
MSEKSSKVYIGLDVHKESIDIAVGEEGGEVRHHGQIGGDMNALWRAVRKLESLGRELVFVYEAGPCGFGVYRGLIARGHACWVVAPSNTPRRVRDRIKTDRRDSVKLAGLARAGELTPIYVPDVRDEAMRDLVRAREDAVVMQRQARQRLTALLLRNDVRYAGKTAWTAAHRRWIADVRLAQPAQRLAFEEYVQAVEEATVRVERLTGYIAQEVAQWRWLPVLNALQACRGIQLLHAVRIVAELGDLSRFNHPRQLMSYLGLIPSEDSSGERRRQGCITKAGNGSARRALVEAAWAYQYMAKVSGLIARRQVNAPKAALDIAWKAQVRLCARFRRLAARGVSRNKIVVAIARELAGFVWAIGQQVKPV

SEQ ID NO: 114186 - protein, 376 aa, unidentified
MRKHGEAFVGIDTAKARNAVAVAEGGREGELRYLGESDNTPDAVAKLVRKLAERYETVQFCYEAGPTGYGLHRQILALGQNCIVVVPSLIPRRPGDRVKTNRRDAQTLARLLRAGELTAVWVPDETHEAVRDLVRTRAMAIEDYRRKRQHVSSFLLRHGRSYEGTATWKGRHLQWLDRQSFAHPAQRLAFQEMLNTVRSVAERIDRLDAALLEIVPAWTMAPVVAAFQAMRGVGLVTATTMVAETGDIRRFEHPRQLMAFLGLVPSERSTGDTRKQGGITKTGNIRARKALIEAAWTYRHSAGIGEIHQARLAQLPEQIREIAWKAQARLCARYRRLTAKGKKPMVAITAIAREIAAFLWAIARHVEPSPAQPART

SEQ ID NO: 114187 - protein, 338 aa, unidentified
MIVIGVDVHKQSVTAVAVDDAGRMLDERTVVVGSEELLDWAAAFDAERLWAIEDCRLLTPWLERQLLERGEELVRVSPKLTVPERRAGRVRGKSDPIDALAVARAALREPDLPRPQPGERVHREIKLLVDHRDDLVDERRRIQQRLRWHLHELDPTLVVPLRRLDRASHLERVGRWLARREQEVQVRIARELVARCRSLTRSIDELNQQLEQRTASVAPALLELPGCGAVTAAKLLAEIGPISRFKTDAQLARHSGVAPLEASSGKSQRHRLDRGGNRQLNAALYRIAITQSRYHPAARAYLERKQAEGKSKREAIRCLKRLLARTVFNTLKASPALT

SEQ ID NO: 114188 - protein, 348 aa, unidentified
MQDILTCVMGLDVHRDIIVACLVKGAVDAEPEAETRTFSTLIPEMQKLRDWVIEAECRNIAMESTGIYWQPIYEMLESCFDGEISILVVNARHMKNVPGRKTDMKDAQWIATLLRAGLLKGSFIPDKTFRELRHLTRYRKSVVHDITAQKNRIDKFLQSSGFRFTAFLSDTFGASGRNIIRHLIERGSIDREALDKCLKTKTRNRIDEILVALNGSLSVHQRRFLNIVFLHLEDLEAHKHTIEDEITEEVLKHTDALNLLCSIPGIDVTAAAAIVAEIGTDMSAFPDSQHICSWAGLSPGNNESAGKRKSVHINKGNPYLKSMLCETAWIMASHRKLYLSGWPLLPLT

SEQ ID NO: 114189 - protein, 355 aa, unidentified
MDSIQYIGLDVHQSTISVAVLNADGKLVMQSVIATHAATILDFVHGLRGTLHVTFEEGTHSAWLYDLLVRRVAKLVVCNPRKNALLKAGNKSDTVDARKLAELLRAGLLSAVYHGQNSTAAVKHLGRSYAALTEDTTRIMGRLKALYRSQAIACAGKKPYGSRYREEWLAQLTESGLQRRARRLYQQLDLLQELRRDARRDLIVECRKHSETKLLGTIPWLGPIRAALLIGRVQTPHRFRSKRQFWAYCGLALETRSSADYGFVNGQLERRKKPVFIRGLNLNHNHDLKNLFKSAATTASGSNGPFRPFYENLLIKGMKPELARLTLARKIAAITLHVWKKGEPFDAEYLKPQAA

SEQ ID NO: 114190 - protein, 324 aa, unidentified
MTDAVLGIDVSKNTLDTSFLAGTKPRSRSFANSPDGWRQLIAWLAKEGVRQVHACLEATGRYSLGIALALHEAGHVVSLVNPAQIRDFARTKLGRNKTDPVDAAHIREYAELFKPRPWTPPSPALRRLCELQTIRAGMVASLTEWKNRSTSGMADDRALALAKATIQHFTSQLEAVDQAIAETIDNDPELCAKRTLLVSISGVGETLAGIVLAELPGPDVLGSSAAVAAYAGLNPRQHQSGTSINRPARISKIGNAVLRTALYMPALSAMRYNPAIAALVDRLKAQGRLKGKQIVVAAMRKLLVICFGVLKSGKDFDPAVAMGQ

SEQ ID NO: 114191 - protein, 465 aa, unidentified
MRTDKKLWRNRKARKELGRRLQSENPGLEVVNPHAAGIDVGNSAHYVAVRPDCDSQPVRRFECFTADLYRLAEWLHSCGVKTVALQSTGVYWIPLYDILEERGFQVYLVNAQHTKNLPGRKSDVQESQWLLKLHTYGLLNNSFQPPAKIRTLRTYWRQRLQHVTGAATCVQRMQKALTQMNIQLANVISDLSGVTGQLIVRAIIAGERDPWKLAELSHPRIQASRAEIAKSLEGTWRPELIFVLQQELEMYDTYQRRIAECDQQLQKHLAAFADTVTHPPKEELPPKKKKKQNKNNPHFQLADELQRISGVDLTRIDGVDVFVAQTVISEVGLDMARWKTEAHFASWLGLCPDNRISGDKVLARGTRHVLNRAATALRLGASTLLKSQTYLGAQYRRLRARLGAPKAITAMAHRLARLVYRMLKYGQQYVDKGAEYYERKNRQQQIEFLRKKAAKLGLQVSLAHP

SEQ ID NO: 114192 - protein, 347 aa, unidentified
MTIVDRSVVCGGVDTHLDNHVAAALDGIGGVLGIETFETTEAGYRKLVEWLEGFGPVLRVGVEGTGSYGTGLARFLHGRGVEVVEVDRPNRQLRHRRGKSDPTDAVAAARAALSGQAAGKPKLRNGPAEQMRVLLVARRSARDQRIQTLNQIRHLVFTAPEPIRERFLGRYQRGMLTEMTKLRPRPGSDPVAYVTLSTIRNLARRIKSLDAETKSIRTQLGGLITEMAPQLLELYGVGPETAAMVVVAAGDNPHRIRSEAAWAHLCGVAPIPASSGKTVRHRLNRGGNRQANSALYRIVLSRLSGDERTKTYMARRLEEGRTRKEIIRCLKRYVARDIYKHLPRDSG

SEQ ID NO: 114193 - protein, 366 aa, unidentified
MSSVTPVAGPIHLGMDTSKNTIVVGILMPGDEVPVIDRIWNEEGSVRHLVSRLGDPAALRACYEAGPCGFELHRLLASMGVACDVVAPSLIPRRAGDRVKTDKRDASRLARLHRAGELTSVRVPSAAEEAVRDLIRVRAALLADRKRAQQRLTAMLLRHGRVWRSGSYWTHAHERWIAGQRFEEPALAAALAHYRAGLDTRRAELDAIEAELAPWAGREPLAPACARLGCYRGIAELHSLALAAEVVDWRRFPSARAFMGFTGLVPGEYSSGDKTRRGSITKAGSAPVRTALVEAAWAYRFKPAIGVTLRRRQRDAEPDTLARSWKAQRHLHSKYKAMTARGKPPAVAVTAVARELAGFVWAEMTS

SEQ ID NO: 114194 - protein, 416 aa, unidentified
MKKNSNFQTTSGQKTKSAKARGPVQRDAKEVMAELVAKLSERLGPKPAQENASEGTPQDVPAPNRDRLTVGVDLGDQWSNYCIVGLEGETLGEGKLRTRREDVAELFQALAAARVVIEVGTHSAWVREVVVSCGHEVLVANPRLMDGMKRGKRKNDRIDARKLARLGRVDPQSLFPMKHRSREVRQDLVVLRARDALVSVRTQLINTTRGLVKSMGARLPKCSSPSFPKKVEEALPAEIRETLLPLLRLAEELSDRIKVYDERIEKLGREKYEHTELLRQVKGVGPLTSLAYVLTVENPDRFAKSRDVGAYLGLVPKQEDSGDSQPQLGINKAGDMMLRRLLVGSAHYILGPFGPDTDLRRYGLRLCERGGKNAKKRAAVAVARKLAVLLHRLWVSGEVYEPLRHGTPTAVVQDAA

SEQ ID NO: 114195 - protein, 399 aa, unidentified
MRKTCGLDVHKDTVYCAIYNGKKQSEVKEFLTTTPGIYAMAEELQIQNVSEVAIESTGIYWKPVWNIFDEMGFRMMLVNPYLIKQMPGRKSDVKDAQWIATLLHKGLLRGSLIPCKEIRELRTYSRQYIKLQQKQTSVLQQMERNLEMCGVRITSFVSNISAKSVMEVIKKIIVGEDSAQALTTSVHARIINKHSREKIIESLTGFITPQNRFTLSLALNEYNMLVDQSQQCLLRMEQLCSQHYKIEMELLQTIPGVSTISSMIILAEIGGNMTAFENSGKFVGWVGLRPRNDESAGKYKSTATTKGNKYLRTILVQVAWAASRTKGSFFKEKFNRLAIRKPRKKALIAIARKIAVLIWHMLDKKQAYDPNKLVVLDPVKLETKLKYHKKEIEKLEKLT

SEQ ID NO: 114196 - protein, 454 aa, unidentified
MEKRSGKTGLSLENIEPNAAGIDVGATEIYVAVPPERDAQPVRHFKTFTGDLREMAAWLLRCGITTVAMESTGVYWIVPYEILEEAGMRVCLVNAQHVRHVPGRKSDVSDCQWLQYLHTVGLLKASFRPEASICALRSLSRHRASLVESAAAHIQHMQKALTQMNLQIHHVLSDITGLSGMAIVEAIVDGQRDPSQLAALCHHGVRSDRQTVVRSLTGNYRPEHLFTLKQSLAAYKNYQQLLAECDQEIQRLTGSLSGKSGDPGGQPPQHGNRRKRRKNQFHFDMSSELYRLFGVDLTAVPGISALTAHALLSEVGTDLSSFPSAAAFANWLTLCPGNKKSGGRVLSSKTRPSSSRLTRALRLAAQTLARSRSHLGNFYRSMRARLGAPQAITATAHKLARILYHLLTTGDAYDETVFEQQQQKHNLRLQKRLIKQAKSLGFQLMPIPAADACS

SEQ ID NO: 114197 - protein, 348 aa, unidentified
MRTEYFITMDTHCRTTDVCVKTRCGKLVKREHLSTGIPQLREVIESVPRPRRVAFEEGSMAGWLYRNLKGSADELMVCDPRRNAHVAKDGDKDDAIDAEKLNDLYRGGFLKQVHQLDGVEKAAVKQVVGMYHDRVGHRVAEGCRLLALGKRWGVMLKRSDLLEADGHKALKARLKEAGVPERIQEVAEDLWKSFERAVEQEETLHQQVCQLARKDKMMERVTELPGYGAIRAATLISYLDTPWRFKSKSALWKYVGIGLLREKSGNDLDIVRVDQTCNRLLRNVVIGAAQNAILQKENVFARRYARWITAGLSPRNARRNVARDQVTAVWGMWKNDKAFDVSLIQDRD

SEQ ID NO: 114198 - protein, 307 aa, unidentified
MRFYGVDVSKETLDVDPEGKVVQIGNDKKSIRAFLKNVPTGSVVAMESTNRYHQMMADMCYSAGMVVYVVNPRMTRHYREALNLRGHTDKLDAKTICSYIRHHHEELRPYVPKSADQRRLQGLIRRRAKLVGVRVQLLQSMREIKELKADLDAVIKRIDRMIAQIDVMIDKQLEGNADRERLCTIKGVGPVVSALLVTDLQAGNFRSADAFVAFYGLDPAPNDSGKSKGRRKISKKGHRLGRTMLYIAAFSAASSKAWKPIYERILAKGLSRVQALVCLARKIARTAWSIYTHKTEFTPGRLLVGLT

SEQ ID NO: 114199 - protein, 344 aa, unidentified
MDHFAGLDVSVKETSVCIVDDTGRIVREVKVASEPATLLPVLRNPAYHFKRIGLEAGPLSQWLYSALAEAELPVICVETRHMQAVLKAQINKTDRNDARGIAQMMRAGLYRPVHVKTLRSQKLRMLLTHRKLLQSKAIAIENDLRGTLRNFGLKVGMVGKVQFEARIKELVENLPDLAELVEPLLIVRRTLREQIVSLHRRLLAIVRDDEVCRRLMTTPGVGPVVALTYRATVDVPARFRKSKAVGAVFGLTCSKYQSGEIDRSGRISRCGDEMMRVMLYEAAQSMLRSKKWSWLKAWAMQIARRRGMKKAIVALARRLAVIMHRIWVDGTEFRWTREQAAAAA

SEQ ID NO: 114200 - protein, 325 aa, unidentified
MKNIIIGIDVSSKTLDICVKNEKEVTYFIIENTLKEIKKFLRPFDKTKTVLAMENTGRYNWNLYDSLESFDFKVYVINPLHLSKSLGLVRGKNDKIDAYRIALYIEKNEKETRPWKPTRKSIKKLKILITERTSRIKIKRVLLKQQHDYRLMKRIGLDKQLLKLNKQMIKKIDEQIGVLEKQIELIFKENQELKKQAELIRSVPGVGKVLTWVMIAKTEGFTKITEPRKMACYAGVVPFEHQSGSSIFRKPKVSFYADKSIKNVLHLGALSAIRLENELGIYYRRKVSEGKNKMSVLNAVRNKIIHRIFAVIRNQTFYQNRLVTS

SEQ ID NO: 114201 - protein, 353 aa, unidentified
MRKVQNFIVKGKQIFIGLEDSKRTWKLCVRCEGIIIHETSMPAKYDNLRSYLKNRYPGCRIEVMYEAGFGGFWLHDCLESDGVACVVTPAHKVTQEKVNKVKTDKIDARRLARNLEYGDYTRCHVPDRERREDRQISRTLDQIQKDIVVTKNRIRRFLDFHGLNEGFPAGSWTETAYEQLKVLQLPVSLQLSLDAYLQLLAELKRIRAALKSQLQAFCQKDRYQALVASKVSCVGIGWLSAIRFTLEWGELSRFGSGKQFASFTGLTSREYSTGETIHRGHITGHGNGQVRGWLIQCAWRALSRDPVLLEKFNAVRNNSGSKKKAIVAVARKLAVRMRALELADQPYCVGVIE

SEQ ID NO: 114202 - protein, 458 aa, unidentified
MFLVGIDISKYKHDCCIIDSDGVVICEPYSFKNDADGFILFLDTLHSLPDSEDIRIGFETTAHYALNLKLFLEKAHYAFMEFNPLLLAKFNKSQSLRKTKTDAIDCYSIARWLAAVEFKPHTTGFYHIYSLKSLTRLRDSLVRQRSFYLVKITNVLDVTFPEFKPFFNNRFDATALYLLENYGTVEKMSHMNSTSYENLRKLSRGKFSIQKFMKLKELASNTVGESNEVFIIQLNSLLSLYRKCVSEIKSIEAQITKLISDINPRFMTIPGIGPLSAAVIYAEFDDLSKFNSHAQMLFFAGLEPGYYQSGISEHRGHMVKRGSSHLRYTLMNLCIPLIQYNYVFAAYYDKKRSEGKPHRVACSHLVKKLIRIIFNLEKNGIDVDSLHTFIIAFIIHFICPKQPLHSTLQAVLPQADQSDKYHDKITTSRIPQNISSYIQQKSHSNECFPVLHSESEIR

SEQ ID NO: 114203 - protein, 430 aa, unidentified
MQNINNTFISVGIDVGADFSYMSIALPNQLIVGKPFKITHSNLSSLESCVKVIKEAEEMYSLESRIFLESTGVYHYPLFCFLRDRGFNCSVINPIITKNNTNINIRKVHNDKFDSKKVALIGLKPDLKTSVIPSDLVLNLRNLMREYYSLSDYCSAYINKLQGQLRMVFPQYIGIFSKITVDTSLALLDKYTSPEAFIAADKSEIIEIIRKTARFGLTYAENKYNAIISAAKAALVFGHSVPSSFTLIRLYIKSIRNFNDEIEAVLTAMNELVEANADELFVKQIRLIQSIKGAGFLTAVTLMCEIGDFSVFKSPKQLFAYFGLDPSVKQSGNYNGNNNKMSKRGSPLARRAIHTIAVIFVGKTKKGVAHNQVALDYYQTKCKSKPKMVALGAVMHKVCNIIFAILRDEKEFVIITPNEHSASYLRRISA

SEQ ID NO: 114204 - protein, 384 aa, unidentified
MLAHPTQTQAAARCQANTLFVSLELSKVRWLVTVSAPASDKLSRYDVPGGDGQALLKLLARLQAAASERTGAPVAIVVIQEAGLDGFWIHRLLVRNGIDSHVVDPASIAVNRRHRRAKTDRIDGVKLVRTLMAWMRGERQVCSMVQPPSPEDEDRRRLTRERARLLKERIQHTNRIKGLLCGQGIPDYDPLHRDRRARLVALTTGDGHSLPERLKTEIGRELDRLEVVVSHLAAVERERDALMAQTIAADPCAAPAALARLRGIGPELASLLWLEALFRPFDNRRQIAAYAGLTPSPWQSGGIDREQGIAKSGNPRLRRAMIELAWFWVRHQPGSALSRWFVERVGTARGRVRRIAIVALARKLLVALWRYVTQGVVPEQGYRI

SEQ ID NO: 114205 - protein, 387 aa, unidentified
MTKIASSPLPTAVDYEDTLVLAVETSNKNWVLAAHVPGLGQVKAKQTIEPNVNALSKAIEGYRRRATASGAAVKQVIVVYEAGYGGFWLARWLDAQGVTVHVVQPSSVPVERRKRRAKSDKIDADLLLRTLLAWLRGEPRVCSMVRVPDEDEEDARRPIREREELVRERISLTNRIGAILATLGVDDYNPLRRDRRTKLETLQTPLGKCLPEHARAKILRILERLELILEQIAQIERRRDAALEDEAPGREEGMIQRLAGLRGIGAQSATVLVYEAFVRSFASGKALGSYAGLTGTPFNSGGSEREQGVSKSGNRRLRGTMGELAWLWLRYQPESALAKWFRERLAGANGRMKKILLVALARKLLIALWRYVTLGVVPEGAVFLPAS

SEQ ID NO: 114206 - protein, 361 aa, unidentified
MKKRTQHLIAEVPRKRGQVELTIGIDLGDVWSHYCTLNQQGEVIDRGRFRTTPKAIDKWFTDVRHARVAMEAGVHSIWISEQLEQLGHEVIVANVRELRAISHSDRKSDDVDAEKLARYARLDPEILRPISHRTVEQQEALTLIRARELLVRLRTAAINAVRGLTKACGHRMPASSTKCFAQRGQAAMPPGLKLALGPILAQIAEMTDKIKQYDRDIQRLTQTEYAETQAMMTIHGVGHITALTFVLTLGDKTRFGRSRDVGCYLGLRPKRSQSGERDPQLGITKAGNAYLRSLLIECANHILRPHGRDSALRQWGLHLAARGGKQAKNKSVVAVARKLAVLLHHLWTTQEPYVPFYQQAA

SEQ ID NO: 114207 - protein, 326 aa, unidentified
MQGKEASEQETKTKCSVGIDTGKCWLDVHVLPADERRRLANTKAGIRQLKRWLSRFDIALVAIEATGKWHRQVHRSLAASAIPVALIDPYRVRMFAKAQGILAKTDRLDARVLASFAAVMSPTVRAPTPQIMAELAELVGARASAVEAQTALKNQLSAAECGFLRHQLNRRLAQTGKVIAELEAEILKRIKSDDGLARRYLILTSIPSFGFAVAATLIACLAEIGSANAKQIGMLAGLAPIADQSGQRDGVRVIWGGRPAVRRILYLAALSAITFNADIKAFYRRLIAAGKPPKLALIAAARKLVILANTLISQNRTWQPRMPNHA

SEQ ID NO: 114208 - protein, 316 aa, unidentified
MGKMMIGIDIAKEWIDIAVACEGRVRRIKNNKLTIDSWLAETGPGSIALIAFEPTGGYERPLRRCLSRAKLAFEQVHPNEVVAFRGRRGIKAKTDRIDARLLADFAAEELVRRDRLAVPEADEALRELAARRRQLQELLHAETCRRDLADSAMVRKSLRTVIAALERSLAAVETAIAEHIAGSIHAETSRRLQTFCGVGPGIAETLIAELPELGHLSGKKIAALCGLAPRTRDSGKQRGHASTGHGRPGVRKALFNGARSAIQHNPVMSAFYRHLIQDNHRLGKVALTAVMRKMLVTLNAMVRDGADWKHAANPAA

SEQ ID NO: 114209 - protein, 347 aa, unidentified
MQGTGRWIGIDLSKRTYELRYFDQKGTVGGTGGLTSIQGRRKLYAQLTAEDIVAVEACSLAFVMEKEMRSIGCRVVILNPSSLAVIYASTKKTDKEDALKLARMIKVYEKEDLPIVNPPSDKEMYQRKLMSEYAVLKRDRTREINRLHALFLQCGITDIKKADLNTAIHRAAVVERLTGYEVEQAQRLCRRLEVIEEQIVVLNEKIKSACKQDGTIQRAKTIPGVGDKTALAFSAYVGDGSRFSTAKQVANYLGLVPRVDSSGTINRYGSITKKGNAYVRSLLYQAAWAAVRSTNGGTLKQKFLYMSAEGKSKKKSITAIARKMAELLYTVIKTKQIYTARPLCMST

SEQ ID NO: 114210 - protein, 354 aa, unidentified
MDKTKYIGMDVHKEAISIAVLNSSGKLVMECVIETKASTILQFFQGQSGSLHVTLEEGTWAAWLYDLLTPHVTELAVCNPRKNALLKQGSKSDRIDARKLAELLRNRALSVVYHGENGLRLLQQLSRSYLTISKDLGRVMNRLKALYRSWAIPCAGTQVYAPRQRAAWLAKISEAGVRRRAELYYQQLDALRPLHQQARKELLAEGRKHSATKLLSQIPGIGPLRAAQLVALLQTPDRFRSKRQLWKYSGLALEIHDSAQYRYAQGQLQRSKKPQPLRGLNTNHNHDLKNIFKGAAMRASTCQGPLHDFYQVLLARGMRTTMARLTLARKIAAITLILGKKGVGFDAPYLKQAA

SEQ ID NO: 114211 - protein, 387 aa, unidentified
MSQSFDTSRSLTALEQDNTIVAVIELSKAKWLIASLVPGFKRQPLKKIDADAPSLLKLLQRWRDEAGRTGRQIKRIAVAYEAAGDGFWLARWLRARGIEAYAIHPASVAVSREHRRAKTDRLDTELLMRAFLGWLRGEKRHCSMAPIPTLEEEDARPNRERETLVGDKTRIINHIKAILARFGIRSFRLSLRQAADRLETIRTAEGTPLPDNTRAELYRFLERLSLVREQIRTIEQERLRRLAAAPAAANGPHAMVRLLARVIGVGVETADMLVHEMLSRKLRDRRAVARYAGLTGSPDESGKRRREKGLARAGNARVRRGMIQLAWRFLRFQKDSGLARWFQARTADGRKTTRKTMIVALARKLLIGLWRLVITGEPPQGVTLRAA

SEQ ID NO: 114212 - protein, 416 aa, unidentified
MEQIHDRVAGLDVHRDVVAACVRTPGPRGGTVTEKERFQTTTGALARLGGWLADRDVSLVAMEATGVYWKPVYYALERTEAFELWLCNAHHVKNVPGRKTDMSDAEWLADVAAHGMIRPSFVPPPPIRELRELTRYRTTQTDARVAEIQRLEKVLQDAGVKLTSVASKVFTQSGRLMVEALIDGQRDPAELANLAKGKLRPKIPELREALTAHFGAHHAVVARRILDHVDFLDVTIAALTEQIDLRTEAYQAAKELLLPIPGFGRLVIDTVIAETGADMSRFPSPGHLAKWAGVCPGNHESAGKRRRVGVSPGNAWLRRTLVEAARAAARTNGSYFGAQYRQVAKRRGPNKAAVAVAHSLTELVWHMLSTGECYHDLGDDYFQRRRDPQRQTRRLVTQLEQLGYHVDLTTPDSPAA

SEQ ID NO: 114213 - protein, 411 aa, unidentified
MENILLRCVGLDVHKASVEACVRRMEPSGRLHQQTRHWGTMTRDILMMADWMAAQGVTHVAMESTGVYWKPIYNILEGRFTVLLVNARHLKQVPGRKSDIRDCQWIAQLLQHGLLKGSFIPPRPQRELRDLTRHRTPLVEEKTRTNNRIEKVLEDANIKLGSVASEVMGVSGRAMIQALLEGEKDPAQMADLARRSLRGKIPELQKAPEGHLTEHHRFLLRLLWKELTQQEALIAELEAKIEELTRCFAPEIERLDAVPGVDRRVAEVVLAELGGDMSPFPTHRHLSAWAGMCPGNEESAGKRRKRRITPGNRWLKRTLVQAAWAASHTKSSYLASQYRRLVGRRGKKRALIAVGHSILVILYYLLKDGRQYADLGSDFFDRLEPQRLTRYYVNRLQHLGHKVILEPWVTV

SEQ ID NO: 114214 - protein, 409 aa, unidentified
MVVFVGDDWAEAHHDLYVMNEAGDRLDSARVPHGLEGMARFHEVVAGYAEDPTDVVVGIEVDRGLWVEALVVCGYQVHGVNPRAASRYRDRLNVGGAKSDRGDAKMLADLVRTDRHQHRQVAGDSEIAQATRVLARAHQSLVWDRTRHTNRLRHGLRDYFPAAAQAFAGELAGMDAIGILAKAPTPVEAARLSVSQIRSALKTGGRQRNVDKRARELQALLRADHLATTPAVAAAFGATTRSLVAIIVELNRQIETLEAELASAFSKHPDTDIYRSLPGFGPVLSARVLGEFGDDPERYANAKSRKNYAGTSPLTRASGRSHVVSARHIRNRRLYDALDQAALCAITQSPGCRDFYDQRRAKGDLHHQALRALANRLVGILHGCLKTRTHYNEHTAWSHRQEPETRIAA

SEQ ID NO: 114215 - protein, 355 aa, unidentified
MSSEKYIGLDVHQATISVAVMDSQGKVVMESILETKASTLLEFFAGLRGSLFVTFEEGTWAAWLYDLLKPHVTEVLVCNPRKIPLLKQGNKSDKIDARKLAERLRLHDLKPVHHGETGIRMLRELARSYLTIVKDLSRVMNRLKALYRSWAIPCAGRDVYYTRHRSQWLEKIPEAGTRRRAEQLYQQLDMLQHLRQQARRELLAESRQHAITAKLRQIPSLGPIRSALAVALIQTPHRFRSKRQLWTYSGLGLETRDSGEYHFVQGQVRRRKKQATIRGLNKDYNHDLKGLFKGAATRASVKPGPFQEFYQRSLAKGIKPTMVRLTLARKIAAITLTLWKKGEDFDIAKLKSQAA

SEQ ID NO: 114216 - protein, 300 aa, unidentified
MTSSVTPTRFIGCDVGKRSITVFDSQTQRSFVVANTASALRTFAKRLDACCLVICEATGGYEARLLASLVAAKVPAHRAGTLGKSDKIDAKGLSRYGAERQTRLVRWQARDESRISLQTLVLTRNDLVKSRTAFQNRLAAPQSQAARPHLKAVSAKLNAEIAKIEAKIGELERNSQPLRQALEILTGIVSIGATTASALLALMPELGTLNRRQVASLGGLAPHPNQSGEQERYRRTRGGRSAVKDALFMAALSASRYHPTLSLLYQRLIQRGKKQIVALAAVRRKLLVIANAKLRDAMAV

SEQ ID NO: 114217 - protein, 336 aa, unidentified
MEKKECCIGIDVSKNTLDIAIFDGGMDWNKHIQVPNNPKGYASIVAWLGKNGISKKGIRLCLEYTGLYAHSFRLWIEEQQITYYMVNPMKMHRYEIPTNIKGLGRIKTDQMDAFRIAIYCYQNYRLLEPSKLPSESYFKIKRLLAERKQYVRQSTLYQQQLHDISAYDTESSRHRKEEMRVQMHYHIKQTDEEIDNVLKEDTALLNNYSLLTSIIGIGRVNALTTIVLTENFTAITDPRKYACYIAVAPFRRESGTSVRGKAKVSKMGFKQAKADLSIAVVTTIQHDPDIRAYWLRKKAEGKQTGIVMNAIKFKLILRMFAVIKRQAPFVKMDAYK

SEQ ID NO: 114218 - protein, 334 aa, unidentified
MEKITTAGIDLAKRVFALHGVDGAGRVGLRRTVRREQLMQTVAALPPCLIGMEACSGAHEWARRFQELGHTVRLMAPVFVAPYRKSGKNDGNDAEAICEAVTRPSMRFVPVKSLEQQALLVMHRVRQGFVVERTAIINRLRGLLTEFGVVLPLRSVTVRRQAAQAAENLPDLARRAIGDLLDELRVLDERIGGYDREIEAQARLCEPAQRLMKIRGIGPTTALAIVATVGNAREFKNGRQFAAWIGLVPGQYSTGGKTRLGHISKRGDAYLRNLLVQGARSVLHTAAAHRDHVSRWALELQPRRGYYRTLVAIANKNARIAWALLAKNETLRAA

SEQ ID NO: 114219 - protein, 330 aa, unidentified
MENWNVILGVDVSKLSLDICCAERGLHLKIENQTKGLNLFLKWCKNQEIDLKRTLIILEHTGGYEYRFLQFCEAHSIPYCRISGLEIKRSMGIVRGKNDRVDAFRIGQYGEEKIKKLIPSKPLDKNILALKHLLSFRKRLVREKAGLLSTVKERRHMYNAKKTDMVTHISQAKIKANNQYIKQVEQEIMEVIAINDDLLKNYRIITSIKGIGPVNAWMTIAYTENFTSFTDARKYAVYVGVVPYDHSSGTSLNGRKRVSHLANKELKQELNQAAKAAITHDPELKAYADRKIKSKCYPIILNNVKFKLILRMFSLVKRGEKYVENYRRSA

SEQ ID NO: 114220 - protein, 346 aa, unidentified
MTIVESTRPVTGGVDTHLDTHVAAALDANGGVLGVESFPASRAGYVSLSSWLAGFGHVDRVGVEGTGAYGAGLARHLRGCGLEVIEVDRPNRQLRRAHGKSDSLDAIEAARAVLSGRATGVAKTADGNVEAMRALLVAKRSGREARITCLNQIRHLGFTAPDELRDRFGSAPRTALAAQAAALRPRPEGDAVLYATKLAMRSLGRRVLVIDDEIARLDAALAELVTATAPGLVGLYGVGVDTAAILCVAAGDNPQRVRSEAAWAHLCGVAPLEATSGKVTRRHRLNRGGNRQANHALWRIVFTRLGSDPRTRTYVARRLDEGRSRPEIIRSLKRYVARQTYRHLPR

SEQ ID NO: 114221 - protein, 414 aa, unidentified
MEEERRWFVGVDWASETHQVRLSDARGNKVGERSFHHGGEGLAELASWVLQLTEATPDIVHVAIEVPHGPIVESLMERGFHVYAINPKQLDRFRDRFSPAGAKDDSRDALVLADALRTDPRCFRALVTLDPILVELREWSRIAEELRHDRNRLSSRVRELLWRYYPQILQLTEDVAAPWFLDLWRLVPTPAKAARIREDSIAKLLKRHRIRRIDASHVLGTLRVTAIPVAPGTVNAATGHLDAVASRLDLVNQQIARAEAQLDALTERLASKEIADEGQESEQRDVTILRSLPGVGRIVLATLLAEASDALHRRDYHALRCLSGVAPITKRSGKSRIVIMRQAVHVRLRNSVYHWARVAVQHDPRSRAKYAALRARGHGHGRALRSVADRLIAVACTMLQNQTTFDPALATQAA

SEQ ID NO: 114222 - protein, 410 aa, unidentified
MEVLYPHCAGLDVHKDTVVACVRHMVNGSVRREVRSFKTTTKELLALSDWLAGEGCTHVAMEATGVYWKPVWHVLSDGDFTLVLANAAHVKNVPGRKTDVNDATWLADLLAHGLIRSSFVPDGQTQEMRTLLRTRKQLVRECSRHVQRLQKTLEDANIKLDSVISDIVGLSGRRMIEALIAGETEPGALAAMAHRRIKATPDELEAALRGRVTRHHRFLLQLHLQQIDAVNAAIDQIDQEVDAYVEPFRATVRLLTTIPGIDELSACVILAEIGRDMSRFPTAGHLISWAGLCPKNDESAGKRRSTRMRKGAPWLKTTLVQCAAAAARKKASYLQAQFHRLRARRGAKKALGALAASILTSVYHMLISGELYRDLGPHHFDQRAKAVNTRRLVVRLQNLGYDVQITPLAA

SEQ ID NO: 114223 - protein, 344 aa, unidentified
MGKITTVGLDLAKNVFQVHGVSDDGRVLVRRQLRRRQVLAFFEKLPPCLVGLEACAGAHYWARELRALGHEVRLMPPSAASPGPRSGVKPYVKRGKTDAADAAAICEAVTRPSMRFVPVKTSDQQAVLLQHRARDFLVRQLTQIANAIRAHLGEFGIVAPKGMHNVERLLGRAAEDGLPANAEAPINLLAAQFRETRAKVEEVTALIKAAQGRDATAARLATVPGVGVLTSSVIAATTPEVANFRRARDFAAWLGLTPKPHSSGGKERLGRISKMGNRYIRRLLYLGAMAQISARRRRGPGDDWLWKMLEKKPAKLVAIALANRMARTIWALLKTGESYRARPA

SEQ ID NO: 114224 - protein, 378 aa, unidentified
MHSMKEDALVVGGVDAHTDTHHAAALDQRGALLATQSFPATTPGYLELLAWLRSFGEVDVVAVESTGSYAAGLVRYLRGHGVRVLEANQPHAHTRRRRGKSDPIDAEMAARLALAGKATTVPKQTDGIVESIRLLRVARQSAVKSRSAAMVQLRDLTVTAPQELRDQLACRKTIRGKAALCRRLRPSTGELGQPAHAAKFALRSIAVRIKALDAEVAVLDRQLEELVSGAAPRTSQLLGISTGHVGRLLVTAGENIDRLRGEAAFAALCGASPVPASSGKTSRHRLNYGGDRQANRTLHLIAVCRLRYCARTRAYARRRTAEGKTKPEIMRCLKRYIAREVYYALRADLARLDHPRRPTRVTTIICGAGPIGITRRRT

SEQ ID NO: 114225 - protein, 370 aa, unidentified
MHQSNTLYIGLDVHKDSIAVAYVAQDHGAEVTYLGSIGTRQCDIDQLARKMQSKAKHLLFVYEAGPCGYWLYRYLTRKGYDCWVVAPSLIPKKPGDRVKTDRRDAMQLARLARSGDLTPVYVPTAEDEAIRDLARAREDAIRDLKAAKFRLKAFSLRHAIRYVGRANWGPAHLRWLAEVVCPTPAQQIVFQAYVRAVHEHTARLQRLEQELQEQVKTWRLQPVVEALQALRGVQFTVAVTMVAEIGDLTRFENPRELMKFLGLIPSEYTSAERRRQGSITKAGNTHARRALVEGAWASRDPAKVSRHLQLRLEQQPKMIQDISWKAQVRRCQRDRRRVSRGKHAKVVIVAIARELVGFMGAMAKQVPLTA

SEQ ID NO: 114226 - protein, 403 aa, unidentified
MNNVAGIDVSKGKSMVSVLRPFGEVVAKPFSVGHTGSELKELADYLKSLDGETRVVMEHTGRYYEPVARFLHDEGVFVSAVNPKLIKDYGNNTLRKVKTDKADSRKIARYGLDNWAELRQHTPMDTIRMQLKTLNRQQSLYTKAKTMMKNNLIALLDQTYPGVNALFDSPVREDGSQKWVDFAMTFWHVDCVRNMSLTAFAERYRKWCKRHGYNFSQSKAVEVHAGAQDLIAMLPKDALTKTMVRQAIDALNAVSASLERLKAEMCTLAAQLPEYPVVMAMHGVGDSLGPQLMAELGDVTRFTHRNAITAFAGVDPGADQSGTHEAKSTRVSKSGPPELRRALFLVMDCLLKTQPQDDPVYRFMDKKRAEGKPYLVCMTAGANKFLRIYYGRVKEYLASLEGN

SEQ ID NO: 114227 - protein, 341 aa, unidentified
MHLYFVGLDVHKQVIAYCVKTQAGEIVSEGNIRATRAALDEWVRTVPGPWHGGMEATMFSHWIYHHLKPHAQRLEMGHAARMKAISAGKKKSDKIDARTIADLLRCDLFPSCYVIPPELGALRQQMRFRRLVVEDTVMFQNKTAGLLMSAGVEYERRRLHGKRYFRELVQDNEWIGEQLRPLLTFNREQIETLQGMQQRLIRMLEQHPRLQARINALQAIDGVGPVTALTWALEIATPERFGSSKAAMSYCGLTSALRESAGQQKRGPLSKQRNRHLQSALIEAAKIAPMVNETLREVHRKAKDKGGHANRATLAVARKLVAYLLAADRAFLACQGKFSAA

SEQ ID NO: 114228 - protein, 377 aa, unidentified
MDQQTGEIISQPVSFSNDKEGFDFLVQEIKSYPKDSILIGMEDTGHYHFALLKYLLDLQYTVALINPKTTDFNRKMQGGITKNDKLDTINICDVLDTPERKKQYRITKVNSFDLYEQKQLTRHHHNLKEEENVYKNRLQKCIDIVFPEFNKLFNSKYGIVYMNILKMFGSAENIANTDIRTIRKCFEIEGRGNRISLTPERLKECAISSIGISSSAEVIQIKHLTAQIELIEEQLTEIDKKIEEFSIQNNSPILSIPGISHFSGTSILAELGDISNYSKPSQIIKFAGVAPLHYESSQFNAQHTAITKKGSKYLRKTLYQIILPVIRHNPVFNKYYQLKISQGKGHRCAQGHCVRKLLRIIYHLLKTNQQFDPQLLR

SEQ ID NO: 114229 - protein, 370 aa, unidentified
MAQSTPLFVGLDVHKDSIAVAHAAGGGAEPPVFVGAIGSRQADVDRLIHRLQGKASVLTFAYEAGPCGYQLYRYLTGKGLACQVVAPSLIPKKPGDKVKTDRRDAMELARLLRSGDLTAVYVPSIEDEAVRDLCRARDAARVTGKDAKLRLKAFLLRLGRHYVGRATWNDAHRRYLAKVVCPTPTQQIVLQESVRAVDEQVDRRQRLDAELVERAPAWRLSPVVDALQALRGVQFLVAITVVAELGDLTRFDNPRQLAAFVGLIPSEYSSGGSRRQGGITKAGNGRARRALIEAAWADRHPAKVSLHIQQRIDHLPKALQDLGWKAQVRLCKRFRRLVARGKHPNIAVTAVARELIAFMWAIAKAVPVPA

SEQ ID NO: 114230 - protein, 372 aa, unidentified
MQEASTFVGLDVHKKDIAVAVLTPGSAAPLEWRVAHEPTAVRRLARRLQRQARAPVHCVYEAGPCGYALQRQLAGLGLRCDVVAPSLIPIRPGERIKTDRRDARKLAELGRAGLLTLVQPPTEDEEAVRDLCRGRDDARLDVLRARHRLGKFLMRHGRAFGTGQQGAWSQAHRWWLGQQTFERMAERVMFEDYLLAMEQTEARRRSLELHLEEVAREPRYAEAVGWLRCFQGIDTITAITLLAELHDFRRFRSPSQLMAYLGLVPSEYSSGTHQHRGAITRTGNRHVRRLLVEAAWHYRHKPRVGIRLAQRRHGQPVNVIALADRAQLRLCRRYRRMERQGKHPSKIVVAVARELVGYLWAALTPGALAHKA

SEQ ID NO: 114231 - protein, 305 aa, unidentified
MNGIGIDVSKATLDVAVHQGGHRSFANTAAGHRKLILWLKTLPVRQVVLEPTGGYEQDVLDTLHAAGLPVVRANARQVRDFARATGQLAKTDRLDAAVLAHIAQVLDLPAYQPPAPWQRRLAEHVQSRRQVVQLLVRAEQQLRAVKDRALRRMLQGNLTQLRKSKDFLDQQIAQQVSEQPQLHALQTLKGVGPVLLAVLASQLPELGKLDGKAVAKLVGVAPLAHDSGTMRGTRRIWGGRADIRQALYMSALSALRHEPRLRDFYQCLRARGKAAKVAIVAVMRKMLVILNARARDAGIPRQAGA

SEQ ID NO: 114232 - protein, 366 aa, unidentified
MKKDSTTGIAKTSTSAVRKLTIGLDLGDRSSWYCMLDEAGEVIQEQKLGTTPKAMKEVFAAMPRSRVALETGMHSPWVSRLLSELGHEVIVAHARNVRLIGESRRKDDRLDARTLARLARIDPQLLSPVKHRSAQAQADLTVIRARASLVRARTALVNTARGLTKSYGERLRGCNPRNLDTEKAQALSPELQAALGPLLQALESLSERIAEYNQQIERIAQQSYPQTALLKQVKGVGTLIALTYMLTLEDPHRFRKSRDVGCYAGLQPGRRNSGQSEPQMHISKEGDAYLRTLLVQGAHHILGPFGADSDLRRWGLRLAERGGKNGKKRAIIATARKLAVLLHRLWVSGEVYEPLRNTNRTMAVAA

SEQ ID NO: 114233 - protein, 339 aa, unidentified
MKLYAAIDLHANNSVLVILNEKDRVVLEERRPNDLKVILAELAPYKKRIQAIAVESTYNWYWLVDGLMDEGYDVKLVNTAAVKVYEGLKYTGDEHDAKHLAHLLRLGVLPTGYIQPKEDRAVRDLLRKRAQLVRCRTTQILSIQGLVSRNSGKRINTDGVRKLDDEKIGQYCSGDSILAMAVKSNLTVLRCLDEQVVALEKVVLKQARLKPGFRKILTIDGIWEVLGMTIMYEAGDMKRFKKVGHFASYARCVSSSRWSNGKKKGEGNRKNGNKYLGWAFIEAAHFAIRYNERIRNFYQRKMTKTNKIVAAKAVAHKLARACYHVLKDQVVFEETLAFA

SEQ ID NO: 114234 - protein, 411 aa, unidentified
MEQIYDRVAGCDVHRDQVAVCVRTPGPHGGVHKEKARFKTTTAGLAEMADWLSERAVELVAMEATGVYWKPVYYALEERFALWLCNAQHVKNVPGRKTDMSDADWLADVAAHGMVRPSFVPPAPIRELRELTRYRKTQIDIRASELARLEKVLQDAGIKLTSVASKVLTASGRAMLQALIEGERDPHALADLAKGKLRPKIPELTAALAGHFGAQHAIVASRILAHLDFLNESITELSVQIAARVAQRYQSVLDLLLPIPGLERTSIEVVIAETGADMHCFPTPGQFASWAGLCPGNHESAGKRRKVATTPGNQWLRRTLVESARAAARTKASYFGAQYRQIAKRRGPNKAAIAVAHSLLDVIWHALSTGELFTDPGADYFTSRQDPEHRTRRLVAQLEKLGYTVELNPAA

SEQ ID NO: 114235 - protein, 353 aa, unidentified
MTNGTRWVGIDLHRRRSQIAIIDEHGELTLSRRIVNDPETFKELLGDPDGTHVALEATYGWEWLADLLEEAGYEVHLAHPLRVRAIAAARVKTDAVDAPTLAHLLRTGLLPEAYIAPPELRDLRDLLRHRATLVHLRTSIKNRVHALLARQGVLPDHSDLFGTAGREFLAAVELPEGSRRRLDSLLSLIGDFDREIVATTREIDQRAKTDERVKLLCQIRGIGRYTAMLIIAEVGEVKRFPTARHLCAWAGLTPTVRSSDGKARLGHISHQGSTILRWALTEAAQHTPTGGGPLRAQYERIAKRRGRKVAKVAVARQILTLCYYGLRDGEIRCLKHQPAIDQHHDNHELAEAA

SEQ ID NO: 114236 - protein, 387 aa, unidentified
MLLDHLSDGPTAIRTQFGAIFVSLELSRSNWLVTSLSPGKGEKMSKHSVGAGNVAELSKLFAELKRKAQARTAENYPIIAIQEAGLDGFWLHRALQQEGIESHVVDPASIATPRRRRRAKTDRLDGETLLRTLLAYKRGEPRVCAMVVAPSPEEEDRRRLCRERGTLIAERIAHVNRIKGLLFAQGIFDYVPLRRNRRTRLEALRTGDGRLLPAHLKAQISRELDRLELLLGQIAAVEREQDALPAASRPTSAKAAPDPVTMLLALKSLGPNFTAVLWTEAFYRQFTNRRQLAAYAGLAATPWRSGGIEREQGVSKAGNPRLRTTMIQLAWLWVRHQPQSALALWFKANSQLGRKRAIVALARKLLVALWKYVTSGVVIEGALMKTA

SEQ ID NO: 114237 - protein, 345 aa, unidentified
MNKSTPTFTATVFCGIDVSASSLSVALIEPDHSVCQREFANSACGHKALIGWLGKSNALVRVSLEATGIYSQDLALALDAAASVEVAVLNPKLVNRFAQTLRRSKTDAADAWVLAEYCQRMPFTAWKRPGVNHLRLRTIGRYIESLVIDLAEVKNRLHTAASTSTTPRAVLFDLKQAQAALLRRLAKMRREAMKLIQADELLRERFALLVSIPGIAEVSARQILSELVLLPPGMTVRQWVAYSGLDPVHQVSGNSVHKPSRISRAGNRHLRRALYMPTLSAVRFDPHLRAFYQALRQRHKTGLQALMAVARKLLHAIYGIFKSGRPYDGKRLFPQIQFAVESIAG

SEQ ID NO: 114238 - protein, 339 aa, unidentified
MRKYDLFIGIDISKNWIDVSLTCDGVKKQMPHIRVDNTEAGFAKLLKWMRSTALYVRDKNRWLCCMEHTGVYTLRLCRFLEQKRIAYVLVDLLHLKYSLGLRRGKNDKEDSAHIARFIFMHHDELELSEIISDKLLILKNLLSLRKRLVKSRAALNTASKELQAFEKKVITQQVVPISQKQAKQLHQSIKQIEKRMLQLIRSDEELDRLYDLVTSVKGANLIIATALLVFTVGFKAFTDPRKFAVYIGLVPFEWKSGESLNVPAKVSHLAHKTIKGYISNGASSAMQHDKELKAYYQRRLAQGKNKYVVQNAIRNKFLYRIFAVVKRGTPYVEFGTFRS

SEQ ID NO: 114239 - protein, 342 aa, unidentified
MEQVTIVGLDLAKRVFQVHGATADGGIAIRKKLSRAQVLAFFADLPPCVVAMEACATAHYWAREIGALGHNVRLVPPAYVKPFVKRQKNDAADAEAIAEAASRPTMRFVEPKSPQQQARAMVFRTRDLFVRQRTQTINALRAHLAEHGLIAPQGMSNLANIRRLIDEAAAEVEPLVVETAHIYLEQIDDLSSRILKLEATLKQEAARTDASSRMMTMPGVGPITAMAIEAFAPSLCVFRRSRDFAAWLGLVPRQHSTGGKQILGRTSKMGQRDIRRLLIIGAMSVIRWATRKGTTPGSWLHSILQRKPRKVAAIALANKMARTLWAMETRKEDYRDPRLTAA

SEQ ID NO: 114240 - protein, 363 aa, unidentified
MRCFAGLDVSLHSTAVCIIDRKGNVVREGICASDPDALAAFLKASGFSFSRVGVEASSMAEWLYRGLAKARVPVVCIEARQASHVLKTRRNQASHVLKTRRNKTDKNDARGIAEIMRTGLYVSVHIKSPEARRVRILLTARGLVLTKALDLENAIGGFLRGFGLKMRRCAADKFAGQVEQLAREQRDVLESISPLMAARAELRRQLLEYDRLIKDFVQGDQVCRRLMTAPGVGVWVAAVYRSSIDQPERFRNSRTVGAHLGLTPRIRQSGTIDISGRISRWGDRLARTALFTAANVILNPRRRTCALTVWGLGLVQRRGRMKATVAVARRLAGILHRMWIDQADYQDWRGSLEPIGSADPVAS

SEQ ID NO: 114241 - protein, 338 aa, unidentified
MMIIGVDYHPSFQAIAFFVEETGECGERELKHSDGEAERFYRDLKQRGICVRVGMEATGYSRWFERLLAELGFEVWIGDPAQIKAKRVKKQKFDREDARLLLRLMRENNFPQLLWHRHRLVQMRTRIMNQLQALAMNEGYRWKKKLFSEQGRAQLEKLPLAPWASRRRQELLELLDRMNPTIQELTAAVEQEARKRPDVVRLMTHPGVGPLTALAYVLIIGTPRRFQRGKQIGTYVGMIPCEESSAGKQRLGHISKQGNSLLRFLLVEAAQAAARIHPDWRRRYVHLAMRRHKSIAKIAMGRRLAVRLYWMWRNGCEYSSSFEFGSYAGQLGTGHGGK

SEQ ID NO: 114242 - protein, 310 aa, unidentified
MDKVFVGIDVSKDRLDVHVQPSQEAFAVARDEPGIAELIGRLQAAPPALVVLEATGGLQVKVAGALAAAGLPVAVVNPRQVRDFARATGQLAKTDRLDARVIALFAAAVQPEPRKLPDEAAELLKALVARRRELVELRVAERNRLRQSTASWVRGDLERSIDALTKRIEAIDAEIEDHVKGSPIWQVQEDLLRSVPGVGKTLSRTLLAELPELGKLTRRKIAALVGVAPFARDSGTLRGRRMITGGRPAVRAVLYMATVAASRCNPAIAATYKRLTAAGKPAKVALTACMRKLLVILNAIARDQRPWQSA

SEQ ID NO: 114243 - protein, 348 aa, unidentified
MRFYTQTHKHHCGIDLHARSMYLCILDAQGKILLHRNYKATPEAFLGAIAPYRDDLVVAVECIFTWYWLADLCADEGIAFVLGHALYMKAIHGGKAKNDRIDARKIALLLRGGMLPQAYVYPKAMRATRDLLRRRNHLMRKRADLLAHIQNTASQYNLPPLGQRVDRKGERAAIPAHFPDPVVRRSVELDLALIAHYDTLLKTLEQELALMAKTHDAFAYHLLRSVPGVGRILTLVLLYEIDDIHRFPRVQEFLSYARLVKAQKSSAGKVYGHSGKKIGNAHLKWAFSEAAVLFLRRNPEGQRYVQRLAKKHGKGKALSILAARLGRAVYVMLQRREPFDPAKFLAHA

SEQ ID NO: 114244 - protein, 358 aa, unidentified
MKIIGCDYHPSFQQIAMLDLDTGEYVELRLLHAGGEAQRFYESLSGPVRVGVESSGNMLWFERLLQRLGHELWLGDAGVIRAKAPRKQKTDVRDARHLLQLLRENNFPRIWVPSVAERDLRQLLKHRHTLVQMRTRVKNQLQHIALNQGLQKKQKLWTRAGQELLRGLELDRWTARRRDDLLHLLEYLGKQIEELDQAVKAEAEQRAEVRLLMTHPGVGPVVGLATVLTLGEVGRFPRGRQVAAYVGLIPSENSSGQRRRLGAITKQGSSFLRFLLVQAAASAVKGDAEWARAYKRLAHKKHHGVAKVAIARKLVVRLYWMLRTQTRYPEVVRMSGSPSHPVARFQADALSGHPASRR

SEQ ID NO: 114245 - protein, 387 aa, unidentified
MTKNKGRVVGLDVHPDSFAGAVVEGSDPAQARVLSSSTRVELEQLEQWALRHTSTEDRLVLEASGNAFAVATRLRTIGRKVEILDSHRAGKVGKVYCANDRVDAVKIARIYLSALSPIVWQPDAKTLERREIFSAYQAVVKESTRAKQQLRSMLNEHCVRLEKGFRLCHPNAIRRLVALREWTPARTMLLQQLHGTLVAARARRTLLRRHMAQEIVAEEALLRLTRLCGINLITLYGVVAAVGDVRRFSHSKKLVAYLGLNPSVSHSGNFEGSGALKRHGRGALRALLIQSAKKLLEVNNPLQKWGLAVAARRGRNKAAVAVARKLCVALWHVLMGHTIGVLERLDTLETKLSKFATEMGPAALRAFGYHNKAEFVEKKLYVLRSYP

SEQ ID NO: 114246 - protein, 335 aa, unidentified
MYYVGLDVHYRTSTYCILDHHGREVKCETVRGHWPKLLERLAMIKGRWTICFEASCGYGYLHRELSRMAHRVAVAHPGQLRLIFRAKRKNDRVDARKLAKLLYLDEVPETYVPGEDVQSWRELIEHRRRVVDRQTTCKNAIRSLLRSHGVLPPKGLWSKKGRAWLERLEMPTSAAQLKRDLLLDELGEVQRRVRTITKALDAMGQGHPAVILLRTIPGVGMRTAETIAAYIDDPKRFRRSGQVAAYFGLIPCQDASAGTNRLGHITRQGPGTARKYLVEAAWQGVYRSPTIGAYFERIRRGKKERRKIALVATAHYLLRCMHAMLVQGRPWREAA

SEQ ID NO: 114247 - protein, 419 aa, unidentified
MAFKILRKNCCGLDIHKTWIFACIGITDSNGRTEYKQARFSSFSNGLRDLADWLAKYSCSDVCMESTGKYWIPVFNILEKTCWVTLAHPKYTKPQKGNKTDRKDAKWICDLCMCGMVKPSFIPPPDIRQLRDLMRYRVKLTNMLTGEKNRAQNCLTVSNLKLDDVFSDVFGKSSRSIIQYILEHPGEQFDVTPFIHRRCKHPVEEIQAAVDGVVSREQAAKLKECLLHIDQLNAHRERIEAEILRLAEPYPYQLELIRTVPGFAAAPLTAVALISEIGVDMSVFPSAKHLASWAGCCPRNDQSNKKVKSTRISRAGCYLKPLLVQIANAVIKSDRHPECRERYRRIKARRGHKKAIIAVCRMLLTAIWNVLSKLEPYSAKGYLADKLTEHSVVISKAEGLALLRKRGYIFKDELAVESG

SEQ ID NO: 114248 - protein, 387 aa, unidentified
MTTRANDMSRSLAAFDEHSTLVIVVEMGQKSWLVAGLIPGVERHPKKKMDPDGEKLLGLLERWRGEAVKAGRPITRIAVAYEAGRDGFWLARWLESRSIETHVIHSTSVAVSREKRRAKTDRVDAEMLLRVFLGWLRGERDHCSMVAVPTIEAEDDRRPGREREALVAERTRITHRMKADMARLGVRGFKPYLRSAPKKLAAVQTPEGVAVPPNTKAELERDMARLAVLREQIAAIEKTRLKRIEAAPDKGPHAMIRLLARVVGIGIETADMLVNEVMTRRLRDRRAVARYAGITGSPEESGKRRREKGLSKSGNARVRRGMIQLAWRWLTLQKESSLTVWFNARTEGAPGLRKKMAVALARKLLIALWRMTTTGEIPQGILLRPAA

SEQ ID NO: 114249 - protein, 307 aa, unidentified
MNSKNYIAIDIAKDSLAVISDSFSGSFDYDNKGLKTLLEQLRRIESALVVCEATGGYERKLMELLFSHEIPVALVNPARVRAFARSEGTKAKTDPIDALMILRFAQSKDLSPTPVPSEQQRTLQALMDRRSQLTESLAREKNRLQKSPKCVIKSVEKMIRIIERELKALEQKMEKLIDEDESMCRQDSIMQQVCGVGATTSWSILAYLGEITALKRNQLVALAGVAPYNRDSGKFKGKRRIEGGRAKVRKCLYMAAQSAAVHNPHIKEYVDGLRSRGKPYKCAIVAAMRKLLIHLQSLLKKQELELA

SEQ ID NO: 114250 - protein, 340 aa, unidentified
MSLVLQPLLPFPDGCQGMSPHQQGRGTKMTEHCYGGIDVSKDRLDVMVLPDRKSFSVDNNAAGYSELVKRLRGLSIAAIGIEPTGGYERAVIRALLAADLSVRRINPNKLRQFGRARGVLAKNDRLDARLIAEYVAIMPTRVVQRDPATEQLAEVVTMRRQLCDEHVAVENQTAHLEDAMLRRLNKRRLARLAADILLLDRRMAQIVVSNANLTRRYELLTSMQGVGPTLAFTLVALLPELGQMSRKQIAALVGLAPYDFDSGRLKGHRCIYGGRLPVRNVLYMAALSACRYNPALKVFHHRLAATNKKPKVIIVAVMRKMITTLNAMLRDNVAWQAKSA

SEQ ID NO: 114251 - protein, 428 aa, unidentified
MPYKIAGIDVHKRMLAVVVSDVEVDGEYAFERRQFGSNPAQLRLLADWLLEQQVEEVVMESTAQYWKPVWAALERYWTPTCKKREGAGSMSGTPHLAQAQSNRARQGRKNDFADAERLVKRLVANELTLSFVPDPEQRLWRTVTRTKCQLTRNRVQLQNRLEALLEECHIKLSSLVSDLLGVSARRMVQALADGETDPAALAALANYHLRATQEQLRDALGACQELNPVYRRLLKLALEELQLIEKQISQLDQEIADLLRPYQDQVQRLAEVPGLGVDSAQQIIAEVGPTAATFPSAGNLSSWVGACPGDDESAGVSHSHRSPKGNRQMRRLLNQAANAAVKYKGGIFEILYRRYVPRLGHKQTIGVIAHRLCRLIWKILYQGVRYEERGPDVRKKSQRYRAARMIRELQSLGYRVEQANSQSADVPA

SEQ ID NO: 114252 - protein, 452 aa, unidentified
MQQPVEVQVDEHEQIVERVAAIDVAKASGMVCLRVPHERIPGRRVTTVWPVAATTAALVELGDHLRCERVQRVVLESTSDYWRPFYYLLEAAGLTVWLVNAAQVRNVPGRPKTDKLDAVWLAKLAERSMLSPSLVPAEPMRRVRDLARARYDLVEDRTRVKQRIEKLLEDALIKISSVLTDVLGVSGRAMIEALIAGQRSPKVLAELARGRARARRADLERALHGRFTDHHARLARLLLGQLDELTARIDEVTTLLDAAISALPAPPAPTRPTGADELDQTPTQPAHAGYTSAVARLCAVPGGGPDSVRAVLGEIGLDMSVFDTPQRLCSWARVAPRTVQSGRKTGRARTGRGNPYLKSALAQIAIGAAKTDTFLGERYRRLIKRMPKAKALVALQRSILVIFFHLLADPTAEFTDLGADFYQRRIDRARRTTHLLRQLHALGYDVQLTETA

SEQ ID NO: 114253 - protein, 599 aa, unidentified
MKALPVLDSKAAGIDVGSEKLHVSIAGDTPKVFGTFTGDLERLRDWFQEQGVHSVAMEATGVYWLYVYEVLEAAGLEVVVVNGRHVQNVPGRKTDMADCQWLATLHAHGLLRGGFVPPADIRQLQDYQRLRADHLIGAASQVQKMQQALERMNLKFHDVISDLVGVSGLKVVRAILRGERRPGELLALCDVQIQKKKADRVKESLRGCWKKEQLFALRQALELWETYQQKIADCDRELEALLREMTGPQPPEGGRGNAVVMGPVALAPAKSPGKNAPVIERLQELVARLCGGRDVTQIPGLSVYLVLQLISEVGTDMARWPSEKHFASWLGLAGGRKQSGKRKGSVKAHRNRAGRMFCAAARALGQSVDKALGGFYRRLRGRLGGLAANVALARNTLEAQIALVEKGGGDQSTAGGAMIQLTQEEAEAYTEMERLMSDARRSASLAFPKGDPRLHLEFSVGVQDQPHDLDHELQYANTIVKGCQTYAAQLAEHGWTADDTTALDGYITTLEGDPAVRDTAGDTKKRITSARNSGANDLYKMCLTVQNAARLAYPITQAGKVAGVTEARARFLLDEFPPQRDNSAAPAPTPTPAPTQPAK

SEQ ID NO: 114254 - protein, 414 aa, unidentified
METIVSRCAALDVHKDTVMACVRVPDGQGGRAQEVREFRTFTSGLYALRDWLLGHGVTQVAMEATGVYWKPVWHVLEAEPGWQLLLANAQHVKNVPGRKTDVADAIWLAQLLECGLLRGSFVPPRAIQQLRDLTRYRKKLIEERVRETQRIQKLLEDAGIKLDSVVSDVLGKSARAMLEALIAGERDPVLLAELAQTRMRRKIADLRLGLEGGFDDHHALMLRLHLHHVDELTAAIDRLDQEVDRVIAPFGEQHRRLTTIPGVGKRTAEVIIAEIGVDMSRFPTAAHLASWAGMCPGNHESAGKRRSGKARKGDAALRSALCESAWVASRTSGYLGSLYRQLHRRFGKRGEAKAAFAVGHAILVIVWHLLHDERDYQDLGADFLDRRNDTEARKRYLVRQLESLGHKVVIEPAA

SEQ ID NO: 114255 - protein, 341 aa, unidentified
MTVMIGIDPHKLLHAACAIDRTEVELGQLQVRSGPRQLSELLAWAAPFESRTWAIESAGGLGYLLAQQLVGRGECVVDVPATLAARVRVLGSGRSNKNDANDARAVAVAALRSRSVTPVRAEDHASVLRLLAKAQLDASRARSRACSRLHALARELVPGGIRKEIVAGQAFQVLAAIEPINATQRQRLQLAHELLDEIGQLDTRMKRSKRRITDAVHASGTSLTEIFGIGPIIAATIIGYTGDITRFPSAGHYAAYNGTAPIEFSSSGRTVHRLSRRGNRTLNHALHMIAVTQLRNPGSEGRSYFDRKVAEGRTKREAMRALKRQISNRVYAHLRADTANR

SEQ ID NO: 114256 - protein, 333 aa, unidentified
MKTLPLYAGLDVHQEFTVGTVVDEMGNAVRELKVPTDEQGYKRLFYELQNVTAVFEAGRNWSYIANLLKPYCTFKMAHPLKVRLIASARIKTDEIDSRTLAHLLRTNLIPESYMPSDSIVELRNLVRYRVRIGRMATHLKNRTHDILAREGHKSDFKKPYQKKAMLWIQNLKMNPVNRDELDYTLKLLNELEDKIKELDEKLEKERIKYPEANLLTTIPGIATYSALLILAEVGDFSRFPSADKLAAYSGLVSSTHQSGNRCYQGRITKQGNVWLRWILTQCAHASVKKQHRLQKFYLRIKHRRGEQKAITATARKMLTTIWYMLQRNEAYHG

SEQ ID NO: 114257 - protein, 409 aa, unidentified
MMKQNIIFGIDVSSKSSTVCVVIDRVKQGKTFKITNDSFGYQELLDHLNQYLITPLVVFEATGVYSLSLQAFLEDYHIKYLKLNPLKAKKLMDNNLRHNKTDKVDAYRLALIQFNAPQKLRQPQSREYHELQNASRYYEELTRALVVNKNQLHRNLQSTFPQLESLLSVPSGRVYWTIASLFPHAQYVLNRNETQVFQSLLAISSIGRQRAQYLTTRLYALARQAYPYDTEKSITIRAIQRNIANLLSLSTERNNVINYMEKLVLQLNARSLTIYESIPGIAKTTAVRLVAELGNLRRFDTSAQIDAFVGIDPGRYQSGEKDSHLGITKHGNHIARKILYRTITQMETTKATQPCHITDYYDKKKRSSNSQGYKKIAIASVHKLIRTMFALIKHDQLYDYNIATDNQRL

SEQ ID NO: 114258 - protein, 350 aa, unidentified
MEKYIGIDAHSQSCTLAVIGPSGKRLRSLVVETNGKALVEAIKNITGERHICIEEGTQSAWLYEVLSPHAEEVVVTVAEKRRGQKDDEGDAFGLAEALRVGSLGTKVYKAPRQFSGLRNAVRAYGMTVQDIVRTKNRLKAVYRSRGILTDSDVYGGEQRSRWLTKLPPSHRRLAESLGQQLDALLPLEKQAETWLREESKAHAIVRKISTAPGMGAIRSAQVVAIVVSPHRFRTQRQFWSYCGLGIVRRSSSDWVRQDERWVRAETMQTRGLNWNRNPLMKTVFKGAATTVIRQLGGHPLHESYQRMLQAGIKPNLAKLTLARRIAAAVLAMWKNGEVYDPARSELHKKA

SEQ ID NO: 114259 - protein, 353 aa, unidentified
MEAETFVGLDVSRKSAVATAVDPWGELIDQSTLGATDAELIAYLQRLPGTKHVAIEACTMWEHFHDAAAAAGADVVLSHPYKTRLIADASLKSDKVDSEALATLLRLRALPTAFVPSEETRALRRLVRERVFYRKQFKAVANHTYALLIAKGVPYDDGILGLKRRREELRSLHLPEVDRGLDRLVELDQATRVLDEAIHAAFLGSKEAQLLESIPGIGELTAVTLVAFLCPIARFASFDELSSYCGLCPTNYQTAETSYKGKLKSDCNHILQWILVEASYIHRQNARGSYVARVGRRGARRKGVKRGAIDAAHALLRIIYAILKRGTPYTPHAPERPSCKTRTATSSRTVARL

SEQ ID NO: 114260 - protein, 343 aa, unidentified
MSIVGGLDIHRKQITFDYVDTETGEVRRGQICPADREHLAKWLARFAGQDAHFALEGCTGWRYVAEEIIAAGLTPHLADPAEAAHLRGPKRRAKTDRADARHQRVLLEQGRLPECWVPPSRVLECRALLETYLDLREQRTGWVQRIHAVLFHHGAPRIAGQQLGTAEGAAALRAAAAHCSPAGQLQLAIAAQMLLVYDERLHQVRRQLLDRARHTRGAAELTARLYGVGPVTGLALTCWLGGAGRFSSSRKAVRFAGLDITVYSSDGKRSPGHLSRQGPEVLRWCLYEAGKAHARAGAPDHAYYAQVKDRIDGKRAALSEARKIIRQAVHILAGLGDDALTAC

SEQ ID NO: 114261 - protein, 393 aa, unidentified
MICVGIDVAKDKHDCFILSSEGEVLADVFTISNNAEGFDTLLQTIHRCARPEDKIKVGLEATGHYSYNILGFLLDKGLHTFVINPLHTNLYRKSLSLRKTKTDRVDARTIAAMLMSDVDLKSYTDTAYHNEELKSLTRYRFDKVRERAKLKQSVSRLVTILFPELEKLVPTLHMASVYALLSEFPGAKQVAEAHLTHLKAVLHDASKGRYGRDMAVTLRDAARCSVGSVMPAKSLELQHTIRLIRELNTEIEDIESAIQTIMEEMQSPITTIPGIGFRMGAMILAEIGDFSRFDSPDKILAYAGMSPSTYQSGQLSLSGTYSHMEKRGSKYLRYALYNATKYVCLWDSTFEAYLAKKRAEGKHYNVALSHAAKKLVRLIYAMEKSRQPYNSVA

SEQ ID NO: 114262 - protein, 336 aa, unidentified
MSHYCGIDLHSNNHVVVVIDERDKRVLDKRLSNDLSLTLEVLSPYQETLRGVAVESTFNWYWLVDGLQDYGFNLHLVNTAAVKQYDGLKYSEDHREAYHLAHLMRLGILPTGYIYPKEQRAIRDLLRRRMSLVRSASTRLISAQSQIWRSTGIRVKSGDLRKPGFAPPPMDQYTLLAVDAGLTVYQTIQQQINVLEQSAYQAVKLTDAFKILQTVTGIGKILGLTIMLEIGDIHRFASAGNFASYCRTVDATRTSNGKKKGTGNAKAGNKYLSWAYSEAAHFAVRFEPLAQRFYERKKAKTNGITAIRAVARKLARATWMMLRHQVPYDARLMFPN

SEQ ID NO: 114263 - protein, 347 aa, unidentified
MSEHTPTTMGIDISDQWSTVCVLDTDGEVMEESRFRSTRAGLGRYLEHRAPMRVVLEVGTHSPWMSRQIEELGHEVFVANPRQLRLIYQSDRKCDAVDAEALARLGRVDPKLLRPIRHRAADTQLARAQLRVRDMLVAARTRFILSVRGMAKSMGEVIPRASAESFHVGVPGAVSAPVWQVVEPLVEAVAGLTAKIKGCDAALEELSLTRYPETAALRQISGVGPITALAFVTTIEDPHRFARNRSVGAYLGLCPRRDQSGASDPSLRITKAGDPYLRRLLVGCAHYILGPFGPDSDLRRWGLAYAGRGTNSKKRAVVAVARKLAVLLLSLWKSGETYEPTRHAAAA

SEQ ID NO: 114264 - protein, 345 aa, unidentified
MEQIIRIGMDTSKHFFQLHGVNAAEKVVLRKKLRRKEMVAFFKALAPTVIGIEACGASHYWARLLQSFGHEVKLIAPQLVKPYVKRGKNDMADAEALCEAMSRPTMRFVPVKTAEQQAALMMVGLRDRLIRNRTQLSNAIRGYAAEFGIAAAKGMAHLDPLLDRIQADESVPVLARELFAAQAEEYAQLQAQIDEVDAKLMAWHKADECSRRLAKIPNVGPIGAALLMMKTPAPEMSRSGRQFAAWIGLTPKDHSTAGKVRLGIITRAGDEALRSVLVAGATAVIQHVRRGGRGSPWIVDLLKRKPPKLAAVALANKTARVAWKLMVTGDSYAGKSAPAALVSAA

SEQ ID NO: 114265 - protein, 317 aa, unidentified
MNQEDQSQYVGIDVAKSRLDVAVGQDGEYWQAGNDERGIRRSVERLLALQPRLVVLESTGGLEMPLMVELDAAHIPFALVHPGRVKEFARSVGQLAKTDKLDARLLARFGEAVKPPVTHLPGEAEQYVNALTVRRRQVLDMLVDERNRLAATRLSMRAKIEEHLAWLQAELAELDRQIEEQIQQVPHFQEKGAILRSAKGVGPVLCAKLLSGLPELGHLDRKKVAALVGVAPFNQDSGRRRGKRKTKGGRADVRAVLYMATVSAVRSNPVLKPFYQHLVKQGKLKKVALVACMRKFVTILNAMIRDMHPFSFPYQPA

SEQ ID NO: 114266 - protein, 363 aa, unidentified
MKKVSTAAAKQSSNFSQQKLTIGLDLGDRSSWYCVLDEAGGVLLEQKLSTTPKAMKEVFGAMPRSRVALETGTHSPWVSRALSELGHEVIVAHARNVRLIGESRRKDDRLDAQTLARLARIDPQLLCPVKHRSARAQADLTVIRARAGLVRARTALVNTARGLAKSYGERLRGCNVRNMNPEKADGLSPELQTALQPLLAGIELLSEQIREYNDLAQESYPQVQLLKQVKGVGTLIALTFVLTLEDAHRFRKSRDVGCYLGLQPGRRNSGQREPQMHISKEGDPYLRTLLVQGAQHILGPFGADSDLRRWGLKLAERGGRNGKKRAIIATARKLAVLLHRLWVSGEVYEPLHNSSRVAVPAAA

SEQ ID NO: 114267 - protein, 354 aa, unidentified
MPKSASTQIAVVGIDIGKNSFHVVGHDKRGSIVLRHKWSRGQIEARLANLPPCLVGMEACVGAHHLARKLAALGHDARLMPAKYVRPYAKGQKNDFNDAEAIAEAVQRPTMKFVATKTADQLDLQALHRVRERLVSQRTGIVNQIRAFMLERGIAVRQGMRFLRAELPIILATRTDALSPRMLLVIENLAGDWRRLDERIETLSREIETIARQDAGCDRLMSVPGIGPIISSAVVAAIGSGDVFSKGRDFAAWLGLVPKQISTGDRTILGKISKRGNRYLRVLFVQAAWVVLIKPVSWERHGLKSWIESAKKRLHHNVLAIALANKLARIAWAVLAKGRGFETARTIDGSTQPA

SEQ ID NO: 114268 - protein, 358 aa, unidentified
MQKYNISFKGQKIFIGIDVHKKNWDVAVAPEVGFVKRHSQKASAKVLIDFLKKNYPNGDYLAVYETGFSGFSTYYALKEVGIDCIVIHAADVPTTQYEEVMKTDRIDSVKLVKSLKAGLLKGIYVRERENIDDRSVVRVRKAIQKDLCRYKSRVKHILHCNGVEMPECFDNTNTHWSNAFMNWLKDEVTLLSSTRNSLDLLIKQVETIRMNLLAATRMLRNLSQTERYKSNCKRLVTIPGIGVIVAMSILTEIYDVKRFRNEKEFAAYLGLIPTCHSSGEKVVHGEKTFRGNKQLGPMIVEAAWITINRDAGLGSQYLRYRERMKPQEAIIRIARKLSNIILAILKSDKEYIPYHMGS

SEQ ID NO: 114269 - protein, 344 aa, unidentified
MEIYVGLDISQSMTHLCVVDSKGKRIWEGKCSTSPEAIAETVRKRAPGAELIGMESGALSPYLWHELTGMGLPVVCIEARHAHKTLSEQLNKTDKHDARGIAQLVRTKFFKEVKVKSVESHRVRTLLGARAQLVWMRTDLKNQVRGALKTYGFVVSDRAEKGFNAKVAGIMKDCPGLTRMVAPLLTVLETVEREVEVLDKLFEEYSESNAACRNLKTIPGVGPITAVAFTSAVDDPKRFRKSRSVGAYFGLTNRRDQSGERDIAGRISARGDKLVRCYLWDAAGALLTRTKSWSALKSWGLRVAKRSCLAKAKVAVARKLAVMMHQMMITGEAFRWSDAEAAAA

SEQ ID NO: 114270 - protein, 349 aa, unidentified
MRFYTKQHQFYCGIDLHANAMYVCILNSTGEVVLHKNIPTKPKSLLRLIKPYRENLVIGCECMFSWYWLADLCADEDIKFVLGHALYMRAIHGGKAKNDRIDSYKIAVLLRGGSFPLAYVYPKSLRATRDLLRRRNHLVRKKSELFAHIQNTATQYNLPDPLGRIAKLSERGDLLQKFPDPVVRRMVEVDLLTIEHYEQLLATLEWELERLTERQAPIELALLKSINGVGRILGMVMLYEIEDIGRFPRVQDFVSYCRLVKPEKQSNGKSYGHSGKKIGNAHLRWAFGEAVVLMLKGNKPLQAQLQRLASRHGKGKALAILSHRLGRAVYFMLKNQVPFDQELFMRKGT

SEQ ID NO: 114271 - protein, 382 aa, unidentified
MQASTVDTPTTSHCGTIFIAIELSQKSWLVTLHSPDRERISRHKLEGGDHAGLLALLASVRARAAGKLGSTPKVVSCYEAGYDGFWLHRLLTASGITNLVFDPASIAVEQRARRAKTDRIDGELLLRTLMAHLRGEPRVVRIVQVPSVEQEDARRASRERDRLVKEQTGHTNRIKALLRLVGMAVGYPRRRDWPNWVERQRDRQGQPMSPHLLAEVTREHARLMLVRDQLAALELTQAAQASPVPAAMAERRDLLQRLKALGPAFAATLTNEVFYKDFRNRRQVGAYCGLTSSPWRSGGVDREQGISKAGNPRARLKAIELAWLWLRHQPESELSRWFRTRTANAGKRAKRIAIVALARKLIVALWRYLTTGLVPAGAVMKA

SEQ ID NO: 114272 - protein, 404 aa, unidentified
MSAICGIDWAADWHDVRIADQASGEPLAERRFDHDEAGVTGLIELLVTERVERVAIERPEGLLVGRLLAAGLRVLAIHPNQVAAARDRFRAAAGKSDRFDAFVLCELARTDSHRFAALAPSSDETIALQALVRTREDLVGVRVHLANQLRAQLDACWPGARRIFADVDSPIALAFLARYPSAQDAHGLGPKRLEGFLARHAYCGRRPVPELLQRLRQAPVAALGDLEADARRAAIVALVAALAPTVDQISQLTSQIAGAVRAHPDGPIFLSFFKDPKSVVTAAGLLAEIGDNRARYPTPDSLAADAGQAPVAKESGKRRHATFRWACDKRLRGHFATLADSTRHWHPWAHDTYARARARGCEHPHATRILGRAWTRVLWRCWQNRTPYDPTKHGNLTRLLETRG

SEQ ID NO: 114273 - protein, 390 aa, unidentified
MERPVKRNDLRRSLIAFDQVSTLVAVAELSLGNWLVAGLVPNLVRQPLKKLRSDPEALLGLLLRWRDQATKTGGRIKRIVLAFEAGRDGFWLARWLRARGIEVYVIHPASIPVSREHRRAKTDRLDAGLLMRAVLGWLRGEAKHCSMAAIPSIAEEDARRPTRERETLVREQTRAVNRIKSTLIRFGIRTFKVKLRQASKHLEGLRGPEGEPLPANTMAELRRDLARLQLIRGQIREIERARLERLKRAPGQGTHPMMRMLARIMGIGIETADVLVHEVLSSKLRDQRAVARYGALTGSPDESGSKRRERGLARAGNARVRRGMIQLAWRWLMFQKNSTLAKWYRARTTGATQGLRKAMIVALARKLLIALWRYVTIGEVPAGAVLRPVT

SEQ ID NO: 114274 - protein, 343 aa, unidentified
MQIRSVGIDLGKTTFHLVALGDNGKVLLKKKFTQKQLITFTANMQTSLIGMEACGGAHFLGRALREQGHDVKLIPAQFVRPFVKSNKNDFIDAEAIAEAVDRQNMRFVPIKTDDQLDLQALHRVRDRLITRRTSVINQLRAFLLERGLVFAKSPARLRERMPEILENADEDLTPRMRNLLALLWNEWKDLELQIVEMNDEVEQIASSDPACTRLRQIPGIGPLVATAIVASIGNGAAFHKGREFAAWLGLVPKQYSTGGKAKLYGISKRGNNYLRKILIHGARAVVLRSKRERIAMGAWMTSLETRAPRNVLIVATANKLARIAWAVLSSGEDYRAVQELVAA

SEQ ID NO: 114275 - protein, 344 aa, unidentified
MKNMYYIGLDVHKRTISYCVKDGGGAIYAEGTIPATRFDLDRWMRTLPQPWTAAMEATVFTGWIYDHLQPHAAALKVAHPLMLRAIAAAKKKNDRIDASKICDCLRCDFLPECYMASTAIRERRRTLRYRNLLVRQMVQMKNKIGVLLMEAGVSYNKQRLHKAGYFRELLATNPDIDEGLCSLLRLCRETVVRLQRTESALVRSLERDSLLVERVERLMTIPAVGPITALTWALEVGDAKRFPSIKKAISYCGLCGAEKSSGNTVQRTPLSKQRNKHLQTTLIEAAKMAPRNSSELAILYDKEKQKGNVNRATLAVARKLVAYLMAVDRGQRKFQVVETNCIAA

SEQ ID NO: 114276 - protein, 358 aa, unidentified
MVMLADHYDYVIGGDPDRDTIDLAVVDTRTGGVQAKTAETANATGYQHLLEWGGRHAPGRRVWALEGTASFASGFVSCLLDAGEDVVEVGGVRRARGSKNDQIDAVRAARQALSSEHQATPRARGLREAIRLVMNTRHALLASRTKAINELKSAIVTAPEHLRAGLRGVSLAKQLDHVEALAVPVSADVEHRVTVLTLRSITARIRFLSDQVSELDPELMALVKAHAAGPALLSEPGVGPVVAAQLLVSWSHRGRVRNEAAFAALAGTSPLEASSGQRSRHRLNRGGDRDLNRALHTVAVTRLRCHPETIRYETRRTAEGKTHRDIRRSVKRALARRLYRRIQDATTPTAPVVARHVR

SEQ ID NO: 114277 - protein, 343 aa, unidentified
METYIGLDVSLKETSICMVDDDGVIQCESTVISEPAAIAAFIKTRTNDVKRIGLETGPTSTWLWHELRALGLPVICIDARHAKAALSMQINKSDRNDAVGLARIMQCGWYKEVQVKSVTCHEIRSVLNSRALLVKIKRDLENQVRGLLKNLGFVIGKASGNVFRQRTEELLSEEGLLCESVRPLLEVREKVRREIVSLSRKLLELARNDENSRRSMTVPGIGPITALAFHAAIDDPIRFRRSRSVGAYLGLTPRRYASGEIDWSGRISKCGDQLLRTYLFEAAGVLLTRVTKWCNLKVWGHRLWKRIGFKKAKIAVARRLAVILHRMWCDGTDFIWSSKEVAA

SEQ ID NO: 114278 - protein, 350 aa, unidentified
MTTIARRITGGVDTHLDVHVAAALDERGALLGVQSFPATGAGYKELLCWLEGFGTIELVGVEGTGSYGAGLTRHLLDHQITVVEVDRPNRQRRRRTGKSDPHDAVAAARAAQGGDATGSAKTRDGNVEAMRVLRVARRSARGSRTQAINQMRSLISTAPEELRAELRSLSIYKVLTVASAYRHTGRTDVTTVTKLTLRTLARRALSLEEEVKEIDRLLKTLVAEAAPELSAIEGVGTDVASAILVAAGDNPERLKSESTFAKLCGVSPLDASSGKQQRHRLNRSGDRQANSALWHIVFTRMVCDPRTQHYIESRMKEGRSKKEAIRCLKRYVAREVFAALPRSQFALDSP

SEQ ID NO: 114279 - protein, 347 aa, unidentified
MEQIIRIGMDTSKHIFQLHGVNAAEEPVLRKTLRRKEMVRYFEELQPTQVAIEACGSSHHWARLLRSFGHEVRLIAPQFVKPYVKRNKNDAADAEALCEAMSRPTMRFVPVKTTEQQAALMLVGVRERLVRNRTQLSNAIRGYAAEFGVTASKGLSRIEQVLERIATDETLPVLARELFALHGKEYGQLQARLEEIEARLMAWHRADACSQRLAQIPGIGPIGASMLVMKTPAPETFRSGRHFAAWLGLTPKDHSTAGKSRLGGITRAGDEGLRSVLVAGSTSVLHRVRQRGTGSPWLTDLLKRKPAKLAAVALANKNARIAWKLMVSGECYRIAKPMTGFSPPQAA

SEQ ID NO: 114280 - protein, 355 aa, unidentified
MTFVGLDLHKRYITACALDVTGALLGEVRRMPVSSDSLLEFLATFPAPVTVGMEATLYWQWLHDQLEHAGHSSRVADARQVKLIWQVRSKTDPIDARKLAELLRVNLFPTVWIPDHDTRRRRQLLHGRAFLVRQRTQIKNRIHGRLTAENLLFPRSDLYGRAGRAWLATTPLSPMLRSQVDRLLRLHDGLTTEIDQLDDEVKRLRRDHPMIERLHTIPGVGLFGALFLVAEIGTIERFASSHQLTAYAGLVPSTRSSGGKTTHGGVGHASNRWLKWLLVEIVQTLKQAPGPVGDQYRRLLRAKGKPKATTAAARKLCCYIYWMWKEGVSYDEWLARRGRDVWSEVRPVQRMGAVA

SEQ ID NO: 114281 - protein, 339 aa, unidentified
MQKKWIAGIDVSKKTIDVALSLNLSNTAVFTRQFSNNFKGYEQLKKWLKEYEAAIESTLFCLENTGLYHRLMVNWLQKQNGFVWVEMPVQIKWSMGMQRGKNDKVDAARICLYAFRNQDKAQNYTSMDIAVQQIADLMAARQRLLQCLKTLRLPIKELKDAGLSTAAKLVEKSCAKSIKAMEKELEDIEQQLEQIIEQDEQLSTTYRYIKSVRCIGLVASLQLLVYTNGFKRFKNAKQLASYCGVAPFEYSSGTSIKGRPKVSNMANKTLKTAMHMCSVSAVRHNKEMRAYYQKKVSQGKNKMSALNAVRNKLLHRVFACVRDKREYGEHYGRTEVTAA

SEQ ID NO: 114282 - protein, 325 aa, unidentified
MVRMTAAGERLETLHLDNDPLELGLALRRAGEDPQVVLEATYGWYWAADVLAEAGAQVHLAHPLGIKGFAYRRVKNDERDAADLADLLRMNRLPESWIPPRETRQLRELVRHRAKLVALRTGLKCEVHAVLAKQGVAVPMSDLFGYRGQTMLEALCLDDGFAQRMESARQLICVFDNHVDRFERLIKARLKNHGGYQAIQVVPGVGPLLGAVFIAEIGDVTRFPSPAHLASWAGLTPRHRESDTKIHRGHITKQGSKLVRWAAIEAVQRLQHNDLLPQLRRFQSSVAQRRGRNISKVATARRLLCLVYYGMRDGEVRCLTHQPAS

SEQ ID NO: 114283 - protein, 380 aa, unidentified
MTQHSHLTTSTGLDYDRTLILAVEVSSRSWIVAAQVPGLQHKGVKQQLAPRADALMAAIEGYKRRATAAGMAVDRVIVAYESGGSGFWLARWLQQRGVEVYVMQPSSVPVDRRMRRAKSDRIDADMLLRTLLAWLRGEPRVCSMVPVPDEAVEDARRPIREREELIRARVALVNRIEAVLTVLGAGDYNPLRRDCRERLGQLRTALDQPLPPHARAQIERLLDRLDLIRQQVADLEAQRDQAVEGEAAGRTEQMIQRLARLRGIGVQTATVLVHEAFVRRFRNARALGSYAGLTGTPYSSGGTQREQGISKDGNRRLRATLVELAWMWLRYQPGCALSRWFHDRLGGSRGRLRKVMIVALARKLLITWWTMLLKPPRISC

SEQ ID NO: 114284 - protein, 414 aa, unidentified
MSNPLLVGVDVHRKTNAVCVMNGQGQELIPRFTMDNNRPGTEAFAQQMAQLMLDGDFDVLQVAAEATGWYWFHFFQTLSQDPFLNQWPLELYPLNPRLTANFKKTFVDLDHTDHIDSFVVGDRLRLGRDLPAPFHYEEIYLPLRFLTRYRYHVVHNLAREKAYCLAILYLKVSEYTHKDRKPFSNVFGAASRAVLQEFASIEEIAAIPFHELVEFIDLKGKRRFPNPAENARKLQQVARNSYTLPDALQHPINLVLDLSLKHITFLERQEKRLNTAIAQHMEAIPHTLDTIPGFGPVFSGGIISEIAGIERFDYNQAKVAKFAGLKWRKHQSADFEADETRLTRTGNRYLRYYFCEAAQSVRLRDTEYAAYYDRKYHEVRKHQHKRAIVLTARKLVRLVTRLLTTNQPYRPRRR

SEQ ID NO: 114285 - protein, 371 aa, unidentified
MKTGSKLSEDEIQLYNAFVASKKAQPVAVDLAARVFQVCYIDKDTGRLYNRKLSRADFFKFITEQKDKVIWGFEACGACNFLARKVAEHGHDSKIMPAASIKSFLGIDKSDKIDAMGIFRALITPTIREIKPRSVGNQMLLWLFTAREQLNKQMVQTINVAHAILYEFGTVADKAYTKNVKVLKDGFAEMRDKYRQLPEYLHIEITLNAVEEQLDALSKKLEQIDDRLEAIGKTDSVCRTLCSIPGIGPKTAVAFVAYAGDIGRFPSSRHFCSFIGVTPRITGTGGKIITAGLRKSGIKTLKRMLYMCAFVYLCSSVRKGVMSSWLKSRLNRKGYSKRKIIGAIMNRLCRIAYSVMKNGKTFEPGRCSMIA

SEQ ID NO: 114286 - protein, 324 aa, unidentified
MIDGILGIDVSKNTLDVSISSSTKVRTKSFANTSDGWHHLLDWLIAHKIRRVHACLESTGRYSLGIACALHEAGHVVSIINPAQIRDFVRTKLGRNKTDGVDASHIREYCELFKPQPWVPPSEAHRRLGELQTIRAGIIASLTAWKNRKNSGIVDAEAQALADATISHFTSQLGTVDQAIALTIENDSHLRSKRDLLLSINGVGETLAGVVLAELPGPDVLHSSGEVVAYAGLNPRQHQSGTSVDRATRISKIGNAVLRAALYMPALSAMRYNPAIVALVARLKSRGRLKPKQIVVAAMRKLLVLCFGVLKTGKPFDPAIAMGC

SEQ ID NO: 114287 - protein, 347 aa, unidentified
MNDQNIHIIGIDLGKNWFHLVGMDEHGKPVYRKKLNRAQLGEWIVTLKPCIVAMEACPGSQFWGRRFQHAGHVVRVIPAQFVKPYLKSNKNDFNDAEAIAEAGSRGTMRCVALKSADQLELQALHRVRQRFIVERTAVVNQMRALLLEHGWVVPIGRELFARRLPTILGDLEHGLTVRMVQLIERLRRRWRALDDELASISNEIVQIAADSELCRRVRTVPGVGPIVSTALIAAVGNGAAFRRARDMSAWLGLVPKQYSTGGKSTLGGISKRGNAYLRMMVIQGARALLIHMKRDQSRIGLWLRELEQRSHPHVALIALANKIVRICWKVLTSGQNYRPFLEVSKLA

SEQ ID NO: 114288 - protein, 425 aa, unidentified
MNSISNKKINQVTDQTLVVGMDIAKKKHYACFVDERGRVLKKSFPVPQSREGLEWLYQSIVKAMEEFEKTEVIVGIEPTGHYWLNLAYFLDEKGIPLVMTNPMHVKRSKELDDNLPTKHDAKDALVIARLVKDGRFSYPRILKGMEAELRAGATFRSKLVEEQGAVRNQMIRWLDRYFPEFTQVFPSFGKMALAALEQTPFPSDLAGKEIEEVLTLYRQSEGLQSPQKPKAKKLMELAQHSIGVTEGQQMARIEIATLVRRYRQLEEEIEALTQQLTELVQTSVEYEWLKTVPGLGDATIVELLSEIGSFSHYQDPRQLLKLAGLTLREHSSGQHKGQKRISKRGRRRLRALLFRVMMPMIRHNEAFRQLHEYYTTRPDNPLRKKQSIVVLCGKLLKVLHAVCMKHQAFDAKLMMQDIFGLESAA

SEQ ID NO: 114289 - protein, 344 aa, unidentified
MTYYTGIDVSLRSVSICVVNDKGEVCFEAKVAAEIDAIVDCLHRFDREVRSVGFEAGTLTQYLTYGLQAAGFEVTCLEARQVSVTLAAMRNKTDRNDARGIAQILRTGWYSPVHVKSLHSHQVRALLASRKVILKKCVDLENELRGLLKVFGIRLPSRVGHGAFDAELRQTVSGDDMLACALVPLLDARTVLYKTYLKLDNAVKAVVRVDPICRRLMSIPGAGPVTALTFKAAVDDPGRFKSSRTVAAHFGLTPRRFQSGELDNPGHISRAGDADVRSALYVAAHSLLTRNAQWSSLKSWGVRLAKTRGHRRAVIAVARKLAVILHRMWIDGSQFRWGPEPTHA

SEQ ID NO: 114290 - protein, 313 aa, unidentified
MSPAKVYVGIDVAKDWLDVAQRPGGEAWRVSSDETGVAALVERLRGVRPALVVLEATGGLQIPAVAALAAAGLRTVVVNPRQVRQFAGATGRLAKTDAIDAQVLAQFGEAVRPEVRPLPDADSQELSALVNRRRQLIEMLTAEKNRLRLAAKKVRPNIEAHIRWLEGELLDLEGGLGDAIRSSPVWRERDNLLRSVPGVGPVLSSVLLAELPELGRLNRKEIAALAGVAPLNRDSGQFRGRRTVWGGRSHVRTALYMATLVASRYNPTIKSFYQRLLSVGKPKKVALTACMRKLLTILNAMMRHQAPWEISAS

SEQ ID NO: 114291 - protein, 334 aa, unidentified
MNQKYFIGIDISKGKLDCAVILSDYTVVTECIVPNNVKKINSFLKAFMKKHKMEPNQLLVCCENTGIYNRPLEVVCTDLNIGLWEEHALRIKRASTDMRGKSDRKDAMRIAEYALRYQDRAVLYKQPSEVLETMDSLSKVREKLVDQMVSIQNQLGEAKSHNPRHYKILLDSYKPLIALIERQLKKVDLEIQELLNQNEDIRQNIQLMKGIPGVGKQTALQFILYTQNFTLFKSAKHLACYAGVVPFQNESGTIVKRARISKMASQKLKSLLHLAAMSAVRSKSELKTYYIRKVAEGKNKMSVLNAVRNKIVHRIWAVIERQSPFLPQENFRPI

SEQ ID NO: 114292 - protein, 363 aa, unidentified
MTSITTTTGPVTGGVDTHGETHHAAVLDQVGRELGDREFPTTPSGYRALLGWLAGHGQLDRVGVEGTGAYGAALARHLRAGGVTVVEVDRPDRKARRTSGKSDPLDAYAAARAALSRRATGAGKSRDGRVEAIRALRIARCGAVKARAAATNQLKSLLISGPAELREQLRHLSTTVLITTCANLRPTSDLADPVQATKAALRRLARRHQNLSKEITEADVDLKNLVTAAAPCLLALHGVGIEVAGQLLTTAGDNPDRLRSEAAFAHLCGVAPVPASSGRTHRHRLNRGGDRAANNALYIVVLSRLCYDARTREYVDRRTKEGLSKPEIIRCLKRYVAREIFTLLTARTASEQSHQVLPMSTVA

SEQ ID NO: 114293 - protein, 387 aa, unidentified
MIYVGIDIAKLNHFASAISSDGEILIQPFKFTNDYDGFHLLVSKLNSLEQDSLIIGLESTAHYGNNLVEFLVLHNYKVCVLNPIQTSTMRKNNIRKTKTDKVDTFIIARTLMMNPHRFFTTYDLDLLHLKNFGRFRQKLIKQRTRIKIQLKSYVDQAFPELQYFFKSGLLINTCYCLLKEAPTPNAIASMHLTHLTHLLEKASHGHFGKDAANSLRILAQKSVGSNDSSISIQITQSIEQIELLNSQVNRIESEMKAIMLSLDSVIMTIPGIGYINGGMILGEIGDVTRFSTPKKLLAFSGLDPAVYQSGNFNASHTKMSKRGSGPLRYALVNAAHNTVKNNQTFHLYYDKKMSEGRSHFNALGHCAGKLVRIIHKMLTDNVPFNLE

SEQ ID NO: 114294 - protein, 340 aa, unidentified
MSEITRIAIDTSKAFFALHAVDAAGRTVFRRGLRRPQFEAFFEKQAAVEVVLEACGGSHHWGRWLAKLGHRVRLIPPQYVKPFVKRAKNDRNDAEAISVAASQPSIGSVPVKSAEAQAAAMLLSARELLVRQRTQLANALRGHATELGMVAPIGNKGLTCLRGEVATADEALVPPAAKQALKLLGREIDRIEASLVEIDARLKQQFATDTLARKLARVPGIGPITALNLSLRVDAGQFKSGRHFAAWLGLVPRENSTGGKQRLGGISRAGNERLRQLLVVGATAVIQHAKPDRAGASLWLIELLKRRPRKLVAVAWANKMARIVWAMMTSGEEYRPAKAA

SEQ ID NO: 114295 - protein, 338 aa, unidentified
MEHIAIDLGGRDSQVCIRRSDGTIVDERRIETAGLARFFTTIPSSRVLVETCAESFGVADAAIAAGHEVRVVPASLIRSLGVGARRIKTDRRDAQALSEASCRMDLPSVHIPSVEARRKRSLCAMRAALVRSRTLLVNTVRGWLRTNGLSIRATPETLPARVRERGGGAVPEHVMRTLHSIAELTTQIRQGDRELFEIARADDVCRRLMTVPGVGPITAVLFQSTVDDQQRFGGAHLVEAYLGLVPGEHSSSGRQRRLSITKAGSDVVRTSLVQAAWSARRTRRADPMVQWSIEVERRRGQKIAIVALARKLAGILFALWRDGGVYDPRRGAETPSTI

SEQ ID NO: 114296 - protein, 337 aa, unidentified
MDYFAGLDVSMEETHVCVVDRDGAVIHEVKVPSTPADIKTALAEAPACRRVVFETGRMAPMLHHGLTGCGVPVICIESRQARQALKSFATHKTDRNDARGLAHLARTGFFKPVHVKSLPAHAIRSLIIARKKLVGQRVTLENQIRGLAVVFGVRLPRALSPAFIAKALQASEGIDGLSAAMRGLVAARAAVLSAIAAIDADMKKLARASDACRRLMTIPGVGHLTALAFAAAVDDPERFRRSRDLGAYLGLVPRRYQSGEVDYTGSISKCGDRRMRTLLYEAANVILTRYKQPLKLKDWALAIARRSTLRKARIALARRLAIIMHAMLRHGTEFKPA

SEQ ID NO: 114297 - protein, 394 aa, unidentified
MKKTSTIRENGNMIFKGRKLTIGLDLGDRWSFYCVLDEAGQIILEQKLSTTPEAMKQTFESTPRSLIALETGTHSPWVSRLLRELGHEVLVAHAQKVQLISKSNRKDDRHDARTLARLARIDPELLGPVRHRSAKAQIHLTVIRARAELVSARTALVNAARGLAKSYGERLRKCGTQQVSRELAAELSVELREVLEPLLQEVESLNERIKQYDARMEKIARESYPQIELLKQVKGVGTQIALTFVLTLEDPHRFPKSREVGCFLGLRPGRRDSGESQPQMHISKEGDPYLRTMLVQGAHYILGPFGQDSDLRRWGLKLAARGGKNAKKRAVIAVARKLAVLLHRLWVGGEVYEPLRNSHKAMRAVAYSEQLPTKQGRLGVDGVGDRRSWLEISL

SEQ ID NO: 114298 - protein, 392 aa, unidentified
MIYVGIDAAKRKHDCCILDPQGKPYPVFSFSNSHDGFQSFFQKLFSICSDKGQIKIGLEATGPYSENLFNALVDRSLPVLRINPLLVKNFKSSMSLRRTKTDKVDAQAIAQMVKEKGDSLQTYSTSLYHMEELKSLTRYRLKLVGEQSKLRVSVSRLVTILFPELESLVSSLHLASIQALLIEWPGHQQLADCSLKRLTNLLKKHSRGQFGKPKAIAIQQAAQQSIGRVSPSKSLELRQTLKKVAYVQRDLDEVEAQIKEMVDSLHSPILDIPGIGYTTGAMILAEVGDFNRFANADKLLAFSGMSPSKYESGEFKGTTGKMEKRGSSYLRYALYTAAKLVSQFAPQFKSYYQKKRAEQKPYNVALSHVAKKLTRVLYKLGTTGEAYQPQAA

SEQ ID NO: 114299 - protein, 396 aa, unidentified
MARLWIGVDIGKTHHHVAAVDGDGRLVYSRRVANDETALLTVMAEVSTHGRPVCWAVDVTTGMSALLLTLLWRRQAQVRYVSGTVAFHMAAAFAGENKTDARDALVIAQTIRMRPDIPILEPSDRLLAELTVLTSYRAGLVGQRVATLFRLQELLTGISPALERAVELNRKAPMMVLACWQTPAAIRHAGIDRITALLRRGHVKNAVQVAEAMVAAARQQTVNLPGQRAAAMVVGQMATEILALEQRISAVDDLIADHLEQHPLAPIIGSLPGMGNLLTAELLVHTAGMTEYDSPAKLAAHAGLAPISRDSGTVSGNHRQPRRYHRRLRHILWMAAFTAARECPTSRAYYEKKRAEGKNHRQAILALARRRVDVLWALIRDRKTFTRPAPVIRAAA

SEQ ID NO: 114300 - protein, 430 aa, unidentified
MEEVDEQELQVERVAALDLGKAALEACVRVPHETKPGRRLQEVRGYATTTTSLLALADWLHSWGVTRVVMESTSAYWKGVFYLLEAEGFDCWLVNARDVKHVPGRPKTDKADAVWLAKVAERGMCRPSLVQPRPIRQLRDLTRYRRSLIQDRTREMQRVEKLLEDAQIKLSSVASDIFGVSGRAMLEALIGGQRDPKVLAQLARRRLRAKLAALEEALRGFFTDHHAVILRMMLDNIDRLSEQIAALDTTIEQAIAPFAAQVAQLDEVTGVGVTAAQELIAEVGVDMGRFPSAPHLVSWAKFCPQVHESAGRKKPKGRGTGNPWLAGTLGNIVATAARTDSFLGARYRRIAKRRGKQKAMVAVGNSALVIVYHLLSDPEARFTDLGAEHYDARIDKQRRARNLAAQLQAVTGQRIVIRDGKAVIVQPEAA

SEQ ID NO: 114301 - protein, 447 aa, unidentified
MVEPEEIEDEQHEQILERVAAIDVAKASGQVCTRVPHAARPGRRRTMVWPVDATTGAILELASHLTGERIQKVTVESTSDYWRIWFCLLEARGLDVQLVNAREVKNVPGRPKSDKLGCVWSAKLTERGMLRPSFVPPPQIRQLRDYTRLRTDLTRDRTRHWARLEKLLEDALIKVSGVSSTMDTLPVRDMLQALIAGERDPQVLAGLARGRMRAKHDRLVEALNGRFDDHHAELAAILVGQIDSLTAQIDRLTARIGSLIEAIPVTWGVDAGGSTGPAAGAGPGAPVLPAVARLDEIPGIAPHTAQVIIAEIGLDMSVFPTPGHLVSWAKVSPRTIQSGPRSHGGRTGKGNPYLKGVLGEAAAAAAKTGTFPGERYRRIVKRRGKLKALVAVARSILVIIWHLLACPAARYQDLGASYYTSRIDKDRKIRNHVRQLEARSRPARWCK

SEQ ID NO: 114302 - protein, 385 aa, unidentified
MKSRPVYHVGSVSVSLQTDGVDGPLTAFECQMVVVEDHQEREPSMSEITTIGIDIAKHVFQLHGVDAAGEVVLCRRLRRNQIASFFTALPPCLVGIEACGTAHFWAREIAALGHDVRLMPPGYVKPYVKRSKHDAADAEAVCEAVRRPSMRFVPVKTLEQQSALIAHSVRDLLIRQRTMLVNALRGHLAEFGIVAPRGIHKVEELTAVIGDQTDRRIPTSAKHALRVLASELATIELRIAVLETEIVTRTRADAVARRLATIPGIGPIIASRITATVPDPSIFRSGRDFAAWIGLAPRQNSTGGKVRLGGISKRGNGTLRRLLVGGAMAAMFRSKVLQTDPWLRQLRARKPVMVAAVALANKIARTVWAVMRYDQDWRPAAAPVR

SEQ ID NO: 114303 - protein, 456 aa, unidentified
MKIPQSTIRLLTGRLVKILLYREVSTMKSNTQNAKIEAITEKTLVLGIDVGSKTHYARAFDYRGIEYSKKPFKFSNTEVGFATFKEWILDLKERHEKDKVVPGMEPTGHYWFNLGKFLQDNEMKPVLVNPHHVKKSKELDDNNPTKNDRKDPKVIAGLVREGRYMIPYLPDGVYADLRTASNIRFQLQAELTRIQNRISRWFNIYFPEYKTVYGKPDAKSGMLILKAAPLPEDILTLGIDGVNQIWRDAKLRAVGKARAKTLIKAAEHSIGSKEGTMSARMEIRMLLEDYESQNMRLQEVMVLIEELVKEIPMAEKLLEIKGVGIRTVSGFLAEVGDISRFNNPKELQKLAGLALVENSSGKHKGKTTISRRGRKRLRYLLFEVAMSLVAKNPEFRELHNYYTTRRLNPLKKMQSLMAIAAKLIRVFYAMLTKGVDYDPKKMISDIKRPTVYLQAA

SEQ ID NO: 114304 - protein, 341 aa, unidentified
MKNKSFIGIDISKNVIDASIFCEGTPIKDFPHAVFNNSHKGFGEMCTWLKKNHVVLSNSLFGMEFTGSYSMELEKFLNARKYQFCMLSTHVVKHYPMGPKDKSDKIDSAKIADFLYRYDGTECVKPYKMPDKTMQRLKALMNERKFLVEQRTCFMNRRQLCTTKEDAQLYDGYIKKLSRDIENIELEEQKLLATDDSLLSTYKNLLTIPGIGFVNAINVIVITRNFTAFETARQYASYVGVAPHFHTSGTSVRWRPRPSARCDGQAKADLSMAATVAVQYDAELQSFYNRKLGGKQDSDTKRKALNAVKFKLVLRMFAIGKQNRKWEPLDSKSSNEKLAIS

SEQ ID NO: 114305 - protein, 376 aa, unidentified
MKNVVICGADVHDNSITTRIAVNKEEPETRIFSYTTSGRKSMFKYLKFIACQHGAARTVMAYEASSLGYGLCDEGTDAGIECYVLAPTKMPQSEEQRKRKTDKRDAQKILEQLRGYVLAGNDLAKVWIPDIQTRDDREVVRMRLEVADKLTAARTQVRTLLKRNKVEKPKGVGNAWTVSDCQWLQRLTVPGNELAFGGRVALASLLRQITALEAEIKELDEAIKVLAATDRYRAAAEELVAQLIGVGELTAMVFLTELGDMRRFRNHKKVGAFLGVVPSSHESGESNDRKGHITRQGPARVRKVLCQAAWARIAFDKEESKVHARIVEKNPKKKKIATVACMRRLGIRMWRMALEAQIKAGVYASKELPQTKRPAA

SEQ ID NO: 114306 - protein, 338 aa, unidentified
MLHSGIDLHKRTVVLATVDAQGQCVKEAELPTTRAAVAAYFAAQPGPHRAVVESTATWYWLRDLLVSLGVDLTLGHSKYIKAISYAKVKTDAVDAHTLAQLLKNELIPKGHMISAAHREERDLLRARLRLVAQQVRCRVTVEGLLAQYNVTAAEALPELVRWRVAMLAEQRALVTAHIKQIEQALVPRLIPTPDIQRLLYIPGIGKIVAFTVLLEIDDIARFPTVKGFFSYCRLVPAAKNSGGKVRQQRSKDGNKYLKIAFHHAAVRAIQYFPEIQHFYRNMARRKPKAVARALVAKEIARAVYFVLTRQEAFNGTFKGQPLSRTKQPRWPRLANPPA

SEQ ID NO: 114307 - protein, 343 aa, unidentified
MQTITTVGLDIAKSVFQVHGVDAAGQVVVRRQLKRRYVLAFFQKLPPCLVGIEACASAHHWARELQVLGHTAKLMPPAYVKPYVKRHKNDAIDAEAICEAVTRANMRFVATKTPEQQSCLTLHRTRHLLMRQQTSVINAIRSHLAEFGIVVPVGRNGVEQLLGVVADPNDKRLPELARACVAALGAQLRVLKLQILEFDRMITAWHRSSEASKRLDQVPGVGPLLATALVASVAEPKAFRSGRDFSAWIGLVPKQNSSGGKERLGNISKRGDRYLRSLFTTGALAVIRYAKIHGTKHRPWLTALLARRPTKVAAIALANKLARMAWAMMARGERYKEPAALAA

SEQ ID NO: 114308 - protein, 340 aa, unidentified
MGNVTTIGLDIAKNVFQVHGVDADGTAVVRQRLTRGRLLKFFAKLPPCLVGIEACGSSHYWARELVALGHDVKLMPAQYVKPYVKRGKNDAADAEAICEAVTRPTMRFVGIKTPEQQSAMMLHRVRLILSRQRTQLSNALRAHLAEFGVVAPIGRNGIDQLLDVIADATDERVPADARFCLEMLAAQLSTVKGQILENDRRILASARETELGRRLMEIPGVGPLLASAIVATVPDPAIFRSGRNLAAWIGLVPRQNSSGGKERLGGITKAGHQYLRQMLIVGAMAVVRYAERNGAKRPWLVQLLARRKAKVAAVALANKNARMIWALMTSGERYREPQVA

SEQ ID NO: 114309 - protein, 375 aa, unidentified
MKEKLRFLGLDVHAETIAVAIAEPEGEVRSLGTIPNRADSLRKLIRKLGPAEKLRVCYEAGPTGYVVYWELAELGVKCEVIAPTLVPVKAGDRVKTDRRDAEKLARCYRSGDLTAVWVPDEGSEALRDLVRTREAAKQDQLRARHRLSKFLLRSGQRPPSGIRPWTRPYLIWVAQLRFTQMAQEATRLDYLHEVEHMRERVERLEQAITEAVKLASPTLQQVINDLQALRGIADISAVTIAAELGQVSRFDGARQLMGYCGTVPSEDSSGKRTRRGSITKTGNAHLRRIVVEAAWSYHRPPCIWYRLRKRQESISEEIKEIAWKAQHRLHKRYMRLAAAGKDKRKITTAVARELLGFIWAIGTRAETVARQRIAA

SEQ ID NO: 114310 - protein, 361 aa, unidentified
MKTVDGKTSRDKALHLEVGEFVVVGVDVHKKNWHLAVWSMKRGLVTHWVQPASAATLIERLDPVRTHISWIGYEAGPTGFGLARALKAAHLNVWVVAPSRVPKLPGRENKTDRLDCIKLAKLIAEKQIVHPVCIPSEQEEADRHVLRMRATVSRKLGKVKVQIKSFLLLHGIAEPEGLRGWSRRSLQALREVPMNTELRMCLDALLEELNEHAVRLRKLNAGVRALARTERHQSTVTNLCTVPGVGLLTAMTVRTEWIQPERFTDSAQVARLIGLAPSIRQSGQSSRSGPIIKSGNARVRWVLVESAWRSLRLDSTANDRYHRLLRNTANPKKAIVGVARQRATCLWRMIVTGKPYRVAPK

SEQ ID NO: 114311 - protein, 522 aa, unidentified
MSQSIVRRSPSKATRRSSLQVSLPKGRADQRVQEVGPERFGIASVDCAKHRSKWTLRNFFGKVLLEPQTVEHNEPALRAMIAALRGAVGRYHLAHVLVAIERTGNYHRIVYRACRDAEFETRLVHPLASRKFREAENPQNKTDDNDLGGIHRAVVLGFGLLEQQLDQTYSRLRLLVRHRRDLVWKMSSVHCQIREHLQATLPGLTALFADKQFWTSPLPMALARRFPSPHAIRELGRVRLTKLLRDERLHFQERTIDKILAWSEQAAPPDPDASIEQRIICDLDDDRLEKLRMIHALEIEIASLVGHTPYVLLMAIPGINVVSAADFAGEAGPIEHYANPNALTGRAGLFPSRYQSDTVDRQGRLVRCGNRRLRAALMQIADNLIAVNNHFRGVAALWKQQRVHPGLQRVRVAKRFTRLAYSMLLGRKIIPHPCCREPHYILEKLLAFLLDHGTTHAILQQCLDTAAQQLPATVRPAEAKQLQTQAGALQNSRKTEARSLSTILKEVLAKLLTPRVDSPAEG

SEQ ID NO: 114312 - protein, 412 aa, unidentified
MELLHRRCCGLDVHKETVVACLRLVIDGKVITEVRTFQTTTADLLRLSEWLATNDCTHVAMEATGVYWKPVWHILDDGEFKLVLANAAHVKNVPGRKTDVNDAMWLAELLAHGLIRASFVPDAQTQEMRNLLRTRKQLVREQSSHVLRVQKTLEDANIKLDSLLSDLMGKSGRAMIEALIAGETNPAKLASLADRRVKASPEEFREALRGRVTKHHRFLLRLHLNQIDALDAAMATVDAQVEANIGPFRTAVDLITSIPGIKNLGAHVIVSEIGIDMSRFPSAAHLISWACICPGNDESAGKRRSNRMRKGAPWLKATLLQCAWAAAKKKDSYLQAQFYRIKARRGPKKAIMAVAASILTAIYHMLKDGTMYQDLGCNHFDRRSTDQQKKRLVKRLVDLGYAVDIKPLAAMA

SEQ ID NO: 114313 - protein, 458 aa, unidentified
MKGKRTSAENHSGMVTVHPNAAAIDVGATMHMAAVGADCASDSVRSFGTFTGDLHRLADWFAECGVKTVVMESTGVYWIPIFELLDERGVEVFLVNARDAKHVPGRKTDVSDAQWLQRLHSHGLLRASFRPKGEIAELRAYLRQRERLLDYAASHIQHMQKALTEMNLQLHHVVSDITGATGMRIIRAIIAGERDPTVLALMRDTRCHAGVDIIEKALTGYYRAEHLFGLEQALALYDEYQQKVSACDLRIEAVLMTLASLRGNRGEPLGSPRRRMPRQANGPAFDVRKALYALLGKDLTQIHGLGPYVALKLVAECGDDLSAWPSAKHFTSWLCLAPSNKISGGKVLSSRTRRSGSRVAALLRLAAVTVGRTETALGAFYRRLSARIGKAKAVTATARKIAVLFYNALRHGMNYVDPGASYYETRYRERVIGNLHRRAKAFGFILQPDTVASEVAVS

SEQ ID NO: 114314 - protein, 315 aa, unidentified
MSDVPCFIGIDVAKAQLDIALRPSGERWAVPNDTSGVAMLVERLQPLHPTLIVLEATGGLERAATSALATAGLPVVVVNPRQARDFARATGQLAKTDALDARALAHFADVIRPTPHPLPDAQTQALRALLGRRQQLIGMRTAEQNRLAGASERLTKDITAHITWLNAAIATLDDDLETLLRASPLWRENDDLLQSAKGIGPVSAHTFLLELPELGTLTRQQIAALVGVAPLNGDSGTLRGKRTLWGGRAHVRTVLYMSTLVATRFNPQIKVFYERLLAAGKVKKVALTACMHKFLTILNAMLKHRTPWQPQEVQS

SEQ ID NO: 114315 - protein, 401 aa, unidentified
MPELWAGTDAGKAEHHCVVMDADGQRKLSRRVANDETALLQLISDVLELSDGEPVTWAIDLNAGGAALMIALLTDNGQRVLYIPGRTVHHASGSYRGDGKTDAKDAFVIADQARMRRDLQQVHRGDDIAVDLRILTSRRLDLAADRTRAINRLRAQMLECFPALERAFDYKTSKASLVLLTGYQTPAALRRIGKNRLATWLKNRKVRNSQLVAATAVQAAEAQHTAVAGEKLAAAVVAKLAREVMALDEEIAETDALIEGRFRDHPHAEVILSMPGLGPVLGAEFIAHTGGDMSAFGSSDRLAGVAGLAPVPKDSGRISGNMRRPRRYCRRLLRVFYMSAMVAARCCPASKAFYDRKRAEGKGHQQAVIALARRRLNVLWALIRDHRAFEVSPPPSPVALG

SEQ ID NO: 114316 - protein, 318 aa, unidentified
MAQKTRFVGLDVAKSKVDACIRSEGLRLSAPSTPEGRAGLVAWVRANRVGRAVMEASGGYERGWAEALRAAGVEVRIVDPKRVRHFAKAAGRLAKNDPIDADTIAWFAEAFPDRQAQPHDPARDEIDRLVAARTALKDAEDRIKQQGEHRPPAVVAKALAAIAKTIRAELRKVEGAIAAKIKANPGFARRAEIIASVPGLAAQTAAGVIAWLPELGHVTNEAAAALIGAAPYDDDSGGRKGQRHIKGGRRKLRNLLYMPVMGAATRHNPMLKAHYQRLRARGKEAKVALIACMRKLIVILNTMLARDQTWNPPVRAAR

SEQ ID NO: 114317 - protein, 382 aa, unidentified
MEFYHKEHRYYCGIDLHEKTMYVCIVDQQGKIRYHKNIKTSREEFLAAVAPYREDLIVGVESTYAWYWLADLCEDEGIHFILGHALYLKAVHGGKTKNDKIDSKTLAFILRGGNFPVAYVYPRKMRATRDLLRRRMYIMRKRVAILAHTQNTNSQYNLGPFARTLKYKSNRQGTADRFTDPSVRKSVEVDLHLLDFYDEILRDLELYILKTARLDDPISLHILQTAPGIGMILSLVMMYEIEDIGRFKRVQDFLSYCRLVKCPRESGGKKYSSKNSKIGNAYLKWAFSEAAVLFLRGNEQIEKKHNRRVSKHGKAKALSILARDLGTAVYFMLRRKEPFDMNKFLGAGDASLSPNWTEEGETLNKAAKTKCIEECQPVAVGH

SEQ ID NO: 114318 - protein, 377 aa, unidentified
MKEQTFVAREFEIFGGLDVDKKSIAVTFMSHQGILQSFSMPYRAENLLSYVGKHFAGKKVAFAYEAGPTGWGLYDRLTAEEHFCVVAAPSMIPKVPGQRVKTNRLDSQKLSEHLRGGQLKSVHVPSQSYRQLRQLVQLRDTFVQDLVATKLRVKALLLLEGLEFPPAPAGSQWSLIVRGKLKKVSCSSAVRFKLDQLMESLESTEKRVVQTIKEIRRFYQQDPELCQAMRHLKSIPGIGEIVASHLLARIGDPQQIGNVRQLAGFIGLVPTERSTGDRVARGHITRSGDGRLRSKLIQAAWSAIRQDPELREFYRSVYQRHPRDRAARKAIVAVARKLTTRIYAVLKQQRPYEVRKIVHSAPLTQEETSPQGTTRRR

SEQ ID NO: 114319 - protein, 387 aa, unidentified
MPTTGAAAQDRAAIPVDRATLFVSLELSRSRWLVTSLSPGSAKLSNHTVAGGDGNALLDLLALLQSKAARRVGVPVKIVAIQEAGLDGFWIHRLLVANGIESHVVEGASIAVPRRHRRTKTDMVDGEMLVRTLAAFKRDEPRVCSMVVPPSPAEEDRRRLSRERRTLIKERVEHSNRIKGLLASQGIRGYQPLRRDCRERLAELQTGDGRPLLPRLKAEIIRELDRLELVRQQITEVEAARDALLQSQDAEGKAPAKLLLRLMSIGPEFATVLWLEGLSRSFSNRRQVAAYAGLAPSPWRSGCIDREQGISKAGNPRLRSTMIELAWLWLRHQPDSSLSRWFHARVQANRGRIRRIAIVALARKLLIALWRYVSQGEVPEGARLKTT

SEQ ID NO: 114320 - protein, 339 aa, unidentified
MKSVATIGLDIAKQVFQVHGADKAGRAVLGRKLRRNEVVRFFSELERCVIGIEASGSAHHWARVLSGLGHRVRLMAPQFVKPYVKSQKNDANDAEAICEAVTRPNMRFVPQKSVEQQDLQCLHRVRSRLVACRTQLINQIRGLLAEYGIVLPQHPGQVRSSLPTVLEDAENQLTGFGRELFRSLYEELAQLDEKIADADYRIQLAFRNSPNCRRIAAVEGVGPLIATAIVAAISNGHAFENGRQFSAWLGLVPRQNSSGGKSRLLGISKRGDPYLRTLLIHGARSVVFRARAKTDKRSLWIIDKQKRLGTTKACVAVANKNAWIIWSLIAHEQEYRRAA

SEQ ID NO: 114321 - protein, 368 aa, unidentified
MKKNTNSKQNASKGKRTEQKETFAFYIGIDLGDKNSDVCVLNSAGEVHKEFRIRMNAAAIDAYFAGIGRSRVAIEVGGQSQWVAEVIEKYGHEVHVANTRKVAYIHESDDKDDPGDAYKLAELVHFKPRLLHPVRHRSQALQADLTWIRAREAAVAGRTHLINTVRSLSKGFGERLQRCSTEAFTAKLAEQIPTAIRSAVAPLLEMIDHFNEQIRYYDQMEEHIARERYGKYTLLSQVDGVGVHTALSYMLTMGDPNRFEKSRQVGAFLGMRPRKKDSGASQPQLGITKAGDEYLRKTLVNCAHYILGPHGRDCDLRRFGQRICERGGKNAKKRAVIAVARKLSVLLHRLWVTGEVYEPLRNSHKKAA

SEQ ID NO: 114322 - protein, 375 aa, unidentified
MNNNNTLYVGLDVHKESITVAYAINSEPVELMGKIGTSPTDIQNLCKRLRSKSSQVSIVYEAGPCGYGLYRRLVKSGFDCMVCAPSLIPKKPGERVKTDRRDAIRLVRSLRAGDLSAVYVPGIEDEAFRDLARAWASARDDLRHARQRLKSFLLVHGVHYVGRADWGPAHRRWLSKYSFESPWRQLAFDEHRRTIEDRLAQCERLESALKEAVTEWRLYPVVEALQAMRGIQFITAVGLISELGDLTRFEHPRQLMSWFGITPSEYSSGGSRHQGSITKAGNSYARKLLVEAAWSYRHPARISPAIQKRQENLPRPVIDRAWDAQLRLCKRYRKLQAKGKNVNITIVAVARELAGFIWDMGRIAMSVAQQPQCHK

SEQ ID NO: 114323 - protein, 319 aa, unidentified
MEKGETYVGIDIAKAEMDMAVHGTDQQWCFSNDDAGISQAVACLKELSPALVVLEATGGIEVPLAAAVAAAVLPVVVVNPRQARDFAKATGKLAKTDALDAKVLAHFAAAVHPIPRPLPDAEAGEFRAILSRRRQLVEMITAEKNRLKTAGKGVRGRIQAHIAWLQEELGGIDKDLRQSVQTSPLWQEKDILLRSVPGVGHVLSVTLLAGLPELGSLNRREIAALVGVAPLNRDSGAMRGKRSVWGGRASVRAALYMSTLVATRHNPVIKSFYDRLCTAGKAKKVALTACMRKLLTIMNAMLKHRTPWGYAPETHRSQP

SEQ ID NO: 114324 - protein, 372 aa, unidentified
MVKKTVRNGSSFPSLFVNLDSSLGLEPACRIDKLQTDFLCYKNKFMKKITNYVGIDISKLTFDVAIKNEKGKYEHHKLSNDNKGFKDFYSLLNKKNDCCVMEASGPYYLKLATFLHKKRIVLSVVNPLVIRRFSQMRMMRAKTDKKDSRTIADYGFTETPKHWSPEKDYILELKQMQAFVDQMNKCRTNFLRQKEAFSQNPFQSTFMNKSLDDTMLVLKNKIKEIELKMQELINENHGELSSKIQSIPGIGKKASLQLIVLSAGFTKFENSKQLTSYVGLSPRIFESGTSVKGKSKICKMGMGAVRATLYLCAWSAKKCNKACRELYDRLVLNGKAKQQALIAVAHKLLKQAFAIATKNEYYAEQELINAIM

SEQ ID NO: 114325 - protein, 316 aa, unidentified
MNNKEIFVGIDVSKKQLDVAILPDAKHKVYANNEEGIGQLTIFLKSLSPTLIVLEATGGFEIPCVGVLAAEGLPVVVVNPRQIRDFAKATGKLAKTDAIDAQTIARFGEAVRPAIRELKSPEMQELAALNTRRCQIIQMITAEKNRLATATKWTREDIKENLAWLKERLNGINDELNKSIRNSPVWREKDDLLQSVPGIGPVASATLLSQLPELGTLNRRQIAALVGVAPLNRDSGIMRGKRCVWGGRAGIRTALYMATLVATRFNPVIAAFYRRLCNAGKAHKVALTACMHKLLTILNAMVKNRSHWSPVCPENS

SEQ ID NO: 114326 - protein, 454 aa, unidentified
MEKKVKPAPAAAVVHPNAAGLDIGAREIWACVPAGRDEATVKPFATFTPDLRSLADWLISCGVDTVAMESTGIYWIPIFEILEARGLNVYLVNARHIKNVPGRKSDVQDCQWIQKLHSLGLLTASFRPDGEMVALRTYLRHRAQLMQHRAPHISHMQKALQQMNLQLPHVLSDITGETGIRILRAIVAGERDPIQLAQFRDPRCQSSQETIAKALTGDWKTEHVFALTQSLELYDFYSQQIAACDTQIQQQYAVMKPRWEVVEDAAAPMVEPKRAKMPRRNEPPAETRQVLLHLTGIDLAAVEGIGPSLAQTILSEIGTDMTKWPTVKHFASWLGLAPHNDISGGRVLRSRTLSTNNRAGQAFRQAATSLARSASTLGAYYRRKRAQGGPQFAQVATAHKLARIVYHLLRYRVSYVEMSATVFDQKQRERDIANLRKRAEHLGFTLALPQTSDP

SEQ ID NO: 114327 - protein, 476 aa, unidentified
MAVPNEDSKKPAKSKKPTNPNRARERSLAVPVPASAAPLTVVNPDAAGIDVHSDMHMVCVPADRDANPVRQFGAYTADLHEIVTWLHKCGVKTVALESTGVYWIPLFELLESEGFEVNLAEPGQLSRCGARPKTDVLDAQWIQRLHSYGLLRGSFRPPESVLALRAYFRQRQMLVRYAASHVQHMQKALEQMNVKLPEVVTDITGLTGMGIIRAILDGERDPVKLAKLRDARCHHSEEQIALALQGTWRPEHLFELRQAYELYQFHHRQISQCDQQLETELGRFPNRAGEKTRTVKPRGRGRKSNDVRFEAKGPLFQALGVDLTMIEGIDVGTVLAIAAEIGPDVSRFPSEKHFASWLRLSPPQNQSNKTNKRRGHRKSTSRVTIALRLAARSVGKTKTPLGMFYRRIRSRIGGLGAVKATAHKLACLVYRMLKYGQEYVTQSMEEYKAKMETSVLNALKRKAAAMGYQLNPLPAK

SEQ ID NO: 114328 - protein, 319 aa, unidentified
MPTQNAVMYAGVDVAKASLQVHLQGRQSEFKNTPSGLRQLCLELRKTSGVHVVCEATGGYEHALVKALHKEQIPVSVTNPAQVRAACQARGQRSKTDRIDAQMLTDFGQRYQPQPTAPTTPSQDQLVALTQWLQQLIHGLALAKTQAEHHQDPFVGRQHSKLMTHLESQIEAVEKQIKALLEKDPVLQQRVDCLDEIKGVGARTAWMVLAHMPELGRLNRQEAAALAGLAPWTRESGTMKGMRCIGGGRPEVRVALYMACLSAVRSNPVLRPLYQRLRAKGKLPKVALTAAMRRLLIYMNHQLKHLASDVPASGGDKTK

SEQ ID NO: 114329 - protein, 332 aa, unidentified
MGVDISKEKVDIAIIDSNYDVIHEKTVKNNPETLLSFMKSVLRKLKIEKQEILVCCEETGIYKRPLQQVCSKWGLALWVEIALKIKRASTSLRGKSDKQDAVRIAEYALRYLDRMNLYIEPSQAQNRLQSLLNVRESLLNEATRMNQRMKESKRFDKDVFNIQNAYCKEVLEILKNQITKIERDIDVLLSQQPAMKQTVELLSTIPGVGRQTALQFIVYTRNFSLFQTAKQLACYAGIAPFLNESGGQIKKARVSQFANKKLKKLLHLAAMASIRVESDLKSYFIRKVQEGKNKLLVLNNIRNKLVKRMFAVIKRQSEYISNNFETNICTLT

SEQ ID NO: 114330 - protein, 433 aa, unidentified
MSNFFYSPVIGIDVSADFSYTAILAPNGDIYKKSFKIKHDLNGFNHLVNEIKKVEEEFNMKTAIFMESTGVYHLSLFHYLNKYFDNTFVINPLVTKSNKNGDIRKVKNDKKDALSIATIGKFQNIKLSQQLSLDIFLLKNLVREYYKLTDTSSTFKKKLSADLRVIFPGYNTIFSDSTSKSSIELLSQYPTPQSILEAPKENIIKIFLDSSKNGIIWSENTYSKLFKVANEAKIIGLPLDGLAVKIASSITLIKTIQSEIDTLLQKINNFIQSETFPESIRANIELIDSIPGIGQLTAITIIAEIGDIDGFLKPKHLVAFFGIDSSVNQSGNFKGDDNKISKRGTRIGRRALYSVALASIRNNRNGVPINKVLLDYYQINLKGKKPKIALVAIMHKIINYIFAVLRNQTPFEQRDPKIHKQMFLENNSLNKVA

SEQ ID NO: 114331 - protein, 387 aa, unidentified
MTVPGQVFKIIPRHYDIFGGLDVAKKNMAVTFTDHEALMRSLRLPYSSAHLLHYVRKHFPDQRVAFVYEAGPTGFGLHDELVSAGYRCLVVAPSMVPTAPGDKVKTNRLDSRKLSVQLRGGELRSIHVPAPRYRELRHLVQLRDTQVGQLKATKCRIKSLLLCEGLAFPPAPESSQWSARVLSELLELPCSEAVRFELDQLIGTLHFHFNSAAAAQKQIRYFCQNDPELRQSIRLLASLPGIGVIVATHLVARLGDWREISNVRQIAAFLGIVSSEHSTGEKANRGRITRTGDSRLRNKLIQSAWTAIRKDAELRAFYLRIYHRHPKKIAARKAIVAVARKLTTRIYAVLKEQRPYVLRPENFAAPLTAEETVGPRGRLDNPQNEQP

SEQ ID NO: 114332 - protein, 386 aa, unidentified
MQKLNDFSRSLIALEPDGTLIAVIEMSLSSWLVAGIVPGVERQPLKKLAVDESALLKLLHRWREEAEKAGHRIERIAVAFEAGRDGFWLARWLKVRSIEAHVIHAASVAVSREHRRAKTDRLDTELLKRAFLGWLRGERDHCKMVAIPSIKNEDAKRPNRERENLVSEQTRIINRMKAALIRLGIRGFNPKLKRAAGRLEDLRTPEDEPIPPNTLAELRRDMERRRLVRDQIRQIEEARLERLDHAPDDGPHAMVRLLARVIGVGIETADMLVHEVLSRNMRDRRAVARYAGLTGSPDESGRKRREKGLARSGNGRVRRGMIQLAWRFLMHQKNSALAQWFRARTENARGTRKPMIVALARKLLIALWRLVREGVVPDGVVLRPVQ

SEQ ID NO: 114333 - protein, 323 aa, unidentified
MSIVGAFDVHRRQLTFEYLDTSSGELKRGRVVPADRQHLRQWLARFAGQDDVHFALEGCTGWRYVAEELAAAGITPHLAEPADTAALRGKKRHAKTDKTDTRHLRVHLMAGDLPECWIPPGHVLEARAVVRLYKDLLDERGAWHQRIAATLFHQGVPVIGSMATAEGRAAVEQVDLSPAVDVLRRQLGMLSRRQPGCAALRATWFGIGPVTAVAIWAELGDVRRFGNSDDVVRHTGLDITVWSSDDKGPPGRLSRQGPPLLRWALYESAKCAARAAAPDHGYYAAVRDKRTAGLATLSVARKLARRCYHTLRELGEEALAPAA

SEQ ID NO: 114334 - protein, 334 aa, unidentified
MWHVGIDLHRLSVVIAAVDDEGNSFGTRRIDCQNRQAILATMRSLQPFRAVIEATGTYRWLYNLLRPLGTVLLAHPLRLRAMVQRRSKTDKLDSQLLANLLRINQIPLAYIPPENYQQLRDVTRHRARLSRQAAAAKTQLRSLLARHNLVAPYKCVCGVRGCRWLATQDFGGIDNLVRDELLLRLEHYRRQLAVIDAHLKELRAHVPQVEALLGIHGIGLYTALLVIGELGEVERFRTARQVGSYAGLTARVRQSGDHCYRGAITHEGSPWLRWILVEAALQVIREDSVLKNFYQRIRKRSGAKKARVAVARKLAEICWKRLIGWSGRPAMCIA

SEQ ID NO: 114335 - protein, 353 aa, unidentified
MRIIGCDLHARQQSLAMLHVETGEIEERTLEHEGEAVREFYAGLPGPVRVGIEATGSMQWFLELMDELGVECVVGHPAKIRACEPRKQKHDRRDALLLMKLLAEDRFPAIWMPSVEQRDVRALLLHRHQWVRIRVRLQNALQSIALSHAIRRGAGLWSHGGQQTLAELVLPPHAGARRSELLRLYQQLQREIEMLDKEVARTAEERPQARLLMTHPGVGPITGLATEVFLGDPARFTDGKAVASYVGMIPSEFSSGGKQRCGGLTKQGNPLLRMLWCEAVGHAVRKDAELNRFYRRKLAQKGLGKAKVAAARKLGIRLWIMLREQIDYEEFCRRGRQRGEAHAEMPGREHGPA

SEQ ID NO: 114336 - protein, 348 aa, unidentified
MRFYTKNHRHYCGIDLHARTMFICILSHDGEILVEKNIHTSPEAFLELIAPFREDLVVAVECMFTWYWLADLCANEDIPFVLGHALYMKAIHGGKAKNDRIDATKIAALLRGGMIPKAYVYPHRMRSTRDLLRRRLHLVRHRGQLLAHIQNTNYQNNLPDFQAKIIYKANRKGVPERFKDPSVRKSVEVDLDLIAQYDQIIRELELFIVRKAKQHDPDMFHRLRSIQGVGKILALTLLYEIHDIERFKTVQRFASYARLIKCARESGGKRMGTGGAKIGNVHLKWAFSEAAVLFLRNNPAGRKHLARLTNKHGKGKALSILAHKLGRATYYVMMRRRNFDMSKFMKTA

SEQ ID NO: 114337 - protein, 420 aa, unidentified
MGMLNEVGETMHHKEKFIYVGVDLHKDTHTAVIINGWYEKLGEIQFANKPAAFPELIKTVKKHSKRLTPVYGLEDVGGHGRSLAVYLTEQQQKVKEVNATLANSLRKSRPIVHKSDSWDAECIARTLLDNLPALPDANPQDLYWTISQLVLRRRALVKAMSALTNQLHEQLSYAYPSYKKFFSEVDGKTALLFWERYPSPHHLDEISQEELTAFLRECSNNACSTKKAREILELIEKDGGTKRGYQERRDFLVQSMVRDIQFKKREIALVEAELKPVMAELDYKLESMPGISTVTAAELVTEIGDIRRFSNANKLARHAGIAPVLHSSGGKSKNRKNKKGNRELHSIIYFLAVRQIGVDRTTKKPRNELFYSYYTRKVAEGKTKGQALICVMRRLVNIIYSMMKNKTEYMQPAIPEKEAV

SEQ ID NO: 114338 - protein, 342 aa, unidentified
MRIIGCDLHAAQQTIAMLDCESGEIVERTLAHDGTVVRDFYAGLPPPIVVGIEATGSMGWFLRLMEDLGIACQVGDPAKVRRTETRRQKHDRRDAILLLTLLCEERFPTIWMPSSELRDLRALVRHRDQWVRIRTRVKNALQGLALAHGLRRGAGLWSHGGQAMLASLPLPPHAGHRRSELQALHDHLTTHIDELDQEVSAHARERPQARRLMTHPGVGPVTALATEVFLGDPSRFVDAKALASYVGLIPSEYSSGGRQRLGRLTKQGNPMLRFLWCEAAIHAARRDPTLRRFYRRKLQQKGLGKARVAVARKLGIRLWILLRDQIDYAEFCRRTPARAVAR

SEQ ID NO: 114339 - protein, 405 aa, unidentified
MNPLYVGIDVSSKTNVTYLMRPDGSKYSSFSVQNNVGGAKILSEKIVSAMNSMSLKDVVIGMEATSIYGDHLVHELREDGNLGCFHRKIHVLNPKQVRKFKEAYPDLPKNDFVDAYIIADHLRFGRIASEVYMDDYRYEALKTLTRARFYAVQNLAREKQRFANYLFQKYSELAQNPDFKNTSATMLNLVSDFESVDDLANVPLEELSAYIEKSGHGRFSDPAAVAKQIHAAAKSSYRLPKTINDSVNQAMSASIATMRAMQAQIKALEKAIEQQFEIIPNTLTSIPGIGPVYSAGIIAEIGDIHRFESQASIAKYAGLVWTQHQSGDYEAERTRMIKSGNRFLRYYLLEATNSVRRCDSEFKRYYDLKYKEVNVGQHKRALALTARKLVRLVFRLLKDNRLYIP

SEQ ID NO: 114340 - protein, 376 aa, unidentified
MSNVRFLGLDVHAETIAVAVAEPRGEVRSLGTMPNRPESLRKLVKKLGPAEDLRVCYEAGPTGYVIYWQLTALGVRCEVVAPTLVPTKAGDRVKTDRRDAEKLARSYRAGDLTAVWVPDAAHEALRDVVRAREAAKKDQLRARHRLGKFLLRHGRRPPTPMAPWTLRHLTWVRQVQFEHLAQEATVLDYLHEVEHVAARLERLERAIDAAVQAAPAPMRAVIAGLQALRGIAQISAATIVAEVGVLSRFARAPQLMGYSGLGPCEDSSGTRTRRGGITKTGNAHLRRIVVEAAWAYRHRPAVGAALKKRQAPLSEAVKTIAWKAQHRLHSRYQQLRGRGKNPQQVVTALGRELLGFVWAIGVTVETEQKTPRPVAA

SEQ ID NO: 114341 - protein, 336 aa, unidentified
MIAVGVDTHKHEHLARAVDGLGQILGGLTIRADLSGYIELTQWLQTLGEDIVVGIEGAGSYGAGLCEFLLAEGIAVVEVERPRRQDRRRGKSDEIDALMAAKKVLAKDGLSTPRAGGTRQALAALLIAQRSCVSERTRLLNQLQALHTTAPVALRERVGPGNGRKLAARLVKMRGRSEAPGSEQLIFTVLRDLARRAQELAAQADAYKHELTELISSLDPTLLDEYGVGPISAAKLLVCDPRRLKGEAAFARCNGTAPKPASSGQTIRYRLSRGGDRQANNALHTIARIRARHDESTRAYLERRQSEGKTPREAMRALKRHLSRSLYKRLITIPLT

SEQ ID NO: 114342 - protein, 353 aa, unidentified
MKDLTTIGIDIAKNYIQLHGKDSKGKTVLKKRLTRNKFLTFMANIPKCLVGMEACAGANFWAHELIKLGFEPKLISPRRVKMFVICQKNDDKDAEAVCIAVSRADMRFVPLRTKDQMDIQAIHRIRSFFIKQKTALMNMIRGLLLENGIAIPKGKAALVDRIESLLCSDDDRVSEAMKDMLRGVYKSLEETEIYINQHKDKLEQLADEDELCQRIMTLPGVGPITASAMMSKIGNGSEFKNGRELSAYLGLVPKQHSSGEKEILGRITKHGDRYIRQLLVHGGRSAVKSAMKKNKKTDLFEKIDEHSQWIRKLCNRVGKNKTSVAVANKNARMIVALLKNQTQFVPTLAHGNF

SEQ ID NO: 114343 - protein, 405 aa, unidentified
MIEPIVKRIAGLDVHKMVVVGTVLIEEEEGSIKQETREFGTFKRDRRQMCQWLKDHDVELVAMESTGIYWKSIYATLEKAQILAYVVNARHVKNVPGRKTDVSDSQWLAALARVGLLRPSFIPTKDLRELRIISRQRTKINVTLSAEKNRLNKVLDDAGIRLGGVASDIDGVSAQKIIEGIIDGKPIEELIACARGRLKAKTDDLRACLDEELSERHIFLLKALQKHIQFLKSELEDIDAYLFAAMSPYQKQWEILQTLPGVDKVAAMVLIIEIGIEMERFGSADQLSSWAGMCPGNNESAGKRKSGKTRKGNQAIRSILCEIANAARRTKSQFKGKYESLVIRRGHKRTIIALGHKILRVIFVMLNNVRPYFDPGIDYEELMVDRNAPRWLQALKKFGYLPQTV

SEQ ID NO: 114344 - protein, 343 aa, unidentified
MEHFAGLDVSVKETSVCVVDDTGKIIREVKVASEPGTLLAVLKNPAYHLKRIGLEAGPLSQWLFSALAEAGLPAICVETRHMRAALKAQINKTDRNDARGIAQMMRAGLYRPVHVKTVRSQKLRMLLTHRKLLQSKAIAIENDLRGTLRNFGLKVGMVGTVKFEARIKELVENLPDLTVLVEPLLIVRRVLREQIGILHRRLMAIVRDDDVCRRLMTVPGVGPVVALTYRATVDVPARFRNSKAVGAVFGLTPSRYQSGEINLTGAISRCGDEMMRAVLYEAAQVMLTRTIKWSWLKAWAMQIARRRGMKKAIVALARRLAVIMHRIWVDGSEFRWTREAAAA

SEQ ID NO: 114345 - protein, 459 aa, unidentified
MKRKGKRTKGIEQAHPFDGMSRVNPQAAGVDIGAEEIVACVASNETTQLVRGFGNYTVDLHAIANWLAEHKIRTVAMESTGVYWIPLFEVLEKYGFECLLISSRSLRRVAGRKSDIEDAQWIQTLHNYGLLESSFRPQADLVALRSLLRHRRSLVDHRSPHVLHMQKALLQMNIQLSQAVSDVTGVTGQAIIRAILSGVRDPQMLTSLREPGCKKSEEEIGRALTGTWREEHLFVLKQAVALYDFYTQQIQECDEEIERQYSETRPDWDGGELPPLPARKRNSHSKNKFRETEKIRAHLKRISGVDLSLVDGMGVSLAQTVILECGTDMSKFPTEKHFCSWLGVAPKHDISGNKVLKNSTLKTKNLAGQAFRMAAQSVKQAECAFGVMYRRLRARLGPAQATVATAHAIARMVYRMLKYQVEYDPLSVNEYQKQYEEQQIKYMKKRAAKLGYQLVPALA

SEQ ID NO: 114346 - protein, 358 aa, unidentified
MQHQVKELNFGGQNIYVGLDTHKNQTTVTVLGENLHHKTFSQPTAADILARYLKKNFSGANYYAAYEAGFSGFWLQETLQSQGINCIVVNAADVPTKGKERNQKNDNVDSRKIAYALRKGDLDAIYVPSKECQRDRGLLRARQKIVSNQTRCRNRIKGLLNFFGIVYPEKFSKSGTHWSRKFMDWLKSVNLGGSGNDTLAIYLEEAEFLRALLAKTMKKINHLSNQERYAKNVKLLISVPGVGRLIAMILLTELERIDRFKTRDSLCNYVGLIPDVYSSDQTVHVGDITQRGNKSLKKFLIESSWVAARTDPALVMKYNQLCSRMNGNKAIIRIARMLLSRIRYILMHEQEYQMAVVA

SEQ ID NO: 114347 - protein, 393 aa, unidentified
MICVGIDVAKDKHDCFILSSEGEVLADVFTIQNNAEGFDMLLQTIRRCARPEDKIKVGLEATGHYSYNILGFLLDKGLDTYVINPLHTNLYRKSLSLRKTKTDRVDARTIAAMLMSDVDLKPYTDTAYHNEELKSLTRYRFDKVRERAKLKQSVSRLVTILFPELEKLVPSLHLASVYALLIEFPGAKQVAGAHLTHLKATLSDASKGRYGRDMAVTLRDAARCSVGSVMPAKSLELQHTIRLIRELDAEIEDIETAIQSMMDEMQSPITTIPGIGVRMGAMILAEIGDFSRFNSPDKILAYAGMSPSTYQSGQLSLSGTYSHMEKRGSRYLRYALYNATKYVCLWDPAFAAYLAKKRGEGKHYNVALSHAAKKLVRLICALEKSQQSYRNAA

SEQ ID NO: 114348 - protein, 412 aa, unidentified
MEVLYTRCCGLDVHKKTVVACVLCTQEDGTVERHVRTFGTMTADLCALSDWLTAYAVTHVAMESTGVYWQPVFNILEEEDRTILLVNAQHIKQVPGHKTDVRDSEWLADLLRHGLLRASFIPPAPIRELRELTRYRKTLVQERSAEINRVQKVLESANLKVAAVASDVLGASGRDMLAALLAGERDPEMLANLARGKLRAKLPALRRALVGRVKPHHLVLLDCLLTHIESLEQLIAKVQEEIAHALAPFAEALTLLDGIPGVGPTAAAAMVAEIGVEASRFPSHKHLTSWAGVCPGNKQSGGKRLDGKTTKGSPWLRAVLGEVAQAIARSPGTYLHAQYHRIARRRGKHKALTAVAHSVLVIAYHILKDKRPYSELGADYFDKLDTTRIERHHVHRLEQLGYTVTLTPKEAA

SEQ ID NO: 114349 - protein, 324 aa, unidentified
MLATLGIDISKADFHVELSVNEKLRHRRFVNGKEGFRELCVWLARHKAEPVHACLEATGRYGDELALHLYEAGHVVSVINPAQIKAFGQSELLRNKDDRPDAGLIRRFCEKQQPAAWQPPSTQLRELQALTRHLENLHDTRQQQVNRLEGVNNKAVLKSLRKLVTHLDSEIQRTEKQIQDHIDNDPDLQRQQQLLSSIKGIGKLTAAKLLAEIGDISSYKSARQVAAYAGLTPRNNRSGTLRGKTRLSKTGNARVRKALFFPALVAKRYNPIVRAFCQRLTHSGKNKMEVIGAAMRKLIHIAFGVLKSGKHFDPDYELLLNSNG

SEQ ID NO: 114350 - protein, 348 aa, unidentified
MNYVGIDLHRDFFVAGAQNEKGIELFKKRYENSVASVHDLVTHCEVKPRIVVEATRNWMWFIHALQAKGCSVHLAHPFRTKAIASALIKTDSIDAKTLCDLLRADLIPQAYIAPIETLDNREIGRARIALIHDQTMVKNRIHAIIIKENRRFLGSDMFGVKGREWLTLQKITCGAREAIDVYLGELKAIQHAITTIDKGITQKCSSIPEVKLLQTIPGFGTTTAFLLASEIGNVTRFPNSKKFTSYFGVVPRLSQSGDHAYYGRITKLGNPYVRWLLVQAAHRYTRVDREARRFVTRLSFRSGKKKAIVALARKLGVITYTILKENRIYEKRIKERAVKVCPAIIPER

SEQ ID NO: 114351 - protein, 423 aa, unidentified
MQKIAQFHQSDKPSPTHLLLAVDVSSRTLDIYSRYHQAGTEFELCESVHNDLSTIHQTLESYQKQACRLGYRGLSMVVEPSGAYEKKLTHAALQKGVDVWMVNPERMYKAGVIHHGDDGKSDPLDGKVLFMMARMGKVSRLVPLPGPWGALRRLGQWMEDATLAAADARIHIGVIRRGLFADWRQSGDLTWGPTGRAIQTLYGFDPWKVTADSFETYITRMQAHHKGLPRRCLAGIWQQAQSSCQAPLPPRQRQALQGQLDHLWNAWSLHQDRKTHLGQQMVDLVDGLDPSDHWIPPLMSGFTKVARAKILAETGPLERFPHWRALLAYAGLKVRMRASGKYRGQDKITKKGRILLRKHLGQLAWVLSRKDRVLGPYYHRKLAEGMPARKAKVACMRKLVKLLYGAAKSNQQFNPERVYRSAG

SEQ ID NO: 114352 - protein, 411 aa, unidentified
MEQIHDRVAGLDVHRDEVAVCVRRPGPRGGVQTGKARFSTTSGGLAAMASWLAECGVTLAAMEATGVYWKPVYYALEGRFELWLCNAHHVKNVPGRKTDMSDAEWLADVAAHGMVRPSFVPPPAIRELRELTRYRKTQIDVRAAEIARLEKVLQDAGIKLTSVASKVLTQSGRAIIEALIAGQRDPRALAGLAKGKLRPKIPQLTAALQGHFGAHHAAVAACILGHLDFLDAAIAGLDEQVAIRIANGYQPAARLLRDVPGLDRRSIEVIIAETGADMSRFPNPGHLASWAGVCPGNHESAGKRRRVATTPGNQWLRRALIESARAAARTKGSYFGAQYRQIARRRGPNKAAVAVAHSLLDVIWHMLTTGEAFTDLGEDYFTSRQDKEHQARRLIGQLEKLGFTVQLTPAG

SEQ ID NO: 114353 - protein, 351 aa, unidentified
MVVVGADVHKHSHTFVAVDQVGKRLGQLTVEATSKGHAKALRWARAQFGDELVWAVEDCRHLSARLERDLLSAGQQVVRVPPKMMAEQRRVARTRGKSDPIDALAVARSYLREPGLPVASHDEVSREAKLLVDRRESLVNTRTRTINSLLWRVHELDPGHAPKARSLDLAKHQHLLRAWLVTLTGVVAEMAVDELDDVIALTARIKEFDKRLRVLVRREVPTLLELPGCGELSAAKLLGESAGITRFGSEAQFARHGGIAPIPVWSGNTAGRVRMTRSGNRQINCAVHRIAITQSRMPDTLGKAYYEKKLAEGKSKTEALRCLKRRLARVVFNLLTTDHNNRQTTAQPAAA

SEQ ID NO: 114354 - protein, 343 aa, unidentified
MKLTRVGVDLAKQVFQVHGVDRAERPVWCQRLKRGRWIVELERTVEPGCEIGMEACGGAHHWARLLQSKGYVVKLIAPQFVKPYVRSNKNDATDAQAICEAMSRPSMRYVAVKTVEQQDIQAVHRVRASLISERAAKANQLRGLVYEYGLVTPREIASLRRAVPVWLEDATNGLSARFRALLAALYRDLRWLDERVHELDREIAAIVRENEAVQRIEQLRGIGPLTASALVAMVGDGRQFKNGRHLAVALGLTPRQHSSGGEEKQLGISKRGDTYIRTLLIHGARSALRTAPGKTGRLSRWALALAERAHPNVAVTALANKMARVAWAMLRHGTNYEPEHMAV

SEQ ID NO: 114355 - protein, 379 aa, unidentified
MIENITHVALDDHKKRHQVAVLLPGMDREESVTWRIENTRAGIRKMVRKVLKMAPGDVRFCYEAGPNGYVLLRQISEFDRVSCVVVAPSKTPRRSGDRVKTDRRDAKKLVSLFRAGELKSIVPPLEEEEAVRDLCRCRKAAQKRVTASRHQVDKFLMRNGYVYRDGKNWTRRYREWLRSLKFDDWRRERTFQAYLFGIEQDEDRVKRLDLEILRAAEEEPYRTLVGFVRCFRGLDTLSAMILTSELYAIGRFTTAPSLMGFVGMVPSEDTTSWDPHRGPITKAGNEHVRRILVEAAKHYRHPARVSKALTQRRKGQPDWVIAIADKAQTRLHQKYWRLVMGKGKHPNVAAIAVARELVGFIWAVLIQAATTANIEELVA

SEQ ID NO: 114356 - protein, 376 aa, unidentified
MQDSTFIGLDVHKATISVAVAEGVRGGEVRHLGTIPHRADHIRKLVEKLGAGGHKLHFCYEAGPCGYGLHRQLVELGHDCIVVAPSLIPVKTGDRVKTDRRDAVMLAKLHRAGELTAVWVPDAAHEAMRDLVRARATAIRVTGKARQHLQGFLLRHGRIYPGKKGWTVAYRRWLTTVRFEHRAQQIVFQDYVDAVADAEARVARLTGQITELLLDWDLAPVVEAIQAMRGVAFVVAVTVVAEVGDFHRFDNPRQLMAYLGLTPSEHSSGATVRRGGITKAGSGLARRALIEGAWSYRMQPRVSRKLHDRLEAVPSCVRDIAWKGQLRMCQRYRRLVMAGKPKVVVTTAIAREMVGFVWAIARAVSPVPDPAVSQSA

SEQ ID NO: 114357 - protein, 374 aa, unidentified
MMSEMVKGKFSVGVDLHKSQFTVCVLDGSGEHQLEEIYYVNASGYEKFKLDMHTFEQEFGCEIILAVETTGNVRYFKNQMEAEGFEVLVVNTNKFKVISQSTKKNDKNDASTLAYYLYKEMLPESHIADQSSQELRRMIKSRSLLVSTNVKLKNQIHGMMLGYGINTKGGQLQSIKKRQALLWDLEDHGFSGAAASLKVILQSIETIEAQIKEIEKRLSEMTKEDEDVELLMGIPGVGLITATTIAAYTKDIEKRFEGDFKRFASYIGIVPSVHNSNEVVRMGRITKRGPQELRTAIVQATMGLLRLSKRTGSWKLITDYKTMKISKGSGVSIIATTRKLARIIFAMLNNREPFNVELMVKNKCLFTVNEVIGA

SEQ ID NO: 114358 - protein, 356 aa, unidentified
MSEKLNSKIAVIGIDIGKNSFHIVGQDRRGALVLRQKWSRGQVEARLANLPPCLIGMEACTGAHHLSRKLQALGHDARLMPAKYVRPYCKGDKNDYRDAEAIAEAVQRPTMKFVATKTADQLDLQALHRVRERLVSQRTGIINQIRAFLLERGIAVRQGLRLLRAELPDILAKRTDVLSPRILRIIEDLSGDWRRLDERIEGLSSEIEALARQDQGCARLMSVPGIGPIISSAMVAAIGTGDPFSKGRDFGAWLGLVPKQMSTGDRTILGNISRRGNRYLRTLFVQAAWVVLVKVGPKQWERYGLKSWIEAAKKRLHHNVLAIALANKLARIAWAVLHNGRTFEHVKTNATASRSA

SEQ ID NO: 114359 - protein, 438 aa, unidentified
MRGPARESLLAMEARALAGTPAGTRLEVVLEPTGAAWFPVARFLSARGHAVYRVSSAKAADLRKFYRRHAKSNGIDAETLARLPLAAPDGLTELELAAGDEAVLDRRVRACDRLTQQAARHKTRIKDLVRQLMPMTPLTGDVGKADLQVLERYADPRALLAAGPAQLAALIRSASRGHQGQARAAQWAAAAQAAIELYGPDDPAVPFADLAAEVATEIRLLQAIEAELQAHAAAREAAYRTVDPGQIARTLPGLAEVGGPAMTAIMGKPGRFPGGHHFKSFLGLAPRASETGETDRKGEPMTKAGPSLARATMIRAADTARKLDPQLARIYYTQMTERGANHLKACCVVAGHLSLRLHAAMLRGAPYQLRDTDGTPVTPEQARQIIAANWTVPEDVRKRRRSRKTTGRTPQQAKKPVQRGDPPRPGSRPGNTPVNPAP

SEQ ID NO: 114360 - protein, 423 aa, unidentified
MKNSAARKLKQVPEDYLVIGVDPHKKRHAAVAITQDFTTEAKFKFDNTREGLETMLARARVEMVKSDCRGVIFAIETGGHYWRNVAYFLDEQDIPYHFINQFTLKRRREGKDLNRRKNDYRDSEVAAQLLCTGEFTESKIPQGVYADLRAAHNAYRRLVKERTRITNLVKGLLDALFPEFTYVFKDPCGLTALSVLSTCPIPSVIAGMTEDEFVATIAAQHEGRLMRRKLRALHCSARTSIGIKAGAQSVSSELSFLVEKLELIRRHICLIEKTLIRLVDETEEGKYLLSIRGLNYIAVAGLLAELGCFKSYQSAKQMIKMAGSNPTESESAGKKGTHTPMSKQGRPVLRYCAWTSVIPMLRFNPDFRAWAKQRRERPVHANPLGGREVVGAALNRLLRLAFALVKNQTYYQDVKPALIPVTV

SEQ ID NO: 114361 - protein, 316 aa, unidentified
MAKPVTKITLGIDVAKDQLVICQWGCEQLLTLVNQPAEIQAWLETLCGPVRLAIEPTSHYHLAVVEAALACGHQVYLVNPRQLVHYRYAVDVRNKTDAVDAWLLARYLEHEAAQLRPFRPQDRRAQRLWALLTRRATVVQSRQQLQQSFAEVRLSIQALLSQFQQLLQRLDQQIQHLLRELGWWPDYLRCQSIPGIGPANAAALVAAYHRGAFAGSDAFIAYLGLDIRLRESGRFKGKRKLTKRGEPELRRLLYCGSNAACNHPRFAAYRQRQLDKGLSKIAARVALARKLARIAFTLMNQQETFATEQKTHCMAP

SEQ ID NO: 114362 - protein, 355 aa, unidentified
MLFVGDDWAEDHHDVELVDDQGRLLARRRLPEGITGLSTLHALIAEHLPEEWAELEDAEAQARVKVGIETDRGPWVAALVSAGYEVFAINPMSVARYRERHSTSGAKSDTADAHLLAEIVRLDRAHHRAVAGDSQEAEAIKLVARTHQSLIWDRTRQVLRLRSALREFFPAALQAFPDLDAPDALELLAKAPDPERAARLTRAQITGALRRANRRYIDTKTAQLQGILRADQLTRSPVVQSAYAAIVTGQVALLQTLNTQIDQLGAVVADHFGRHPDAEIYASQPGLGVVLGARVLGEFGDDPHRYADAKARKNYAGTSPITRASGTKKLVLARYARNRRLGDVLRLTWCQRTAC

SEQ ID NO: 114363 - protein, 386 aa, unidentified
MRGKTFIPQDYDVFAGLDVDKRSISVTFTNHQGFIRSLRLPYSVEQLLSHVRKHFGDQKVAFAYEAGPTGYGLYDGLVAHAYPCVIAAPSMIPRAPGQRVKTNRLDSVGLAENLRGGQLRSIHVPSPVYRELRHLTQLRDTFVRELVGMKLRIKSLLLLEGIRFPPAPPGSQWSSRVQAELRTLPCAGTVRFKLDQLLDSVAFGEQQVRKTTREIRRFCQNDAELSQCLKYMMTVPGIGWIVASQLLARIGDWRELQHGRQLAGFLGVVPSERSTGETIARGSITHTGDGRLRSKLVQSAWSAIRQDGELRDFYRAVYRSHPRDRAARVAIVAVARKLSVRVAVVLRQQRPYVVRATVQSAPLTQAETVPQGTPRRQAEPGAATAS

SEQ ID NO: 114364 - protein, 362 aa, unidentified
MAHGIRWVGLDVHAHESTIAIFDQDTGELTTRRVVGRPHELLPWLRGVARPARAVYEAGPTGYGLVRRARAEGIEVEVCAPTRTDRGPSDRVKTDKRDAIRLARRLAAGELTLVTVPSVEHEQLRDVVRCREDIRVDLMRARHRLSKFLLRHEIYYEGSGRAWSRQHRGWLASLRFANRASQLTIGDYLHAHDVLIARRDGIESELEQLAGSSPWAAAIARLRCLRGIDTLSALGLCAEIGQFDRFEHPDQLACYLGIVPSENTSGERRRQGSITKAGSTHARRLLIEAAYHYQRHPGIGIALERRQRDQDAAVIDIAWRAQRRLNARWRQLRHTRHKPNGVVAVAIARELAGFCWEIALAA

SEQ ID NO: 114365 - protein, 389 aa, unidentified
MKIFVGIDIAKLNHFAAAISSDGEILIEPFKFTNDADGFQLLVSKLESFDKNSIIIGLESTAHYGDNLVRYLVAEFYQVCVLNPIKTCQMRKNNVRKTKTDKVDTFVIAKTLMMQDDLRFITFFDLDMMDLKALGRFRQKTIKQRTRLKIQLTTYVDQVFPEIQYFFKSGLHQNAVYALLKEAPSPKEIASMHMTHLANLLKVNSHGHFTKELAKELRVLAQKSVGANDSAISIQITQTIQQIELLDSQLQKIEAEITDIMEFNDSVIMTIPGIGYINGGMILGEIGDIHRFSNPNKLLAFAGLDPSVYQSGNFQAKTTRMSKRGSRVLRYALVNAAWNVVRNNATFKAYYDAKRAEGRSHYNALGHCAGKLVRVIWKMLTDEVEFNLE

SEQ ID NO: 114366 - protein, 322 aa, unidentified
MQNVIGIDVSKKKLDICVLFDGKIRKKIVENSVSGFKSLRIWISKNNIDDPHICLESTGCYSEGVAEFFHEFGFKVSVVNPLQIKAFRGSKLIRQKTDSVDAQIIAEFCLQNAPAPWNPRSPEQKDLHNINIRISALKSELHRSSNALENRNLSKVILKSIRDEIKFLKKQIALLENEAQKIINSNKNLKEQFDRITEIKGVGEKLALAIIADMPDVSNFQKAGQFSAFAGVSPSHFQSGSSVHGKSHISRLGSKSIRKVLYMSALVVKNYNPHFRKFVQKLQKKGKAPKVIIVAIMRKLMCILFGMLKNSSDFDPKLAFSD

SEQ ID NO: 114367 - protein, 319 aa, unidentified
MSTPTIGIGIDVAQTTLVVARHGGDPPWPVANTADGWATLVAQLRPLAPTRIVLEGTGGLERPVAVALAEAGLPVAVVNPRQVRDFAKALGRRVKTDAVDARVLAQFAATVDVPARALPSAATRALQALVTRRRQVTALLVAERNRRHRADPIVQPSLERVIARLVAERAALDAELRQRIAADPTWRAQAAVLRRVPGIGPVAVATLLAHLPELGKLERHALAALVGVAPFNRDSGQHQGARSIGGGRASVRTPLYPAAVTAARCNPVIRPFYQRLLARGKPKKVALIACLRKLLTILNALLRDGATWDPAPQLHPATP

SEQ ID NO: 114368 - protein, 343 aa, unidentified
MPHYVGLDVSQKTTAICVVDEQGRRLWRGVCATDPEPISARISKYAGVDAKVGVETGSMTPWLVHGLRGAGLNVQCLDARRVKAALQMQLNKTDENDAEGLAQIMRTGWYRAVHVKSLDAHRARALLGARAQLVGMTTRLSNMIRGVLKTFGLLPGAGRGLRFDRKVEALLEGAPEIALVVRPLLATWRQLREQIAVFDKAVLQQVRADPICRLLMTVPGIGALSSLMYVSTVENPSRFSRSRAVGAHLGLTPRRYQSGETDRSGHISRCGDALARTLMYEAATVILHRVKRPLHLKDWAEAIERRSGSGKARVALARKLSVILHSVWRSGEPFRCAAPAMAV

SEQ ID NO: 114369 - protein, 294 aa, unidentified
MEKRKTVGIDLAKNSFYFVVLNEHGKRVVRKKLNRRQVLPYLVNHESCVVAMEACSSAHYWGREIQKLGHEVQLLPPQHVKGYLRGQKNDYNDAQAIAEASQHGAIRSVAIKTIEQQDEQSILHMRRLLNVERTRLINHIRGLLGEYGIVVIKSAAAIRKEIPLILEDADNPLTDIFRKFIHRQYLRLLDIEEELKLYQHYVESTVKTDDTCQRLISMPGIGPIVSISLKAWMGDGQQFKRGRDASAALGLVPRQHSTGGKTVLLGISKRGNSHLRSLVVNGARAVVTQALLRN

SEQ ID NO: 114370 - protein, 342 aa, unidentified
MKKYFIGIDVSKETVDVSFVESDFQWQPEYLAQYPNGKKGYRSMVRDLRLALRGTSSGQWLFCCETTGAYDRQMCHWLTEHGMHVWRESALQIRQSLGIRRGKNDKADSMAIADYARRHHDKANLFELPAKELAALKDLFLYRQTLVDKLKGVKNRLKAQKSQGLAASPAAKFIHRDANGELRRLERSIAQCEKAMMEVIRSDEQLRTNYEHVKSIKGFGLVVTVALIVFSGNFQVIPTANKMATYCGVASFRNRSGTTLDSRQDVRHLSNLRLKGVLTMAARTTIRHDEAMMQYYQRKISQGKQHGVVINNVKNKLLHIAYALVRNGQDYQSRHVTNGEAT

SEQ ID NO: 114371 - protein, 370 aa, unidentified
MNAGKDIILAVDYHAENIEFRWFNTATGEERTGRYPTTRGNILRQAEETLREVASGGRVVWIMESTTGWVRVKELLGERVEFVLANVLDMPLPPKARRRKTDKIDTGRLLREYLNGRLPRSFQPPARWRQVRRLVDSRQDVVERQTALKNWVTSLLHHETWQDRTNLWSAAGQARLRAMPLAESDRQLVGWKLAQWEQLQRQQAEIEERMQAIYDAWPEAQWVDQIRGIGMMTAVSVLSHIGPIGRFATAEDLISYAGLAPGVRNSDQMRHNGRLGGGGTDKHLRYLLVEATQWLCQIPRYRPTYERVLAKRGKKVARVVLARLTLRSIHKMLRDRVRFNPGPRPRPAPPTFTQRPGARGAVATTGGAGR

SEQ ID NO: 114372 - protein, 397 aa, unidentified
MIAVGIDISKAKSTVAVIDSDGTVLASPFTMAHTQPEMEAFVTYLKGLGEPTTILMEYTGHYHYPVLKKLQDEGFPVCIVNPYQMKKYGDVEIHKAKTDKKDALRIAAYALEKSYKLVPYSSMEQKYEDLKFLSRQYSQRITYVAKLKVQLIALLDQTMPGITRILPLNSRNPEKCALLLFIKRFKSFDEIQRIGKARFLASYDVLAKKTSERSASSKGLSIYELAVDSITTRGEDPYIWLSQNQCVDLLSATQNAADEIISQMRNIAETIPEYKVLRAMHGVGDRLGPIILAEIGDVHRFHSGKALNSYAGNDAPPYQSGQFESRNRHISKRGSSTLRKACYEVMQALKLTKPQDDPVYLFMLKKEQEGKPFNVAKMAGVNKFLRIYYARAMELYK

SEQ ID NO: 114373 - protein, 456 aa, unidentified
MGNARARKVPAQLVEDEDYQLRHERVAGIDIAKAKADVCTRLPPQRDGGRRASRVEEVPARAREILDLAVRLISDGVELVVMESTSDYWRIWFYLLEAAGLNVQLVNSSHARQLAGRPKTDRLDAQWIARLAEMGLLRPSFVPPPEIRALRDLTRTRLMLVRDRTREWQRLEKLLEGALIKLSSAVSSLARTKTARAILEALADGERDPKALAALAAAQVKGGRAAIERSLDGMMIGAHHPMLIRAHLNHITLLDRTAAAIEDEIEAALGAIPAARGITADGVPSAGPGPDAAALPAAERLAEIPGVSLMLARAIIAETGLDMTRFPAAAHLVSWAGLAPVASQSGPRSRKPGKGQGDAYLKGYCTQAATGAATTDTFLGERLRRLSRRLGGSRARCAVGRSILVIIWHLLADPSARFADLGAGWHDARADRDRKIRAHLRQLRALGLDVTITPAA

SEQ ID NO: 114374 - protein, 460 aa, unidentified
MNRKRSKSKVDRTMPVVHPNAAAIDVGATMHMAAVRADRAPEPVRGFGTFTADLHRLVDWFTECGVETVVMESTSVYWIPIFELLDARGFTVFLVNARDAKHVPGRKTDVSDAQWLQRLHSFGLLRASFRPKGHIAELRAYVRQRERLLEYAASHIQHMQKALTEMNLQLHHVVADITGATGLRIIRAILAGERDPEALACLRHYSCHSSAETIAKALTGSYRAEHLFALDQALALYDAYREKASACDVRIEAVLKELSIHRGRDHGSTPPALRRRNRTDQANALAFDVRAALFGLLGKDVTTIDGLGPYLSLKLIAECGDDLSSWPSAKHFTSWLGLAPSNKVSGGKTLSSRTRRSGGRAAALLRLAAVTVGRTDTALGAFYRRLSSRIGKAKAVTATARKIAVLFYNAVRHGMDYVDPGASSYETRYRTRVINNLHRRAKAFGFVLQPLEPKAGAAVS

SEQ ID NO: 114375 - protein, 314 aa, unidentified
MTFYLGIDVSSKTLDVAFFRAGEKTGACEQFDNSPAGAKKLLRIMARLDVQHVVLEATGGYENLILDAMAQIYTVTRIASHRGTAFVRSLGKFAKTDKADARALAHMAQTITPQPYKPPTPAQRHLRGLVKGRDQLIRQRDDNRRRIKRCESMVVQGALERVDALLTAEIKALEGLMAEAAKAADAPLAEQLLQVPGLGKIAVATLLAFLPELGQRGNRQISALVGVAPYTKQSGRRDGPRQIMAGRPFVRRILYMAALAAIRSTQSPLRAHYQALKERGKPPKVAIVACMRKLLITLNAMVRDQTPWHGTVEA

SEQ ID NO: 114376 - protein, 354 aa, unidentified
MPVYLGVDFHARTQTVCWCDTENGVIRQRTLDHEQDEVRAFYAQFAAPAIVGLESSGYAVWFHRLLAELHHQVLVGDAFAIRQFAKRRQKNDRRDAELLLDLLVHGDFPAVHVPPPASREVLGLLRYRHRLVRIRTMLRNGLQAVALNHQLRLGPRLFRTRGLAQLEALPLAGADAIQRQHSLLLLLQLHEQITALEQQLEQRADGDVRVARLRTHPGVGLLTALAVVHTLEPVTRFDRARRIAAYCGLDPKEHSSGDTVRFGHISKQGNRLLRFLLVEAAHRTVAVGQDDDLRRFYFRLALKKCHAVAAVAVARKLVLRLYRMLRDQIDYDEFRRRGRDARRARENTSPVRSG

SEQ ID NO: 114377 - protein, 315 aa, unidentified
MSKVHYFAADVSKRELVIAAYPAAGDGVRVSNTAAAITAWLDTLPANSVLAMEATGTYHRRLAALAYERGLVVYVVNPRDVYYYARAMGARGKTDATDAKLLARYVAHEQAHLHRYVPPTPRSEQLTTLLERRALLVRTRQTLKQSLAELPALDAEKHTALAALDALLKAIDRELARLNDSDPPTAQLVTRLKTISGVGPLGATLLAALFQRFAFRHADALIAYVGLDPRPDQSGQHQGRRRLSKRGHPEWRRLLVAAAMSAARSHAWRDYVAHQRSKALPATAVHVILARKILRVALALYKNGQQFIAPQTQTA

SEQ ID NO: 114378 - protein, 384 aa, unidentified
MQASTVDTLTAGHSGTIFVAIELSQKSWLVTMHCPDKDKISRHKLEGGDHAGLLTLIERMRERAARTLGAVPAVVSCYEAGYDGFWLHRLLMAAGITNHVFDPASIAVDQRARRVKTDRIDGERMLRTLMAYLRGEPQVVRIVRVPTPEQEDARRASRERGRLTKEQTAHTNRIKALLRLVGMAVGNPRRRDWLTWLVKQRDWQGQTVPPQIMAEIKREHARLMLVREQLDALAQAPADLTPAAAQMAQRSELLLRLKSLGPAFTATLTSEVFYKDFRNRREVASYFGLTPSPWQSGGIDRDQGISKAGNPRARCAAIEMAWLWLRHQPDSKLTQEYRRRTLDASKRIKRVAIVALARKLIVAVWRYLPTGLVPEGAMLKTAEV

SEQ ID NO: 114379 - protein, 345 aa, unidentified
MPYGRRRAAADGVDAHIERSRAVLDRQFIAGPGGYAAALAWARQEAGEAGLAWAIEGTRHYGLGLARYLTAAGEHAGEIDASKHAGKRRNGKSDALDAVRAAREMLARPVAAQMRAAGDREALRLLMCDRDNAVASAKTARTLLTSVIVTAPATVREQLRHLSRDRRATVCASLTSPPGADRQTRVLYQTLARLGQRITTLARTAADLQKQISALVEDMTPGLVAAEAGLGALTAAQLLLSYSHHGRIRSEAAFGMLPGTAPVPVSSGRTDRHRLNRLGDRQLNRALQVIAVARMRSHPPTQAYVQRRLAEGKTSREIRRCIKRYLARHLYRALRNQPGLELQRT

SEQ ID NO: 114380 - protein, 317 aa, unidentified
MAATRFLGIDVCKDWLDVASRPDGLVARHPNTPEGIADLIEGLKADPPVLIVLEATGGLERPLAVALGEAKLPARVVQPGRVRHFARALGQHSKTDVLDARVLAHYAEAVLPEARALPDEATRALQALLDRRRQLMAIRISEQSRLPQATTPAVRGTIEALIAYLAAQIEKLDGEVTAALEAAPEWKLRDEILRSVPGVGPQTARTLLGSMPELGTLSRQQVAALAGLAPRARDSGSSRGARTIFGGRAEVRAGLYMASLAATRYNPALKAFYARLRVAGKPAKVALVAVARKLLTILNAMVRDKKVWEPNMTTAIG

SEQ ID NO: 114381 - protein, 342 aa, unidentified
MDKTLTPVGVDVAKLTLDVRVFLPEPATGPFKRFANQEQGLAQLQEWLLRQGYQQVHACLEATSTYSDLVAHFLYEHGHQVSLANPARVAAFRTSEGIRTTTDRHDALLLARFCAQKRPTLWRPTPPAVQPLHVLLAHLDDLLAMRKPERTRLENLRLDALTRQSLLAHIDWLQTESDHTLQRAAGLLAQTSEVAVPCAHLDSIPGMAQLTAMRLSSVFFDLQRFSHAPKLVAHAGWCAADENSGTSVHRRASISSVGHAQIRTWLSMSALSVMRSDPDFVRWVSELKARGKSNQVIIVAIMRKLLHLVHGVLKSGQDYDPWKAFPSHDASAPHPQEDLSAA

SEQ ID NO: 114382 - protein, 414 aa, unidentified
MAAETIAWFAGVDWGSERHQVCLVDAHGTVIGERDYPHSAVGLAELGEWILSISGTANAVAVAIEVPHGPVVDALLDRGFLVYAINPKQLDRLRDRFSVAGAKDDRRDAYASADGLRTDRHLFRRLQVADPRLVELRAWSRLAEELQEERVRLRNRVYQQPWRYYPQMLGLTDDLAATWFLELWERAPSPAKAAGLRKPAVERLLKQHRVRRVDADAVLRILRQPAIKVADGVVEAATIHMSSLVARLRVVNRELKHAERKLDELCGAIGEAGAAAADRITQSDVVVLRSVPGIGKITLATLLAEASGPLSRRDYQALRTLSGVAPVTKRSGKSRVVTMRYAAHVRLRRAVYHWARVAAQHDHRSRARYAALRRRGHSHGRAIRGVADRLLALACVLLRRQALFDPGLTQAAAP

SEQ ID NO: 114383 - protein, 457 aa, unidentified
MSILRIRYVGLDVHKRVVEACFIDSQGNVVHRERFALNRRTLELFATKILQPGDQVALEATTNCWAVADALRPHVARVVVSNPLTTKAIAQAKVKTDKVDAHVLAQLLRCQFLPEVWQPDEATRRLRELTGRRSALVGQRTMMRNRVHSVLAMRLVEEPKKLFNAEGRQWLKTVELDAQGRMLIDSDLRQLEFLDQEITTLDLELARRGHADGEVKLLMTLSGFDVGTAEAVLAAWGDFRRFPDADHAASYLGLAPSTHQSAEHCYHGPITKRGNCHARWMLIEAAQHLDKHPGPLGVFFRKLMKKKCRNVAVVAAARKLARIAWLMLTRNEPYRYALPKSTETKLAKLRVKATGQKRKSGNPKGLKCAAKLPGGSRTIKSLAGLCAGEGLPPPRELTPGERRTVAESGCAEFVAQIAAAQVVPRAATRKPTVAARRCAPQATGSSSLLPETNHGGH

SEQ ID NO: 114384 - protein, 477 aa, unidentified
MARKKQQQAQNKAARKRERSRKPKHGMCGQDRPILEPNAAGIDVGAREMYVAVPPDRDSDPVRVFRTFTDDLDRLVNWLLECGITTVAMESTGVYWIPVYEMLADHGLRPCLVNARHMKNVPGRRTDWHDCQWLQYLHSVGLLRPAFRPEQAVCVVRAILRHRSELVQMAAQHVQHMQKALAQMNLQIQHVISDITGFTGLAIVDAILAGERNPEQLAGLRDPRIKADQETIRKSLVGDWRHEHLFTLRLSRQMFEHYQQQILACEKEVQKQLGEFSWRVNPDERPLPPDNKHKRNRRSRLSKKRAGDFHFDLRTEMYKLFGVDVTRIPGLDALALPLFSEIGRDLSRFPTAAHFSSWCGLCPDNDVSGGTVWKGGRRINHRVGHIFRLAAHSLHHNLTPLGDYLRRMKAKAGPKAATTATAHKIAIIFYTLVKNQVEYDENIWSARDAARHKRFEEKIKRQARKLGFELVPAQSAA

SEQ ID NO: 114385 - protein, 432 aa, unidentified
MKVNRMSQRLEEITVSTLIVGVDVAKSLHWARLVDYRGMEVCKALSFRNDRCGFEGIVSKINELCNSKVLKMRFDNVIIGMEPTGHYWKPFANYVIKLNYRIVGINPYHTKKAKELDDNSQTKNDKKDAITIARLVKDGRYFDPYLPQDIYAELRVLTNTRVSILKRNSNLKNTITAILDEYFPEFVTVFKNPLKGKAARQILKVCPFPGLIIELGEDEILTEIKKAVKKTVGMKKVRQLIEAAKDSIGVDYGLDSAKLRLSMLISELEMIENQLLEVEQAMGKILYATGHGEKMIGIKGIGIVTAASFLGEVGDPLRFDNARQISNYAGYNLTEDSSGKNKSGTCISKRGRKQLRSILYKMAFVMVGKNAEMKELYHYLKNRTDNPLKKKQALVVISKKIITVIYSLLKKQETYKPELALGKVRREMLLAS

SEQ ID NO: 114386 - protein, 393 aa, unidentified
MICVGIDVAKDKHDCIILNSEGKILAGAFTFPNNAEGFDTLLHKIHSCANSNDKIKVGLEATGHYSYNILGFLLNQGLPTYVINPLHTNLFRKSMSLRKTKTDRVDAKTIATMLMSNVDLKSYTNTAYHNEELKSLTRYRFVKVRERAQLKQSVSRLVTILFPELEKLVPTLHMSSVYALLIEFPGAKQIAGAHLTHLNHLLNDASKGRYGRDMATKIRDAAQHSIGSVMPAKSLELLHTIRLIRELDSEIEDIEAAIQTIMNELQSPITTIPGMGVRMGAMILAEIGDFSRFDSPDNILAYAGMSPSIYQSGQLSLTGAYSHMEKRGSRYLRYALYNATKYVCHWDPTFSAYLAKKRAEGKHYNVALSHAAKKLVRLIYAMEKSRQPYKRTA

SEQ ID NO: 114387 - protein, 354 aa, unidentified
MSQKLNSEIAVIGIDIGKNSFHLVGQDRRGSIVLRQKWSRGQVEARLANLQPCLIGMEACVGAHHLSRKLQALGHDARLMPAKYVRPYSKGEKNDYRDAEAIAEAVQRPTMKFVATKTADQLDLQALHRVRQRLVSQRTGIINQIRAFLLERGIAVRQGLHFLRAELPGILAKRTDVLSPRMLRIIEDLAGDWRRLDERIESLSAEITRVVEQDPACQRLMTVPGIGPIISSAMVAAIGTGDVFAKGRDFGAWLGLVPKQMSTGDRTILGSISRRGNRYLRKLFVQAAWVVLVKVGPEQWERYGLKSWIEAAKKRLHHNVLAIALANKLARIAWAVLHKGRAFECVKTNAPRPA

SEQ ID NO: 114388 - protein, 402 aa, unidentified
MRFFVGIDWASQTHAVCVLDPRGHLHWQGTVPHTSEGLAALLGRLRRFRRRGPVRVALERPSGLLVDTLVDAGFEVVPIHPNALKASRPRYSAAGGKSDPGDAFILADVLRTDGHRLRPLHPPSDDTRALRALVRGREDLVAQRVALANQLRALLERFWPGAAAIFADIASPIALAFLTRYPTPHRAARLGERRLAQFLGQHAYCGRRPVAELLARLHRAPASQVGQAEAEASGDIVRAIVAVLGPLGAHIQHLSAAIAAALPQHPDGRLVQSLPRSGAVNAAQILAELGDDRAHFSTDDQLAAEADLAPVTQASGKHHAVVFRWACNKRLRRALTTFADNSRHASRWAALVYQRARARGCRHPHAIRILARAWARVLWRCWQDRTPYDITRHRAAQAVAAA

SEQ ID NO: 114389 - protein, 315 aa, unidentified
MVIGIDVAKDSLVVAVHPSGETWTTGTTAKELRALAKRVRRLAPTLVALEATGGYEIPVLGALAAAEVPLSLVQPGRVRKFAGAHGQLAKTDVIDARIIAQFAAQMAPAPYTLPDAVQRGLMLLVARRRQIDEMLVAERQRLDQQQLFPDSPVRADVEETVAYLEAKRKDFDQQLHAYVAAHPRWTESAALLRSVPGVGPITVATLLAFLPELGTLSRQEIAALVGVAPMAADSGAWRGQRHVRGGRAMVRRVLYMAALAATRHNPWLRPFFAQLCARGKTGKQALTACMRKLIVLLNSILKTKTPWQAPTPATA

SEQ ID NO: 114390 - protein, 369 aa, unidentified
MEVIYPRCCGLDIHKKTVVACVILSDPGQPPRKETQTFRTMTADLLALADWLSELECTHVAMESTGVYWRPIYNLLEGLFELLLVNAQHIKTVPGRKTDVKDAAWIAELLRHGLLRGSFVPSRPQRQLRELTRYRTTLVQERARTINRLQNVLEDANIKLASVVTDIRGVSARAMLEALIAGERDVQVLSELARGRMRSKRAELEEALRGCFAPHHSFLLTEHLSHIDYLDEAIERVSATVEQSLAADQDAVALLDTIPGVGQHTAEILIAEIGTDMNRFPSAKHLASWAGMCPGNRESGGKRLSGKTRKGSRWLRQALVEVAHVASKTKGTYLAAQYQRLASRRGKKRALVALGHTVLVIAYHILKQR

SEQ ID NO: 114391 - protein, 470 aa, unidentified
MAKSSYKISQHLCGDKGNILSGQLRSKNLENVMVVPIEIGKSYHKALVANYFGCLLRDSFEFHNSREGFGFLHNTITEISKHQPVEEVLIGMEATGHYFKNPAASLAQMGYRNLFILNPLSTSHCRKAGLTWSKTDDIDLRAVGQAVISGYGTIYSPERPLWEDLRQICRYRRFLIKHQTAYKNKIHSILDRLLPGITELKLFTRSHLWSDSSYDFFIKYPDLDSIKKLNVKSVMKFFQHRARRISPELGHQLTQWAKNALDSSQSTNTTRQFVLRSIIEQLKGLSQSIREIEVNLLGYLVKIPAVVLLSINFIGPVRAAEFAGEVSPLEQYSHSRALIKAAGMDPTRYQSSTQESSKHYISNMGSRTLRYITIHTADDLMKRNEYFAHFAKALMRRGKSRGCACVATGNRYIRVAFSMIKDQKTFKPANGLGISKDPLFKIKDFLQNHKASEHTDEYVGYAQKYLGKKE

SEQ ID NO: 114392 - protein, 433 aa, unidentified
MIKINYMSTLFVGIDVSSKSNVVYAMDFDENKYIDASFGNNQPGADELAGKIAACIQKHPHLNTIIVALESTSVYSIHIANFLSSCELLMPYKPYVYCLNPKMTANYRKSYVGMDKTDHMDAFLISDFARVGRTKKCEPWRGSQYLALKRLTRHRLHLAECITREKTYMVSNLYLKFSELQLLDNDIQPFSNIYGATSSAVLTEFMSLQEIIDSPEEELLQFLASKSRNRIADISRTSELLKKAARDSYRLDKCMYEPLNVSLASSFNCIQTYQKEIKLIDQAIEKCINGMNPNAFIILKSIPGIGPVWAAGILSEIGDITAFHSSDALAKYAGLTWLKNDSGDFVSEDNRVSKAGNTYLRYYFGEAANSVRRYVPEYAEFYSRKYAEVTKHQHKRALALTSRKFVRLVFGLLVKNQLYTGEKLDAELNTESE

SEQ ID NO: 114393 - protein, 421 aa, unidentified
MTQSAPHTFAAFVGIDWADAKHDVCLQAAGSAKRECCQLDHTPEAIDAWVITLRTRFNGQPVAVCLELNKGPLVFALHKYDFLILFPLNPLTLARYREAFTPSRAKDDPTDAELQLELLLTHRDKLRPLNPQSPTMRALAQLVEHRRRVVGDKVRLTNRLTSTLKNYFPHALQWFQDKDTLLFCDFLSRWPTLKAAQLARRSTLETFFRDHHVRSSDVIDKRIHAIHAASPLTIDEGVIAPHALLVQALVSQLRVTLQAIETFDNAIAQRAQSHPDFPLFQALPGAGPVFASRLLVAFGEQRDRYASAAELQRYAGIAPVTERSGKKSWVHWRLQCPKFLRQTFVEWAAESTRHSFWAQVYYQQQRDKGKAHQAAVRALAFKWIRILFRCWQERTPYNESAYLQALNSRGSSLIHNLAKEA

SEQ ID NO: 114394 - protein, 396 aa, unidentified
MLYLGIDIGKNTHVASLIDDNAKLLFKAFSFCNTTEGGESLISKLVSHVPSISEVEIGMEATGHYWLSLYSFLVGKRYVIHVVNPIQTDGWRKGTEIRKRKTDIIDSVLIAELIRYGDFLETSLADENTMSLRNLTRFRHYLVASIGDLKRKAICVLDQVFPEYQSVFSNVFGQTSKELLLQLQSPDDFQSISAEKLEDILKSITFKKFAQNKISTISELAANSFGLSFCRDSFSLQLKLLLEQIKFIEAQVADVEAEIRRLLEKINSPITTIPGIGPINGATILGEIGDISRFSTPAKLVAYAGIDASVSQSGMYQSTNNKMSKRGSPYLRKALFQAALVASNCDPTFKAFYQKKRMEGKHHLTAVGAVARKLCYTIHAILKNNCPYQVQTTSQD

SEQ ID NO: 114395 - protein, 396 aa, unidentified
MTQLYVGIDTSKDKHDVCVKNEKGSVLLGNLKIRNTHSDTKRLYKKLDQLKKQNNGCTIVFGMEATGIYYLPLYHALTSGGYAVKLFNPIQSHGYRKMEIRKTKTDKIDAAIIADMLRYSEVPMLGKIDLELYTLRELCRVRHRIVQKITDCKRQLYRDIDMLWPGYHRYFSEMFGKTSCAILKRYSVPTKLIKQPFEDFCAFLIKTSNAQFKRNKAKDIYEHAKDTLTIPELEVVGSIEIRMLIAQLELLDEHKKRLEKRMQKIMQKRNSKITSISGINEILGAVILGEIGDIRRFSSSRKLMAYAGLDPSINQSGKIDGTGGRISKRGSPLLRHALYLAANIARNCDNSFRVYFEKKMAKGKHFKAALTATAGKVLRVVYYVLKEDKEYDMAKN

SEQ ID NO: 114396 - protein, 346 aa, unidentified
MKITTIGIDLAKEVFQVHGVDAQGKAVLRKQLRRSEMVRFFANLEPCLIGMEACGGSHHWARKLGEFGHTVKLMSPQFVKPYVKTNKHDMADAEAICEAVSRPNMRFVPIKNVEQQTILSVHRARQGFVKARTAQSNQIRGLLSEFGIVIPQGIQSIIKQMPEILEDGENGLLGIMRALLERLTENLKEMSRQVDELEKQIVLWHRENEASRRLAEISGIGPITASAIVATVGRAKEFKNGRQLAAWMGLVPRQHSSGGKQNLLGISKRGDTYLRTLLIHGARAVIRFAENKAKPESWLRKLMARRNKNIAAVALANKNARIVWALLVNNQTFHPDYIPTTIVAKM

SEQ ID NO: 114397 - protein, 353 aa, unidentified
MATILALDLGKFKSVACWYELGSGAVAFETVPSARAELQDLLTRRAVEIVVFEACTLAGWLHDLCLELGLKPLVANTNGEAWRFKNLKRKTDRDDALKLARLTAMGDIQGVRLPAKATREKRALLGYRQTLVTRRVQIQNRIRSVLLAQGLAAPRGHRAWTELGLEGLGQLARPLAECGPEELWRGELGLALTELGQVLGLLEAVENKLDALNKEDENVQRLQTIPGVGPRTAETVAAYLDEAQRFKRGGEVSSYAGFVPRLYESGQTSRRGRITKRGPRLLRKMLVECAWVMLRYNAWARRIVARISKGQKVRRKQAVVALARKLLVRMWAMLRDRTAWRDEEPQPRPQPAA

SEQ ID NO: 114398 - protein, 378 aa, unidentified
MKNDNRYVGLDVHAETIAVAVVETDGEVRFLGTIPNRAETVRRLVKRLGPANRLRFCYEAGPTGYVLYWQLTGLGAHCDVVAPTLVPQKPGDRVKTDRRDAEKLAVLYRGGHLTPVWVPDQAHEALRDLVRAREAAKSDQLRARHRLQKFLLRHGRRPPQGVKAWTQKHLDWVRREVHFEALAQEAVLVDHLAEVEHARERIRRLEGAIDTAVKAAPASLRAVIEALQGLRGIAMVSAATIVSEVGSLSRFRKPRQLMGYSGGVPREDSSGERVRRGGITKTGNAHLRRIVGEAAWSYRHRPTVRGELLKRQAGLSEEVKAISWKAQHRLYSRYRRLIGKGKAKQQVVTAVARELLGFIWAIGVHVEQQHGTAARRAA

SEQ ID NO: 114399 - protein, 406 aa, unidentified
MKLTCGVDWAEAHYDVALVDGDGVVVARARIDTGATGFNKLLALIAEHEGSAQDTPVSIETDKNLLVVALVEAGFTVYPINPRAVARYRERYGQAGGKSDPGDAAVLAHILRTDRHLHRQMPAVSEQGRAVKALARQHQEAIWALHQTVSRLRSVLLEFYPQALQAFPNLTHKAALTVLAAAPTPASSRQLTRRRVVTLLQRSGRGNHPTLVEQILTDLHTAALRQPPQVEQALGHTVVGLVGIVVAMQRAVDDLELELAREFDQHPQTAILRSAPGLGPILAARILAEIGDDPQRFANPNSLRAFAGTAPVTIASGRSHYVKARKVRNKRLADACHWWAFTALTKSAGAREHYDKRRAACDHHNAALRNLANKLLGRLWWCLANNQTWDDTAAWPHRLKPDSVAA

SEQ ID NO: 114400 - protein, 337 aa, unidentified
MTIVFVGIDLAKNVFALHGVDGAGKARLVRPSVRRDQLVETVAKLPPCTIGMEACSGAHHWARQFMAFGHTVRLMAPKFVVPYRMSGKRGKNDKADAAAICEAVQRPNMRFVPVKTELAQARLAVHTVRQGLVVGRTATINRLRSVLSEFGQVMPKKASSVRLEAATRAEGLPQWALTACMDLLGEIRRLDEQIAAYDQHIRQMAQADDRSKRLMGMPGIGPTTASALLAAIGNGHDFDNGRQVAAWLGLVPGQYSSGGKSRLGHITKAGDSYLRTLLILGARAVLAAANGKQDRISRWAQALAERRGYWKAVVAIAAKNARMAWAMLAKGEAFKPV

SEQ ID NO: 114401 - protein, 380 aa, unidentified
MRQVCGLDVHKDSVFVCIINENGVVFQEKYGVLTPELEQMLAKMLEYHVEEVCMESTSIYWMPVWRVLENYVSLKLVNPYFIKQLPGKKSDVKDAEWIATCLLKDLIKGSYVPDDLIQPLRQYDRRISDLNAECVRKLGKLDAALQRCNIRISNYVSTTDGKSYKEVVRLISEGTRDPAELTKVIHGRTINRVGKDVILASLTGVISNTDIDVIRQLREEVALAERHKDECQSKMDAICQQYFPQQLKNLQTIPGIKGRSATAIIAEVGTDMSSFEDAAHLVSWCGLKPRNEESAGKIKARNTTHGNRYLRKTLIECSWAASKTQGCYFNKFSYHQVVVRRKNKMKVQVAIARKILTAVWYVMHDNVAYRDYTPDIAPAE

SEQ ID NO: 114402 - protein, 424 aa, unidentified
MVAQRENPKARRNLMKEERPLAKYHVGVDVSKHKHKACIRNLSQDSYSGVFSISVNRQGFDKFLGTLDKLSPNKEDFLIGIEATGSYGVTLAYFLLSQGYSVVEINPYRANQFRKAQGKKAKTDRIDARSLAALLSLENHKPLSLPDPVLDNLRELTRFRAYMVKDRTALVNQLHETLSILFPEFATVFSQLDSPTSLALLMAYPGPYYICHAGEERVIQALAAASHGRIGKPVAKALVEASQSSVGILQRQTALAIKLSILGERISALTAAIERVEKEIADLFRGLPYEPKDFPVGDISSLATLISEIEDIHRFPTLKHFLSHFGWCPRSFQSGNYRLQHPRMSHAGNKYVRRVIWMLSIVAIRSVPRYRAYFQRRVEVGKAKMHILVAVGRKLLSVFYAILKRGIPYDPNWEVNSYFALART

SEQ ID NO: 114403 - protein, 394 aa, unidentified
MKKNLMCRQQIGGEQVAVGVDPSRNALHLAMLAPHGTTIRRLPLVPDSLHSIDAFLRDAQEVRLGVENAASCGALVLLHWLSQGYDVREVNPQVSKRLRECFTEAHTDASDAQGLAWSVRFHPDLPKVRLTVTTAAWKRLARARARLVKTQTGLYNRLHAMLAESYGAAYKMLFPSLRSKKALAFFRDFPTLDDARGDLARVRTLLGEEKAALLEEVGQWGESLYLEVLRIEVRLTIHLLLTYRAAIKELERKMAELSRADPEVERLKTIPGMGTTLALTILGHCGHLSRFPKRDAFIAYCGLAPTIWQSGQSPVYTRRRRRYSRALKQAFLQLALTQLRVNPESRVYYERKRQEGKAHWTALIALARQLAKVVYKMMVEVPPSTCSSHLDIDG

SEQ ID NO: 114404 - protein, 335 aa, unidentified
MTITTIGLDTSKNWFQVHCVDADGRTVLRQKLARSKVRTFFAKIPQCLVGLEACGGSHFWARELVKLGHDAKLMPARYVRAYVKTNKHDAADAEACCEAVQRPGMRFVPIKTEEQQSMLMIHRARDLLVRQRTAAVNALRGHLAEFGIVAAKGTAKAHELMRLAGDDERLPAMAQEALRYIVAQIHDIEIRLKSFEQRILSLAKENEVCKRLMTVQSIGPYIATAIAATVGDPRNFASGRHFAAWLGLTPKQHSTGGKEKLGGISKRGDSYIRRLLIHGARATVARVRSGQMKSAWLSGLLGRRHFNVATVALANKTARVAWAVMSTEQTYRRAA

SEQ ID NO: 114405 - protein, 320 aa, unidentified
MKKQKVYIGIDIAKASMDMAQHPDGERWSFTNDDRGISEAVSTLRKLSPALIVMEATGGIEAPLVAALAVAELPVVIVNPRQIRDFAKAMGKLAKTDVLDAQVMAYFAATVQPKLRTLPDAQSKEFAAILARRRQIIEMLTAERNRLSSAREVVRERIKDHIAWLDQELGSIDEELRHSVKRSPAWREKDNLLQSVPGVGPVLSATLLADVPELGTLNRRQIAALVGVAPLNRDSGKLRGKRSVWGGRAKVRPALYMGTLVAIRHNIVIKTFYQRLCAAGKEKKVALTACMRKLLIILNAMLKYRTPWNYASTGIIGHCS

SEQ ID NO: 114406 - protein, 356 aa, unidentified
MNKRSKLDFSGQPIYIGLDVHKKSWSVSIFTQHGEYKTFSQPPEAEILSQYLRHHFPGAQYRSVYEAGYCGFWIHDELKDKGIQNIVANPADIPTRDKERRTKRDRVDCRKLARGLRGDEIQGIYTPPRWKLEDRSLTRTRLSMGRKQARCKNQIKSMLLFYGVVIPERREMGHWSRRFIRWIEGIRMERASGDLALQIHVEELCHMRQILAKLNRAILALARTEQYRSWVSLLKTIPGISTLTAMILLTELYEITRFRSVDELCSYIGLIPDTQSTSEKEHVGGMTQRHNSQLRWLLIEASWIAVRKDPVMMEAYQEYCKRMRKTKAIIKIARKLLNRIRYVLKNQAEYVTGVIE

SEQ ID NO: 114407 - protein, 444 aa, unidentified
MSNAVAAPSEPEWAAFAAIDWADQKNFWRLLPAGGRKSEAGELDSTPEAVEVWAANLQQRFGGRPIAVILEQTRGPLVYMLTKYPHLVLFPVHPTTAARYRETFAPSGAKSDPSDTDSLLDLLLRHRERLRPLRPDTVETRLLHFLVEERRQTVDEKTRANLRLTDCLKLYFPQVLRWFDDVTSPLVGDLLERWPTLEQLQRVHPGTLRRFFHEHNCRSEEKNAERMAAIQQATSSTQDQAVREACVLIAHSLVAMLATLRAQINVFDKRIAELVADHPDGALFRSLPGAGDALVPRMIVAFGTQRDRYQSAYEMQCYSGIAPVTEASGNSQWVHFRFICPKFLRQTFHEFAGCSIPQSEWAHAYYDHLRHDKNKSHQVAVRSLAFKWLRIIYRCWKDGKPYDEAIYMQSLRRRGSLLAGVLGTPTRVGWKSVAGFQKLSENNA

SEQ ID NO: 114408 - protein, 389 aa, unidentified
MKIYVGINIAKLNHFAAAISSDGEILLEPFKFTNDADGFQLLVSKLESFDKNSIIIGLESTAHYGDNLVRYLVAEFYQVCVLNPIKTCQMRKNNVRKTKTDKVDTFVIAKTLMMQDDLRFITFFDLDMMDLKALGRFRQKTIKQRTRLKIQLTTYVDQVFPEIQYFFKSGLHQNAVYALLKEAPSPKEIASMHMTHLANLLKVNSHGHFTKEQAKELRVLAQKSVGANDSTISIQITQTIQQIELLDSQLEKIEAEMTDIMKFNDSVIMTIPGIGYINGGMILGEIGDIHRFSNPNKLLAFAGLDPSVYQSGNFQAKTTRMSKRGSRVLRYALVNAAWNVVRNNATFKAYYDAKRAEGRSHYNALGHCAGKLVRVIWKMLTDEVEFNLE

SEQ ID NO: 114409 - protein, 369 aa, unidentified
MQNTMFVGLDVHKATISVAIAHGARDGEVRHWGTLPNRADHVRRLAEKFGSDGRQLYFCYEAGPCGYGLHRQLTELGHDCMVVAPSLIPVKAGDRVKTDRRDALMLAKLHRAGELTAVWVPDRAHEAMRDLIRARATAVSVAGKARQHLQGFLLRHGRIHPGKKGWTKAYRRWLSTVRFEHSAQQIVLQDYVHAITDAEARIERLTKQIADLLPSWSLAAVVEALQAMRGVAFIVAVTVVAEVGDFSRFDNPRQLMAYLGLTPSEHSTGKTIRRGGITKAGSGLARRVLIEGAWSYRMQARVGRKLVDRIEALPATVRDIAWKGQLRLCQRYRHMMAAGKPKVVATTAIAREMVGFIWAIARAVTPVSA

SEQ ID NO: 114410 - protein, 344 aa, unidentified
MSTIKVLGIDLGKSSFHVIGRDYSDNQIIRKKFSRAALIQFLHQVQPCTIAFEACGGAHWLGRQCESMGHKVRLIPPQYVKPFVKSNKNDFIDAEAICEASTRPNMRFVSVKSEEAQVISAIHKVRHGYIKDRTACMSRIGALLLEFGVALPTGHSVMKQLFNWLAQQKQTIPELLMQELMELHEYYLFLNENIDRQDKKLKQLVETNPIGQLLKTIPGIGDMTASLCIANISSATDFKSGRNMAAWLGLVPAQHSTGGKPKLLGISKRGNKELRTLFIHAARAVMSRPDKTGKIYGEWLINLRATKPFNVVTVALANKLARIAWAVMKTKQAFNNNALAPSLQ

SEQ ID NO: 114411 - protein, 408 aa, unidentified
MNTLYVGIDVSSKSNVIYLMLPNGDKHSNFSVANSHEGSTQLVKRIHSALTSHSLDTVLIGLEATSVYGDNLVYFLREDATLAPFNRKIHVLNPKQVKKFHDTYNDLPKNDYVDSFVIADCLRFGRINKEVYMGDYRYKALQNLTRARFFAVQNLVKEKQRFMNVLFKKYSTMTQEKVFSDTFSTTALAVYDEFESAEALANMDLHELTDFIIEKGKNRFPDPDAVAKAIQKAARSSYRLPKTVNDSVNQVLSISITSMKALESQIKEFDKAIKAQMELLPNVLISIPGIGPVYSAGIMAEIGDINRFNSQAALAKYAGLAWKQHQSGGFEAEVTRLIPSGNRFLKYYLCEAAFSLVRCDKEYSDFYHLKYKEVNRCQHKRALALTARKFVRLVFRLLKDNRLYCPAK

SEQ ID NO: 114412 - protein, 322 aa, unidentified
MSVSVLGIDIAKQKFDVALLADGKAKHKTCKNSTEGFETLMIWIEKQGVETVHACMEATGNYGEDLAIYLHEAGHTVSMVNPARIKGFAQSELIRTKTDKIDAGVIARFCLAMKPEPWIPPALEIRSLRALVRRVDSLIDMRSQEKNRLGTAHESVVILIKEHIVYLDQEIEKIRKQIDDLVKRNPQLKQKKDLLNSIPGLGKATIPHLLAELYNLDKFNHVREMVAFIGLAPKETISGSSIKGKPRLCKIGHARLRKALYMPALVSIQCNPVMIAFYNRLKEKGKNGKVIVCAIMRKLVHVIFGVLKSGKMYDPNYKSALA

SEQ ID NO: 114413 - protein, 340 aa, unidentified
MTSLPNTPIQPHAAAQTRDAALLAQPLYVGIDVAKQSVEVSFGAHLPTLALSNDSQGVEALLKRLQDETVSLVVMEATGGLEAIMACALQGAGYAVAIINPRQARDFARAMGQLAKTDRIDAHILSQLAGVLDRHPQRERYVRALPEAEQSELAALVARRRQLVGMWVAERNRLPGSHPRARPSVIAMIEALAQQLANIDQDMDRHVKAHYADVSSLLDSAKGVGRRTIATLIAELPELGKLGHREISALVGVAPINRDSGQMRGKRTIFGGRASVRQALYMAVLSGTRYNPTIKVFYQRLLKAGKPKKVALTACMRKLLTILNAMVKSGKPWQESIHEA

SEQ ID NO: 114414 - protein, 350 aa, unidentified
MMIIGCDLHTRYQQIAMLDTDTGELTERGLEHESGEARAFYSALAGPVRVGIEATGHTHWFEAMLAELGHELWMGDAAKIRAAVVRKQKTDARDAAHLLELLCSQRFPKIWRPSVAERDLRQLVWHRQKLVWMRGAVKNQMHALAMGEGVCRKKKLFTAKGRQELEGLALGPWASYRRQELLRMFDELQAAVARLDQAVEQAAKSQALAARLMTHPGVGPVTSLAFVLIIGPVERFEHSKQVVSYLGLNPQEHSSGGKQRLGSISKQGNPMMRSLLVEAGHTAARFDPQLRRVYQRLKFRRGASVAKVAVARKLAVRMYWMLRSAADYAQLVRMQGSPWATLVENSPSLG

SEQ ID NO: 114415 - protein, 400 aa, unidentified
MISVGIDISKGKSTVCIMKPYGEVIRTPYEIKHTEKDLSDLADIILDFDEESRVTLEATGAYHLPVLSYLKQKGIFVAVINPLMMKKYSSLTLRKGKTDKIDSIKISNYGIDNWFHLNDYCVSDVLYDELNTLCRQYNQYVAIKIKCKINLANLLDKTMPGITNLLRNNDYIGKYKLNSFVKEYWHYDNITKKSEKQFIQSYLKWAKREGYHANEAKAKSIYTLAKESITTLSAQMKSTKMLVIEATRVFKEVEKTIRMILLQMQELAKKLDEYNVVRAMPGVGDVLAPRLIGSIGDIRRFHNGKALIAYAGIDAPPFESGNFKGTRQKISKRGSSYLRKTGYEIMTSLNAIKPIEDSVVYDYMLKKESEGKAEKVAKIAGLNKFLRIYYARVKEVYSKV

SEQ ID NO: 114416 - protein, 362 aa, unidentified
MPKSTTIVAFDHHAATTVAAVLFPGHRTPALHPLTSDNRTILCFIERLRRLGPIQCCYEAGPCGFELQRALTAQGVLCDVIAPALIPRRPGDRVKTDRRDAAQLAVLYRADALTAIHIPTEQEEAARDLLRCREDIRADLLRARHRLSKFLLRHGRRFTATKKAWTKRHSAWLQAQRWPLAALEQTHRAYVRAVDEGVARLQAVDTELRDLLTIEPLRARVERLRCFRGIDDLTALTIAAELGDARRFPSASRVMAFTGLVPAEYSSGAKHARGHITKTGNAHLRRVLVESAWHYRHHPFLGEALRQRQRGAPADVIERAWHAQARLHRRYRRLAARGKPKQHIVTAIARELSGFLWAALTQ

SEQ ID NO: 114417 - protein, 373 aa, unidentified
MPKYSTAFGMDVHLRSTTVCALDADTGEAVTRRFPGNPWGEIAGWMDGFPGPSLAAYESGYLGFAPQRELAGLGVECVVAAVSKIPRSAADSASKNDRNDAARMAKAILAHDISPVWVPSPEVEGIRDLAGAYGGATARLATARQRLLAFLAKRGFVYGGTTPAGNPRKYWTYDFLRWLDKVRPEDDGGVRTLAALRNEVEAAAEARADLLSEYRAAVDASPIAAEVAALQSIKGCAFALAAAFSAEVGDFTRFRSGRQVTAYFGLAPSQRSSGGSVRLGGISGAGNALVRKLAVEGSWCYAAARHQPKLMPRDTGVPLEIRMHGRKGSERLLRRREEMLARGMPAAKANAATAAELVRWLWALGMMCREGAE

SEQ ID NO: 114418 - protein, 343 aa, unidentified
MDYFAGLDLSVKETSICIVDDAGKIVREVRVASEPEALLQVLTNNNYRFKRIGLEAGPLSQWLFSALAEAGLPVICVETRHMRAVLKAKINKTDRNDARGIAQMMRVGLYRPVHVKTLRSQKLRMLLIHRKLLQSKAIAIENDLRASLRNFGLKMGLVGTVRFEARIKELVENLPDLAALVEPLLIVRRVLREQLGILHRRVLAVVRDDEVCRRLMTIPGVGPVVALTYRVTVDVPARFRNSKSVGAVFGLTPAKDQSGERDRSGAISRCGDELMRVMLYEAAQIMLVRSAKWSWLKAWAMKIARHRGMKKAIVALARRLAVIMHRMWIDGTEFRWTREVAAA

SEQ ID NO: 114419 - protein, 332 aa, unidentified
MRFYNNQHQYYCGIDLHTRTMYVCVLDGQGNKLQHKNLSCSPQNLHEVIKPFLPNVVIAVECMFTWYWIADYCQREDIPFVLGHALYMRAIHGGKTKSDKIDSYKIAGLLRSGMIPMAYVYPQEMRATRDLLRRRMHFMRKKSELLGHIQNTKSQYNLPDFEKPITRKNNRTAVAEHFNDPIVRRSIELNLALINQYDHVLRGVENYILSKVKVHDPNTFYLLRTVPGIGEILGLVMLYEIHDIKRFGRVQNFTSYARLVKPARESAGKQKGASNKKIGNAYLKWAFSEATLLLLRDKQEVKDWHSKLKNRHGKARALSIISHKLGRAVYYM

SEQ ID NO: 114420 - protein, 343 aa, unidentified
MEYGAIDLHLRRSQIRIIDAEEHVVLDRRIETTREALTQVFGGRRLRILLESGTESEWVAQHLEGLGHEVVVADPNYAPMYGSRSRKVKTDRRDVAALAVANRRGLYRAAHRATAAARAQRQTLRIRRQLVRMRSGVISLLRAVLRQEGFRLGAGTAETVIARLDAVGMPSTVATIVAPLRATLEQLTGQLIAVSAAIEAAADATPVTRRLMTAPGVGPIVAATFVATLDDVGRFGGDAARVSAYLGLVPTEFSSAERQRKGHITKTGPGDLRALLVQASWTIWRSTRPEAAALRTWAQVLAARRGRRIAIVAVARRLSRILYAMWRDGQDFHAPRSVSEAAA

SEQ ID NO: 114421 - protein, 402 aa, unidentified
MRNSVFVGLDWAYRSHAVCVVDAQGSVLKHLTVSHDAQGLGELRHALAAFGKALPIAIERPSGLIVDALVEAGHQVFAIHPNAVKASRPRYRSTNAKSDAGDAFMLADLLRTDGHRWHALQPQSAAIRGLRTLVRTRDDLVATRVRLANQLTALLDAYWPGATCIFAAVDSPIALAFIEQWPAARKLTARQIAAFCKRQGYSGRRSPGVLLDRLQAAAPSLCEPMLAQAYATAALALVALLKPLAAQIKSLDGHIALSMAALPQAISVMSLPRAGCICAAQILAELGDVPERFASAEQLCSEAGVVPVTYESGKSRAVTFRWACNHRLRRAITCLADNSRHASPWAASVYQAARKRGCDHPHAVRILARAWTRVLWRIWTDGTEYNPAIHSSACRIENTQAG

SEQ ID NO: 114422 - protein, 341 aa, unidentified
MRTLYVGMDIHKNFIQAAAMDQAGNIIKEQQFKSDAKEIKRFIKTLKAKNIQAAIEATCTWYHVYETLDALGVETTLVNMRRTKTIAESKIKTDKLDAKTIAQCLRTGFIATAYIPPKTIMEQRNILRHRMSLRKEITRYKNKIHAILLRNGIQHSDYSDLFGPGGMRFLRSVTLPDSEHYSLTSYLNIMETLIHEKTQTAEKIETLCKNNQQAMLLTSIPGISYYGAMIILTELGEIHRFPHPKKLCSYAGLVPRTIQSGSHVYHGRILKECNQNLKWILGQCTHIHIRHCPNSMITKLFYRVENKKGRNKAIVAASRKLLTCIWYMLMKSETFKYSNDD

SEQ ID NO: 114423 - protein, 447 aa, unidentified
MAQRNRRYTRKGLEVTNPDAAGIDVGGAMHYVAVREDVADQPVREFGCVTGQLQQMIEWLRSCGVKIVAMESTGVYWIPVYEMLERAGFEVLLVNARHVKGLPGRKSDVQDCQWLQQLLMYGLLKGAFRPTDAICGWRSLCRQRARRIKEQARYVQHMQKALVQMNIQLGTVISDVAGATGQKIVRAIVQGERDPQELAAYRDCRIKASEEEIAASLLGNWRDEHLFELKQALQAYDFCGQLLAECDQEIERVMLGLAEHEGQLEKGPRRSKNRNAPKFDVRQRLYEICGVDLTRIDGIDASTALVVLSEIGADMSRFKTVKHFTSWLGLCPGTKISGGKELGSATKRSANRARQALKLAAAALRSSKSSLGAYYRRMCARMDKGKAVTAAAHKLARYIYTMLTKGQQYVDQGQQYYEERYRERVLRQMRKRADELGFRLVPAEQAA

SEQ ID NO: 114424 - protein, 413 aa, unidentified
MGMLEVALDPATVVVAVDPGKVMNRVWVSNGQGLLEEPVSLPVARSGIAALEKMLAGHAGERVIAIEATGSLHRAWAAELERLHPGSLRLFAPSETKAARTQLGSGRFKTDDRDCAALTYLARQGAGRRQTEEAVIEELRAAVRHRRGLVADRKKAQQRLHDQLNALCPGLSAPDGHTATLGRSLPIESPTGQAVLACAVAFAGRAPSTRSLIARAPGRLTKATAGYWAARWRDCLPPPPDAAARAERLGRDLDRYRSLLVDIAAVEDETAVLLARTDGQVLTSLPGVAANRAAAFAAHSLPITRFPDAEHLYSATGLAPAMYESATLRKRGRISRQGLAEHRDALMGIAWGLSVYSPSFAERNAELRSRGMAPIQARVALARNACRLIYRMLVTQQPFDEEAYRRGRLSRGR

SEQ ID NO: 114425 - protein, 368 aa, unidentified
MATTTHPAQPDHTDPHNSPTVVLGVDTHRDVHVAAVLDHLGTLLDARSFPATADGYRGLLAWARTFGQVRRAGVEGTGSFGAALTRYLRGEGVQVVEVHQPNKALRRRRGKTDAVDAEAAARAVLSAQATAVHKAGDGHVEAMRIYKLARDSAVKSRSQAINQLKAVLVNADPTLRESLAGLGTKTLIRTCAELPDPSPASTPAFAAAVHTLRLLARRIRQLSAEAYELEKQLRAAVLEHTPQLLERPGVGPDSAATLLITMGDNPERVRSQASFAALCGVSPVQASSGKTQRLRLNRGGDRQANAALYRIVLTRLRRQESTRDYLERRTSQGKTRREIIRCLKYYVAREVYHLVRPKHNGAELTQAA

SEQ ID NO: 114426 - protein, 447 aa, unidentified
MQSKDLNSGTFEILHPNAAGIDIASQMHYVAVPTDRDEQSVRKFGSFTEDLHDMARWLKLCNIDTVAMESTGVYWVQPFLVLEEYGFDVYLVNARHIKHVSGRKSDIKDCQWIQQLHSYGLLNKSFQPEDLMRELRTYVRQRKNLTQGYATQVQLMQKAFDQMNIKLHNVISDITGKSGLLMIDAILEGERDARVLAELADRRIKATKEDIVKSLQGIWRQDNLFELKQAYELYLVFRDKIVDCDKQIENVLKQIADQSDETTKYNQKRKATGKNKFNFNASDYFKVISGVDLTEIFGISELSVAEIISETGTDMTKWVTEKHFTSWLNLAPNTRTSGGKRLKSKPMKKKNKAGHAFLIAASSLKASNNWLGEFYRRIKAKSGSPVAIKATARKLAIIFYRMLKEKIDFSPLPIEEYNQYFKERKLKYINKQATSYGFKLVPLELVS

SEQ ID NO: 114427 - protein, 414 aa, unidentified
MPVYLGIDWSQEKHDAAFLRQGPRSRLNEAGAVVAQLTLSHRPEGFLQLDATRQQLGVEAPECLVGMETAHNLLVDFLWDRDYRQVFVLPPKMVQRSRERYRQSGARSDPSDAFVIADILRTDRNRLQPWSRDTLLTREIRAKVSLIHHLTESSVRLSNRLQAVLARYYPLALHVFSEPTGQIGLYFLQTYPTPQEAAELTLETFQDFGRRHRYTRRDALARSFGRLQAPYPEASPEISQIYRQEAVLLAGLLLELTQAKKAAMRGLQDLFRQHPDAALFASLPGAGILLAPSLLAKFGDDRTRFASPASVQALAGTCPVTKSSGKRRTVSFRYACDREFRQIAVQWARCSLRESAWANAYFESVRPHCRTQSHAFRCLANRWLAIAWKLWQTGERYDDGYHLRQRTLRSLPRT

SEQ ID NO: 114428 - protein, 313 aa, unidentified
MKHENKGVNVGIDVGKFQLDIFIWERDRHFTVENNDSGIREAIKILNRYNIQCIAMEATGRYEMAFASAAFEKDLPVAIVRPLLIRQFARAADQLAKTDKIDASIIARFAAVMHPRMTQKRSENLQLIKDLVVRRRQLIQVRTQETNRSKVMGKHMERSCNRILKALEKEIQWVEDKLSKAVEAEPTWLERKELLESVPGVGKALIWTLLSEMPELGSLNNKQISALAGLAPINRDSGKSQGKRRIQGGRYSVRTTLYMATLSATQCNPLIGGFYRHLVKQGKHKKVALTAAMRKFLTILNAMIRDGQEWSYE

SEQ ID NO: 114429 - protein, 349 aa, unidentified
MSPKLNAAIAVIGIDIGKNSFHVVGLDWRGAIVLRQKWSRGQVEGRLANLPPCLIGMEACVGAHHLSRKLTSLGHDARLMPAKYVRPYSRGQKNDFRDAEAIAEAVQRPTMKFVATKTAEQLDLQALHRVRERLVSQRTGIINQIRAFLLERGVAVRQGLRFLRAELPRILATPCDVLSPRMVRVLEDLAADWRRLDERIERLSSEIEALARRDAGCERLMSVPGVGPIISSAMVAAIGAGEAFSKGRDFAAWLGLVPKQISTGDRTILGKISKRGNRYLRVLFVQAAWVVLIKPKSWQRHGLKPWLEAAKSRLHHNVLAIALANKLARIAWSVLAHGRTFETSKIHAA

SEQ ID NO: 114430 - protein, 341 aa, unidentified
MKVTRVGLDIAKEVFEVHGVNEHGKAQVRKQLRRARVLEFFANLEPCLIGMETGSGAHYWARELQKLGHTVRLMAPRFVKSYRKNDKSDRNDAEAICEAVGRPNMRFVAVKSEEQQVMLSLHRMHAGLKSERDALANRLRGLLCEFGFVLPQGAARLRSGLPAVISQERLPVLMNQVLADGWQRLRELDDQVNRHERQIRALAQQSEPARRLMEARGIGPMTATAAVATIGDAKLFKNGRAVTAWLGMVPRHNGTGGKIWMGRITGRGDTYLRTLFVQGARSVMNTTRGKNDPLSLWVERLRARGGDNVAAVALAAKNVRMVWAMLARGEAYRPPLQGVGA

SEQ ID NO: 114431 - protein, 414 aa, unidentified
MTNPLLVGVDVHRQTNTVCLMDRQGQEAGPRFTVDNNSPGTEAFIQRVAQQVLAGHFDAVKIAAEATGWYWFHFLQTLDQDPLLNQWPLELYPFNPRLTANFKKTYVDLDHSDPIDAFVAADRLRLGRDLPAPFHYEGRYFPLRLLTRYRYHLVHNLAREKAYCLTCLYLKASEYTRKDKKPFSNLFGAASRAVLQEFASIEEIAAIPFDELVEFIDAKGKRRFPNPTDNARKLHLVAHDSYHLPEALQQPINLILGLTLRHITFLEGQEKRLNTALAQRMEAIPHSLDTIPGFGPVLSGGIISEIGGIERFDYNQAKVAKFAGFKWRKHQSADFQADETRLTRTGNRYLRYYFCEAANAVRRCDAEYAAYYQRKYEEVCKHQHKRAIVLTARKLVRLVVRLLTTNQPYQPRRC

SEQ ID NO: 114432 - protein, 419 aa, unidentified
MRFLALDVHRDFCEVAIGEDGRVRLARRVETNPAALELFAQSLGADDQVALEATGNALAIARVIEPYVARVVLANPKAVKGATQTAKTDKLDARTLARLLAAGFLPEVWTPDERTRALRRRISRRAQLVGQRTREKNQIHAILIRNLKARPPVTDLFGVEGRKWLAEQALPGDEREMLEACLRGIDFLDREAAAIDRALAGLVLASPELRRLLTLPGVNFVTACALMAAIGDVRRFPTARHLVSYLGLDPRVRQSGVEPARHGRISKQGPGEPRHVLVEAAWHAARTTGPLRAFHERVATRRGANVATVAVARKLAVIAWHMLTRGEDYAFVRPSLVREKIRRLELMVGAERRQGRRNPVRVFATSEQHRLEKELAAQAELAYRRLIADWKPQRRKGAGAAPGRASSAARQGTAPHPAL

SEQ ID NO: 114433 - protein, 338 aa, unidentified
MPTYAGIDLHSSNNFIGVIDANDKRLYEGRHENRLEHVLKALAPFKRTLKGIVVESTYNWYWLVDGLQEHGFKVHLANPSAIKTYEGLKHTDDRWDSFWLAHLLRLGILPVGYIYPKEQRPIRDLLRRRLMFVRQRTAQILSLQSMISRNRGLDFSGNSIKVFDADLIDRLFDGHYHRFTAKRNVSTIHFLGGIIKEIETEVRSQIQLREDFQMLLTTPGIGLILGLTIMLEVGDIARFAKVGDYSSYCRCVGSKRVTNNRKKGEGNQKNGNRYLAWAYVEAANHAIRVCQKAQRFFQRKMAKNNRTLAIKALANKLSKANYFMMRDQVPYDAEKLFG

SEQ ID NO: 114434 - protein, 418 aa, unidentified
MINKDANQFERVIGLDSHPDSFTAAVLRGQTPAQALTEKVFNKVSMSQLQSWAKKHTTDQDLIVLEASGNSFQVARSLAAIERRVLVLESCQMGKLKEAHASNDKISAVRIGKAYLAGTAKTVWVPDTRTQERRDWFHAYRKATKRLTQMRSRLLSYLSDNGVRFKKGTPLTQPDDAEAQLRKAKEWSVRQWAVLESMLKELRHAEQQRKYWRSLIAQEVLADPLLLSLVRLCGVKEVIAFALGALIGDINRFARPGSLVKYIGLNPAFDDSGQGKWSGGIGVHGRKDLRGLLIQGAQAILRSKDPLAQWGRRLMARKSSLKLAVAAIARRLTVAIWYLLKGQWTRLEEVDHKLTAKLGTILAGMRKEAINKTGKTREALRQDCCQLLKAGRTYLLDSNKKFTPKAQPDSLAAEYGLR

SEQ ID NO: 114435 - protein, 346 aa, unidentified
MEHVAIDLGGRESQVCVRATDGSVLEERLVATKGLGKYLSSRPASRVILETCAEAFAVADEVLAAGHEVRVVPSLLVRQLGVGARGVKNDRSDARALSLASSRLDLPSVHIPSATARYARSLSAAREAVIESRTRLINSSRGWMRTELLQPRKGGTETFTRRVRELLESSPRGTPAFIEPLLSAIDGLSEQILELDKQLETLAENNPVCRRLMSAPIGPVTAVRFVAAVDEVARFGSAHAVESYLGMTTGEHKSSGRGHRTGITKAGPAAVRRALVQACWVAWRGRTKEPLVLWAKNVAERRGARIAIVAMARKLIGILYAMWRDGTTYDPFFEDKRAHTAKRAAA

SEQ ID NO: 114436 - protein, 412 aa, unidentified
MQAIIERCCGLDVHQETVVACLLVGAPGAQPTKEVRTFRTVTRDLEALRDWLLEAGVTHVGMESTGVYWRPVYAVLEGHFELIVGNARHIRNVPGRKTDVKDSEWIADLIRHGLIARSYVPPRPLRELRELLRYRRKLVESQAAERNRLLKLLETANIKLASVASDVFGVSGRAMLRALIAGETSVEAMADLARGQLRRKRADLILALDGRLEEHHRFLLAMQLRRLEAIEADIAALDLRIGERLEPYSAPHALLMQIPGVDWVVAAVLIAEIGVDMSVFLSVYHLSDWAGVCPGNHESAGRQMSGRARKGNIHLRTILVSAAISASRAKGAYLKDKFHRLKARRGGLRAALAIAHKILVSAYHMLAKNLPYRDLGEAYLDQIGQTRTVANLKRRLERLGYRVILEPNAQAT

SEQ ID NO: 114437 - protein, 343 aa, unidentified
MKVTAIGVDLAKNLIQLHGVDAQGKAALKKQLKRNQVLSFFANLSPCVIGMEACAGAHHWARKLESFGHRVKLMAPQFVKPYVKTNKNDAADAEAICEAVTRPSMRFVPTKNIEQQAVLALHRARQGFVKARTAQANQIRGLLAEYGIVIPQGLSHISKRVPMVVEDGESELPGVFRQLLQRLVEHLKEIDRQVLELEARIQLWHRQNEASRKLAQIPGIGPITASALVASIGDAKSFANGRQLAAWLGLVPRQHSSGGKQVLLGISKRGDVYLRTLLILGARAVLRILDQKTDCTQAWLKRLLARRNSNVAAVALANKNARIVWALLAHGREYDAAYAAALK

SEQ ID NO: 114438 - protein, 388 aa, unidentified
MIYAGIDVAKLNHFASAISSDGEVLVEPFKFTNDADGFQLLSSRLDSLPDDSLIIGLESTAHYGDNLVRYLVTNGHKVCVINPIQTASLRKNNIRKTKTDKVDTYIIAKTLMLQQSHRFITFDDLTLMDLKALGRFRQKSLKQRTRLKIQLKAYVDETFPELQYFFRSGLHQKAVYALLKEAPSAKDVASMHLTHLAHLLECTSHGHFKKDTASDLRVLARKSVGSSDSALSIQVVHAIEQIELLDSQIEHVEAEMTDIMKFHDSVIMTIPGIGYINGGMILGEIGDVHRFPGHKQLLAFAGLDPSVYQSGNFQAKRTRMSKRGSKVLRYALMNAAHNVVKNNSTFKAYYDAKMAEGRTHYNALGHCAGKLVRIIYKMLTDNVEFNLE

SEQ ID NO: 114439 - protein, 396 aa, unidentified
MNGPIISFDVSKGSSHMQGFLDHGKPAGKATVIRHDLKDFAKIDALRGKIREETGSNPVAVYEYTGVYSHTLERYLDSIGMRRYGISPLESAKVRKAMIRPTKNDSLDCRTIAEVYYLRTLREGRSDDEIHVSLRDMGRFYHYLLEVKIVEKGRYYRCLDDVWPCFDKVIEPNSPKSLAIISHYGHPSKIRSKEQVKNFLMKLPRQGRVSTDELAEKIAAYAKTHVSGASPDSYKVKEVKMMSARVKGIINESERVMDSMISKAENLPEFALLKTIPGIADVTATRLIAEIGDINAYPKADSLIAYAGLDPAVMQSGQMTGEHMHITKKGNPHLRATLYVAVINMIMSKAENMITRYVLKKKNSGPSYKAAVIAGCSKLLRLIHAMLRNGTCYSDK

SEQ ID NO: 114440 - protein, 349 aa, unidentified
MTMIGGLDVHRQQITFDYVDSDGLVRWGQVRPATRKTLRGWLAEHCPDGDAEFALEGCTGWRYVVEELRAAGVGAHLGDPAEIAVLLGPKKRAKTDRADARLLRSLLLQGRFPESWIPPAHVVEIRTLGRLYCTLMDERRAWQQRIHAQLFHQGCPPITALLSTAGRDALTRAELSAAGRQYVDTVLRRIDELSAEIEPLRAQLINFARRQRGCQALQARHYGVGWLCAVIIWAEIGDVRRFSSSDQLVRFAGLDITVYSSAGKCSPGHLSRQGSPELRWAAFEAAKCAARRGSPDYAYYHRVAARPGHGKDPTLAVERKLLRRCYHSLRELGDAALAPPVTQAKEVAA

SEQ ID NO: 114441 - protein, 335 aa, unidentified
MTYLGIDISKSTFVVAYPKEKGYTIREFKNTPAGIHSFMHTLNKDEHHCIMEATGNYGVTLLYMLDKGGYRVSLINPLKTHNFAKTELSVTKTDAEDAKLLSRYGQEKQPPVYKMPTETILILKQKRTVLRQLKKQHTMLTNMQQSLDVLPVQDQLSKNAVKKVIISIEKQIRALEEDMTNITKKEYKHQLELLTSIKGINNKIASALITATGGFTYFDNAKQFSRYLGLCPTIIQSGSSVNVKGHINRNGDSYLRSQLFISAMPTMRFNKACRELYERLRANGKSGKVALIAVANKLIRQAFAVIKSGSPYIDGFVSQPPLLKPTTKAIYTSSL

SEQ ID NO: 114442 - protein, 455 aa, unidentified
MYRIAGIDVHKRLLVVVIAELRADGVVILERRKFLATPEQMRKLAECLLEWEVEEVVMESTAQYWQPIWGMLEEVWQLARRQRTGAGPKAGKLYLAQAQSNKGRRGRKNDYEDAERLVKRLEANELVLSYVPEPEQRLWRAVSRRKIQLNRDRSRVQNQLECVLEQAHIKLSSVISDLLGVSAQRILRAIAEGGSDPVVLAGMVEKNVKATPEELADALSAVRRCRTEYRKLIQMMLDHVKLLDEQMEQLILQAAKLMKPYEDAVQRLAETPGLGVDSGLQIVAEVGPRAEVFPRPGNLCSWVGSIPGEQISAERNASSKSPKGNRQMRRILTEAVQAAVKQKGNIFEVKFRKFITHMDYQEAIWCVVHFMCKIVWKILHDGVRYQERGPAVDAKNAHRRNQKMARHLKAVGYNVLPPVAPMPSSFLHGGRLLSDSCLATGFYRIGANRRLPTFN

SEQ ID NO: 114443 - protein, 307 aa, unidentified
MFIGIDVAKDRLDIHVRPGGDAFSVPRDDEGVASLAKRWAKDSPILIVLEATGGFETIVAAGLAAAGLPVAVVNPRQIRDFARATARLAKTDTLDAAVIAHFAEAVKPVARPLADPQTRLLGELMARRRQLIEMIVAEGNRRRQLTAKRALKSVDRVLAILKAQLTAIDHDIDTSIRGTPAWRETENLLTSVPSVGPKIARTLIAELPELGTLDRHQAASLVGVAPFNRDSGTLRGRRTIAGGRPVVRAALYMAVLVAIRRNLPLAQTYHRLKSAGKPAKVAIVACMRKLIIILNAILRDKKPWQPA

SEQ ID NO: 114444 - protein, 377 aa, unidentified
MQEMYGLLPLTGDLRYKVKSIHSNQLLPGVHTMEQCNVIAIDLAKDIFQICIMTTNGKIIVNKAMNRAKLKEWLAKQKLSLVAMESCGGAHYWARFAQSLGHKIIVIPPKQVKPFRTGQKTDANDAVAIAVASRAANIKPARVLSIEQQALQSIEKMRSLIDKQKLQLSNQARGLLLEFGIVINKSIKSFKERIPEILEDAENDLTFPMRKGLLQMWELYSRLEDDFDEINNELIQLTAQDSDCQKLMKLEGVGPITAVRLKIQLGNGEHFNSGRQVAACTGLTPKQHSSGGKVKLGSVGKGSCDKPLRSCIFLGARAVVSKLKNRPAKTEKERWLKALIERRGVNCASMALANKTARTAYALLKNNTDYKPVLIAA

SEQ ID NO: 114445 - protein, 388 aa, unidentified
MQTAADRPEAPNAIRSDLAAIFVSLELSRSTWLITSLSPDGGEKMSKHVVRGGDVAGLLERFAQLQKKARARTGKVFHFVVIQEAGLDGFWIDRVLRKEGIESHVVDPASIATSRRRRRAKTDRIDGEALVRALLAYKRGEPRVCAMVKAPTPEEEDRRRLCRERKVLIVERVRHVNRVKGLLFSQGISGYKPLRRDRQERLDTLQTGDGRLLPDHLKAQVRRELDRLELLLEQIKAVEAERDALLAVQQGAAPAPATMLLNIKGIGPEFAAILWSEGLFRHFDNRRQVASYAGLAPTPWQSGSVDREQGVSKAGNPRLRTTLIQLAWLWLRNQPQSALALWFKDRVSRNGGRLKKTTVVALARKLLIALWKYVTAGVVIEGAIVKSA

SEQ ID NO: 114446 - protein, 410 aa, unidentified
MLFVGDDWAEDHHDVYLMDDAGAALVARRLPEGLVGIGQLHDLIAAHADDPGEVVIGIEKDHGLWVGALAASGYRVYAINPMAVARYRDRHRVSGAKSDAADAKLLADLVRTDRHIHRPLDGDSAQAEAIKVLARAHQNLIWTRARQVATLRAGLLEYYPVALQAFPNLGDRDRDRDSLAVLGRAPTPDQGARLSVSKIGAALKAGGRKRNVDERAREIQAVLRSEQLTAPEVVATAYGATTRAAVNILLALTDQIGELETELAQYFRTHPDADIYLSQPGFGVILSARVLGEFGDDPNRFTDAKCRKNYAGTSPLTVASGRKHAVMARYVRNPRLYDALDRWAFATLKCSPGARAYYDQHRAAGDTHHQALRALANRLVGILHGCLRHHTAYNEDTAWAHRTPATAAAA

SEQ ID NO: 114447 - protein, 327 aa, unidentified
MIQHTLGIDISKDTFDVTLLVDGISQHHQFENCSIGYKHLSVWLRKNQAVQIHACMEATGQYGEKLAEYLYQQGQTVSVVNPHRIKAYANSKLRRNKTDKADSELIAQYCSREIPGKWSPPSASFRDLQALVRRLDDLQNNYQQESNRLQSGTTTLEVVEDLKDHLSYLQEKIAHIKQAIQEHIDANPELKRRQSLLVSIPGIGALTAAKVLGEVRDICEFNSSRQLAAYAGVTSRNFYSGTSVHKKSRISKMGNTNLRKALYMSAISAKKHNPIVRPFCQRLSASGKKPKEVICASIHKLLHLIYGILKSGVPFDPNFLIKRGFAS

SEQ ID NO: 114448 - protein, 358 aa, unidentified
MAVTEGTRRIVGGVDTHKDLHVAAVVDEQDRVMETRSFATTRQGYRQMLAWMRSCGELQRIGIESTGSYGAGLLRFLQQAGIAVLEVTTFDKQDRRRRGKNDDLDAQNAAHAAFAGQRTVTPRSRDGMIESLRILMACRKTAVSARRVALQMIHNTIVCAPDGLRDQLRSLTRMQLVRTLASWRPDLTAYRDLDSAYRIGLKSLARRYLELHDEIADLDAMIAAIVDELAPNLVARNSIGHIGAAQLLLTAGDNPERLRSEASFASLCGVSPVPASSGKTVRHRLNRGGDRAANSALHIIAIGRLRTDQRTKDYVARRIAEGHSKLDAIRALKRYLAREVFTLITQRRREINATRIAA

SEQ ID NO: 114449 - protein, 420 aa, unidentified
MSFKIIRKNCCGLDVHKTWIYACIGIADSHDRVEYKQARFSSFTKGLNELCDWLAKYNCTDICMESTGKYWIPVFNILEKHNLWVTLSHPKYTKPQTGNKTDRKDAKWICDLYMCGMVKPSFIPPADIRQLRDLVRYRFKLTCMITGEKNRAHNCLTVSNLKLDDVFSDIFGKSSRSITEQILQHPGEFFDVTPFVDDRCKTPIEEIQAAVDGAISPEQAVKLRQCLEHIDELEKHKSEIEREIFRLSDKYEVALNLIRTVPGFDKNPLTAIQVLSEIGSDMSVFPTAKNLVSWAGCCPRNDKSDRKIKSTRISRAGTYFKPVLVQIANALIKSKKHPEFTNRYRRIKARRGHKKAIIAICRMILTAIWHILTDLKPYTPEGFLESRPVNEAKVLTASQALNLMRQRGYIIKDDMSPVMN

SEQ ID NO: 114450 - protein, 434 aa, unidentified
MESEFAAFVAIDWADQKHAWVLQLPGSSDRGNGTIDHTPEAIDVWAAELRLRFGGQRIAVALEQSRGPLVFMLTKYEHLVIFPVHPTVLVNYRKSFRPSGAKDDPSDAGLLLDVLMLHRDKLRQLDPDTSETRTLQFLVEERRKLVHEKTRYSNRVTAHLKMYFPQVLAWFDEIGSNIAAEFLERWSSLEKLQRARPATIERFFIDHNSRDSERIAERLEQIRRAVPATTDTAVVMSCSAAIVVWAGLLKQVLAAIATYDENIDELARAHPDYALMKSFPGAGPALTPRLIAAMGSRRDRYQGAYELQCYSGIAPVVASSGQQRWVHWRWACPKFLRQTFHEWALHSIAYSQWAREYYEQQRAKGKRRNTAIRSLAYKWIRILFRCWKERKPYDEIAYQHALAARRPKKHSAPQPVELGWKNVAGFSKLVVPGA

SEQ ID NO: 114451 - protein, 429 aa, unidentified
MNYTQNEKIEQVTDSTMVVGVDIGSQIHYARAFDNRGRELTKRVFSFHNDLEGFNSFNLWAETLKTENKKTAVLIGCEPTGHYWFAFAKYVNDHQKRLVMVNPFSVKKIKELDDNSPKKTDSKDPKTIAKLVVDGRYSIPYMPEGIYAEIRDLVYSRDRIMKQHNISANRIQRWLAIHFPEYLGLYTRFDAISGLAVLEKAPLPKDVIALGVNGIRKIWHDKKMRGRGVTEDRAKTLVEAAHNSVGLDGGIGTKSELYMLLEEHRLWTSQLEAVNKVLEEMILKVPHVEKLLAIKGVGSITIAGFIAEIGDIRRFDSPKQIQKYAGLELVENSSGKHKGRTRISKRGRRKLRKILYQVMVPLLARNKEFRGIYDYYVTRVKNPLKRRQAMVAVSCKLIRVFYAVLTKGVEYDRFKMMSDIHRKSDIIAA

SEQ ID NO: 114452 - protein, 341 aa, unidentified
MKKSLFIGIDFSKKTFDVSVVHQNNLQSVDYQQFENDKEGCVSMLKWVKTLTQEPLEHLMFCGEHTGLYSICLSEFLVQKGLYLWLENPLQIKQSIGIKRDKSDKVDSREIAFYAYRFQDKSISYQLPEKSLKSLELLLSYRERLLSNKHSLLVSSTEIRGVMQRNSIARFIYEQSRQDIERINKKIKEIERKMLEEIARDEKLHENYELVSSIKGVALINTVAILVATQNFTRFENSRQFACYSGMAPFGKQSGTSVNSKPRVSNLANKKIKSLLTQAARCAINYDPNIRQYYERKRLEGKDDWLIINNIRNKMIHRIFAIVRNKQLYQVEYKNHLDKVA

SEQ ID NO: 114453 - protein, 356 aa, unidentified
MNEGSCVGLDVHARSVVAGVIDVGSGEVRSLRVPPGSEGTVAWLKTLPSPVRVVYEAGPTGYGLARACADAGISCVVAAPSKIRPAADRVKTDRRDAERLARLLRLGEITAVRVPGPDEEAARDLVRAREDARGDLMRARHRLSKLLLRHGAVYEATAWTRAHDAWLRKQRFQGGPLAIVFDECYSRMIDAKTRRDTLDKAITELAASEPYVDVVERLVCLRGVSTLTAFALTVELGDWNRFRPESLGPFLGLTPSENSSGQRRRQGGITKTGNTHARRLLIEAAWHQRSAPRLSITLERRRTGKSLAVRAQADSSARRLHGRWNALEARGKPRLIVVVAVARELAGHCWALATME

SEQ ID NO: 114454 - protein, 386 aa, unidentified
MQKLNDLSRSLTPLEPDGTLIAVIEMSQSSWLVAGIVPGVERQPLKKLAVDESALLKLLHRWREEAEKAGRRIERIAVAFEAGRDGFWLARWLRARSIEAHVIHASSVAVSREHRRAKTDRLDTELLKRAFLGWLRGERDHCKMVAIPTTKDEDAKRPNRERESLVGEQTRIVNRMKAALIRLGIRGFNPKLKKAAGRLEDLRTPEDEPIPPNTLAELRRDMERRRLVSDQIRQIEEARLDRLKQAPGDGPHAMVRLLARVIGVGIETADMLVQEVLSRNMRDRRAIARYAGLTGSPDESGTKRREKGLARSGNARVRRGMIQLAWRFLMFQKESALAQWFRARTETARGTRKTMIVALARKLLIALWRLVREGVVPDGVVLRPAQ

SEQ ID NO: 114455 - protein, 347 aa, unidentified
MRFYTKQHKYYCGIDLHTKKMYVCILDGEGQIRLHQNIKTEPESLLRILTPFREDVVVAVECMFTWYWIADLCIEENISFVLGHALYMKAIHGGKAKNDKIDSHKIATLLRGGMLPQAYVYPVKMRATRDLLRRRNHFMRKRAELFAHIQNTRSQYNLPDPLGCIAKPQNREGIVQRFDDPSVQKSMAANLEMIKAYDHTLTQLEHDIIASAKEHDLRSYALLQTIPGVGRILALVILYEIESIQRFPSVQDFVSYSRLVKCIKESNGKSYGPSGKKIGNAHLKWAFSEAAVLFLKGNEPGKRYLERLAHKHGKAKALSILAHKLGRAAYFMLKNKEAFNQKQFLNL

SEQ ID NO: 114456 - protein, 338 aa, unidentified
MKTHVGVDLHQRFCYLTAVDASGKMRQQGQVVNEGEALRAWLRQLPGPRQVVVEASGFWPAFARAVAPEQERLVMVHPQRVKAIASAKLKNDRVDSETLAHLSRCDLLPEAWMADEATQQLRLRVRLRITLGRQRARAKNQLQAVLHQEGFKKPVTDVFGKRGRAWLAELELSAAGRLVVDTWLREVDHLDVELAAQTRELERLARADARACCLRTMPGIGAYAAMVILAELGDVERFGSKRALASYAGLTPVVRESAGKRKRGGITHQGSNTLRWMMLQVAQVAARCSPGARSYYAGLRARKPAQVAKIALARKLLTVVWALLRHGECFDEESFARG

SEQ ID NO: 114457 - protein, 393 aa, unidentified
MSMYFIGIDISKYKHDCCIISAADQKVVSKVTIKNNKAGFNELLTIIHSLANPADIRIGFESTAHYALNLELFLENSLLTFMEVNPVLISEYKKSKTLRRTKTDSVDCESIARWLMTVEYKPHSKGFYHAYSLKSLTRLRDKLIRQRSFYLIKITNVLDHTFPEFKPFFNERLSKTALYLLENYGSAEKMARMNSASYEKLRSLSRGKFSPQQFLRLKELAANTVGVNNSIFDVELNSLLSLYKSLVKEINTIEKEINKLIEEVHPHYMSVPGIGPLSAAVIYSEYGDISNFTNPGQMLAFAGIEPGINESGTESHGGKMVKRGSSQLRYTLINCCLPLIRFDMTFATYYAKKRGEGKPHRVAITHVAKKLLESSTHWRGKISTLMHRNFVNL

SEQ ID NO: 114458 - protein, 335 aa, unidentified
MHYLYYVGLDVSKETFDASLVAFEDANEMAHRKFANSRKGICSCLHWVEKRHGIRLDDVIFCAEDMGSYISEMAVCASDRTLNFNFSLISPLVIKYSMGIARGKTDRVDARRIAEYAITHYRKIALYLPAEKELCQLRTWLILRAHLAKQRVAKLVLLEKLDYKEKFADVSIQRSMLQEEIAYAETHMKTIEREMKELIAADSNICRNYKLLTSIKGVGPITAIVMLCSTLNFTKITDHRKFACYCGLAPFEHSSGTSVRGGCHTSSMANRDIKVQLNRSALIAIRCDPQLKAYYERKVAEGKHKFSVLNAVRAKIAARCFAVVRRGTPYVALQI

SEQ ID NO: 114459 - protein, 354 aa, unidentified
MIIIGADYHPSFQQIAFVDTNTGEVQERRLEHPEEAEKFYRDLGAQGSSVRIGMEASGHARWFERLLSELKFELWIGDAAKIRAKRVRKQKTDRQDAELILKLMLKDDFPQIWMPSGENRDLRQLLWHRHRMVQARTRIMNQLQAVAINEGLLCKKRLWRETGRKQLESFPLAPWASRRRQDLLELLDRLTPTIAKLTQAIEREVENSPEAQRLQTHPGVGPLTALAFVLILGKADRFQCGKQIASYLGLVPLEDSSGKRRRLGHITKQGNSLMRFLLVEAAQVTVRSDPEWRSKYFHLAMRRGRKIAKVAMARRLAVRMYWMMRKGWDYEQLNKFGSHAGQPGNRHGVQQNTE

SEQ ID NO: 114460 - protein, 401 aa, unidentified
MNAVGIDVSKGKSMVCVMRPFGEVVLEPFEVLHTAQNLRDLAEKLKALDGETRVVLESTGNYHKPVAFVLHDAGLFVSVVNPVLIHDYDNNSLRRVKTDRKDAVKIANYTLDKWTRLRQYLPEDDTRLALKNCYRQYQQAVAVRTMLKNNLISSLDLTFPDANKLFSSPAKSNGCEKWVDFIGDFWHSECVSSLSSDAFAKKYLKWCQKHGYNFTRSKSDTIYACAVNAASLPKSPTSKLLIQQQVAQLKAVSQSVAAFQQEMLRLSQQLPEFDTVMEMYGVGPSLGPQLMAEIGDIRRFSSKKLLIAFAGIEPQPNDSGKIVGNDSGISKVGSAVLRRTLFLIMTVILKTQPQDEPVFQFMNKKRSEGKPYKVYMMASANKFLRIYYARVKAVMDSKHSK

SEQ ID NO: 114461 - protein, 400 aa, unidentified
MRVIGMDIHRSFAQVAVLENGEITRQLRVDLLHGPVTEFAQTLSHEDDVVLEATGNSAAVERLIRPHVRRVVVANSRLVRAIAYARVKTDKIDAAILAKLHAAGFLPEVWVADDTTLSRRRQVAERMGVLEQLVRTKGRIQAILHSNLIPKYKGHLFGKAGRKWLDGLPLPDGERALLGRLMDELERVSAQLAELDQALAAKALDDPQAKRLMTIPGVSYVVASTVLASIGDVSRFETPQKLSSYFGLTPKVRQSGDGPARHGRISKQGNSAARKMLVEAAWSAKTAPGPLRAFFTRVQKKRGSGAAAVATARKLAVMIWHVLTGDQEYAFARPAFTAMKLRKVALKAGAPREYGKAGPGRDYWIAEIRHREMDYVERAERAYERMVAAWREKPPKPAPA

SEQ ID NO: 114462 - protein, 407 aa, unidentified
MGMEPVIIGVDPHKLSATIEVVDQHERRLGSGRFTTDQAGYAAMRAYAKQWPERVWAVEGANGAGRPLAQRLLEAGEPVVDVPAKLAARVRLFDTGHNRKTDALDAHSVAVVAVRTSNLRVLKVDGELEALRILADRREALTRRRVQTVCRLQALLAELLPGQAKRDITTGQAKAMLATVRPRDIAGETRRRIAVEELTELIAVEQKMKKASAELKAMVLARESRLMDIHGVGAVVAARILADVGDVARFADRNRFASWTGTAPLDASSGEQNRHRLTSRESSGQPHDPHRCCHSAAARHRGTCLLPAQESSREEAPRSVPLPQAADLRRYLQTTRRRRPSSPWGGPGRALRGVSRIQRGRPTPAHRHFGSATPGPEFPTLRRTTRNQEEAAVRTPRQHRLTTEGSR

SEQ ID NO: 114463 - protein, 485 aa, unidentified
MKEATLIRSVGIDLSRTGSHQVRCLDEQAKPCDSFSFDSTLEGLEKFEKRVFSNSDTPTIIFEPTGLAWIPMAVYLRARHPECQMVKARLQKVAALRRYLRSYTKSDRVDGVTLAKMPFIDAEQLDEAYLPPAEYHSLQRLTRQRERLMKSITIRKNLIGSIVNGYLPGLRKAFSDEWSDRARLFYRQRLNPFTVVRDGKSALETFLVSVKAKGAQTESNRVYQACQKLAEFYEKSKAAGMINEDFFDDLQDEIACELRLMETEEAEVERVSVRIEELYRHLHPSDYLRSIPGIGVRTAQVFLAIIGDPHRFRSQSAFANWTGVVPGARQSADTEGKGLRMTKAGPSMMKRALFQAGDIARRYDPQLAHLYYREMVHHGKTHLQAMGAVMSHLGARIMAVLREGRPYELRDSRGKLLTKKEAMELIRSAYKVPEETRQARRRRKPNEGRLTSRRTREAAKAPQSGPLIPPPKTVYCGEELQSIAN

SEQ ID NO: 114464 - protein, 398 aa, unidentified
MTRKNTLKSLPTDTEFRVVGLDLAKSDVSVAAIPVDDNTPSLVDRMTYADLLDWAGKISPTLFAMEPCNGYSLLCLQLENLGHEIKVISGWTVSMWINTHLSGQKTDLNDAIALARLAVSDAELTPIRHKSITEIRIQTVQAVRQQLMSQRSRSIVSFKALAQQWGIPCAAGHRNLKKLRESIEAKVDLITRPVANAMLFLLDAVKSLDRQIGQLNQTLQELVMSDERGRLLQSVLGVGTQISARVITVVGNVERFNSPRSLVAYVGVAPRNFITGHKNLTKKKHGNCPDLSHKGQGKIRRRGDKLLRSLFIQGAACLYMQFCKDQLPECLLKRWILKQLAIQKPYGKLIVSLAAKLIRIVWAVLTYGEKFNIQKAGMTRSMWSEMALETPLNKEVPA

SEQ ID NO: 114465 - protein, 366 aa, unidentified
MKKVSTAAAKQSKNFSQQKLTIGLDLGDRNSWYCVVDEAGQIQLEQRVRTTAKALQEVFGTMPRSRIALEIGTHSPWISRMLSDLGHEVIVANARKVRLIGESRKKDDRLDAQTLARLARIDPELLYPVKHRSAQAQADLTVIRARAGLVRARTGLVNSARGLAKSYGERLRGCNVRNMNPEKAESLSPELQRALEPLLSAIAELSQRICEYNERIEALAQQSYPQVELLKQIKGVGTLIALTFLLTLEDPHRFGKSRDVGGYLGLQPGRRNSGRSEPQMHISKEGDPYLRTLLVQGAQHILGPFGVDCDLRRWGLKLAERGGRSGKKRAIVATARKLAVLLHHLWVSGEVYDPLHNSGMTVAAAA

SEQ ID NO: 114466 - protein, 413 aa, unidentified
MIVVKFLRVLSLSKFILKLGDFIFYIGVDIAKNNHEASIIDSNGKLVSESFSFSNSIKGLEKFQKYISSFSIDSNNCIIGMEATGHYWLSVYSFLIELGFFCVVINPIQSDAFRKMYIRQTKNDSVDSFVIAQILRFGEFSVSHFSDEDTFALRNLSRFRFALVDEASDWKRKLVAILDQVFPEYSSLFSNVFGVASKELLSKYPLPEDMISIPADELAMLLSKCSKGHFGIDKAKEIQEKASNSFGVKFALKSFSFQIKQIIAQISFLEDQIADIEDEISSMINSLCPVITTITGIGDVLGAAIFSEIGDISRFERANQLVAYAGLDVAVKQSGNFNATDTKISKRGSPYLRRAIWLAASVAAFKDPALSVYYQKLRQRGKAHGTAIGAVARKLTNIIFAVLRDNKAYIPNI

SEQ ID NO: 114467 - protein, 347 aa, unidentified
MTLYCGVDFHSRRQTVCYCNTEDGEVKVKDLHHYEDDVRSFYEQFKNEQIIVGYETSGYARWFETMLFELGIEVWVGDAAEISRLGKRRQKNDRRDAEHILDLMLKGEFPKLYRMSEKSQEIVRLLRHRQKLVKHSVMIKNSLRRILIETGLIFKASLSSQKAKQKFRELKLPLLLANERDRWLELLIEIEKQIAGLEQKLKAESQTDERVQRLLTHPGVGLLTSLCIVNTLGDVRRFATTRKVAAYAGLEPMEHSSGEKRRYGAISKAGNRLLRFLLGEAAHIATRTDDELKQFFGRLKNKCGTAKAIVAIARKLLIRCFIMLRDEIDYAEFRQRGIEARSARVYT

SEQ ID NO: 114468 - protein, 423 aa, unidentified
MTHPKTLFTYVGVDSHRATHTAVFTDCFFEKLGEITFRNLPSDYPAFLREAEKFKADGTELYFGLEDISMYGRTLAVFLTSNDQKVKHVSSLLVARERKNQNVIRKTDSVDAECAARVLLSKFGGLPDAAPDDRYFLLKTMVSRRGFIVKNNTALKNHLHSLLTQHYPNYCDFFKNIDGVSSLAFFTRYPSPANLAGVTVAELTVFFKQASRGKVGEGRARLILESLQDTAVPFQEIRDEAVRSTIRQIEANMTEIERLESALAKFLKQFECTLTSMNGIDIVSAAQILSCIGDIRKFSTPAKLARYCGVAPVTYASGQKDLQFANQRGNRELNSVFHLLAVRLIATVGPANKILNPFFKDYYERKISEGKTKRQALKCVERRLVNIIWTMLTNHEEYVNPPMPDNTKRAKQGLKQAADCGII

SEQ ID NO: 114469 - protein, 317 aa, unidentified
MDVATTADRFVGIDVSKARVDVHVRPDSTAFGCATDPEGLAVLVDRLTPLSPCLVVLEASGGYEGVVAAALAQAGLPVAIVNPRQVRKFAGAVGRLAKTDTIDAAVIAHFAQAVRPTVRPLPDELAVRLAELMARRRQLVVMINAEKQRLARARDRIAQRSFKAVLKRLEAERARIDKAIDKLIEVSPLWCAQQDLLQSVPDIGAVVARTLIAELPELGRVDRHQIAALAGVAPMNRDSGRYRGKRKIQGGRVEVRAPLYMACLVAIRHNPALKSFYRRLRDAGKPARLALVAAMRKLLTILNAILRDQQPWANAQN

SEQ ID NO: 114470 - protein, 338 aa, unidentified
MKLYSGIDLHSSNSFVGVINEQDQRLFRRKLPNDLSTILQALDPFKESLEGVVIESTFNWYWLVDGLMENGYKVHLANPSAIKQYEGLKHTDDNWDSFWLAHLLRLGILPEGYIYPKETRSVRDFLRRRLIYVKHKTTHILSLQSLFNRALGIRISSRDIYKLKEENVKEIFDDPNLVTIVKHSLGTIHFLKRKVKEIEKDILGQVKLRKEFILLKTIPGIGDILALTIMLEVGDITRFKKVGNYSSYCRCVKTNRLSNNKSKGKGNSKNGNKYLSWAFVEAAHFAKRFCPEAEKFYHRKIAKTKEVVARKALANKIARASFYIMRDQVAFDVKKLFA

SEQ ID NO: 114471 - protein, 448 aa, unidentified
MVVRDPALGVPSINPKGGDTMKKRMKFDHLSTLCVGLDIGSRSNFITALNFDSDRLINMRPVFNAANGVETMEAMILAVLEGSPQFRYLLVAMESTSFYGVHVANYLSTSDLLKPYGVKVFCLNPKTVANYKKTFTGLGKNDGIDSFIVADYVRAGLLEIESWRGSQYLALQRLTRQRRHISEAIAREKNYVLNNIFLKFSEFALLSGEDSPVSNKFSTTAEAVLTEFKTTEDIANAPLDELIDFISTSGHGRFSDPGQVASLLQKAARNSYRLDKALYEPITTSIACSFNCIRAFEKEQKALDKAIAATVAGLNPTEYQILKSIPGIGPVYAAGILAEIGSVRCFNSNNALAKYSGIIWRDNQSGEFDSEDTPMMKAGNRYLRYYLIQAAGSVIRYCPEYEDYYNKKFAEVPRHQHKRALALTARKLIRLIFGLLDKNQLYSPAKGR

SEQ ID NO: 114472 - protein, 338 aa, unidentified
MKLYGAIDLHSNNSVLMLIDRQDKVRFQGRLPNEASYILETLRPYRPQLQGLAVESTFNWYWLVDALQEAGYPVSLVNTAAVKQYEGLKFTDDASDARWLAHLLRLGILPQGYIYPKEERAVRDLLRKRAQMVRQRTTNLLSIGNLVQRNTGGKLAGGEIKQLDESAVDEMLPESDLGLAVKCNLRVMQCADAQVAVLERAVLERVKLKPAFKYLRTVPGIGQILALTIMLETGDIRRFGGVGNFASYCRCVDSKKLSNSKKKGEGNRKNGNRYLAWAYVEAANFAQRYDPSIRRFYQRKQAKTHPVVAIKTVAHKLARACYYIMRDQVPFDATKAFG

SEQ ID NO: 114473 - protein, 435 aa, unidentified
MEEVTDEPLYRDRVCGIDIGKAGLVATIRVPSDKDPARRAAETRSFGTTRRQVLALADWLRSWQVPAVVMEATGDYWKGPFYRLEAEGFECVLADARQVKNLPGRPKRDPSDSRWLAACLERGAVRPCFVATPEFRIIRLHTRYRRDLTGERTREKQRAEKVLESAAIKLSSVLTDLHGVTGRDIMDRLIAGERSPKVLAQLARAAARRKISQLEEAVEGAEFFTAGHAALLAVMLARIDRLSADIDGLSQVIEQLLAPYEDQLAQAESMPGWGRHAAQDVLAETGPDMSRFPTGAHLASWAGRAPLDHQSGTRAGRSTAKKGNRYLGAVTGETAVAAGRTQTREGARHRRLARRRGAAKACVATGNTQLRVYHKLLSSPGMRYADLGPDYYERRRDVRRQIAHHVGKLGALGFEVTLCRIPEPGPDRTGQIKPA

SEQ ID NO: 114474 - protein, 413 aa, unidentified
MALKIVYKICCGIDVHKNFVVACIASTNNQGVTTYKSHRFSTYTKGLKELLQWLLESDCKDVCMESTGKYWISVYNILEKDCSIVLAHPKYVKAIRGKKTDKKDAKWIADLFKHDLVTGSFMPPADIRQLRELMRYRHKLTCFMSSEKNRLQNCLTVSNIQLGNVATDTFGKSSKRILDKILENPLDTSFDIGPLIHGSMKDKIPELELAVDGYITPEQAGKLKIIKKHFEDLESRRTELEKLILALASPYQQKLDLILTAPSFKNIFSAITIISEVGVNMESFPSAKHLCSWAGLTPTNNESAGKKKSVRVSKAGCYIKPLLVQCANSVVKSEKHPEIRNRYLQLRKRRGHKKAIIAIARMLLTALYNMLKKNKPYNAELYRNSDIIPINREITVEQAIQLAKFQGYRIKSA

SEQ ID NO: 114475 - protein, 355 aa, unidentified
MNATTVAVDLAKSVFEVIAADARGKPIERARLTRAQFERWFDNRQVDLVVMEACGSAHHWARSLQARGIAVKLLPAQYVRAYVKRNKTDAADAMALLEAARACDIKPVAVKSIDQQALQALHRTREAWKSTRTRRINTLRGFCREFGLVVPEGAVTGIAQIARYLADERSALPAMLRGSMRLMLEEIRLMEARIGQLEQQLGEIALQSEACQALLSVPGIGLITSTAMVAAVGDPRSFDSGRRYASFLGLTPREYSSGNNRYLGRISKRGDRYIRMLLTHGARSVLRSGTVAKRMGRPVDRLKSWALAVQSRTNHNKAACALANKLARIAWAVWVKHEKYRSENVPVAATPAPSA

SEQ ID NO: 114476 - protein, 343 aa, unidentified
MITIGIDPHKSSLTAVAVDAEGQRLAQRRFPVNAGTFTQLAKWSARWPQRRFAVEGANGLGRGIAQQLAAAGHVVLDVPATLAARARLLATGGGRKTDAADAASVAHVALYHQRLRQVLAEDQTTILRLLAERHDDLTHERTRILNRLHGVLRDLVPGGAPVGLSADKAAAILRAVRPSTATNACRRDLARELLNDLRRVDRQIKANESLQRDAVAATGSTLADVHGIAVVLSAKILGHVGDVTRFPTADHFASYTGTSPLDASSGNRNRHRLNTGGNRQLNTALHTIAVCQARDPGPGRIYYLRKLSEGKTPAEARRALKRRLANVIYRHIVKDQQRRPNST

SEQ ID NO: 114477 - protein, 419 aa, unidentified
MAKVHSIAQEAVLVAIDISKKRNDVLIQIPGSIRRRRLTVLNQRAEHDRFIDQLKSFERPVLAGFEATGNYHRALAWRLVDAGIETRLISSMALARQREAIHNGWDKNDPKDAQVILHMLATGVSQTYQDPLAAGLADIQELSKTHEAVSRAKTQTIHRILTHYLPLYFPEIERFLNSSRRDWFFALLEKFPTPASITALSPEDFSMAVWDIVGKKTSKARLIADIYETAKESIRLPIPIDSKAIAMFRMVLAEARSLNRQRDAIEAEAEALLGGTRDYEALKQIPGIGPIISLTILAEAGDLRRFGHHRQFLKFCGLDLSTHQSGTFRGQTKLSKFGNARLRKALWMAGQVAIRQKENSFRDKYTRYIAKDPDNADLKRKALSAVTAKMARTAHAVIKSGKAYRPFYEGSVPGGRTSL

SEQ ID NO: 114478 - protein, 421 aa, unidentified
MRSNSPEVLELEVWIGLDWGDKNHAFALRDRSGHCEEGTLEHSAENLHRWLEELATRYGSRPVALAIEASRGGVIQALLQYSWLTIYPINPVTSARYRKAFKPSGAKDDVPDANVLLELVHFHAAKLQPLEPQDSATVQLTSLVEVRRGIVDRRTTVTNQLSSLLKTYYPQALQLLGELNTDLAVAFLRRWPDLISLKAAKPGTIKQFYYQHQVRSTELVDERLALIAKSRALTTDEARVSVAVLQLRELLDQVGVFQKHIPVFDAQIKTAFAAHPEAALFRDLPGAGPQLAPRLCVAFGTIRSMSSDSSSMQKRVGVAPVREKSGNQVWTHWRWQAPAFLRQSFVEWAGQTVRYSAWAKIYYERMIKKGKKHAVILRALAFKWIRVLWKCWMDQQPYDEARYLKQLLHRKSPNAVSAPNT

SEQ ID NO: 114479 - protein, 319 aa, unidentified
MDNLSHGRVIGIDVSRDWLDLHCLPDGHRCRVANDPAGHAAVADLARDRVAVVCFESTGGQEWQLWALLESEGVAARQVPPAQVKAFAQSRGTRAKTDRIDAELIARFFAFRPEAGRSLPAEKLRLLRALTTKRAQLVEMRKRLLAQIRAHQKLGTAAMFEDVDTELKQRIDSLIKELEDRITKAIASDDHLSETAIVLRSIPGIGPVASTMLIAEMPEIGTITGEEAAALTGLAPVAHDSGTLRGKRAIAGGRRALRHVMFQAALVAAHHNPSLRSFADRLRKAGKPHKVIITAVARKLVTIANALCKSRQKWTAATA

SEQ ID NO: 114480 - protein, 330 aa, unidentified
MKSWNVILGVDVSKLTLDICCAERNLHVKIDNCSKGFTVLKKWCKTNAIDLKETLIVMEFTGGYEYRFIQFCEALSISYCRIPGLEIKQSMGMTRGKSDQADAFRIGQYGEEKIKRMAPSKPLDKNILILKQLLSFRKRLVREKAGLESTVKERKHMYGAKKNDLVTHIAQAKIKANEKYILQVEQEIMEVIKSNEAMWLNYRIITSIKGIGPVNGWMTIAYTENFTSFTDARKYAVYVGVIPFEHTSGTSTKGRRRVSHLAHKELKQELNQAAKTAIMHDPELRTYAERKLKNKEYPLVLNNVKFKLILRMFSLVKRGEKYVENYKRAA

SEQ ID NO: 114481 - protein, 324 aa, unidentified
MLPCVGLDISKDNFHVELSVNEKLRHRRFANRKEGFVELCAWLAKHKIATVHACLEATGPYSEGVAMYLHQQGHTVSVVNPAQIKAFGQSELLRNKDDRPDAGLIRRFCEKQRPPAWNPPPPHLRELQALTRHLENLIETRRQQLNRLEAANTKGVVKSLRKLVTYLDAEIERTEKQIVDHIDNHPDLKQQCQLLESIPGIGKRTASKLLSEIEDISRYSSAREVAAYAGLTPKNNRSGTIRGKTRLSKTGNSRVRKALFLPAMVAKQYNPIVRAFCQRLARNGKSKMQIVGAAMRKLIHIAFGVLKTGKAFDPNHEVLLKSVS

SEQ ID NO: 114482 - protein, 401 aa, unidentified
MRIIALDIHRTFAQVVILEQGQLRQAGRVHLSHDKLLTFARTLTPEDEVVLEATGNSLAVARTLQPFVRRVIIANPLQVRAIAHAHVKTDKIDGAVLARIHACGFLPEVWIPDERTEALRRQVTRRTQIVRHRTRLKNTIHAILHAHLIPSCPSADLFGHKGRAWLAEQPLPADEQATIKRHLRELDRLAEDLAALDRQLAEVALADAQVGRLMTISGIDMPVAIGVMAAVGEIGRFASPRQLVSYFGLNPRVRQSGSAPARHGRISKRGRAQARAMLVEAAWAAARAPGPLRAFFLRIRARRGPAIAAVATARKLAVLIWHVLTKQADYLWARPALQAAKQRALQLRAGQPTQKGRRRGAAYAYNLKTIRDQERRAVEQAERAYERLVANWRPRRPPAAS

SEQ ID NO: 114483 - protein, 371 aa, unidentified
MNFIGIDLHTNRFTCCYRNELSSAENPRNGREIKTFDLTEHGLTDFYQTLTADTCVLIEATITTFSFARLIKDRVKEVIIANTYELKQISLARCNTDKIDADKLCRILKAQVLSGEQLISPVVLPPAEIQDLRSLFTTYRLYKKQNIQLKNRIHSLLKERLFGFTKEEIFSNKRRELIRKISPGTAMQFQVNQLLDRLERDEADVEELEKQVLLSAEPFMQEIEILTGMKGISVFIAIAIIADIIDVGRFRDSKAFTSYLRSAPKVSNSNTSVSNCGTNKKGRKLSATLLTQSLNHVLDASPKLRCWHDRLCEYKKPGLVRTGLRRRVFAEMFQMLKKREYHYGRDIAKHELKMSRYGNFLAKRKNPSEVA

SEQ ID NO: 114484 - protein, 343 aa, unidentified
MQAEYDGRQIVGIDLHRRRSVLVRMTETGERLGSTRIDNDAMTLMAEIAKAGEHPQVVLEATYGWYWAVDVLQEIGAEVHLAHPLGVKGFAYRRVKNDLRDAADLADLLRMGRLPEGWIAPPAVRELRELVRHRAKLVAWRSGLKASVHAVLAKQGLHLQGELFGVAGRQLLKKAPLDAAYRLRVNALLRLIDAVDFEIQAVSGPLRAALAGDPGFAAVQQVPGVGPVLAAIFVAEIGDVHRFASAAHLTSWAGLTPRHRESDTVVRRGPITKQGSTLVRWAAVEAAHGAGHAGWLSEKRAAIADRRGRNVATVAVARKLLTLVYYGLRDGHIRALAPVRAAA

SEQ ID NO: 114485 - protein, 345 aa, unidentified
MELHTIGIDLGKTVFHLVGMNLRGEAVVRKKLSRKQLLQFTANLHVDLIGMEACGGSHFLGRALREQGHEVRLMPAQYVKPYVKTNKSDFIDAEAIAEAVARPTMRFVPIKTDDQLDMQSLHRVRERWVMRRTAIVNQIRGLLLERGITLRKGRSHVDAALPGILEDADSKLSGALRVLLAQLKLELDQMAIRIDEADAVLNKTAHENEACQRLVKIPGIGPITATALIAAIGNGGAFRKGRQFAAWMGVVPREHSTGGKQKLLGISKHGNSYLRKLFIQGARAVLQQRTKQAPGLNEWLAQLAGRAHNNVVAVALANKLARIAWAVLAKEEQYHPPTLTSLEAA

SEQ ID NO: 114486 - protein, 430 aa, unidentified
MKSNTQNAKIEAITEKTLVLGIDIGSETHYARAFDHRGIGYSKKPFKFSNTEVGFVTFKEWILELKERHEKDKVVPGMEPTGHYWFNLGKFLQDNEMKPVLVNPHHVKKSKELDDNNPTKNDRKDPKVIAGLVREGRYMIPYLPDGVYADLRTASNLRFQLQAELTRIQNRISRWFNIYFPEYKTVYGKPDAKSGMLILKAAPLPEDILTLGIDGVNQIWRDAKMRAVGKARAKTLIEAAGHSVGSKEGAVSARMEIRMLLEDYESRNIRLQEVMTLIEELVNQIPMAEKLLEIKGVGIKTVSGFLAEVGDISRFNTPKELQKLAGLALVEKSSGKHKGKTTISRRGRKRLRYLLFEVAMSLVAKNPEFRELHNYYTTRRLNPLKKMQSLMAVAAKLIRVFYAILTKGVDYDPKKMVGDIRRPVVYLPAA

SEQ ID NO: 114487 - protein, 394 aa, unidentified
MIYVGIDVAKDKHDCIILNSNGKVVFDVFTIQNNIDGFEDLLFKIKTTEKYPDKVKVGLEATGHYSCNILGFLKNKGLSTIVINPLYTSLSRKSISLRKTKTDKVDARTIACMIMSDLNLKPYSDTLYLNEDLKSLTRYRFNKVAQRAKLKQSVSRLVNILFPELEKLVSTLHGKAVYELLSEFPSAQHIASANLKHLTNLLHTASKGRFQRASADQIRQAARKSIGSYLPAKSLELKHTIKLIRELNSEITEIEAEIKKIMDVIDSPIISIPGIGQNLGAVILAEIGDFSRFESPDKILAFAGCSPSTYQSGQLYSSHAKMEKRGSRYLRWALLNAAAYVCKWEPTFATYLAKKLAEGKHYYVALSHAAKKLVRVLYHLETTGKTYQPTSILS

SEQ ID NO: 114488 - protein, 341 aa, unidentified
MQITTIGLDIAKNVFQVHGIDAAEKVVVRKQLRRGQVLKFFAALPPCLIGMEACASAHYWARELTKLGHEVRLMPAKDVKAYVKRNKNDAADAEAICEAVRRPTMRFVQAKSAEQQGRLMQHRARDLLLRQRTQVINALRAHLAELGIVAAQGHEGLKQLLTIIADERDERLPIDARASLIVLAAQLQALHTMIGSIEKRLTVQHRANEASKRLQSIHGIGIIGASAIAATVTDPKAFRSGRDFAAWIGLVPREDSTGGKRKLGPISKQGDRYLRRILVVGAHSVLRRAKQNPEKYPWLTQLLARRPFKVVAVALANKMARIAWALLASGGHYRPRLGTAA

SEQ ID NO: 114489 - protein, 348 aa, unidentified
MTTIDYIGFDVHKKTISFCTKGQDGGILREGTIAARPADLNVWAQAQARPWIGALEATLFTGWIYDHLRPFAQELKVANPAMLKAIAASKKKNDRVDARKIADLLRCDLLPECYMAPSWMRELRRVLRYRNLVVRQATRMKNRIAGLLMETGTAYNKQRLHGKAYFSELLESLQAMPASVLQLLQLSRGQVELFESIQQRLMKELRTNARLRERVERLQSIPGVGEVLALTWVLEMGEVQRFSSIAQAVSYCGLSSAQRSSAGQEHRGPISKQRNKYLQTILIEAAKLAPRYNSQLAAAHERELGRGNRNRATLAVARKLVAYLMAVDKSDKAFAPRLSAVEESCPIG

SEQ ID NO: 114490 - protein, 320 aa, unidentified
MMAQNDLVVVGIDVAKDKVDACIRSLSQRRTFPSTVEGRRQLISWLRKHKVTKAVMEASGGYERDWAKALREADIEVRIVDPKRVRSFARSAGRLAKNDVIDAEMIAWFAETFGEAKGQAYDAAREKLVQIVHARQGLLDLQTSLQNRGEHAAPEVVQKMQGRLLKKIALELAGLEAAIAAMIKATPHFAELAEIIESVPGLGGITAAGLIAAMPELGQVSNKIAAALLGAAPYDDDSGRRRGERHIKGGRRRVRNLFYMACLGAATRHNPMLKAFYQRLLAKGKEKKVALVACMRKLIVILNTMIERRQKWNPTLYALS

SEQ ID NO: 114491 - protein, 494 aa, unidentified
MVGEDWAWLLLLGLLAGRRLVEFVVVDPDCLSGAGEPVGQHGGGGLPREPWIGAIEPERQTFNLPALPTTDTAGVRMGRDRRAVEVVHARCAGLDISKRDAKVCVRIAGAGRRKTVETVTTWGSMTSQILALRDHLIAGRITCAVMEATSDYWKPFYYLLEDAGFDVLLVNARHVKNLPGRKTDVADATWLAQLGAHGLVRASFVPPEPIRHLRDLTRARTAITRERSREVQRLEKLLEDAGIKLSAVASDILGVSGRAMLESLIAGNNDPAALADLAKRRLRSKIPALTEALTGRFTEHHAFLARVHLDLVDQHTAAINDITTRIEVTIKPFHWFRDLICTIPGISTLTADVIIAETGADMTRFPTAGHLASWAGTTPGNNESAGKVKTSQTRPGNPYLQGALGAAAMSCAQNPGTYLGARYRRIAQRRGPQKANVAIQHSMLIAIWHMGTNGCLYDDPGADYFNRLHPERAKKRAISQLEAMGYNVTLTHAS

SEQ ID NO: 114492 - protein, 367 aa, unidentified
MKKVSTVAPKARRKISQQKLTVGLDLGDRSSWYCVLDEAGSVLLEQRLSTTPKALREVFGGMPRSRIALETGMHSPWVSRLLSELGHEVIVAHARNVRLIGESRKKDDRLDAQTLARLARIDPELLSPVKHRSAKAQADLSVIRARAGLVRARTALVNTARGLAKSYGERLRGCNVRNMNPEKAEGLSPELQAALQPLLAALGSLSERIAEYNQRIEKLAQESYPQVALLKQVKGVGTLIALTFLLTLEDPHRFCKSRDVGCYLGLQPGRRNSGQNEPQLHISKEGDPYLRTLLVQGAHHILGPFGADSDLRRWGLKLAERGGKSGKKRAIIATARKLAVLLHHLWVSGEEYEPLHNSSQTTVAAAA

SEQ ID NO: 114493 - protein, 370 aa, unidentified
MKKNNTVAQSPKRASARKQGPITIGMDLGDKTSRYCVLAENGERLAEGSVATTRKAMAQKFAGMRRGRVAMEVGTHSPWLSRWLTSLGFETIVANARQVQLISASSRKNDRMDAHLLARLARVDPQLLRPIRHRSEQAQADLMTIRIRAALVEARTSLVNAARGFAKAQGDRLPACDADAMGVEKMEALPAGMRERLRPLLEQVESLTEKIKTLETKIEQIARTEYPETALLRQVSGVGTLIALTFVLTVEDRNRFQKSRDVGCYVGLRPRQSESGQSQPQLRITKEGDRYLRTLLVQGAHLILNRRGPDTDLKRWGLMLAERGGKNAKKRAIVAVARKLAVLLHRLWVTGEVYEPLRNSQAGQASKQAA

SEQ ID NO: 114494 - protein, 399 aa, unidentified
MSESTLIVAGADTHADTIHVAAVTMTGTALGDREFPTTPAGYTAAIKYLTSLGHVERIGVEGTASYGAGFSRAAIAADIEVVEVSRAIKSARRLKGKSDPLDAYSAARTALAGDRLATPKDHATTGLRALHIARRSAIKHRTAAINQIKAMLVSAPDVVREKYRALTTLRLIEAIAHCRPDAQADPCSQSVLVAANMLAQRVQFLETQAEALQERIDALVTDANPGLRAAYGVGADTAAQLLITAGANPHRLRSEAAFAALCGVAPVPASSGRTNRHRLSRGGDRAANNALFRIALVRMSRHKPTKHYVQRQIALGHTRMEILRKLQRAIAREIFKLLTRHVAVPEYADLRPARQAKNITVTAAANHFGVWPTVISRIERGLQRDDTFADTYRNWLNAA

SEQ ID NO: 114495 - protein, 394 aa, unidentified
MTVLSVHSFRQSMSETAGKDDPMTKSKQTTPVVGGVDTHKDLHVAAVVDDNNQVLGTHSFATTRQGYKLMLAWMRSFGDLQRIGVECTGSYGAGLLRYMQIAGVDVLEVTAPDKQDRRRRGKNDDFDAQSAAHAAFARRRTVTPRSRDGMVESLRVLKVCRNEEDEQTAWGAVCPTNAVQARRIALQIIQTTIVCAPDRLRDLLRSMTRMKLIRTLAAWRPDLTGYRDVEEAYKIALKSLARRYLELHDEVADLDDMIEVIVTDLAPELIARNGVGLNSAAQLLLTAGDNPERLRSEASFAALCGVSPVPASSGKTTRHRLNRGGDRAANSALHIIAIGRLRLDPKTQEYVARRIAQGHSKLEAIRCVKRYIAREVFNIIARRHKQINQAQIAA

SEQ ID NO: 114496 - protein, 442 aa, unidentified
MEILHSHVGGIDVHKKQVTVTARTPDPKRAARWETTRTFRTFYGDLLAMARWLVVERGVTHVAMESTGPYWWPVYSALREVGGPDLTIEVVNAAHVKAVPGRKTDVKDSQWLAQLMEVGLLRGSFLPPEEVRRMRDFTRYQTKLTEERSREKQRLLKMLEAAGIKLDNVASDTFGVSGRSMLDALVAGERDPVVLAGLARGVLRNKTDDLRLALAGRFTAHHGHLVALHLARIDHLDQMLTKVKDSIGRVGDKTAGGLVAPFAAQVELLTSIPGIGERVATVVISEIGVEMARFPTAKHLAAWAGLAPGNNESAGRRRSGRRRKGNAQVCSILVEAALAASRTTSRVGARFHRLHRRFGGRANPGAAKKAAFAVAHTLIKIIWSVLSTGEPYRDLGHDFYTRRVDPETQTRRLIAQLEALSGKKIVFLDDGDTPEDGQPRAA

SEQ ID NO: 114497 - protein, 328 aa, unidentified
MPMYQLGIDVSKNTLDLCLLREGIKGKIKTRKLKNTADAAKVVTEWLKRQSCELGEVHIIMEATGVYHEPLAYGLHFAGARISLANPHRTREFARGMNILTKNDKVDAWMLACYGSLKEPEAWTPPPESVRYLRALLRRRDALVADSTREKNRLEKSVFTDSPNAVRASIEHMLQELNNEIEHLDVLIQEHIETHPELNQDFRLLTSIKSVGYLLGLNMLAILKSHSFESAEQAAAFLGVVPVERRSGTSVKGKPKLSKIGPPEIRTKLYLAALCGLRFNPVMKQMYTKLCQRGKSKMCAIGALMRKLVHWCYGVLKTQLPFDAEYNQ

SEQ ID NO: 114498 - protein, 373 aa, unidentified
MFNLPVFVGLDYHTKTIQVCVMDQKGKILANQSVANDPAAVFRAVAPFGSNVFAAIESSTGSAAFAEALITKYQWSVSLAHPGYASRMKQTPDKSDWTDAKLLADLIRVGYLPRVWLAPPYIRELRDSVRHRHGYVQQRTQTKLRLRALLRQHRIDCPESPWTIKGKKWLLDANNIASSHVRTLLQDYYETIEFLNKKIVNAEERMAAATADDPIVKQLLHQPGIGLITAITMRAIIGHFDRFRTGKQLAHFCAVCPRNNSSAGKTTTGGLIKAGDDLLRQVLVEAAHRLIRYNPEWKAMADRLRANGKKTCVIIAAVANRWIRKLFYQMTVSTPVDSADVRFLRHGQESTPALETPSDAGRCVSRSTRRLST

SEQ ID NO: 114499 - protein, 445 aa, unidentified
MPNFSQSTSPPKSVRASDWTYQSSIGIDVHCKILVCCYQRLNPSDNSLIEERAEFPTGIQGIQKFAAWCVSKKPDIVMMESTGVLWNTPYEALEKAGFKSSQLALVNARDVKGRTGHKTDRNDAENLAMLARLNAFRKSFVPAREFRKIRLIARGYVTARRDFAKQKNRYQKTLNALGCRAGSVFSDIHGTTARMILHAFLFETKETFADVVREKSRRLKATPEQIFDALRNIDDPEMIWLAKTHFKEAEHLGKLCERYLAKLRNLLKPYKRHLDLLMSIPGINETAALLILAETGNDLSSFPSIEKFCSWIAVCPGNKISAGKSYSGHTARGNKYLRQVLTEVAQGISLSVKRKGFLWQKFQTWKEKRGTKRAVVATAHLVARIIFALFRKGQAYEERYTNILQQHRLKKIVRDARSAGILFKNSEVYDKNTGTVYSLRGLKTA

SEQ ID NO: 114500 - protein, 411 aa, unidentified
MDVLYPVCCGLDVHKKTITACLRFASARARAEEVRTFGTTTRELLRLADWLTAAGCTHVAMESTGVYWRPVYHILEASFEVLLVNAQHVKAVPGRKTDVKDCQWLAQLLEHGLLRGSFVPPAPLRELRELTRYRRQLVQEHAREANRVQKVLETANIKLGDVATDVLGVSGRAMLHALIAGERDPERLADLARGALRQKAEALREALVGRFTLHHAFMLQGLLDHIEFLDQQIARFDERIEEQTRPFGPAIERLDTIPGVGRRSAEQILAELGDDMRRFPTAAQAASWSGICPGNHESAGKRRNGRTRKGNAWLRSTLVESARAAVRNRGCYLSAQYHALARRRGDKKAVVAVAHSILVAAWHILRDGVEYHDLGPDHFDRLNRERLVQYHTRRLAELGLTVQLPGAQATA

SEQ ID NO: 114501 - protein, 312 aa, unidentified
MYYIGIDVSKKDLSVFDGKDDLKFINKEGLTSFKKYLKKKVNFSDLVIIFEPTGVYSLYLKEFCAENSIKAYILNPKKSHNFTRALGRRSKTDKIDACTLYQFHKLINLKDIKVPKTDQQAKVLASYLVSYEFALKQRISLSHHLESLRDKQLITLIKKDLKRAKKLEDKIFHDILEYVSKNQDLKEDYQRLLTISGVGDKTAIALLTLFKTYQGTNRAQITALAGLDPVRRESGTSVKGKVKISKNGKGIYRKILYLPTLCATVHNQKIRVFYQRLLTHHKIKKLAVIASMRKILLIAHAMYQDKTKYVTV

SEQ ID NO: 114502 - protein, 509 aa, unidentified
MTAPTSRRQPASSAPPSGKQAQAQAQRKAYDHRKTRAKAKSEALRQQEAAQVQALPVLRPHAAGIDIGSRSHWVCVGFTADAAAGLIQEFPAHTAGLQALVGFLREHQVNTIALESTGIYWIPLYELLQAEGFEVLLVDPSYSHQLRGRPKTDRRDCQWIYRLHSVGLLAAAFRPDEKTCQLRAYLRQRANVVRQASQHVQHMQKALEQMNLKLTEILSDITGVTGRSILRAILRGTRAPEKLAKYRDKQCKASEAEIAQALTGSYREEHLFELKQAYEAWQFSLGQVEKVDAQIALQLGRMKCDRALPPLKSKARPKRRVNSPGFDVRTALYYVVGLDLTEIEGISELTALTLISELGPGVSQFATVKKFCSWLGLCPNWKKTGGRVRSSRTRRGVNRAAQALRLAAQSLHHSHGALGGFLRRMKGRLGTQAALTATAHKLARIVYLALKHGMTYVRQSQEQYEAQMKEKQIKALKRKARQLGLEVIEKTSSGVATVVAVPVEGYRSE

SEQ ID NO: 114503 - protein, 434 aa, unidentified
MERKFAAFVAIDWADQKHAWMLQVAESVERRSGNIDHTPEAVDVWAAELRLQFGGQTIALAVEQSRGSLVFMLSKYEHLVIFPVHPTTLANYRKSFRPSGAKDDPSDAGLLLDVLILHRDKLRALTPDTPETRTLQFLVEERRKLVDEKTRCSNRITSHLKMYFPQVLDWFDDIGSHIAAEFLERWPDLEKLQRAKPATIQRFFFDHNSRNAQRMTERLDQMSKAVPATSDMAVLTSCRAAVVAWAGLLKELLTTIARYDEQIEALAQQHPDYALMRSFPGAGPVLAPRLIAAIGSQRDRYATAHQIQCYSGISPVVASSGKQHWVHWRWSCPKFLRQTFQEWALRSIAYSRWARAYYEEQRAKGKGCNTAIRSLAFKWIRILFRCWKDQKPYDEALYECKLAAHRNKQQALVPFVNPQWKTFAGFSKLAAPSS

SEQ ID NO: 114504 - protein, 322 aa, unidentified
MQNITLIGIDLGKHSFHIHCQDKSGKALLRKKFTRTKLMQFLATCPPSVVVMEACAGAHFMARCISDFGHETKLISPQFVRPFVKSNKNDFVDAEAICEAASRPSMRFVQPRTETQQAIRALHRVRESLIRDKVKTTNQIHGFLLEFGISLPTGDAVIKRLSLVLAEHEIPEYLSRLLVRLHTHYLYLVEQIAELESELSQSINADDTAQRIMTIPGVGPITASLLSSQLGDGKQFSCSRDFAASTGLVPRQYSTGGKSTLLGISKRGDKNLRRLLVQCARSFMMQLERQHGKLAEWVREQLNKKHSNVVACALANKLARIA

SEQ ID NO: 114505 - protein, 407 aa, unidentified
MIFVGNDWAEDHHDIEVMDDAGVTLARRRLPEGVVGVGMLHALIAEHAEDPAQVVVGIETDRGLWVASLVAAGYVVFAVNPLTVSRYRDRHATSGAKSDTGDAHVLADLVRTDRHQHRPIAGDTPEVLGVRVLARAHQRLIWDRTRQTNRLRSALREFFPAAVAAFEDLDHPDALAVLAKAPTPATAARLSRSAIAAALRKGGRQRNIDARAAAIQTVLRAEQLEFPAVLADAYGAQVRAAVAVIAEMNRQIELLQTELGASFDAHPDAEIYHSQPGLGPILGARVLGEFGDDPNRYQDARCRRNYAGTSPLTKASGKKRSVVARFVRNRHLADACYQWAFCSLSASPGARAFYDEHRAKGETHDQALRVLSNRLVGILDGCLRSRTVYDEDKAWGHRNAGAGDKAA

SEQ ID NO: 114506 - protein, 370 aa, unidentified
MKEPITSYVGLDIHKDSIAIAIAKAGRDAPQFIGTTVAQLAQVRKVLTRQKCTPSKTLVVYEAGPCGYGWARYLNTNGWRCEVISPAHVVRSAAGKAIKTDRRDALLLARESRAGNLTPIAVPDERDEAIRDLSRAREDAIAARLRARQQLKAMMLRHGRTYSSNAWTLAHERSLATVRFEHPAQQIAFDEYRQSVKDAHERCERLTQALREQCAGWRMGPVVEALMCLRGFDFIAAATIIAELGDLNRFSHPRALMSYLGLVPSEHSSGNCRRQGAITRTGNRHARRILVESAWTYRYGAHVGREHQIRQQGQPKAIRDIAWKAQLRLTQRYRKLSLGRKMQPTKVCVAVARELCGFIWDLARHVPAHQ

SEQ ID NO: 114507 - protein, 415 aa, unidentified
MRVHRNCCGLDVHKKMIAACLIREDAEGNSVTEKRLFGSMTRELHTLAQWICAAQVRAVAMEATGVYWMPVWNVLEQYGLQLLLINPEHYKAVRGKKTDLKDGTRIAELLQDGRLEGSYVPPLAIRVLRDLTRYRTKLVQYQSAIANRIQKLLEQCNIKLASVASDTLGVSAMAMLRALAEGETDAVKMANMAKKQLRKKIPQLQLALEGYVLPHHRWLLREMIEDLDHVGTKITRIEETIEQQMRPFQNAVNTWLTVPGIKHRLAWTLVAEVGPTVEAFPSAGDMVSWAGVCPGNNKTAGKRKSGTTRASNPWLRRALCEAAWAASKSKGTYLQAQFRRLAALRGPKRALIAVANSILTAGYYMLQRATTYQELGPAYFDKRNTVRATRRLVKRLEALGHTVILEPRFIDAPSS

SEQ ID NO: 114508 - protein, 366 aa, unidentified
MLYLAIDQHRKQLTVNLRDENAQVLVKRQVSTRWQAVREFLADIQERGRQAGGWMVIVEVCGFNDWLLKLLAEYGAGEIVLLHPEERLRQKTDRRDANRLGELLWLNRHRLAAGRRVQGMRRVVIPSADDHLDRKLTSLRWRIGRERTRLLNRIKNILRRYNLEQECPTKSVTCQTGLRWLRQVAVSELDRLDLNQLLGRLEVVNTERAALEEKIRERQKRNVAAARIATIPGMGAYISLGLACRVGDVRRFPRPRSLANYWGLTPRTRNSGEAKQRLGSITKQGSALARFLLGQAVLHVLRKDSVLREWYKGIKRRRGSKIARVAVMRRLATIIWQLLSKEQTYVPGGPRRQAQRQAKAAQAAAN

SEQ ID NO: 114509 - protein, 412 aa, unidentified
MDVLYPRCCGRDVHKKTVAACLIISTEGPEPVKEVRIFRTMTADLLALADWLQEAGCTHVAMESTGVYWRPVYNLLEGQCELLVVNAQHIKAVPGRKTDVKDAAWIAELLRHGLLRGSFIPSKPQRQLRELTRYRSTLVQDHARTLNRLQAVLEDANLKLASVVTDLYGVSARAMLAAILDGQRDVETLADLARGRLRAKRDQLKEALAGRVTAHHSFLLTEHLSALEYLDEAIARLSAEIDQRLTADQEAIALLDTIPGVGQRAAEILIAEIGPDMSRFPSAKHLASWAGMCPGNHESGGKRLSGKTRKGNRWLRQSLVEIAQVASKTKNTYLATQYRRIAARRGKKRALIALGHTILTIVYTMLTRQQPYQDLGAAYFDQREQHRVERRLVQRLERLGYEVSLQPRALAS

SEQ ID NO: 114510 - protein, 321 aa, unidentified
MSDTTGPGGATHVGIDVSKERLDVCFIPEGEHFVVANNEAGIQSLLDRLLEACPTLVVLEASGRYERPAAAAIASVEIAVAVVNPHQARDFAKATGRLAKTDKIDAEVLARLAAAVGPRPSVLPDEEAQALQAILTRRRQLLEMLVSENNRLKMAPKAVARRIRAHIKWLEKELQRTDKDLDEAVEENAAWKENEALLRSVPGVGPVLARTLLAELPELGTLDHRRLSALVGVAPFNRDSGTFKGKREVWGGRAPVKAALYMGALVAVRHNPILKEFYEKLLSAGKPKKVALVACMRKLLSILNAVMRDRAPWRPTHVFSP

SEQ ID NO: 114511 - protein, 413 aa, unidentified
MDVVYPCCCGLDVHKASITACVLWAEGGGRARKEKRRFGTFTADLLELTDWLRTCGVTHVAMEATGVYWKPVWNILDGSFAEVLLVNAQHIKAVPGRKTDQKDSEWIADLLQHGLLRGSFVPPQPTRELRDLTRYRVSLAQECNRIANRIQKVLEDANLKLASVASDALGASGRAMLRAIIGGEDNAATLAEMAKGLLRHKIPALREALTGRVTAHHRFMLRELLDDLDHAEAKMMTVEQEIDRRLRPFQDDVARLCTIPGVDRVTAWGLLSEIGFNMDQFPSAAHLASWAGMCPGNAESAGKRLSGKTRKGSAFLRRHLCQAGWAVSTKKHSYLSALFRRVARHRGTKRATMAVGHAILVIAFHLLKRKTTYMDLGPDYFDRRNADAVRRSLVKRLQNLGHSVTLAPAPVFS

SEQ ID NO: 114512 - protein, 406 aa, unidentified
MKRRQEDWFGPHELYLGVDVGKSFHWAVGLDPDGEIRISRRVENRLDDVDALPGEAGDAVLVVADQKNSIGSLVVRRCRAKGIDVGYLPGKSMKSAREMLPGTAKNDRIDAEAIAQAGMSLRRAILPIAETDDLGASLSLVSSQLAYATRRATMARNRLHAVLPESDPAFEAAADLSAAWTLDVLSLLGGAAGIAEAGRRAYGTACARHGATKAARDALWDAACASASNGRHPDAEGMVVKELAAEIADADAERTELTDELRRRLDGDETYQCLLTVPGIGPKTAAALVTSIDISLFHSDGKLASYCGLAPRDKDSGTSIDSTTSTHSGNKALKNLLIFSCSPLVGTKNRFGRCYDICVARGMRHNKALKAVARKRLRAIYAVMRDRVPYIEPSVGGDVEKSASAA

SEQ ID NO: 114513 - protein, 472 aa, unidentified
MIRSVGIDLHQGRHRARCLDDRAQPCDSFSFQTTPEGLATLEERVFREGANPIIVLEPAGLPWLMVAVYLRSRHPDCRLVKAKTQKVAALRRYLRGPVKSDRLDALTLAKMPFIDPEQLDEIYLPPAEIHALQRLTRQRKRIEQDITGRKVRISAIVDGYLPGVRRAFNDVWSSPVRAFLRSRLNPFAVVRDGEDALHAHLSKTSNRSKWSRAQTREVFLACQSVATVCELSGPVGTVNEEFFTDLQDEIARELRMLEADEAESESVARRIAELYRKLHPSDNLCTIPGVGEHTAPIFLATVGDPARFHNQSAFANWEGVVPGARQSSDVQAKGLRMTKAGPSIMRMALYQAGDIGRRWDPQLAAVYHREMVYQGKNHRQAMGAVMSHLGARVLRVLKEDSPYELRDIEGNPISKDEARRLILSKYHVSEDIRRERRRRNRKVGKDRETATYRTNEAGKAPQPVQVQAVSRQ

SEQ ID NO: 114514 - protein, 348 aa, unidentified
MKNKSFVGIDISKNVIDVSIFREDTNIKMFPHEVFNNTRKGFGDMCSWLKKSRVVLSQALFGMEFTGCYSLDLEKFLTSKNYSFCMLSTRIVKHHPMGTIDKRDKNDSAKIADFLYRYDGTECAKPYKLPSKAMQQLKQLVNERKFLVEQRTNFMNRMQMFETKEDSAMYESYIKKLNHDIEKIDQEECELMSKEEDVFDTFQNLLTIPGIGFVNATNIIAITRNFTAFDTARQYARYVGVAPCSHTSGTSVKWRARPSAHCNGQVKADLSMAALRAVEYDVEMQMFYNRKLGGRKDSDTKRKALNAVKFKLIRRMFAIGKQKRKWEVLNISDDRKNLHIEKSKASEL

SEQ ID NO: 114515 - protein, 343 aa, unidentified
MEQYIGLDVSLKDTAISIRQGGTRIWRGKCVSDPRLLAEIIRKQAPQAKRVVFETGPLSTWFYHALVAEGSPAICIEARHAQKILNETLNKTDANDADGLAQLAEAGFHKVVRVKTFDAMLTRTLIGIRSQTVGISLQLSNQIRGVMKTFGLIVPKGKGRVFEGNVRELLNGKDNLAKIILPLLEAWRDIRKHAANLDRQLLATARQSKAAQLLMTIPGIGAITSLSFAAAIEDPANFKTSRSVGAWLGLTTRRYQSGEVDYDGHISRRGDNHLRSLLYEAAMVMLTRTGSRHESGLKEWGLKLRERLGIKRAAVAVARKLAVIMHSMLKTGEEFNKLAGATA

SEQ ID NO: 114516 - protein, 343 aa, unidentified
MEHYIGLDVSMKETAISIRQNGKRIWRGKCASDPQLLAAVIRKRAPHVRRVVFETGPLSVWFYHALTAEGLPVICIDARHAKAALDMAANKTDANDADGLAHLAEVGFYREVRVKGFDSMLIRTLITARRQLLKMRLQISNQIRGLMKTFGLVVPKGAGSVFERNVRDLLQGEEKLARIVVAMLQVWSDIRYQTAELSKQLAAMARQDQHCRLLMSVPGVGTVTATAFAAAVEDPANFRNSRAVGAWVGLTPRRYQSGEVDNDGHISRRGDNQLRGLLYEAAAVILNRSTNTSSLRTWALEMKDRLGFKRAAVALARKLAVIMHAMLRTGELFDPHGGTQAAV

SEQ ID NO: 114517 - protein, 421 aa, unidentified
MKFKAQDKQNQLIENITVHHLVIGVDIAQEVHVARAVSFRGIALGTPLEFGNHREGFDLFERWIQDLLKSYKLSSVIVGMEPTGHYWFSLARWLLDQGMEPVLVNPHLVKKNKENRDNTPSKSDHKDALVIADMVKNGYYSPVRFHPEDYEELRILMANRETVTKRLNAAVNQIHRWVDIVFPELRQVFKILTCTSAIATLRLFPLPKEIRLLNTEQVLAGWKQYVKRHAGVKRAELLISLAKSSVGATQALHAYKLHLGQLLEEYDLAQRQLEQIEHELRLILKRIPYAQKLLEIRGIYVTNLAGVLGEAGDLSGYTHGNALLRHAGLNLAEASSGKWRGKMVLSKRGRPRLRHFLYLMTMSMVMTNPEIRAAHRYNVEEKKLKKMKSIMKLIGKVARMLVALAKSSTAYEPIKVFPQAA

SEQ ID NO: 114518 - protein, 407 aa, unidentified
MEVIYRRCAGLDVHKETVVACVRIANHGAPTQEVRTFTTTTSGLLGLVDWLDGYAVEHVAMEATGVYWKPVWHVLEGHFELVLANAAHVKNVPGHKTDVNDATWLADLLAHGLIRASFVPPVAVQNLRALTRTRKQFVRERSAHIQRIEKVLEDANLKLGVVLTDIMGKSGRAVLQAIVEGHTDPEWLITLVSLRVKASRAEVLEALRGRITAHHRFMLKLHLEHIDALDHAIATIEQEVGAGLEPFRHAAQLVNTIPGMSSTASHVVVGEIGIDMTRFATPAHLLSWACICPRNDESAGKRRSTRLRRGGKWLKTTLVQSAWAAVRVKGSYLQAQFHRIRARRGAKKAIIAVAASMLTAIWHMLRNGTEWRELGAAYFDRADAKKTATRLIRRLQQIGYTVQATPL

SEQ ID NO: 114519 - protein, 342 aa, unidentified
MTYYAGIDVSLEYSSVCVVDGAGKIMREQKIASEPEALIAWFRGLGFELERIGLEAGPLSQWLYAAIRASGLAIELLETRHVRDAFRAMPVKNDRNDARGIAQLMRLGWFRPVHCKSMAAQEMRALLTARKLVQSKLLDVQMSLRGLLRGFGLKVGATTPSRFAGRIRDLVEGNATLEVVAAALLAVHETLRRELAGFEKRVRSIARSDGRVRLLMSTPGVGAIVALTYVAAIDDPARFKSSKGVGAHFGLTPKKYQSGETDITGRISKIGDEGVRTALYEAGHIILTRPLKGCTALKSWAMRLAKRAGMKKAKVALARKLAVIMHRMLVDGTLFASAAVAA

SEQ ID NO: 114520 - protein, 345 aa, unidentified
MEIRTIGIDLGKTVFHLVGVNARGEVVVRKKCSRTQLLRFTSKLRACLIGMEACGGSHFLGRALREQGHDVRLMPAQYVKPYVKTNKNDYIDAEAIAEAVTRPTMRFVPIKTDDQLDLQSLHRIRERWVGGRTAVINQIRGLLLERGITIRKGRKHVEASLPHILEDAENKLSGALRALLTQLQIEMQYLDRQVEESDQLIERIASELEPCRRLVAIPGIGPVSATATIAAIGNGAAFKKGRGFAAWLGVVPGEHSTGGKQQLTRTSRRGNKYLRKLFVLGAHTVLLQRTKQSSGLSTWLASLVSRKRKQVATVALANKMARMVWAVLCKGEAYRPPLLPQPVTA

SEQ ID NO: 114521 - protein, 324 aa, unidentified
MHINSNAKCWVGIDVSKDWIDVVVLVEENRVEQFRCDREPEALAQLAQKLVPYRPQGIVLEATGGLEGAVIAALAGARLAVMRMNPKRVRDFAGAHGLLAKTDALDAYVLALFGARMRPPQRAWPEAERQQLAAWVAREQQLICERAAERTRLQQASEPALRKSVERVIAFLGKEIQRLEKQLAAWVAASETWTEQEALLRTAPGVGPKTALRLLAQLPELGHVNRRQIAALVGVAPFACDSGKWRGRRSIRGGRGGVRAILYLASWTAVRTEGALKTFYFRLVAAGKPKQVALIAVARKLLLALNEMMRTRQPWRSANAAVLA

SEQ ID NO: 114522 - protein, 403 aa, unidentified
MTVEEDSGQVYGGVDTHEDSIHVAVISSRGHDLADQEFPTTPAGYRRALAFIASHGDPIAIGIEGTSSYGVGITAAAAAEGLVVVEVIRPERAERRRLGKSDPIDAYQAARAALGNHRVAPAKNHAAIEGIRALHNARRSAMKARTAAMRQIHAQLITAPTVIREKYRDLSSEKRLVVLARMQVPTNRTPVERAVLLVLKTLAQRANELQREHERLGAELDALVTAANPGLRAAYGVGPDTAAQLLLTAGGNSDRLRSEAAFAALCGVSPIPASSGKTVRHRLSRGGDRAANGALYRIALVRMSSDARTKDYVARQRDAGFSNKEILRKLKRAIAREVFRLLTTPVAIPGVEDLRPLRQEKNITLTSAANTLGVWPTTISELERGIRRNDALAKSYRDWLLTA

SEQ ID NO: 114523 - protein, 377 aa, unidentified
MATTRSQAGSVGDPALYVALELSKKEWKLGLCAGFGCEAWVRTVASGDFAALDRVLARGRHRFGLPAQARVVSCYEAGRDGFWIHRALTARGWHNRVVDSASIEVNRRARRTKTDRIDAHKLVTMLVRVCAGEREVWREVRVPSEAVEAARHVSRERGALVDEQTRLRNQIGSWLVTYGCQVAARARGTVGWWTRARDWQGAALPAPVQARLLRADGRLRLVAEQIATLNAAQGAAVAAASADSALGRLVRVKGVATTSASTLLDEGLIWRAFQNRREVGGLLGFAPAHYNSGETQRDQGISRAGNARLQAVSIQLAWSWVRWQPSRALTHWYRARFGAGRRARRIGIVAVARKLLIALWQYARTGIPPTGAVLKAA

SEQ ID NO: 114524 - protein, 405 aa, unidentified
MWYAGIDWADQHHDAVVIDEAGKRVATTRVSHTAAGLDTLVTFLKEQGDVADHPDHLACIVETNRGLLIAALLDAGLPVYPVNPKTVERHRKPAGAKTDAIDAYLLARTGRSDLADLRRLTPDSPLIAELKALTRDQDTLIQSQTRLVNQLTACLKAYYPVALELFGKLQQPTTLAFLQAFPTPDQARAATVEQIAAVLKAAGHPTVAAKAARIRGRVDQPQLRADPVVTRTKTRLMLTLAAQLQVLLPEIAAYDEEITRLFRLHSDSRAFASLPRAGTRLAPRLLAEWGDDRERYTDAASVQSLAGTSPVPFQSGNFAKAHRCYACNKPLRNALQQFAWQSTQKEPWALTYRQRKRRDGKSHAMAVRALANQWVRFIYALWTNHDTYDPAIFHAAQQAHAPRAA

SEQ ID NO: 114525 - protein, 375 aa, unidentified
MKEKLRFLGLDVHAETIAVAIAEPDGEVRSLGTIPNRAESIRKLVKKLGPVEKLRACYEAGPTGYVLYWQLAELGVKCEVVAPTLVPVKAGDRVKTDRRDAEKLARSYRSGDLTAVWIPDEGSEALRDLVRAREAAKQDQLRARHRLSKFLLRSGQRPAPGVKAWTQIYMAWIRQIHFAQMAHEATRLDYLHEVEHMGERVMRLEQAIAEAAKLASPELREVIQGLQTLRGIAHISAITIAAELGQISRFEGARQLMGYSGIVPSEDSSGERKQRGSITKSGNSHLRRIAVEAAWSYRLPPGVGPALRKRQEGVPQEIKEIAWKAQHRLHKRYCRLAAARKDQRKIITALGRELLGFIWAIGIKAETAARQRIAA

SEQ ID NO: 114526 - protein, 343 aa, unidentified
MQAVTTIGLDIAKSVFQVHGIDATGNVVIRRQLKRRHVLAFFQKLSPCLVGIEACASSHHWSRELKALGHIVRLMPPAYVKPYVKRQKNDAADAEAICEAVTRKNMRFVETKTPEQQSCLMLHRSRHLFIRQQTAVINAIRAHLAEFGVVAPVGRKGVADLLDIVADPSDRRLPEVARACLAALGVQLRLLKAQILAFDRRIMAWHRSNETSKRLDEIPGVGPALATALVASVADPKAFRSGRNFSAWVGLVPKQHSSGGKEKLGSISKQGDRYLRSLFTAGALAVIRYAKIHGTKHRPWLTALMARRPTKVAAIALANKIARMAWAMMATGERYKEPVALAA

SEQ ID NO: 114527 - protein, 391 aa, unidentified
MEEGLEEILESSCGLDVHKDKIEACILKTGAKSAYRETFGCIPSELDRLCKWINDYGCKDIAMESTGVYWLSIYERIEAKCPDLQSLMVVNAYEIKNMPGRKTDIKDAHWIALLLKRGLLRKHNSFIPDHIVRDMREISRLRRKITEERSKASNQLEKFLQSHGFKFSSVFSSITGMSSTAMLKRLSENGKLSLRDIYDCCRKNLKHVPEEILAAVNGELNDVERKLLGFLLKRIDGLNDQISELTAMLMDLFEGYKPQIEIAMSLPGINLDSAMEVLAEISPEPQASFDTPEKVCKWAGLAPRNDNSADKIINRKILHGNPYVKSILVQCAWAAVKTRDSEFQKWFWPRQCRLGRKKAIIAVARKLLYLLYTLLSRGMFYSPPVPAPKAV

SEQ ID NO: 114528 - protein, 363 aa, unidentified
MNATAALPVVGVDLAKSVFQLAVADGAWRVVEQQRLTRLQFARWFINRAVGLVVMEACGSAHHWARWLNGLGIEVRLLPAAYVRAYVKRNKTDAADACALLEAARCAEIVPVRIKSVEQQALQAMHRTRSLWMATRTSRINALRGFCREFGIGIAQGSRLGVEQIGRVLADPHSAVPLLLRRSMSLLVEEIRLLEVRIAQLERELTALARQSPACTTLLSIPGVGLLTATAMVAATSGEVSHFHDARHFASWFGLTPKEHSSGGTRHLGRISKRGDRYLRMLLTHGARSVLRAASVAVRSGKTVDGLRQWALAVQGRSNHNKATCALANKLARICYATLRDGEPYGAARLNKKVARAAFALPA

SEQ ID NO: 114529 - protein, 409 aa, unidentified
MHVLYPRCCGLDIHKKTVVACVVLTDPDGSDHRFVRTFGTMTADLLALGDWLDLHAVTHVAMESTGVLWRPVFTVLEEGRTLILVNAQHLQAVPGRKTDVKDSEWLADLLRHGLLKASFVPPPPVRVLRDLTRYRKTLVELRTQEINRVHKVLDTANLKLGAVASNVVGVSGRRMLRAIEQGESDPAVLAELAKGRLREKLPALRQALAGRVQPHHRQLIGELLDHIAYLEQAPHRVEVSIADLLAEQAAAGQVLRSLPATGPVTAAAILAEIGTDMARFPSARHLASWAGVCPGNRRSAGKQLSGATTKGNTQLKTILCEIAATIARSPGTYLHAFYHRIARRRGKPRAMLAVAHSLLVSIYHMLRDQVPYQDLGPDYLDHLQAHRLERHHVRRLEALGFQVLLTPAS

SEQ ID NO: 114530 - protein, 313 aa, unidentified
MAACFVGIDVAKESSVVAIMPQGERFTVRHDPAALAALATRLQRRHPERIVLEATGGYHTVVAAALAAVQLPVIVVNPRQARDFARSTGQLAKTDGIDAVVLAAFAKAVELKVRPLPDAQARALQAVVSRRRQLVEMLSAERVRLLQADPVVAASLRTVIRVLEQALSDVDDDLQTRIQQSPVWRETQDLLKSVPGLGDVTSASLLALLPELGQLSTKAIAKLVGVAPLNRDSGRRQGRRTVWGGRAPVRAVLFMATLVASRWNPVIKAFYQRLLAAGKPKKLALTACMHKLLTILNAILRHHAPWNAEYAHT

SEQ ID NO: 114531 - protein, 352 aa, unidentified
MRKITTIGLDLAKKVFHVHGVDAEGNVVVARRLRRKEVLAFFANLTPCLVGIEACGSAHYWAREIAKLGHTVKLMPPRYVKPYVKRGKTDPGDAAAICEAVTRPTMSFVPVKGLEQQGLSMLHSARSQLTGQRTQLINAVRGHLSELGIVAARGMLGFAELAAIVRDESDKRLPVTARAALMILVRQIETISTEIAALDSTLRKENNASELGPRLESIPSVGPVIASALRARVTDAALFENGRHLSAWIGIVPENDSTGGKIKQKGLSKKGDRYLRSLLVNGAMAVVRQAQKRPDKHPWVAKLLARMSAKQAAIAIANKTARIAWAIMVHGGVYEAGHRAPQYRTEACAAAG

SEQ ID NO: 114532 - protein, 310 aa, unidentified
MNDTIGVDISKASLEVWRLSDRRHMRFSNDRDGLKALCRWLGADPVRVIYEATGRFHRDLEAALSKAGHGPVKVNPSRARRYAQATGNIAKTDRVDARMLAHMGATLALEPTPVRSKSMHEIKELHVARVALIKDRTACRNRLDTARNRMVVAQLKARERQIDRQIAQIDAELVRLIKADPELARRYEILMSIRGIGPVAATAMIVDMPELGTMTPKEAASLAGLAPVTRQSGSWKGKARIFGGRHGLRTLLFMPAVIATRYNAPLRKIYLALYEGGKPWKVAITAVMRKLIVLANALIRDDRKWAEIAP

SEQ ID NO: 114533 - protein, 275 aa, unidentified
MNFYNNMHPYYCGIDLHAKTLYVCIIDQDGNTCLHKEIPASPKKLQALLEPYMGQVVVGVECMHCWYWVSDFCEGLGIDFILGHALYMKAIHGGKAKNDRIDSFKIANLIRGGNFPLAYVYPKEMRATRDLLRRRMKLVRHGANLKAHVGNATSQYNLPPHKVNLKNVSAREQLRSTFPDPVVQRNIDLDMAVLECYAKELSKIEWFLEQQARQHNPVHLHLLRSIAGIGRILALTILYEVGDINRFESVQKFASYARLVKCKAESAGKSYGTQG

SEQ ID NO: 114534 - protein, 355 aa, unidentified
MNQEKYIGMDVHDATISAAVKNAEGKLLMECVLETKAATILEFIQGLRGTLALTFEEGTLATWLHDLLKPHVSRLVVCDPRKNALLRDGNQNDRADARNLAELLRSNQVHAVYHGKHGIRALRELGRSYLTLTKDSTRVMNRIKSVYRSWAIPCAGTSVYSRRHRAEWLAQLVEPGVRIRAEHLYEQLDSLEPVRQAARRELLRESRKHAAVQLLRQIPAIGPIRSALLVALLQTPHRFRSKRQLWAYSGFAVRTYDSGEFRMVRGKVQRNRERITVRGLNRNHNHDLKNLLKGAAISAIERPGPLQDFYVALVEKGMRPSMARLTLARKMAAITLTMWKKGVSFDPKQLQRPAA

SEQ ID NO: 114535 - protein, 315 aa, unidentified
MEATPVYIGIDVSKAQLDVAERPSGERAVMPHTEDSITTLVERLRHRQPAGLVLEATGGLEVPLASALAVAGIPVAVVNPRQVRDFAKATGQLAKTDAIDAQTLARFAEAVRPAPRPLPDEAAQAFSALLTRRRQLIEMLVAEQNRMQRAPRPIQQQIQAHVTWLKQQLAALDEDLTHRIQSTPIWREQEDLLRSVPGIGPVVSRTLLAELPELGTLTHKQIAALVGVAPLNRDSGTLRGRRTTWGGRAVVRAALYMSTLVATKHNPVIKVFYQRLRAAGKAPKVALVACMRKLVTILNAIVKHRTPWRLAVPNT

SEQ ID NO: 114536 - protein, 342 aa, unidentified
MTNVTTVGLDLAKTVFQVHGADQDGRPVMRKKLRRGQVIPFFAAQTPCLIGMEACASAHHWARELQALGHEVRLIPPQYVKPFVKTNKNDAADAEAICEALVRPTMRFAAVKSAEQQSVLMLHRARELLVRQRTMLINALRGHCGEFGIVAAQGAPKVSDLIEVIEDPGDERVPTLAREALGSLIDQLRMAQAQILGLEKKLKAWHRANEASRRLATIPGVGVITATALVATIGDASQFHSGRQLAAWLGLVPRQYSSGGKERLGRISKRGDGYIRRLLVHGARADLRWSKHRKAQRSLWQESLLARRPTNVVLVAMANKTARVVWAMLSRGETFRTEAPAA

SEQ ID NO: 114537 - protein, 430 aa, unidentified
MINRLQVGIDFGQKRADFCLLFPDGRPLEMHQSFANSCSGYSLAKQLLLDALDSYSFDGIDLSGEATGYYWLPFFLQLDADPDLAAHDLNLFLLNPRWVKWFKKCFAQDHKCDEKDPFYIAERTRTRRPDVVWSPLDSLPLRFYTRLRFHLVQSLAREKCYFSSFLFLKASSYRCLKPFSDVFGVTSRIVLTQQPSLDELAELPVEDLAMHLHELSGHHLRDPFDNARKLKRVAQESFPLNETLALPVQRILDLTLEHIRFLEGQVEQVNTWIATELEFYPVIAQLATIPGIGPVFSSGIGAEIGDTQRFLQGSKWDQKRKRYRPRNLRDAEDAVAKIAGLWWPRSASGDFEAEDRRMAKTGNRYLRYYLIQAADHMRKRIPEYTAYYARKFKESAKHHHKRAMVMTARKSVGLVVGLLHRNEPYRSKGR

SEQ ID NO: 114538 - protein, 392 aa, unidentified
MIYVGIDIASEKHDYFMIQSETGIVFNSKSITVTNTEEGYKKLHRDITAFCGATGDSKVHIGLESTGIYHTNIINFLLAQNYEVMMINPILTNMARKASKVHAPKNDNLDSQTICKYLIDNPDRFLPYTLSLYHNEALKSLSRKRFFIVEDLRKAKLSVNNLVQIIFPEFKALFSNIYGESAVAILKEYKTPKALAKARITKVASLLHGRCRCTAEQLIAAAKTSVGISSDFYAFQLVDAIQEMEHIQHRIAGYDVQIKTYVDELCPNLLTVPGIGYVTAGLIAGEIRDANRFHSAESLISYAGIDVTVYQSGKYSAKHLVPSKKGSRYLRYALFQVSRVIWQHDPVFKAYYEKKQAEGKHYYVILGHIQKKVVRVIYSIMKSDAAYEVRSV

SEQ ID NO: 114539 - protein, 338 aa, unidentified
MNQCFVGIDVSKKQIHVCVLGEKPHPYPNCLTGFRKMMKSLREKKPHGEETLFLIGMEATGVYHLKLATFLKDEPDVAVYVLNPAQVKSFFKASFHRTKTDAIDACGIASCTEFLVNRDKVRAFETPDNEVERLRQLCRRRDEILSMAQMEKNRIEALKEVPSHSGEVESSLLEHLEYLEQRLKDIEEKIKGHIRNSPGLKEQVDLLKSIPGISDTAAAGLISEIRSAERFDNVKELVAFAGLAPAERTSGTSVKGKTSICKTGSSRLRKHLYMPALVGIRYNPLLKEFYERLTNRNKPKKAALIACMRKLLHIIYGILKNRTAFDPLWTKNRFAMAC

SEQ ID NO: 114540 - protein, 373 aa, unidentified
MKIIGCDFHPSFQQIARFDSETGEITELRLSHANGEATKFYESLTGPAVVGVEASGNMRWFQRLLARLGHTLLIGDATKMRAGNPRKQKTDKRDARYILDILLEKRFPSIWVPSMEEVDLRQLLKHRHTLVQMRTRVKNQLQHIAINEGFQKKRKLWTVEGLGFLRNLALGPWTGRRRDDLLQLLEQLHGQIQEMNQAAEKEAAKQPLVQLLMTHPGVGPILGLATVLTLGTVQRFERSKNATSYVGLIPSEDSSGERRRLGGISKQGNSFMRFLLVQAGMVAARHEPELGRFYQRLVHKKHHGVAKVAVARKLLVRLYWMLRTNTPYPEVVVRTQGSSSHSVAKKAKTERLSGRPASRKKGKQNKQPGKNQE

SEQ ID NO: 114541 - protein, 428 aa, unidentified
MPSKETEPDLAAYVGIDWADERHAGCLCAADSHRKQHFSLEQSPAALHDWVSRLRQEFGGRKVAIAIEQSRGHVISALMTYDFLVLYPINPKALARYREAFATSGAKDDPSDAELLLSLLVSHREKFRPWLPDDAQTRTLQLMVEHRRKVVQDRVRLTNRLTSLLKGYFPQALEWAGSLTTLQACDFLEKWPSLQKAQKAKPSRLRSFYQQHGCRQSKVIDERIEQVRSARALTQDPAILAGSVLMLQATVVPLRAVIQSIERFDTEIALRFKQHPDHAIYESLPGAGAALEPRLLAAMGNDRERYEVASDLQQLSGAAPVTDKSGKKHVVYRRRACAKFMKQTFHEFAGHSIQGSLWARAYYDHQRALGKAHHASVRALSFKWIRIIFRCWKDGKPYDEQCYLANLRRRSSPYAPGMGSKAMEAAHA

SEQ ID NO: 114542 - protein, 347 aa, unidentified
MLYAGLDLSRQRLDVHLLDEDGRTVEVTAVRPDADALQSLVAAVARHGQPVSAAIESMNGARFVHDTLELAGWEVEIADALKVKGLAPLAAKTDKIDAWVLAELGRRELVPAIWLPDPANRAERERARFRLHLVRHRTALKNRIHAILIAFGHPVPVSDLFGVAGRDLLAGLAIPEPWATTLATSLRFVDELDTEIDACERELRTMGADHPYVELLRTAPGIAWVLGYTIAAEIGDIARFSSPKKLAGYTGLCPIVRQSGGRDDRGPLAKNGPKYLRWALIEAATHAARHPAYKERYERTKKRLGRQRGSKVARVDIARELATAIWHMLSKNEPFAPGRSPARPLVA

SEQ ID NO: 114543 - protein, 500 aa, unidentified
MSVTPIQPATRVCAGLDWAKDDHVACIVDADGEVLDRFSVAHTAAGLRRLVIRLLKAGVDEVGIERPDGPVVDALLAAELTVLVIAPAQVKNLRSRYGSAGNKDDRFDAYVLADVVRTDRRRLTPLTRSTPAAQAMRSSVRARRDLVEHRVAAANPLRAHLQVVFPGIVDLFAALDSAVSLSFLERFPTQAKADWLTVDRLAAWLAKVAYSGRTDPAVLHARLLAAPRGTTGPEAGFHAATTLAFVALLRTLNTQIAAQADSIAEQLDIHPDAHIVKSLPRSGTVRAARLLAEIGDARGRFPTADSLACLAGVAPSTRQSGKVKAVTFRWGADKELRDALCDFAADSRHDNAWAADLYNRARARHQTTPTPCGSWPAPGSTSSGAAGKTTSPTTPTNTERSNAPSTNTPRTPPDTADVDTGQLMRAHRKRAADEGFQVTYRQHRPMVERSIAWLTRGARRVPYRGVEKNNNWLHHRVAGLNLRRLLALGLTIEDGAWVLA

SEQ ID NO: 114544 - protein, 443 aa, unidentified
MTETISSTGEAEFAAFAAIDWADKKHFWRLLEAGSEKPEHGQLDNQPEAVDAWAAMLYARFQGRPVAVCLEQSRGSLVYMLAKYAHLRLFPVHPKTAAQYRETFRPSGAKSDSADTASLLDLLLKHREQLRLLQPDTAETRLLSTLVEGRRLLVNEKTRQKNRLTACLKMYFPQLLQWFHAVDSLLVGAVVERFDSLTELQRAHPGTLKKFFHEHNCRGEERIRERITAIQQAMPATQDAAILEGECLRARALVALIATLRSQIEIFDRRIAELVSEHPDSSLFASLPGAGPALVPRLIVAFGTRRERWEAAYQMQCFSGISPVTEASGGASWVHFRWACPHFLRQTFHEFAGQSIKFSEWARAFYDSQIARKKSHHAAVRALAFRWIRVIFRCWKARTPYDEQVYRRSLQDRGSPLIGSFLPTTNVGWKAESGFQKLSVRSS

SEQ ID NO: 114545 - protein, 418 aa, unidentified
MKKHSKSSQRSEPGLKRTKARGPVQRDAKEVLAEVLGKLTGKLDAPAVSTRAKENWRGNTVGPNRDRLTVGVDLGDRWSQYCILGLEGETLAEGQMRTTQEDVREFFQALTVARVVIEVGTHSAWVQDVISEWGHEVLVANPRLMEGSKRRKRKSDRIDANKLARLGRVDPQSLYPIRHRSREVRQDLVVLRARDALVSVRTELINTARGLVKSMGTRLPRCSSLSFAEKVKDAIPVEVQEALLPLVQLVETVNDCIARYDQKIEELGREKYGHTTLLRQVKGVGPITSLAYVLTLEDPQRFSSSREVGPYLGLVPKQEDSGESQPQLGISKTGDRMLRRLLVGSSQYMLGAFGPDTDLRRYGLRLCERGGKNAKKRAVVAVARKLAVLLHHLWVTGDVYEPLHHTGAEIRTAQATAA

SEQ ID NO: 114546 - protein, 370 aa, unidentified
MSQSSTLYIGMDVHNDSIAVAYVAQDHGAEVTYLGTIGTRQCDIDNLTRKLQSKATQLVFVYEAGPCGYWLYRYLTKKGHRCWVVAPSLIPKKAGDRVNTDRRDAVQLARLMRSGDLTPVYVPAVEDEAIRDLSRAREDAIRDRKTAKFRLKAFLLRHDIRYTGRATWSPAHLRWLSEVVCATPAQQIVFQEYVRAVHEHTERLPRLDQELQEQVKSWRLQPVVAALEGLRGVPCTVAVTIGAELGDLTRFEKPRQVMKYLGLIPSEYSSGERRRQGSITKAGNTHARHALVEGAWAYRYPAKVSRHLQLRLEKQPKVIQDISWKAQVRLCKRYRRLIARGKHANQVVVAMARELAGFLWAIAQQVSVTP

SEQ ID NO: 114547 - protein, 384 aa, unidentified
MGIPHAKGRHYMESIIYVGMDVHKDTYSLCCYDFRNNEIFSEMKTKATTKHVTKYLAQIKKARGEDTLFVCGYEAGPTGYGLCRGLQKEGYSCVVMAPTTMTNPDGKKRVKTDRIDARALSRILAYKSYSPVVLPSEELEALKEYTRARDSKKTMLKRAKQELQSFLLRNGKVYPETGNSWTIKFFKWLESLEFSKEYLQESFKEYLSEVYTLKAKVEQMDAKIEEIAQLDLIKDKVDKLVCFPGINIQTAVAITVEIGDFQRFANAQQFSNFLGLCPGEDSSGKHIRKLGITKAGNNRLRRLFSESAKAIKMTNAYGKKSRRILERQKGAPADIIAYADKAAKRIREKMRSMENRGKHSNVASIAGARELSCFVWGMMTANMA

SEQ ID NO: 114548 - protein, 280 aa, unidentified
MVHYVGLDVSLKQTSICVVSDTGSVVREGVTDSDPEAIVAFVRSKAPDAARVGLESGPTATWLWTELKRLGLPVICIDARHAKAVLKMQINKCDRNDAVGIARIMQTGWFKEVRVKNLGCHAVKALLTSRALLVKIKRDLENQIRGLLKNLGLVIGRAKFNGFAARAAELIANRPELVAVVSPLLKAREAIEKQIDDLDRKVLKLARQDALIRRFMTVPGIGPITALCFKATIDDPTRFKRSRSVGAYIGLTTRRHASGEIDWSGRISKCGGRHASKLSI

SEQ ID NO: 114549 - protein, 350 aa, unidentified
MRTEYFITLDTHCRTSDACVKTRLGKLVKRAHLSTAIPQLVEFIESVPRPRRLAFEEGPMAGWLYRNLASHADELIVCDPRRNAHVAKDGDKDDPIDAAKLNDLYRGGFLRTVHQVDSASKAGFKQLVGAYYDRVAHRVGEGNRLIGLGKRWGVLFTRSMLAESGDSKTLQGKIQAAGAPECVQTMVQMLQDSFIQACEQEQSLHDQLTKMAKGDELMQRLMALPGYGPVRAATLVAYLDTPWRFKSKSALWKYVGIGLRRAKSGDGLNVIRVEQQCNRLLRNVVIGAAQSAIDQKENVFAERYARWIKLGVSPRNARRNVARVETSAAWAMWKTGQAFRPEWISAEAES

SEQ ID NO: 114550 - protein, 410 aa, unidentified
MEMILGCCAGLDVHKETVQACVRKMGAGGKLEQEVRQWGTMTSDLTGMAEWLAAEGVTHVAMESTGVYWKPIFNILEERFEILLVNARQFRNVPGRKTDVKDCQWIAQLLQHGLLKGSFIPPRPQRELRDLTRQRAQIMDERSRISNRIQKVLEDANVKLGSVASNVVGVSGRLMLEAIIQGQDDPAKLANLAQRSLRSKIPQLEEALYGRLTEHHRWMLRLLMDQLSSNEALLARLDERIAECTRPLEPVLERLDEIPGVDVRVAQVLLAEIGPEMKPFPSDAHLASWAGVCPGNNESAGKKRSGKTTKGSRWLRQALVQAAWAAAHKKDSYFQAHARNLMHRRGRKRGLVAVAHSLLIVIYHMLKQGTRYQDLGPQFLDRLRATQLVRFHLRRLQQLGLQVELKTIAA

SEQ ID NO: 114551 - protein, 410 aa, unidentified
MDCVIERGGGLDVHKKTVTACVRVPGLKGQRDQHVRTFGTTAAELLALRDWLIAQGVTHVAMESTGVYWKPVFYVLEEAITCVLANAAQIAQVPGRKTDVKDCAWIAQLLEHGLIRGSFVPPAPIRELRDLTRYRKALIQERTRGANRLHKVLEDSGIKLASVASDVLGVSGRAMLEALVAGTTDPDALADLARGTLRKKLPALRQALIGRFRAHHAFLVSQLLAHLDYLEEVIDGLSAQIDVVITPFAEEVARLDTIHGVNQRTAEVIIAEIGADMAVFPSAGHLASWAGLCPGNNERAGKHRSGKVRKGNRWLRAALTEAALAAGTRSAKGAFAARYRRVMPHRGHKKAVIAVAHAILVTAYHLLAHKTTYREPGADYYERRHADRVRHRAIQALERQGYRVTIEPAA

SEQ ID NO: 114552 - protein, 402 aa, unidentified
MQVDDIDVFIGIDVGKSEHWATALTTAGECLHDRPLPNDEARLREVYEHLGEHGRLLVVVDQPATIGALAVAVAQDMGITVGYLPGLSMRRIADLSPGSAKTDQRDAAVIASAARTMPHTLRSITSSDEDAAALSMLTGFDLDLARQVNQVSNRIRGLYTQIHPALEGVLGPWLEHDSVLEVIATWPTPAALRKAGRARIDAKLKANGCRRHAAWAQAIVEALSKQTVTVAGTDAAGVVLPHLARQLIALHTQRADIAAQVEALVEAHPLYPVLTSMPGVGVRTAAVFLAGTLGKTFTTGAHLASYAGLAPVTRRSGSSIRGEHVSHGGNKRLKRAMFLSAFASLRTDPVSRAYYERKRAQGKRHNQAILALAHRRILTLHAMIRNGTLYNPQPAQPLTTTA

SEQ ID NO: 114553 - protein, 355 aa, unidentified
MNAIKYIGMDVHMATSSIAVLDANGKLMMEGTMATQASALVDFIRGLSGTLHVTFEEGTSAHGLYTVLEPHVAQVVVCDPRQNPRRLGEKKSDRLDARKLAELLRLGSLKPVYHGNALGPALKELARSYRTLVSDTARVMNRLKALYRARGIRCTGTRVYSPCFRDQWLEQLPEPGVRGRAELLHKQLDLLLPLRQEARAAMLAESRKHPAHPILCSIPALGPVRVALLIALLQTPYRFRGKRQLWTYAGLALVTRTSADYEVVDGQVTRSRKPALVLGLNANHNHALKGIFKDAAASALAHPGPFKDFYTLRLAQGMKPELARLTLARKIAAIALTLWKKGAGFNAEHLKAQAA

SEQ ID NO: 114554 - protein, 319 aa, unidentified
MEILGLDVGKRELHAILLQGDRSASKSVPNSAAGFKQLQTWLRNRKAEKVHACLEATGGWSEDVALALCEAGHVVSLVNPARIKAFAQSEMLRTKTDRIDAALIARFCRMHEPEPWTPPAPEIRVLQGLVRRYQSLVQMQTEEQNRLQAPLVAPAVKESIEATLAHLGREIERVDREIEQLFGQYPPLRRQRELLTSIPGIGDTTAARILGEMPNIAEFRDVKAVAAYAGLSPRHYESGSIRWPSRIAKTGNSSLRAALYFPAISAMRYNPPLRRLAERLRERGKSNMTIITAVMRKLLTLAYGVLKSGRSFDPAYATP

SEQ ID NO: 114555 - protein, 346 aa, unidentified
MKIIGCDFHPAWQQVAVLDNETGEIEELKLSHEDGEAERFYRALSRAALVGIEATGNSQWFLDLLQRLGHEVWIGNAAEIRASYVRKQKTDRRDAGHILRLLVEGRFPRLWTPSVEERDLRQLLIHRQKQVEIRTRVKNGLQHLAMNRGLQKKRKLWSVQGRANLEKLSLQGWAARRREDLLGLLGQLDKQIGELDEAVSAAAEKSPQARLLMTQPGVGPITALAFALTIGDVSRFQRSKQVSSYLGLIPRERSSGGKQKLGSISRQGNSFVRMLLVEAAQSTNQWDEGFRKQYAARCHYKPKAVAKVASARRLAVRLYWMLRTNTPYPEIARIESSPGVGMVSAS

SEQ ID NO: 114556 - protein, 372 aa, unidentified
MNEFSKYVGLDVHKETIAVAVAEANGGEVRYVGEIANTEDAIDKLVKQLRKGGANLSFCYEAGPCGYGIHRQLTDLGWDCQVVAPSLIPKKAGDRVKTDRRDSLMLARLHRAGELTAVWVPDGAQEALRDLTRAREDLKHLQLQARQRLLAFLLRHGRRYDGGKSKWTLTHYRWMETVKLDHPVQQIVFQEYIDTVKAMTKRIEAVDKHIESAATESVFWSVIEGLMALRGVSLLTATTIVAEIGDLRRFASAPQLMAYLGLVPSEHSSGGTKLRGGITKTGNGHVRRLLVEAAWTYRHPARKTAYLQRRAEMASDEVQEIAWKAQTRLCGRYRKLEARGKLSVQTCTAIARELTGFIWAIGQALPMPVSRA

SEQ ID NO: 114557 - protein, 387 aa, unidentified
MPSAISPPKAVLGIDVGKSSHWACLVTREGEVALNRRVRNSEGDLDGLFSQVACDTIVVVDQCRNIGLLAISRARLAGLGVAYLPGLAAHQAARLFAGDAKTDERDALVIAKTALGIPDALLPVSEPDEALEAARSLAAQRSHMVTCATRDKNRLRSILLESCPAFEALADLGDRHWLNMLEKLGGPWGCIDAGKPAFGAVTKGANRARMDAAWNAAMASTRPSKRRVDAENPQVRMLARRIREALEEADGIDREITALLAGDGTYECLVTIPGIGPRTASELVIGINIEDFPDHDHLASYCGIAPRNRQSGTSISSVSASRQGNRRLKNLLIFSCNSLVRSENRFGEYYRACRGRGMCHGEALKAVARKRLKVIYAIMRDKVPYSA

SEQ ID NO: 114558 - protein, 402 aa, unidentified
MSFLSGSFRDMRQRGLADESARASMHGERAMKQSTTTYVAMDTHKETISVALAEGGRRGETRFLGEIPSRPECVAKMIERLAKNHGRLAFCYEAGPCGYGLYRHITALGHECVVVAPSLVPTRPGDRVKTDRRDAVTQASLFRSGELTPVWVPDDAHEAMRDLCRARQAAMEALRRARQQVLSFLLRHGRVYSSGGHWTRKHRVWLAAQCFEHPARQIAFEELVQTMDEAQARRDRLAAQMQELLPVWSLSKVVAAIQAMRGIALISAITLVAEIGDFKRFANPRQLMAYLGLTPSERSSGAKTARGAITKAGNTRARRVLVEGAWTYRLPARIGAQILERNERLPQPIKDIAWKAQTRLCARYRRLVRAGKPTNVVCVAIARELAAFAWAIATSGAVVAIV

SEQ ID NO: 114559 - protein, 366 aa, unidentified
MISVAPAAERIYVGMDVSRDKIAVAVLGPGEDVPAVEVISHDGEMVRRLIGKFADRSVLAACYEAGPGGYELCRLLAAAGVACDVVAPALIPKAAADRVKTDRRDCVRLALSHRAGLLAAIRVPSEQEEAVRDLVRTRADLVDDRGRMMQRVGALLQRHGRVWRAPRWTYQHRARLDQQSFTEPALQAALRTYLAALDARDAELAVLETQLRGCWASVDPLASMVRQLGCYRGIAELTALTLAAEVADFRRFASAPAFMGFTGLTPSEYSSGARTRRGAITKAGPQLVRGALIEAAWSYRHRPAIGATLRRRQAGCAAETLARSWKAQQRLHATYAKLTRRGKIPSVAVTATARELAGFVWAEMTS

SEQ ID NO: 114560 - protein, 375 aa, unidentified
MKDYSEAFVAFDTSKLRNAVAIAEAGRSGEVRFLGEIDNTAVATAKLVTKLAKQYDRLLFCYEAGPTGYGLYRQITGLGHGCLVAAPSLIAKKAGDRVKTNRRDALGLATQLRAGELTAVWVPDPRHEAMRDLIRARGAGVEDLRRKRQHISSFLLRLGIHYTGKKTWSKTHMKWLASQKLEHAEQRIAFEEMLLAVRQAEERIARLEEAIRAAVPDWSLAAVVEALMAMRGIDMIAATAFLAEIGDLSRFRTPRELMAFLGLVPSEHSTGDKVRRGGITKTGNRRARCILAECSWAYRHPPRVGKDKQARVAAAPRGVREIAWKAQHRLYKRYRALTRRGKLKTVVITAIARELAGFIWAINREISTAGMAARP

SEQ ID NO: 114561 - protein, 354 aa, unidentified
MKDLSKAVAQVVGLDLGDRYSQIVALDRETGEVVERSRVRTTQSALSSRFAGGAPLLIALEVGTHSPWISRLLAELGHEVIVANARKLRLIYENRNKDDQIDAEYLARLARVDPKLLAPVQHPSARAQSDLALLRSRQILVRTRARLILHCRGVAKSNGLRIPGGSTPTFARRLGEVLPDSLEPALGPLLETLRGLNRQVSTYDSQIEALAKKRYPETQLLQQVPGVGPITALAFVLIVQDPNRFRRSRNVGAYLGLTPARRESGQSHPQLRIRKEGNTMLRQLLVQCAHYMLGPFGEDCDLRRFGERLQARGGAGAHHRACVAMARKLAVLLHHLWRTADVYDPLFRERQRAA

SEQ ID NO: 114562 - protein, 464 aa, unidentified
MTDKKMWRSRKERKEWAQRLQSEDPGLEVVHPHAAGIDVGNGLHYVAVRRDRDPQPVRRFECFTADLHRLADWLQHCAVKTVAMQSTGVYWIPIYEILEERGIQVYLVNARHTKNLPGRKSDVQESQWLLKLHTYGLLNNSFQPPSEIRVLRTYWRQRGEHVRGAATCIQRMQKSLTQMNVQLANVISDVSGMTGQAIIRSILAGDHDPRKLAELSDPRIHASREEVAKSLEGNWRPELLFVLQQEVAMYDTYQQRIAECDQQLQKHLATFAETIPLQPRKEEPKRKKTKLAKNAPRFELRGELQRITGVDLTRIDGIDVMVAQTLISEVGLDMSRWKTEAHFSSWLGLCPDNRTSGDKVLARGTRRVVNRAATALRMAAVTLMRSRTYLGAQYRRLRTKLGAPKAITAMAHRLARLVYRMLKYSQHYVDKGAEYYEHRHRRQQIQFLTKQAAKLGFQITLPHT

SEQ ID NO: 114563 - protein, 345 aa, unidentified
MDQISRIGMDTSKHVFQLHGVNAAEAPVLRRKLRRKEMVTFFEKLAPAVIAIEACGASHHWARLLQSFGHTVKLIPPQLVKPYVKGGKNDAADAEALCEAMSRPTMRFVPVKSPEQQAALMLVSVRDRLVRNRTQLANAIRGHAAEFGLTAAQGMAHLGPLLDRIQADESLPASARELFAMQAKEYEQLQTQIAEVDAQLLARHRADECSRRLAKIPGVGPVGAMLLRMKTPEPELFRSGRQFAAWIGLTPRDHSTAGKVRLGVITRAGDEGLRSVLVVGATAVIQQAQRRGTASPWLAALLKRKSPKLAAVALANKTARIAWKLMLTGEDYSARPAPAAMAGAA

SEQ ID NO: 114564 - protein, 311 aa, unidentified
MICAGIDVGKSHLDIALHPGNARLRVTYDTAGLTALDAFLREHDVSRIGFEASGGYEWRLLAHLRAGERPAARLQPAQLRFFAKSRLKRAKNDRLDAALIALFTASLEQLPALPDARFDKLAAELTYLEQIEQQIALVKTFAETALSEAIKRRHAREVARLETCRKAHLLRLEKTVRDDCDLAQRLDLLISIKGIGLRSALCLIIRLPELGHASRAEIAALAGVAPYDDDSGKHHGRRRIQGGRERLRKSLFMCAFTATRHNPDLAAFYTRLRQSGKEHLCAVIAVARKLIVLANTILFRKTEWTPQYSKN

SEQ ID NO: 114565 - protein, 400 aa, unidentified
MLSIGIDVSKGKSTVCGMKPGGEIVYAPFEVQHTRKGMSELVSLLRSSGEEVRAVLESTGSYHCPVVTALLENGIFVSVVNSLRMKRFCSQSIRKVKTDRIDAMQIALYGLAYWQELQPARLPEDTYRELQLLARQYYQMTSLLIKAKVDFNAICDQVLPGMQELMSDHAGRHKLSDFVLRYRHTTHILEMGETRFRKDYCKWAEKKGYRNCERMAALIFATAQNGIPVLPNAPSTQIVITEAIRVLHTVEASRDAILTQMQALAKTLPEYSLVREMPCIGDTLAPRLIAEIGDVRRFHSKRALIAYAGIDAPPYQSGKFCANNRHISKRGNRYLRKTGYEVMQSYVMHKPANDPIFTFIEKKRGEGKSGKLAMVAGLNKFLRVYYGKVTELYRSLPAIE

SEQ ID NO: 114566 - protein, 312 aa, unidentified
MANLVFAGIDVGKEKLFVNIYLDSQVRDYPNTHSGLERMSRFLIKNAVDLVVMEASGGYERQPASDLRARGLSVAVVNPTYVRRFAQGMGTLAKTDTIDARLIAHFASVKQPKAQAGKTAEEERLAAVVERREQLVSLLTVEKNRLSKASDYNRASIQISIQFLTEQIDSHETEIKALVAKSPERLEKVRCMCSFIGVGDVTSVTLLTEMPELGNESREHIAALAGVAPINRDSGKMKGKRRTYGGRARVRRTLYLAALSASKHNPIIRAFYERLLAAGKEKKVALVACMHKILTILNAMLKKGELFKPLCS

SEQ ID NO: 114567 - protein, 490 aa, unidentified
MKGQGAKRNQKNQKTSKKTSGKATPGKWDEMNRKQRREMMRQMQSGDLSLEVIHPDASGIDIGNESHYVAVPPSRDSQPVRCFGCTTAELKKMAEWLTQCGIRTVAMQSTGVYWIAVYDILEEAGMEVYLVNARETKNLPGRKTDVQESQWLMKLHTYGLLRNSFRPSQEIRILRTYWRQRHDLVRSAGRHIQRMQKALTQMNIRLANVISEISGMTGQAIVKAILDGQRDPRELAAYRDHRVEASEEEIAQALEGNWQEDQLFVLRQEQAGYEFCQQQITDCDQQLEKYLAQLEDRTQGATLPKETRKGRLNKKKKRNPQFNLREELFRMTGTDLTQIDGIDVTVAMTVVSEVGWDMSKWKTENHFVSWLKLAPDNKISGGKVIGKGRTPTNNRATTVLRMAATTLRASDTYLGAQFRRLRTRLGPPVATKAMAAKLARLLYRMLRYGMKYVDKGAELYEAQHRKQQVIHLKRKAAQLGLEIIEVANAA

SEQ ID NO: 114568 - protein, 302 aa, unidentified
MKRKVYVGMDVHKETIQIAYLTSNTKEMVKEQQIKHNEVHIKKFINKLKTEWNEIHCCYEAGVTGYPLYRYLKSLGVNCILVAPGKIPRQSSDKIKTDKRDAIKLARLLRSGDLESIHVPSEEDEAVRDYLRSRDSLRLDLGRNRQRLMKFLLRKGNVYSTTKYWTVSHYKWLNNLHFENEILHETFNDYYSRVRVQEENLKAMDQKIQEIAKSEAFRERVGILRCFRGVDYLTAMFLLSEVNDFRRFKTAGSFMSFLGLVPGEYSSGSKRKQTGITKTGSPRLRRILTEAAWQHRFPGTRK

SEQ ID NO: 114569 - protein, 429 aa, unidentified
MTPPQNSNHNPPPDSQVEPLPEAWIGLDWGNQQHAFALQDRSGRCERGTLEHSSENLHQWLGQIGQHYGGRPVALALEASRGAVVHALLNYAWLTIYPINPITSARYRQAFTPSGAKDDLPDADVLLELVRDHAVKLRPLEVQDAPTVKLAELVHARRDIVDRRTQTINQTTSLLKTYYPQALELAGGLDRDMALDFLSRWPDVISLKAVRPATLKRFYHQHNVRSTQLVEERLQFIQKAVALTTQEARVSVAVLQLRHLVEQLRAFRKHIAIFDQEIQIAFRQHPEAGLYRDLPGAGAQLAPRLCVAFGTLRTTYPDPASLQKHAGVAPVREKSGNQLWTHWRWQAPVFLRQTFVEWAGQTVVYCPWAGRYYARMKNKGKKHAAILRALAFKWIRILWKCWQDRRPYDQAAYLKQLRHRKSPNAVAAT

SEQ ID NO: 114570 - protein, 412 aa, unidentified
METIYARVAGLDVHKDSVSACVRWVGGGGRVGQETRRFGTTTRQLLKLRDWLAQSQVTHVAMESTGVYWKPIYNILEGGFEVLLVNARHVKNVPGRKTDVKDSEWLAHLLQCGLLKASFIPPRPQREWRDLTRTRAQLVRQKASVANRIQKVLEDANIKLASVATDALGASGRAMLDAIIGGQEDAEQLAEMSKGLLRNKRPELKLALQGRVTEHHRFLLKEMLDDLRHVESKMAVLESEIAKRLLPFQDEVERLCTIPGVDKVTAWGLLSEIGLNMDQFPSAGHLASWAGMCPGNFESAGKRLSGRMRKGSAFLRRHLSQAGWAVSTKRDSYLSALFRRLAARRGKKRAIMAVGHAILVIAYSLLKRKQNYFELGVDYFDKNQGDTLKRSLVRRLERLGHVVTLQRAPQMA

SEQ ID NO: 114571 - protein, 366 aa, unidentified
MDPSHFYPASQWAKMGIELTIDKVGGSEMKIKTLGIDLAKSVFHLYGVDAHGKAHMKKRLSRKKLLEFMVNLPPCLVGMEACGGAHYWARTFREQGHEVKLLPPQYVKPYVKTNKNDYNDAEAICEAMSRPNMRFVGIKSVDQQDIQGLHRIRSGFMQARTRVVNQARGLLAEYGIVVGRQVGQFRRRLPEILEDSENGLTAFGRELFASSYQELVHLDERIQVCDERIDRVLKENEACQRLAEVEGIGPITATALVASVGDPGVFRKGRQMSAWLGLVPRQHSTGGEPVLLGISKRGDRYLRTLLIHGARSVVSRAQGKSDARSRWITQLRQRVGMNKACVALANKNARVVWALLATGDRYQAAA

SEQ ID NO: 114572 - protein, 482 aa, unidentified
MANRKKSTFQRLTNGRLNRTQRRELERKLSAQDPGLEIVNRNVAGIDVGNESHFVAVPPGRDAQPVQEFGSWTADLERMAEWLKTCGIETIVMQSTGVYWIALYDVLEARGFKICLANARHTKNLPGRKSDVQESQWLLKLHTYGLLRNSFRPPDEIRALRSLWRLRDRHVKEAGRAVQHMQKSIVAMNLQLSNAISDITGVTGQVIVRAILAGERDPAKLAQLRDRRIKATEEEVARSLEGNWREDLLFELGQAVATYDFIQKQTAECDQRLQTLLAELPARELEAAGRAAEAAGKPARKKRSGGKAKNKPPFDLQAELNRVCGVDLTSIDGIDVMTAQTIVAELGTDFSRWQDESHFASWLGLSPSRDISGGKVLKQGTLKVKNRVATALRMAANALWHSDSYLGARYRSLRTRRGAPKAIKAMARYLACLIYRMFTRGQAWVDRGAREFETRRTQRELSALQRKAAAHGFKLVNLQVPA

SEQ ID NO: 114573 - protein, 411 aa, unidentified
MEVMVERAAGLDVHQASIVACVLIGRPGYKPRKEIRHFGTMTADLEALRDWLRELGVTHVGMESTGVYWKPVHTILEGFFTLIVANAHHIKAVPGRKTDVKDAEWIADLVRHGLVRPSFVPPPEIRELRDLLRHRRTLAETLASERNRTLKLLETANIKLSSVATDVFGVSGTAMLKALVEGDMAPEAMAELAKGRLRTKLEQLVKALQGRLTEHHGFLLRLHLRRLDEIERDLAELEARIADRMKPFRRQVNLLKRVPGIDEIIAAEIIAEIGIDMTVFGNARRLAAWAGVCPGNHESAGRSRKTSTRKGNLYLKTTLFRAAVCAAKAKGTYYKEKYYRLKARLGAKRAAMAIAHKILVAVFHILAEGTEFRELGPAHLDRQHKHRVTKGLVRRLDALGYQVILRPKLAA

SEQ ID NO: 114574 - protein, 410 aa, unidentified
MTVYAGVDWGFEHSQVFALADEGSVVIDERVPSAPDAVARVIERLVSHAGSSADVLVGIEKATGNVVEQLLHAGLSVYNINPAKVQAARVVVSMSGAKDDRRDARVLAKLVESFREDLVCLVPQGSDMRRLRRLGRHRHALVKQRTQLQNRLSAAFREYFPAMLQVGSLDTEWHLRLVCRAPTPLDARELAVDEVQSILSASRARTRAEAVLATLDATPPTALDGVYDAMRFEIPMWAEQLLMVTKQIRLVEQQSAALLERLSTDSADGPSDVQLVLSLPGVGQRTAVVMLGEGLVDLARHNLPAARCLTGVAPVTEATGKRQSKKNPKVVMRRACNHYLRDALHNAVMAGVGNHPELQQRYRRRRARGLTPGAACRGEADRLLRILHAMLRDRTLYGQPAEPPTVRLSS

SEQ ID NO: 114575 - protein, 361 aa, unidentified
MESTKYIDRTKYIGMDVHKETVSIAVMNSTGKLVMESIIETKTATILQFIQGLRGDLHVTFEEGTWAAWLYDLLKPHVTKIVVCDPRRNALLKEGNKGDKVDARKLVELLRAGLLRPVYHGENGLRTLKELSRSYLTISKDLTRVMNRLKALYRGWGISCEGATVYAPHHRSEWLGKIAEAGVRRRAEFFYQQLDALQALRQQVRRDLLAESRNHSARKLLRQIPSIGPIRAALLIALIQTPHRFRTKRQLWAYSGLAIETHDSAQYRYVAGQLQRSKKPQQLRGLNRNHNHDLKAIFKGAATKAGSGAGPFHDFYQALLTKGMRPSMARLTLARKIAAITLIVWKKGAHFDVEQLKPQAA

SEQ ID NO: 114576 - protein, 341 aa, unidentified
MAAIGIDTHKATLAACAVDERGATLAEAEFGNDPAGHRALAAWTRQVAPAALIGVEGSASYGAAAARYLLGAGLRVAEVPPHLSRRERIHTRRAGKSDPGDALAIARITLRETRLPPVRGDDASHHQQLLVEAREDLVAEATRTRNRLHADLLVLLPGYQRQTARLVSRRALAIVRRRLAHRPQLQARLARERLACLLRLEADGARLEAEIGSRVAGHRLLELPGVGPLVAAKLLGEIGDARRFASADAFAAFAGVAPIPASSGQVQRMRLNRGGNRQLNRALFTVALVQSQHHAAAIAFMARKRAEGKSWREALRCLKRHLARRVYRLLEAPIASAEMAA

SEQ ID NO: 114577 - protein, 349 aa, unidentified
MIWIGVDAHKRIHQAVAIGESGTQGERTLANTPAAWASLLEWARQWPERTWAVEGAWYLGRGLAQYLAEQGERVHEVSGRLTAERRTKSVRRGKSDRLDAHAVAQLLREEAARLPRVLAQDDALASVQLWSRTQAELTKDMTRLVNRLHDLLLLCDPQYAERLPALTTKAGIVALLEYTAPGASAIAREREAVIRGTAEQLALLDEQDRELRRKLERASTARFSPLRQIEGVGPLIACAFVAELGRPRPGFGEEQLAALAAAAPLEASSAGALRHRLNRGGNRRLNMVLHQIVLTQARIYPPAQAYLARRRAEGRSAREARRALKRLLVRRVFRAWRACFETSLEAVAA

SEQ ID NO: 114578 - protein, 383 aa, unidentified
MGDHSEAFVAFDTSKLRNAVAIADGGRGDEVRFLGEIDNTPAATAKLVRKLASKYERLTFCYEAGPTGYGLQRQVKSLGHECIVAAPSLIPKKAGDRVKTNRRDAMSLAKLLRSGDLTAVWVPDCQHEAMRDLTRARETAMLDLRAKRQQISAFLLRRGVHYPEDKRTWSKSHLNWLASQKFEIAEHRVVFEELMEAMRQAQGRLDRLEAAIRTAVPDWSLGKLVIALMAMRGLDIISASTIVAEVGDLSRFRTPRELMAYVGIVPSEDSTGDKVKRGPITKTGNRRVRRMLVECAWSYQFPPRLSKDKQVKVDAVPQAVREIAWKAQCRLNQRYRALLRRGKLKNIAITAVAREFVGFIWAVAQAVGAAPVANNRTAPAAAR

SEQ ID NO: 114579 - protein, 410 aa, unidentified
MAERFVGIDVGLREHRIAVLDRDGEAVGQSFTIAASTDGVATLLRTLAARDATAAQTLIGLEASGHLWENLEAALGGAGYRVLVLNPLQTRRYRDVVRRKAKTDDIDAHVIAGLLRSGAAQASYVPDEPIQSLRELARLRARLMADRQDYQRQLVAQLDVVLPEHRAVLGDLLTARARGILAQFPTAQHLANANPRAIRRAAEDAGARGFSLDDATGVRDRARRSLYSGKAAAARAHVVRTLVSQLERLTSAIDEVDHAATTLLPPSEPGTGPSDAELLQTIPGIGPQTAATLLGELGAFTRFTDARALVAYVGFYPVIQESGDRAATPRLSRVGSRIARRSLYLAAVNAVRGSGEWRTIYLRKKAQGKTAKQALVVVVVKLLHALYAILKHRQPYNPSRLLVAPATIGS

SEQ ID NO: 114580 - protein, 340 aa, unidentified
MNVTTIGIDLAKSVFQLHGVDAQGEVVFRKKLRRSAVLDFLRELRPCLIGLEACATAHFWAREIGALGHDVRLIPPAYVKPYVKRQKNDAADAEAVCEAVTRPHMRFVPIKSTERQGVLMLHRTRDLLMRQRTMTLNAVRAHLAEFGIITAQGPHKLLTLIRAIRTGEVPGLPRIARIALESLATQLDVLTDEIRKLERQLMLWHRADKTSQRLKTIPGVGVITATALAASVPDPGVFKSGRQFAAFLGLVPRQNSSGGKDRLGRISKIGDGYLRRLLVVGATSVVRRANSNTSATGAWVRCLLERKPARVVTVAVANKTARTAWAILARGETYRASMTA

SEQ ID NO: 114581 - protein, 343 aa, unidentified
MEIIGGLDVHRKQITFDYIEIDTGEVKTGQIRPATRENLRSWLSRFEGEEASFALEATTGWRFVVEELQRAGCEPHLAEPADTRTMRGKKKRAKTDRLDARHLRDLLHQGRLPQSWIPPSHIQDLRLLVRMRKNLVDERTAFLQRIHAQLFHHGHPQERNLLSSDRRGQFEEMELPGAARKSIELSLKMIDHINEELGPIEEEIRSFARRQAGCKALMGHYGIGELTSVAILAELGDTRRFRSSRHAVRYAGLDVTVSQSDDKRAAGKLSRQGPPTLRWALFEAAQCAWRKGSPDHDYYIESKERLGGNRACLSIARKLVRKAHHTLRELGEEALLEPVGTVE

SEQ ID NO: 114582 - protein, 349 aa, unidentified
MRFYTNTHKHHCGIDLHAKTMYLCILDAEGQILLHKNMKSSPEAFLAAVAPFREDLVVAVECIFTWYWLADLCRSEGIEFVLGHALYMKAIHGGKAKNDKIDAFKIATLLRGGNLPKAYVYPPEMRATRDLLRRRLHLVRRRGNLLAHIQNTHHQYNLPEPRAKIAYKANREGVAEAFTEPDARKSMEIDFMLVEQYDKIIKDMELHLERRAKQHDPQAYHRLRSVPGIGKILALTILYEIHDIKRFERVQDFLSYTRLVKCDHSSAGKKLGTGGAKIGNVHLKWAFSEAAALFLRSNPEGQKHLRRLAGRHGKAKALSILAAKLGRTVYLMLSKERAFDMERFMAHSR

SEQ ID NO: 114583 - protein, 410 aa, unidentified
MRKMFKRVAGLDVHKDQVTACVRIAGEGDQEEIHEFGTTTRELLALRDWLAAHHVELVVMEATGVYWKPLYYVLEDDFECWVVNARHFRNVPGRKTDVRDAQWLAELAQHGLLRASFVPPKEIRELRDLTRYRKTQIQERTRETQRLDKILQDAGIKLSSVASRVLGASGRAMLDALVKGTTDPEVLAELAKGHLRRKIPGLKEALEGKFSRHHALVVGQILAHIDYLDEAVSNLSAEIEEVVAPFAEKVDLLKTIPGVDDRTAQSLLAEIGTDMSRFPTHRHLASWAGMCPGNDESAGKRRSGRTRKGSKWLRDTLVQAAHAAARAKNTYLGSQYARLKGRRGAKRAAVAVGHSILVSAYHVLSRSVPYQELGDDWLLTRGRDVQTRRLIKQLTRLGHIVTLQPSEVSA

SEQ ID NO: 114584 - protein, 406 aa, unidentified
MNMNAVDIDVSKRKSTIAVLRPGGEVLMKPFDIPHKSADFQTLVNKLKGLDGETRIVMECTGHYYEPVARELAQADFFVSAVNPQIINNFQGQDNPLRKVKTDKADSVKIARYTLDSWANLKQYTLMDELRSQLKTMNRQFDFYTKHKTAMKNNLIALIDQTYPGANTYFDSPARDDGSQKWVDFLDTYWHVDCVRKMSLNAFTDHYQKWCCRRKYSFRKSKAEEIYGAAKELIPVLPKDNFTKCIIKQAVAQVNAASQTVERLRALMNETASKLPEYPVVMAMKGVGPSLGPQLMAEIGDVTRFTHKGAVTAFAGVDPGVNDSGDYSQKSVHASKHGSPVLRKTLFQVMDILIKTKPDDAVYLFMNKKRTEGKPYYVYMTAGANKFLRVYYGKVKEYLSTLPQSN

SEQ ID NO: 114585 - protein, 352 aa, unidentified
MTVTIVETPTHARAITGGVDTHAGVHVAAALDPIGGLLGVAEFAASPAGYACLLEWLGGFGTVCLVGIEGTGSYGAGLARHITAAGIRVVEVDRSDRQDRRRRGKSDPLDAVSAARAALSGRAAGTPKGRDGQVEAIRALMVAKRTARSERIQTINQARSLIVTGPDDLRARFAGHSADDLVAELASLRPRPGSMIRYHTLLSLRELGRRVAFLDGQLQRLDALIVPLVTARAPGLLALYGVGHDTAAKLLIAAGDHPERLRSEAAWAHLCATAPIPASSGKVTRHRLNPGGDRQANHALYRIVITRMSSHPPTRAYVDRRSKEGLSKKEIIRCLKRYVARQVYPHLRPGSG

SEQ ID NO: 114586 - protein, 342 aa, unidentified
MHITVLGIDLGKNSCSVVGLDGSGRVILRRRLPRQGVVKLAAGLPSCVMAMEACCGAHHLGRTLREQGHTVRLMSPEYVQPYVKAQKNDDRDAEAIAEAATRPTMRFVELKSETQLDMQSLHRARDRLVGERTALINQLRAFLLERGIAVAQGRRKLELHLQTLLAAEQVTLSPRTRRLIEDMCAEWQALDRRILAFDEEFAEQARSDETARLLTTIPGIGPLNATALVAAMSKAETFGRARDLAAWLGLVPRQATTGGKPKLLGISKRGNVYLRRMLIHGARAALPMLSKGETPLGAWLRSLLARAHMNTVVVALAAKLARIVCAVLHSGKPFEVQVAKAA

SEQ ID NO: 114587 - protein, 430 aa, unidentified
MKSNTQNAKIEAITETTLVLGIDVGSETHYARAFDFRGMEYSKKPFKFSNNEAGFMTFKAWILNIKEKHGKDKVVPGMEPTGHYWFNLGKFLQDNEMKPVLVNPHHVKKSKELDDNNPTKNDRKDPKVIAGLVREGRYMIPYLPDGVYADLRTASNMRFQLQAELTRIQNRISRWFNIYFPEYKTVYGQPDAKSGMMILKIAPLPEDILTLGIDGVNQIWRNAKLRAVGKARAKTLIEAAEHSVGSKEGALSARMEIRMLLEDYESRNARLQEVMALIEELVKQIPMAEKLLEIKGVGIKTVSGFLAEVGDISRFNTPKELQKLAGLALVENSSGKHKGKTTISRRGRKRLRYLLFEVAMSLVAKNPEFRELHVYYTTRKRNPLKKMQSLMAVATKLIRVFYAMLTKGVDYDPKKMISDIKRPAVYLQAA

SEQ ID NO: 114588 - protein, 402 aa, unidentified
MNNVAGIDVSKGKSMVAILRPYGEIISKPFEVKHTVSGIRSLIEQIQSIDGESRIVMEHTGRYYEPLVRELSKADLFVSAINPKLIKDFGDNSLRKVKSDKADAVKIARYTLDSWTELRQYSLMDEIRNQLKTMNRQFDFYMKHKTAMKNNLISILDQTYPGANTYFDSPAREDGSQKWVDFSATYWHVDCVRKLSLNAFIDHYQKWCKRRKYNFSRSKAVEIYEASKELVSILPKDDLTKLIIKQAVEQLNTASQTVEQLRTMMNEAASKLPEYPVVMAMKGVGKSLGPQLMAEIGDVSRFTHKGALTAFAGVDPGVNESGSYEQKSVPASKRGSSTLRKTLFQVMDVLIKTKPQDDPVYLFMDKKRAQGKPYYVYMTAGANKFLRIYYGRVKEYLSSLPE

SEQ ID NO: 114589 - protein, 359 aa, unidentified
MAVIEEGERRVVGGVDTHKDLHVAAVVDQQDRVIETRCFATTRQGYRQMLAWMRSLGELQRIGIESSGSYGAGLLRFMQQAGIAVLEVTTPDKQDRRRRGKNDDLDAQNAAHAAFAGQRTVTPRSRDGMIESLRVLMASRKTAVSARRIALQMIHNTIVCAPDGLRDQLRSLTRMQLVRTLAAWRPDMTAYRDLDSAYRIGLKSLARRYLELHDEIVDLDVMITAIVDELAPNLVARNSIGHIGAAQLLLTAGDNPERLRSEASFASLCGVSPVPASSGKTVRHRLNRGGDRAANSALHIIAIGRLRTDQRTKDYVARRIAEGHSKLDAIRALKRYLAREVYTLISQRRREINATRIAA

SEQ ID NO: 114590 - protein, 341 aa, unidentified
MQPTTIGLDLAKNVFQVHAVSADGKVLVRRKLRRSEVRDFFAKQPPCLVGMEACASAHYWARELQRLGHRVRLMPATYVKAYAKRGKSDAIDAEAICEAVTRPTMRFVPAKSVDQQAIVMLHRTRDLLVRQRTMLANAVRGHLAEFGVVGAKGFWRLEELVAMARTTPASQLPEMARECIETIVVQLEALAERISAVERSIQEWHRQNEASQRLETIPGIGVITATAMAAFVTDIGVFQSARQFAAWLGLTPKLSGTGGKVQLGRISKAGDRNLRRLLVLGATSLVHRARIEPAKLPWIAALLARRPPRVVTVAVANKLARIAWAVLSRAEVYRHNVVAAA

SEQ ID NO: 114591 - protein, 346 aa, unidentified
MTKVIGMDLGDKRHVVVVFDETGDEVEVAKITNTSRQVQRYFEGHPGAVVVMEAGTHSAWITRLLESMEHEVHVGNPRKLRAIWDTDDKSDERDARVLGLMYRLEPRLLHPVFHRSERAQADLELIKAREQLVACRSKLINHVRGVVKSMGERIPKCSTQSFHRRAVEHMPSALAEALGSVVAMIEKLTEQIDDQDKLIKAISESQYSETQWLRQVQGVGPVTALAYVLTLEHPSRLSKSRSAGPLLGLTPKRDQSGDTDKQLRITKAGNSHLRRLLVNCAHYIMGPLASDSDLRRYGERIAARGGKNAKKRAVVAVARKLAVLLHRLWVDQSEYIPLRSARKEAA

SEQ ID NO: 114592 - protein, 341 aa, unidentified
MEEVSTIGLDLAKHVFQAHGASASGGVVFRKKLRRAQVLTFFAGQPRCVVAMEACASAHHWARGIGELGHEVRLIPPAYVKPFVKRQKNDMADAEAICEAAQRPTMRFVAVKSEAKQAAAVIFRARDLLVGQRTQIINALRGHVGEYGLIAPQGPSHVERLIAQIEDPASGIPDAARSCLSRLVAILRGLQVEIVELDREIAARAKADDVARRLMTVPGIGPLIATAIEALAPAPETFRSGRDFAAWVGLTPVQRSTGGKERLGRTSRMGERTLRRLLIVAASSVVRWAKRKGVPARSWLGRMLSRKPPMLVIVALANKNARVAWALLAKGGVYQAPAVAA

SEQ ID NO: 114593 - protein, 370 aa, unidentified
MSSENTVYVAIELSFSSWLVAARLPGTERSRLHRIEAGNTLALLALIAELRSRASTKRGEAVEVACCFEAGRDGFWLHRVLTAHGIAAYVLEPTSILVNRRARRAKTDRLDVEGMLRVLATWLGGDRQVCSMVRVPTPDEEDAKRPHREREHLVQERLRLENRIEGLLFTQGIRKRPSLRSWEREMAELRTGDGRDLPPNLRAELDRLRCRLVLTLELIREIEAERADAAAAPEEVCQKTAALARIRGVGENFAAVLTREVFYRRFDNRRQLGSSVGVAPMPHQSGAMDRDCRIGRAGNPRARKTLIQLAWLWLRYQPGSALASWFRERVGVLAGRTRRIAIVAMARKLLVALWRYVETGVVPESVELKV

SEQ ID NO: 114594 - protein, 360 aa, unidentified
MKTTELTHAMKTTTLPNAETQARIHQLKLGVDWHADHFRVVRMCDGQSPQPAQRFTPASFLPFVQKQLTLADQVFVVYEAGPGGFHLHRQLTALGVTAFVVHPQKLDPQHKGVVTDKTDARELTLNLDRYLRGNLRAMSVVRVPTPAEEQRRALSRQREQLRRERQRLAAQGRSLCLTQGIRLRGEWWKAPLTLPDWLEARLAIWRQLITAVEALLETLTQQVEALAPKVRPKGLGPLTLGMLIAELCDWSRFKNRKQIGSYTGLCGGVSSSGPSHCDLSITKAGNARVRWALIELAWRMVLYQPQSQAVQRWRHVLLNPTAAARQKKRALVALARQLAVDIWRWQTGRATPEQLGWVMV

SEQ ID NO: 114595 - protein, 519 aa, unidentified
MTRSRSSSPRAPKGVLIQKPNGSLSIRVQAVGPERFGILSIDVAKARFKMMLADFFAKPLILPTEFHQSQAGFQAAVDSVRAAQHQAGLGEVVVALERTGDYHRPIQRAFRHAGFEVRLVHPFATKQFRQVANPGNKTDDTDLAAIHRAAVNGFGLSEVELPSDYEQLRLFIRHRRDLVVKASSLRCQLREHLHALMPGYEGCFDDIWDCPTAWIVARALGSAAAVRAAGLAGLQRLVQQAGHRCQPKTLQRILLWAKSAPAAHPQPESLRRIIDDLSSDWAAKKQQILGIERDIARLLARTPYVRLLILPGINVVSAADAAGELGPITHYADANHITGRAGLVPTRYQSDRVDRSDGTLRRCGNRRLRTALLQIADNLVVCNHYFHAKADQWRVQRKDPRWMRVKVAKSFSRLAFALVAGDAFFAHPSLQPRHYLLHKLQAFHDGHATPLPAVLEDLQAALTQLPKPEYGNEAKPLQDELDRCGRRRGPQPLSEILLAVLARLGIGRVQSTSEGQDLS

SEQ ID NO: 114596 - protein, 392 aa, unidentified
MEPVVGVDVAKGSSVVQAFRKRNEPYGRAVDIEHGTSGFEQFGEMLGRLQVETGLAPVVVLEATGHYHRALVSYLDRSGYTYYMVNPLQSKRAKGTQLRKVKTDALDAWHLAEMYYRGDVKPHRTWDETFTELQHLTRQHEFVTGIFVQAKLNSRALLEQVFPEYEQVFYNVFSATALTVLACCLEGDVEDWNEVIQGSAGRSHSKRWANEKARKLEEVLGHWRESRPSSSQSKALLGMVTLLQAMIRQLDALEKQMEEMAASLPEVELVKSIPGIGTKLAAAIVAEVGDVKQFSDAKQLVAFAGLDPGIFSSGKFTATSTRITKRGSKRLRRSLYLAVQCGMRKNANARIRSYYEKKRKEGKPYKVVVIACANKLLHHIFAILQKGQPYQT

SEQ ID NO: 114597 - protein, 339 aa, unidentified
MTEITRVGLDLAKNVFEVHAVNAQEQVVVRRSLRRSQVLTWFAKHPPCLIGIEACGTANHWARELTTLGHSVRLIPPAYAKQYVRRNKNDAADAAAICEAVSRPSMRFVPIKTVEQQADSVTHKARQILIKQRTMAMNSLRSLMAEFGIVVPQGPQHIGKLLAILADPEDTSVAAVARTALNTMSQVLSALEMQIGVLDKDIRVRARTDVTARRLDTIPGFGPILSSAIAAIVTDPRHFDSGRDFAASLGLVPRQDGTGGKVKLGPISKRGNGYLRRLLVNGATAVLNGKNARNDPWRAKMLDGKPRKLAAVALANKMARIAWAVMTRQEDFRPRAVPA

SEQ ID NO: 114598 - protein, 430 aa, unidentified
MKQYELLHSLFVGIDVSMKENVVHAMPFSPEDHPGHAHLRFSAPNTPAGSVGIVEKVSDFLKLYPDVIQVVIALEATSVYSFHLATFLSVAHFNGHIPAIVYSVNPKEIHAYKKTFTDVGKDDYVDAMVIADYARSNKIRSRPWKGPELLGLRVLTRLRFRIAKLMGIVKNSTGNSIYLECSGLMTGENPFCNVWTTTCQELLTTFQGPDEILSLSDEELLNFITEKGHGRFSHPLDVVEKVKKAARNSYRLDKRVYEPLTSGLSVSFFIIHSLEAAIKKLDKSIETMAKSFSSDSYHILLSIDGVGPVIAGGLLAEIGDIKRFKTDDALAKYIGLTWRGKQSGQSESPVKHLSKAGDVYLRYYVLLATGQIINYSAKYREAYERIRSRKTLFPYRAALNLVARKIVRLIFTLLDKHQLYSDNKVMVTLE

SEQ ID NO: 114599 - protein, 378 aa, unidentified
MPSESVVHVAIELSVSSWLIAARLPGAEKPRLHRIEGGDTAALLAFFAELRSRASAELDGSADVACCFEAGRDGFWLHRLLTAHGVATYVLEPTSILVNRRARRAKTDRLDAQGMLRVLAAWLGGDRQVCSMVRVPTPDEEDAKRTHREREHLVQDKLRIENRIHALLFTQGIRARPSLRSWVLDMAELRTGDGRALPPLLRTELNRLRRRLVLILELIRELETERAEALAAAADDAMVRKITALQCIRGIGSNFAAVLVREVLYRSFANRRQLASYVGITPMPYQSGGMDRDRSISRAGNPRARTSLIQLAWLWLRYQPGSALATWFRERVGTLQGRTRRIAIVAMARRLLIALWRYVETGVLPEGVEIRAETTPIT

SEQ ID NO: 114600 - protein, 404 aa, unidentified
MLVKYHVGVDVGKDRHHVAVLDLSQGSYRRSFSFTNDHDGFSEFVSAMEKLSSEKSDFLIGVEACAYALNVSYFLLAIGFSLVEVNPFRAGQFRKAQGRKAKTDKIDARAIAAILALGDHKTLSIPDPILDNLRELTRFRVDLVNERSTMIIHLQEALSVVFPEYEKVFRTLDSAGSLALLTTYPGPEHVIAAGEEAVGKTLSLASPRRMSRGMARRIIEAAILTVGVVQKQPALGIKISILAKRIAELQGTIRDLDRQITALYNTLPQRPCGFPVGRAPSLATIVAEIGDIRRYPTLKKFLSHLGWCPQSFQTGNYRMEHPRMSHAGNKYVRRIIWMLSIFAVQHVPRYREYFQRRVNEGKGKMHIIVAVGRKLLSAFYAMLKNGTVYDPNWEENRRLAPARL

SEQ ID NO: 114601 - protein, 484 aa, unidentified
MAKRKRSTFERINLERMNRRQRRELRQRLEKSDPGLEVVHPNAAGIDVGNQSHFVAVPGDRDAQSVREFGCWTSDLVKMAKWLKGCGIETVLVQATGVYWIALKDIVEQQGIEVVVANAQHTKNLPGRKSDVQECQWLMKLHTYGLVRGSFQLAEDMQGVRAMWRLRGRHVEEASRAVQHMQKALTQMNVQLANVLSDISGKSGQAIVGAILAGERDPGKLAELCDRRVQASAMEVAESLRGNWRDEMLFELGQARESYQFALQQIQSCDRELESYLKVLPTRQLEIALPRPEPSPATAVRARKAPRQQGHTPDISGLRDELVRICGVDLTTIDGISVITTQTILAEIGTDMGRFPSEQAFVSWLGLTPSRDVSGGKLVRAVRRKVSSRAAQALRMAATTLRCSNSYLGARYRHLQKQLPSKASAVKAMARYLGVLVYRLLTKGQAWVDRGAARFEQKRKALNLASLQARALASGYQLVPVTAV

SEQ ID NO: 114602 - protein, 374 aa, unidentified
MENIITYVGMDTHKKQHRIALHHPGQEEIIDFTINNNIRDIKKMLNKIKKQAPGQVEFCYEAGVCGFTLKRRIEDMGCKCAVIAPSLIPRKPGERIKTDRRDAIKLLMLFKAGLLTEVHAPDEQAEAARELTRLRETANENLKRIRHQVLKFLTRHGYVYHQGSHWTIKHITWMRTIKLTEPMLTKVFEHYFDQMIYCTTRLEKLNRELEQLAESQEYKEVVGVLSCFHGIKALTAITIVTEIFEFGRFESPRHLMSYLGLTPSEDSSGEKQRKGSITKAGNKRVRRLLNETAWHYRHRYVPSKVLKKRRQGQPQWAIDIADAAGRRLTKRHRHLINNGKMPCKSNIAVARELAGFIWFAVTQYQARKNVKAVA

SEQ ID NO: 114603 - protein, 460 aa, unidentified
MPPTKKGKRNEKKATELPILKPKAAGINIGATEIYVALHPDCDPQPVRSFATFTEDLHRLADWLKAHAVDSVAMEATGVYWIPLFQILEARGFEVCLVNARYYQNVPGRRTDVSDCQWLRHLHSVGLLRPSFRPADQVCVLRSLLRHRDGLIQAASGHVLRMQKALNQMNLQIHHVISDITGVSGLRILDAVLAGDRDPKKLAALRDGRIKASEETIIKSLVCDYRREHLFTLRQSLAAWRTYQEFIAECDHEIEEQLTIFDAAIDVHANPLPVAKVQRRARYTNEPDFDLRGHLYRIFGIDLTAIPGISVLTAHTLLAEVGTDISRFRSAAAFASWLGLCPDNDISGGKRLSVKTRHVNNRAAGALRMAANGLQKSQTWLGNFFRRMRAKLGAPKAITATAHKLARIVYQLLSTRQSYDESIFAKSEQAARSRMQAKLTAQARGLGFQLIPSADLKSVP

SEQ ID NO: 114604 - protein, 451 aa, unidentified
MRTSQPSQPHADVLMCVNANAAGLDIGSEEIWACVPADRDPQPVRSFGTFTPDLYALADWLAACHIETVAMESTGVYWIPVYEILEARGFKAHLVNARHLKHVPGRKSDVKDCQWMQHLHTCGLLTGSFRPEAELCALRAYMRHRATLLEYRAAHIQHMQKALQQMNVQLTQVLSDITGTTGLAIIRAIVAGERDPVQLARFRDPRCQRSTEEIAKALTGHYRPEQVFALKQALALYDTYTAQVRECDAEIERQFQAITPVWEDDLPPLDPTDKRDSHSKNAPSYDARGLLYQLTGVDLIAIPGLHAGSVQPLIAEIGLDMHPWPTVKAFASWLGLAPRHEISGGKVLRRGTLKTGNRAGQALRLAAYAVSRSRSGLGAYYRRMRARLGPKAAIVATAHKIARIVYHMLKHRTPYRDLSPEDYAQRARERDIANLRKRAAKLGLALVESPA

SEQ ID NO: 114605 - protein, 370 aa, unidentified
MNDFITSVGLDVHKDSIEIALADHGGSKEVRRYGEIGGDLTSLDKAVRKLQSKGSKLRFVYEAGPCGYDIYRHLTKQGHSCTVVAPSMVPKMSGNRIKTDRRDALSLARLDRSGDLTPVYVPREEDEAMRDLCRAREDAINAQRTARQRLCAMLLRLGLRYSGKTAWTPVHFLWLSTLKMPHPAQQIAFQEYIHAVKESTERVARLTEQIQKLMPEWRLAPVVKALQAMRGVAPMIATITMSEIGDLGRFENPRQLMAYLGLVPSENSSGKKEKRGGITKTGNSHVRRALVEAAQTYHHPARVSRLLLVRQEGVPDHICKIAWKAQVRLCGRFRRLIARGKTWNKVVTAIARELSAFMWAIAKEVQIQSV

SEQ ID NO: 114606 - protein, 425 aa, unidentified
MPLSEFSAYVAIDWADQHHCWRLADAEGKYRDHGDLRNTPEAIDTWVAGLLLRFPEGSLAVCLEQSRGGLVFQLGKYARLVLFPVHPATIASYRQAFFPSGAKGDPGDTALLLEVLLHHRQHLRRLDPDTPETRLLGMLIELRRRLVDERTRQSNRLTAWLKMYFPQPLDWIDNIDAPLGCDFLERWPTLQQLQRAKPETVERFFREHNSRSETRIQERLEAIRTAVAAVQDTALLEAGAAATDALVALLKSLNANIGSLDQRIAALPKHPETDLFAGLPGAGPVLLPRLIVAFGTRRERFQSAAELAAYSGIAPVTKQSGKSKSVQFRRACPAFLRQTFHEFAAHSVVKSSWARQFYDQQRQRGKRHHAAVRSLAFRWIRVLFRCWKDRQPYDEARYLEALQKRNGRPREGQGCDTASVTSPRV

SEQ ID NO: 114607 - protein, 353 aa, unidentified
MTSTKYIGMDVHKESISIAVRNVAGKIVMECVIETKANAILDFIHGLRGELQVTFEEGTWATWLYDLLKPHVTKLVVCDPRKNSRQGNKNDQIDARELADRLYMNKLSSVYHGEAGVRTLKELARSYLTISKDLARVMSRVKAIYRSWGIPCAGKQVYAPRHRAEWLAKITEVGVLRRAEFYYQQLDALRSLRHEVRRDLLAESKKHKATKLLCQIPAIGPIRAALLIALIQTPHRFRTKRPLWKYSGFAIETHSSADYRSVKGQLQKSKKQVSVRGLNRDCNHDLKNLFKSAATIASVKPGPFQEFYAALLAKGMRPEMARLTLARKIATIVLIVWKKGVSFDAQYLKPQTA

SEQ ID NO: 114608 - protein, 495 aa, unidentified
MKAKACKAKGKHSNSSKRGAKITVRRGADGMEIVNPHAGGIDCGAQEHYVAVPPQSVEPGEPVVRCFSAFTEGLDALVEWLKACGVTTVAIESTGVYWIALCQKMEAAGIEVFLVNARHVRHVPGRKTDVKDCQWLQRLHSFGLLSASFRPEDMICRLRSLQRHRLNLVSTAGAEIQHMQKALQQMNLHLHHVVSDITGVSGLRILDAILAGQRDAGQLAKLRDHRVYKSTLAQMEAALVGDYRPEHLFVLGQSLQAYRFYQARTQDCDAEIERLLQQLAERFESSSVLAAELSQPEVLNDAAPSQNPRPAKRKVKRRPQANEPKINLADYLRRICGVDLTQVNGLNVLSVLLIVSEIGVDMSKWRSAKAFCAWLGLCPRNKISGRKVLDTRTCKVINRVATTLRLAAQAVGRTDTALGIFYRRKKAHLGPPKATTATARKLACLVYHLLKYKEQYREPDPTTYQLKVQKTILAKIQKQAAALGYKLLPNALVPA

SEQ ID NO: 114609 - protein, 355 aa, unidentified
MLYLGIDQHARQITISLRDETGDVVQARQVSTRPEKVQAFFQQLTRERLRNAEPFVAVVEVCGFNDWLIRMLNDYRCQKVIVIQPEERKRRKTDRRDAAALSELLWVNRGRLLDGKPVRGLRVVEMASPTDQENRRLTILRKDARTARTRVISKIKLILRRHNLQWHLPTKTFPTLAAIAWLKKLVLPSIDRLEMNQLLADLEHVEQQYKELEDVIAERWGNSEEAKLLETMPGVGRYAALALSCRVGRVKRFPRGKSLANYWGLTPGCRNSGEHDQRLGRITKAGSSMARWLLAQAAHQALRKDAQLREWFKRVKRRRGSSIARVAVMRKLATRIWQMLSYGKTYWECREFSTA

SEQ ID NO: 114610 - protein, 338 aa, unidentified
MIVIGVDVHKQSVTAVAVDDAGRTLDERTVPVGSEELVGWASALGGERLWAIEDCRLLTPWLERQLLGLGEELVRVSPKLTVPERRAGRTRGKSDPIDALAVARAALREPDLPRPQPGERVHREIKLFVDHRDDLVDERRRTQQRLRWHLHELDPTLVVPLRRLDRATQLERVGRWLARREQDVQVRIARELVARCRSLTKAIDELNQELEQRAAAVAPALLELPGCGAITAAKLLAEIGPISRFKTDAQLARHSGVAPLEASSGKNQRHRLDRGGNRQLNAALYRIAITQSRYHPAARAYLERKQAEGKTRREAIRCLKRLLARSVYNALKASPALT

SEQ ID NO: 114611 - protein, 393 aa, unidentified
MEKQLHLIVGIDIGKHYHQATVIDDSGQILGGSVRFPNTTAGAELLLKRITSVNLEGLPLLFGLEATGHYWLPLYAYLTEKGYQIVVLNPYQSDAFRKVSMSSTKTDKEDALLIAELLRFGCFPQTKMADEDMIALRNLTRFRLTLNQQVTDSKRRILTILDKIFPEFESMFSDIFGKTGRSLLKKYPTPEEMETVSLKKLTSLITKLSKGHFKEEKAQEVKMKTKISFGITLALESLTLQLKLLLETLEFTEKQLKVVDIQVENLLDNTCVLLTLPGVSKTLAAAIISEIGDIKRFKTSAQLVSFAGINPTVRQSGNFLGSRNHMSKKGSPYLRLALWQAAITSSRFNPILKEYYQLKIKEGKSHMTVIGAVARRLTGIIFAMLRDQTAFTV

SEQ ID NO: 114612 - protein, 343 aa, unidentified
MQITTIGLDLAKHWFQVHGVDANGHVVVRRRLWRSGVIPYFRSLEPCLVGMEACATAHHWARELIALGHTVKLMPPAYVKAYVKRNKNDAADAEAICEAVARPSMRFVPVKDAEQQSVLMLHRARSLLVRQRTMLVNALRAHMAEFGIIAPQGLRHVEILTKTIAHEQERLPELARSILQTIVDQLNGTMARIREIEVRLAKWHRQSRVSRLLATVPGVGIMGASAIAATVADPTLFRSGREFAAWLGMTPRQNSSGGKERLGRTSKRGDKYIRSLLTAGAVAVLRHARNRPTRDGEWVRALLARKPTKLAAVALANKTARIVWAVMMRGDGYQPKEVFGQAA

SEQ ID NO: 114613 - protein, 416 aa, unidentified
MHTEAVGCWVGVDWGGKEHAVCVVGADGVEVTQFTMRQAAGALQGLAERLRALGPVAGVAVETPRHLLVDVLVEGGYAVYPINPRVSHAWRQCSSVGGAKDDRRDAWVLADGLRHHHAKLRAFVPERGPARVLGLLCEDECRFIGQRTALVQQLEDTLKQYFPAALEWFSDWTTQTAWDFVLAFPTAAQLASARPAKLAGFLRTHRVGLGPVWQKRIAARTAALDWPCNPDVVAAKSVLALALAKQLRTVQATLRDYRKQIDALFERREDKAVFTSLPGAGRKLAPRLASAFGTQRDQVESADVVQQVTGTAPVTVQSAAHRSVHIRRACRKDARCTLHHFAWQSLKQSVWAKAAYSRARRKGQKHATALRFVANKWLKIIYRMWQTGEPYDEERYLRQLTQKKSPIAYDLGLLKT

SEQ ID NO: 114614 - protein, 361 aa, unidentified
MFSERTSVGLDVHARSVVAAAIDGVTGEVFRARLGPAGEDVVGWVRSLPGPSAAVYEAGPTGFGLYRTLNAAGIRCQVAAPSRLQRPAGDRVKTDARDAMHLARLLRLDEVTPVSVPSADQEAARDLVRAREDCRGDLMRARHRVSKLLLRHGLVYSGGQAWTGRHEAWLRAQRLPAAAARLAFDSHYDAVLTVAARRNRLDEAIEAMAADSQFTPVVHRLGCLRGVSTLTGFALAVEIGDWHRFTGTSIGSYVGLVPSEYSSGASRVQGPITKTGNGHARRLLVEAAWHHRARYTVGKTMRERWDLAPAAARARGDAGNRRLHQRWVRFNERGTRHVIANIAIARELAGWCWSLAVLEDS

SEQ ID NO: 114615 - protein, 356 aa, unidentified
MNRQQSKQKLDFQGEPIYVGIDVHKKQWNVFIMSKYKEHKGFVQPPDASVLGRYLKENFPGATYYSVYEAGFCGFWPHEDLKKEGVHNIVVNPADVPSSDKERKNKSDKVDCRKLCSKLRSGDLEAIYVPERFQLENRELVRLRMRLVGDIRRTKNRIKGMLNFYGVKYSSSGWSNVFIKGLKESELVYYNGTFALRTLVEELERLTELKKKIARQLRVGLVKNEMYGELIKCLGSIPGVGLITALIILTELGNTSRFPGIDQLCNFVGLVPTLHSSGDHVHVGNLTPRKNKYIMAVLIESAWVAVGKDPALMQAYHKLCKRMKSQEAIIRIARKLMARIRYVLLNQTTYELRIAA

SEQ ID NO: 114616 - protein, 325 aa, unidentified
MQNQTIVGIDVSNATLDICVNSQREQYSFVINNDVKAISKFFKAYKEDLIIGMENTGRYNWALYEALKEAGHRIFVISPLHLKKSMGLVRGKNDKIDAVRIAAFIAKNYHELPQWKPSSPAVQKLKILLTERSFRVKAKRQLLKQQYDYAKMKHLGMDKYLMGLNKQELALVGKQIAMIEKEIETLIKADEQMHNQAKLIRSVPGAGKVLCWMMLAKTESFTTITEPRKMACYSGVVPFSNQSGTSIRGKFRVSCYADKAIKATLHLAAMSAIRLNNELRQYYLRKVSEGKNKMSALNAIRNKIVHRIFAVIKKQTPYQNHLLLS

SEQ ID NO: 114617 - protein, 402 aa, unidentified
MNCVGIDVSKGKSMIAVMRPFGEVVVSPFEVRHTANELSELAGLLKSLDGETRVVMESTGNYHAPVAWLLHDAGLYVSVVNAMLVHDYGNNSLRRAKTDKKDAVKLANYGLDHWLTLPRYIPEEDTRLMLKICYRQYQQYSKVQTMLKNNLISLLDTTFPDANRLFTSPPRADGSEKWVDFVATFWHCECVCGRPEKAFTTQYQKWCRKHGYNFSEDKALDIYASACRHFGVIPKTDTAKLLVEQAISQLQTTSSALAALKQEMQSLAASLPEYPVVMGMFGVGPTLGPQLLAEIGDVRRFHSKKALVAFAGIDAPPYQSGQIDVRSRSISKRGSASLRRTLFLVMSVILQCAPIDEPVYQFMDKKRSEGKPYRVYMMASANKFLRIYYASVKAYLESLEHD

SEQ ID NO: 114618 - protein, 337 aa, unidentified
MEHFAGLDVSMEETHICVLDREGALIREGKTRSSPAAIADFLGGGQPCEQVVFETGRMAPMLYHGLVEHGVRVVCIESRQAYQALKSLAGHKTDRNDARGLAHLARTGFYKPTHVKSLSAHAVRSLIAARKKLVGQRVTIDNQIRGLVVVFGVRLPRALSPAFKDAALKVSDGVPGLHAALSGLFAAREAMLSAIAAIDADMKKMARASKVCSRLMTVPGVGPITSLAFAAAIDDPARFKRSRDVGAYLGLVPRRYQSGEIDYTGSISKRGDVRVRTLLYEAANVMLTRSAASLELKDWARAIGARSTMRKARVALARRLAIIMHAMMRDETAFQTI

SEQ ID NO: 114619 - protein, 354 aa, unidentified
MQCVGIDIAKATFTACLCMYDFNQGCSTTPVVFNNDKTGFNQFVRWSRKEALKSYPLRYVMEPTGIYYEQLAAHLSKLGLDVCVVLPNKAREFAKYEGILTKTDDMDAYTLGMLGCLDKRLRTWVPPSPIYRELRQMTRFVADINKVKTELKNHLEALAHSQTAEKSIVKHYHNLINDIDKQLESNQKAIREKIKQEPGLSERINRITTINGIGFMTVVTVVAETNGFALITNRKQLARYAGLDVPAHQSGPVDTKRHISKQGNVHIRTALYFPAIVSTQCNPQMKDFYGRLCTRNTQSKMIGVTATMRKLLLLIYSLWKSGEEYDPTRDRQKKEAETTEGQPHGIDVGTLAEE

SEQ ID NO: 114620 - protein, 443 aa, unidentified
MKPKRRTHLRGPRGQAFADRIRGVCPEHILCVSIDISKDFHVVLLHNGLGEIVTESFEIDIFRSGFDRFCQAVNEASARTQAQVILVGLEPTGHYYENLARHIQATGQDVTLINSYAVKENRNQQMMAKEKDDDIDSAAIGDLLRRGEGSPFRPPTGIYLQLQQLDRARLGEVKIQTMVKNRIIGHLDRIFPGLILTKAAAKERYQPLFATDFWECQTLQHLVRVCPDPRALAAMAPAELRAAFHEQAYRLGPVTAQRIIAYAQKALWPDPEVVAIRRQVLVTDLQTLDEVSGRVAHYTEQLHRLVAQTPYHILTHVKGLTPTQVASLAAAAGDPANYIHAGQLFRRSGLVSGRNDSGARQRRGKGQSIIKSGDVYLRRALNAMLNGLVLHQPVLGRYYHRLKQSKPVGVARVATIRRITGILWATVRDQRADTLIWRGDNMT

SEQ ID NO: 114621 - protein, 366 aa, unidentified
MSDFTGATVAVGLDVHAASIRLAAVRADELVDERTLPYDHEAVERAVRCWPGARVCYEAGPTGFGLQRHLSERGICCVVVAPGLVPARPGERVKTDARDARKLARLHQGGLLEPIDVPTRELEAVRDLTRAREAARIDRMRDRHRLSKFALRHQRPLPFKSWGVGRRKWLGEQNFPEPAQQLAFDTYLQTLDLVDRRVELLDRQIAEFAERGDWAALVARLRCLRGIDCLTALGLVAEVGDFERFRTAEEFMSFIGLVPSERSSGEQRRQGPITKAGNAHARRLLVEAAWHARRRPKVSYELSRRQHGQDPAVLDRAWRCQQRLHHRWQRMAGRGKPSQKIVVACARELAGFVWAIATDQPLRRPA

SEQ ID NO: 114622 - protein, 327 aa, unidentified
MIDGKGAVTFEGKVTAEPDALVSLIRKRAPQAARVGLETGATSPWLYHALKKADLPVVLMDARHAKAALSMRPTKSDRSDARGLAEMLRMGWYRAVTAKSFTAHERMALLGARRHLVEIRVELDGQIRGLLKTFGLILGKGNTDALIRRAETLAEGNPVISSLVAKLAEVQRQVVAQIAALDREIRRLTRSEPILKRLMTVPGVGPVTALAFLSTIDDPERFKHARDVGPYLGLTPTRHQSGEVDRHGRISKCGDAFTRTCLYEAANVLLTKVQRFSPLKAWGTRLVQRIGAKKARVAVARKLAVILHSIWVDGTEFWWTREEARMA

SEQ ID NO: 114623 - protein, 427 aa, unidentified
MYRIAGIDVHKKKLAVVVSDVEVHGEYQFERCWFGANPEQLRFLSQWLAEHQVEEVVMESTALYWKPVWGALERYWQPICQKREGAGATSGILHLAQAQSNRGPRGRKKDFRDAERLVKRLVADELKLSFVPDWEQRLWRTLTRRRYQLTRARVQLQNQLEALLEEAHLKLSSLVSDLLGVSARRMLQAIADGETNPEALAGLADRRLRATPAQLSDALGACTELHAVYRRLIKMMLGELKVIEEHTAELNQELATLLRPHQDAVERLAEVPGLGVDSAQQILAEVGANAVVFASDKNLCSWVGVCPGDEESAGESSSHRSPQGNRQMRRLLNQAANAAVKTKGSIFEIVYRRLVPRLGHNQTIGAVAHRLCRLIWLLLHKGVRYEERGPAVSQRSRQNRTSKMIRELRTLGYRVEFLNAVPSNPMP

SEQ ID NO: 114624 - protein, 340 aa, unidentified
MKQFIRIGVDLAKNSFQVHALESEDGRATTRKLSRSAMRPFFSGVEPCLVGMEACGSAHYWARELRAMGHGVRLIPPAYVKPYVKRGKNDAADAAAICEAVSRPMMRFVPIKSEEQQARLMAHKTRELLIKQRTMAVNALRGHLAEFGVIAAKGIGRVEELIEKAANAGLPEIARATLSILVGQLSALNAAIADLTRQIASALARDPLARLVAGVPGVGALLASAITASAPDPSVFKSGRDFAAWIGLTPRQDTTGGKVKLGSITKQGNRSLRRLLVVGAIALLRVAAKHKGALGDWLIALRARKRAKVAAVALANKLARIIWAIMMTGEAFRTHMFARA

SEQ ID NO: 114625 - protein, 386 aa, unidentified
MPQPNDLSRSLAALDQDSTLVAVIEISQSSWLVGGIVPGVNRQPLKKLAADETALLQLLSRWRDEATKAGRTISRIAVAYEAGRDGFWLARWLRGRGIEAVIHPTSVAVSREHRRAKTDRLDTELLKRAFLGWLRGEQRHCSMAMIPTLEEEDAKRPNRERENLVSERTRFVNRMKSALARLGIRGFKPHLRKAPERLDTLRTAEGMALPPNTLAELRRDMARLRFVMDQIREIEAARLARLEQHPEQANHAMVRLLARVVGVGIETADMLVHEILSRHLRDRKAVARYAGLTGSPDESGARRREKGLSRAGNARVRRGMIQLAWRFLMFQKDSALAQWYRRQTTDGRGATRKTMIVALARKLLVALWQLVTTGEVPEGVVLRRAA

SEQ ID NO: 114626 - protein, 387 aa, unidentified
MPQSNDLSRSLTAFAQDNTIIAVVELGLRSWLVAGIVPGIDRHPLKKLKADEQALLRLLQRWRDEATKAGCVITRIAVAFETGRDGFWLARWLKAQGIEAYVIHATSIAVSREHRRAKTDRLDTDHLKRAFIGWLRGEPDHCHMAAIPTIEQEDAKRPTRERENLVGERTRIINRIKGCLARFGIRGFKSTLRKAAERLAVLKTPEGVLLTPNTLAELRRDIARLRFVMDQIKVIEVARLERLKKAPKEGPHAMVCLLARVIGVGIETADMLVHEVLSRNLRDRRAVARYAGLTGSPDESGKRRREKGLARAGNARVRRGMIQLAWRFLMFQKDSALSQWYRTQTADARRGTRKTMIVGLARKLLIALWRLVTSGEIPIGVALRPAA

SEQ ID NO: 114627 - protein, 425 aa, unidentified
MNKDVLSTLFVGIDVSSASNYFCAINFEGKHILDFSITNDLPSSEIAVEKIFNALQENDFKFVTLVLESTNVFSFHIANFLASNNSLFNFNSKVFVINPKESSNFRKTYSDIDKTDPQDAFVLADMARCGRINQQPYKASQLFALQRLTRQRFHLVKTIMREKAYMMSNIYLKFSSLYISKKEDEPFSNMFGNTSKSIIADFTPDDIVNMSDEDMINFIMDKGKSRFSKPEENVRLLKKIARDSYRLDKVAYDPINVAISSSFNTINALENNLKVIDKAIEKNVKGLCDNEFTILKSIPGIGDVYAAGIISEIGSIEFFKDNNALAKYAGLTWRKTQSGYFEAETTRMTKTGNKYLRYYLIEAVSSVKNHSSEFKEFYTRKYNEVSRGAHKRALALSARKLVRLIFGLLHHNQLYSTTKLDNRSN

SEQ ID NO: 114628 - protein, 391 aa, unidentified
MPMYFVGIDISKYKHDCCIISAADQQIISKFTITNDKDGFEQLLTALNSLSNPEDIKIGFESTAHYALNLELFLENAHHSFMEVNPVLIKEYKKSTTLRRTKTDSVDCESIARWLMTVEYKPHSKGFYHAYSLKSLTRLRDRLIRQRSFYLVKITNVLDHTFPEFKPFFNERLSKTALYLLENYGSAEKMARMNSVSYEKLRSISRGKFSPQQFIALKELASNTVGVNNSIFDVELNSLLTLYKTLVTEINTLEKEINLLIEEVHPHYLSVPGIGPISAAIIYSEYGDISNFDNPGQMLAFAGIEPGINESGTESHGGRMVKRGSSQLRYALINCCLPLIRFDMTFATYYAKKRAEGKPHRVAITHVAKKLIRVIYALERQDTDFCVQKLR

SEQ ID NO: 114629 - protein, 350 aa, unidentified
MKNDLYLGNDVGKKISVLFAVDKQTGEIVLDARRMQTNNMEEWRKLLAGLREKYVLHLAFEVGPHYDWMYDLFKEFAAEVVVVNAALFGVITKSHKKTDKVDARKLAEGLLRGDLPDVCVPDKETRADRRLVSFVHYSSQQLSSLKGRLRGLLQTFRLECPQTNILSKSATQWLKEKARPQLDEDGQMVLDMLLEQAALLRQHRAQLDGKVKERVQRYSDAATLRSVPGFGPLVSLAVLCAVAGVSRFKQPRQLSSYLGVCNGVRQSGQGLAFTGLTKAGNPHVRWLLAQALLHVLRKDPKARARYLKLKRRKGSGVARGAMLRWLTIILWHVLTKHEAYRLAGKQQKGA

SEQ ID NO: 114630 - protein, 320 aa, unidentified
MSQPDLQCVGIDVAKATLDVAGTESLTSFTVSNDSAGFTEITDRLSGRNISLVLMEATGGLEAPVAEYLQSEGFDVVIINPRQARDFARAMGHLAKTDRLDAAMLAQLARVIDCHPDRSRYLRLMPDAARQALTALVVRRRQLNQMLVAERNRLYPSHPDGRESIGRVMTVLEAELALVTRQMNRQLRQHFREQARLLTSVKGVADITAATLLAELPELGTLTRREISALVGVAPVNRDSGKMRGRRTIFGGRAGVRGTLYMAVITAIQFNPAIRAFYVRLVAAGKAKKVALVACMRKLLTVINAMVRSGTSWEDHSSPS

SEQ ID NO: 114631 - protein, 354 aa, unidentified
MSQKLDTSPAVIGIDIGKNSFHIVGQNQLGAIVLRQKWSRGQVEARLANLPPCLVGMEACVGAHHLSRKLQMLGHDARLMPAKYVRPYSKGQKNDFRDAEAIAEAVQRPTMKFVATKTADQLDLQALHRVRERLVGQRTGVINQIRAFLLERGIAVRQGLRSLRSELPGILATRTDVLSPRMLRIIEDLAGDWRRLDERIEGLSSEIETLARQDKACERLMTVPGIGPIISSAMVAAIGTGDVFSKGRDFGAWLGLVPKQISTGDRTILGKISRRGNRYLRVLFVQAAWVVLVKVKCWERYGLKSWIEAAKKRLHHNVLAIALANKLARIAWAVLNKGRAFECVKTDEMASRPA

SEQ ID NO: 114632 - protein, 338 aa, unidentified
MTVVTVGIDLAKNVFAAHGVNAAGKAILVKPLVRRAKLLELIATLPACLIGMEACSGAHYWAREFQKMGHTVRIMVPQLVSPYRMGGRHGKNDAADAAAICEAVARPNMRFVPVKSIEQQGQLFVHRAHQSYVSERTTLINRIRGLLSELGIVLPQAFKAFLSGVAQVLEDLPGYCNQVIGDLLNELFHIEEKIKNSEKLIPQLARDNSAAQLLMQFRGVGPMTATAIVASIGNGHDFRNGCQFSAWLGLTPRQQSSGGKARLGRITKAGDSYLRTLLVLGAKSVLLGAAKNDDPVSKWALQLKERQGYGRALVAIVAKNARMCWAMLHLKDEFRFPS

SEQ ID NO: 114633 - protein, 351 aa, unidentified
MPRTATVHAVTAIGIDMGKNTLHMIGLDSRGTIVLREKVSRGRITSRLANLPPCLIGIEAGMATHYVARELAVLGHDVKQVPPAYAKPFRQGHKNDFRDAHAVAEAVQRPTTRFVPAKTNEQLDLQALHRVRSRLVSERTAVINQIRGFLLERGIIVRQGLRFLRQTLPDILAKRTDVLSPRMVRIVADLANDWRQLDERIEPVTDEIETLAKSDNSCRRVMTVPGIGPIISSAMVAAIGSGAAFARGRDFSAWIGLVPKQMSTGDRTILGRISKRGNSYLRTLFMQAARVILLRPVSWPKHGFGVWLARAAQRLHPNVLAAALANKLARIAWTVLAQERNYEARIMKAAA

SEQ ID NO: 114634 - protein, 350 aa, unidentified
MIVGIDVHKHNHAAALIDDRGGEIATLEIPNTPKGYRSLIDWLVDHDAATAVIGVESPGSYGRCLVTALAGAGFEVLQVPAWRTHRERHRRGPGKTDPGDAISIAQVVRTKRDDLGPAEEPELVRALGMLELQRRRFVHDRTQAIQRLRADWTQHDPVAEASVIRCDRQRELNKLRRLQLGSSLAARTAARCIRELARDITDLNARIAELDREIAQLLNEHDNPLADLHGAGANLSATIIAQAGDVRRFRNASAFARFCGAAPIPCGSGQTANRHRLHRGGNRQLNAALYRIAVVQQRHYPDARKYLARKIAEGKTPREARRALKRHLANVLYRRLYAWANTAPSMNPLT

SEQ ID NO: 114635 - protein, 313 aa, unidentified
MEAQVYVGIDVSKARLEVALGATGKLLEVANDAGGIASLVARLVELAPALVVLEASGGLQTALVAELGAAGMPVVVVNPRQVREFARASGRLAKTDALDARVLALFAERMRPEVRRLPDAQELELKALVARRRELVEMLTAERNRLGSTPKLLHKEITAHIGWLEGRLKERDRDLDRMLRSSPLWREREDLLRAVPGVGPVLCATLLADLPELGALSRHQIASLVGVAPLNRDSGSMRGRRTVYGGRAQVRAALYMATLAAVRCNPALKDFYPRLRSMGKPAKLALTAAMRKLLTVLNAMLKHRTPWSPQCPA

SEQ ID NO: 114636 - protein, 335 aa, unidentified
MKMVFAGIDVGSAENVVAVSHNKKIGKAKAFTNTPEGHLALIKYLNPNKRKVRVCIEATGTYHFDLAVVLSKSKNIEVMVINPRAIKHFAQAFMERNKTDKIDASLLATAVEMLDFQEKFKLWNAPSETVLSFRACARRLTELGKQKARSKNQLHALISTLSTPEFVLGSVQQSIKNLEVQIDELEQYALSLVQQDAKLLKAFELIITIKGIADKSAISILGELLILPEDMTARQWVAHAGLDPRHHTSGKSVEKKARLSKAGNKYLRHALFMPSLSAIRHHRCVKEYFNHLVEDLSKRKMQAICAVMRKLLHAIHGMLKSGTAFDDSRFYAVTK

SEQ ID NO: 114637 - protein, 430 aa, unidentified
MISPSPCLAPDASVFAAFVGLDWADQKHDLVLYDPRGGAPQHLQLPHTPEAIDEWACGLRQRFGGRPIAVCFEQSRGAIAYALLKYDFLMLFPLPPARLAAYRESFSNSGAKDDPSDAALLLDYVLRHRDQVRVWQPDTPATRELQLLAEARRAAVDQRTRFSNQLTAVLKQYFPQALVLVGCDVDTLLACDFLARWPTLAAAGAAAPSTLRKFYYAHHCRQEERIAERLQLAKSAIPLTTDAALIQAGTLQVQYLVGQLRPLARAIQKFEARLQQLMDEHPDAGLFLALPGAGPALAPRLLVAFGTDRKRFAAAAELQSLSGVAPVTQRSGKRCTVQRRWACPKFLLQTFHEFARCSCKKSTWAQAFYLLQRSRGKGHHAALRSLAFKWVRILFRCWKTRTPYSEQRYLDNLHKRHAPLLAFLPVPSSG

SEQ ID NO: 114638 - protein, 332 aa, unidentified
MENFYFIGVDVSKKRLDFCVMFEGKVVHEEEISNHQSAIMALLHQLEEDYNIANCQMLVCAEHTGQYTFPLACACKAVECKLWLENPAEIKYSSGVQRGKNDKVDAKRIAIYASRFQDKVQYYERPTEDIERLKQLESERTLYVTDLAKYKGQMKDQKDYMPKTLYERKMKRLQALMDDLEEAIQAITDEMDEVIVSCPVLCRQRELLMSIDGVGRVVATNMIITTEAFTRFDDPRKFNCYAGVAPFSYSSGSSQHSKARVSHRADKVMKRLLHLAAVAVTHRVGGELKKYYERKVAEGKNKMSVINALRAKIVARMFAVIKRNEKYKPILS

SEQ ID NO: 114639 - protein, 408 aa, unidentified
MDLLKTVFGIDVSSRKSNVCIMVNGQKVNDYAISNDTVGFNQLLGDLKQVTNPQIIFEATGVYSRRLQAFLDMHELRYVMMNPLEAKRKTKDNLHQNKTDKLDALYLAKLQSEHPQRLAYVQSEEYQELMANNRIYEQASHDLITNKNRLHKAIQLTFPEIEHLMANPRGKNYWSIVLRFPHPGIVLETKEADIIDFLKSLSGIGEKRANDIMQSLIRLAKVACPAVKKNSAHVRGLKMAINNTLSAEEECQTALLQEIAKLAPKRDLEILTSIPGIGENTALRIISELGDIRRFNNPNQLNAFVGVDPQVYESGNLTAHLSILKRGTAIGRKVLYLAINQIQSAKKAGNPCHIADYYEKRKRSSETVSHKKAAIASIHKLLRTIFALIKNDQLYNYDVAKHNQRLLS

SEQ ID NO: 114640 - protein, 405 aa, unidentified
MAVVMIGVDPHKGSHTAVAIGADEVPVGLVRVRACAAQAERLLAWAKSWPERTWAVEGAAGLGHLLAQQLVAAGERVLDVQPKLAARVRLLATGAVSKNDPNDARSVAIAALRSAACLPVRPDDHAAVLKIWAKRHRDLSRARTQVACRLHAVLCELVPGGLSKEICAAQAAAILDEAEPGGVVRQARLELAAEFTADLRRFDARLCETRKKLAVAVRASGTSLTEVFGIGPVIAATVIGDVRDVSRFASRDRFAAYDGTAPIEVSSGNRKVHRLSLRGNRRLNHAIHMAAITQIRYRHSDGRACYDKKITEGKTPKEALRALKRQISDAIYKHLKADAARAAAAGAQGPGGQPGNDSVASAAGSHPERRLFGQATPGPVTTLRRPADQQKRASSRARKKTARTT

SEQ ID NO: 114641 - protein, 367 aa, unidentified
MKDSITVVGLDVHKNSIEIVTADADGAMEVRRFGRIGGTMDALDRAVRKLVSGGSTLRFVYEAGPCGYEIYRHLTGKGFSCKVVAPSKTPKKSGDRIKNDRRDAETLARLERAGELTGVYVPREEDEAMRDLTRAREDAVRALKTARHQLNAFLLRYGKRYPGKGSWTPAHMRWLSDIALPHPSQQIVLQEYISTVRVGTERTTRLTDQIAKLLPEWRLNPVVKALQALRGVAPIVAATTIAEIGDLSRFENPRQLMAYLGLVPSEDSSGESTHRGSITKTGNGHVRRALVEAAHAYGFPARVSRHLLKRQEGLPESVLAIAWKAQVRLCGKFRRLMARGKLKNKIVTAIARELSGFMWAIAREVEG

SEQ ID NO: 114642 - protein, 484 aa, unidentified
MPKGIVQREGEEMARAPRRQGGGQPRQRRSSRGRPAQLEQLNLNAAGIDVGATEHWVAVPADRDAQPVQRFGAFTADLYALAEWLRQCQIDTVVMESTGVYWIALFAVLEERGFDVKLVDAHYARQVPGRKTDVKDCQWLQELHTYGLLRGAFRPEDEVCVLRRYLRQRSMLVAMASRTVQHMQKALEQMNLKLTEVVSDITGKTGMTIIRAMLAGERAPQLLATYRDKRCKHDQATIAKALTGHWRAEHLFALQQAVEQYDFIAQQLRACDGHIEGCLQAFVPDVEIDAPQAPSARPWRSSRSNPLSFEVQAYLEAMTGVDLTQIDGIESLTALKVLSEIGRDMTRWPTSKHFAAWLGLCPGNKLSGGKRYRMRSKPSANRAATALRLAAQGVANSHSALGAYYRRRRARLGAPKAITATAHKLARLVYSMLRYGTAYVDAGQQAYEQKYRDRVLTNLQRKAKAFGYKLVHVEDIAGGVASTL

SEQ ID NO: 114643 - protein, 438 aa, unidentified
MQVLFSRCSGIDVHKDSVTVCVLVYSGGDGPEVRKREFATHFKALLNLKMWLLAQKVTHVAMESTGVYWKPVWQALEGNFQLILANPFQVKNIPGRKTDARDSQWLAELLAHGLIRPSFVPPRETRDLRDLTRYRVKLTEEKNRVHNRIHKVLEDACIKLDTVASDIPGKSGRAMIEAIIDGQQHPDWLADKAKGTLRGKRPQLRLVLRGRISEHHRLMLRELMDDLRFVESKIERLDKAIAPQANLEKLDRLCTIPGIDVITAWTLLAELGSEMSVFSSPKHAASWAGLCPGNHESGGKRLSNRTRKGNRWLRRALCQSAWAASRKKNCYLAAFFYRKAGKHGIRKAIVALAHRMLVIAFCVLRDGSEYQEVGGDYFDRLNPERTKARLVRRLQRLGLDVFLHAKTSPPESSPPHVSPRKRGRPCKCFERAIPCKHT

SEQ ID NO: 114644 - protein, 474 aa, unidentified
MKPIRRCCGIDVHKNSVTVCVLAPVGQAQLGIKKRKFRTFTRDLKQMRAWLKNCGVTEIAMESTGQYWRPLWNLLEGEFSKLILVNPQHIKGLNGYKTDPKDAQWIADLLENGKLKGSWVPPRPIRELRDLTRQRVHTLEDLNRAKNRIEQLCQTGNIKVSSVASDLFGASGRRMLEEIVKGQRDAGWMADYAKGRLRDKRGDLALALDGTFTGEQRWLLQRELEQVKWLEQQVQTLEEEIERRVGPFSDAILRLMTIPGIDRKTAWTIVAELGVDMAVFGDARHLASWAGLCPGNRESGGKRFSGRVRKANRYVKRALCQSAWAASHTKNTYLAAFYRRMCVRKGSPKAIMALAHHLVIVIYQVLSRKENYVELGSDYYDQRNKPRMVAHLVKRLSKLGYVVELRETPLPTVEVGPEQSAPRDIASDTPQVPTGAKKRGRPCKCKDRGIICKHRTSLGVNSLHSQTVEAGEFS

SEQ ID NO: 114645 - protein, 349 aa, unidentified
MALTIVEDTRAITGGVDTHADMHVAAALDPIGGLLGAGEFPVTPAGYTRLLGWLGGFGTVALVGIEGTGSYGAGLARHVAAAGIRVVEVDRSDRQDRRRQGKSDPLDAVSAARAAQSGRARGAPKGRDGAVEAIRALMVAKRSARSERTQTINQARSLIVTGPDDLRGRFAGHTVAALVSELAALRPRPGDAVGYATRIAVRELGRRAEFPGGQLARLDELIVPLVTSRAPGLLALYGIGPDTAALLLIAAGDHPGRLRSEAAWAHLCAVAPIPASSGKVTRHRLNPGGNREANHALWRIVITRMSSHAPTRAYVERRTAEGLSKKEIIRCLKRYVAREVYRHLRAADG

SEQ ID NO: 114646 - protein, 433 aa, unidentified
MPKSKSQSVVQTDDDALYYERCAGIDVHKKLLVVCLRTGRKCESRDFGTTTGEIRGMTAWLKENGCQMVAMESTGSLWKPLYNIFEQEQLPAMVCNAYHIKNVPGRKTDWNDAFWIAKCLAQGLLKPSFVPDREQRELRDMTRFRKSQIEERARNINRLQKFLEGSNVKLGSWLSDVEGKSATALLELVIGKPDFTLADVKSRMHGKMKSTPEMIFASLEGCITPSQRIFLTHVMDVIRQQTAQIEKTDAMIKTSLNEDQKSAVKALDEIPGIGVISAEQIIAEIGTDMSNFRNQHAFSNWTGTAPGNNESAGKRKSGKTNPGNKTLKSTLAQCAKSATNNKRSFFSAQYSRLVSHRGKNRATMAVAHSLAIAIFFVLSGKEFKDLGADYYTQFNREKKIYSHFKQLSKLGVTIPDDLLQLATQHPPESLTSA

SEQ ID NO: 114647 - protein, 474 aa, unidentified
MRRLQGFAPQAAFSGYKEKTMAKRVEKRGRRSAVLEPDAAGVDIGAHEIYVAVPLDCDQETTRRFSSFTHDLQALADWLESCRVRTVAMESTGVYWIPLFQILEERGFMVYLVNAHSLKIVPGRKSDVSDCEWIQYLHSVGLLRASFRPKEDICAVRTLWRHRSSLLEMAAEHTLHLQKSLSLMNLQLHQVLSDITGASGLAILDAILAGQRDPVQLAKLCNIRVKSPQETVAQALVGDYRPEHLFTLKQSLDGYRYYQKLIAELDDEIVRLMHHLPSAMEHSSPMPKRTKHTPYQRMGNDPSFDLRNELYRIAGVDLTDIPGLSAIAAQVVLTEIGPDVSRFRNASAFASWLGLCPDKRVSGGKVLSTKKRKVKNRIAIVLRLGAKSLSRAKGYFGEFFRRMRARLGTAQAITATAHKLARILFHVLHNKEPYTESIFHRCDEQAQQRAEIRLRKQAAQLGFQLLPISTNSVA

SEQ ID NO: 114648 - protein, 343 aa, unidentified
MQVVQIGLDLAKYVFEVHGVDERGNVVMRKTLRRGSVPTFFANLPPCLVGMEASNGAHYWARVLTDLGHQARLISPQFVAPYVKSNKNDRNDAEAICEAVGRPTMRFVPPKSPEQLAIQALHRIRQRLVRSRTRLVNQIRGILSEHGIVIARDIWRLRRALAELTGNTPDDLNALVGVLMMEAHAELIELDRRIASYDRRIRELYRSSELCQKLGEIEGVGPVTATALVAAVGDRSCFKNGRQFAAWLGLVPKQRSSGGRNRLFGISKRGDRYLRTLMIHGARAALGKAGGKQDPRSRWLCSLRQRRHPNVAAVALANKNARIAWAVLSGNVSYEPARSVQAA

SEQ ID NO: 114649 - protein, 311 aa, unidentified
MLTVANERTIIIGIDPHPGHHTGAALDNNGLVLGTMEVLNTPEGLMDLLCWSEGYEERLWAIEGAGNQFVSELVTLLRDRDEVVVDVPALLTSQYRARRTRHKSDEIDAVCAARGYLANPELPVFLRGERQEALQELSRTHRRLSRALKSQRMALRAASLPEVREALEGAIIALKRSVAHLEGALRERVKRDTPELLGVRGVGPVLGGLLLAECGDVRRFRSRDAFASFAGCAPVTRQSGGWVRVRVNAGGNRRLNWAFHLMVRTRLGSCSRTRAYMERKLLEGKSKREGYRCLKTIVAREIYGVLRRLGA

SEQ ID NO: 114650 - protein, 398 aa, unidentified
MNAVGIDVSKGKSMVAITQPFGVVVAEPFEVSHDGQALSELVERVKRLPGETKAVMEYTGTYYEPIANALHNAGIFVSVVNPLLIDDYGTNRVRKVKTDKKDAFKIANYALDKWTQLRKYIPAEDTRKTLKVLNRQYTQYNKLLIMQKNSLIALLDSCFPNANTFFSSPRRESDGHEKWIDFVLKFPHIDCVSKLCLSAFKAKYQSWCKTNRYNYSEAKAAQLHAYSRTQVSSLPMTDAVMRIVEESAKLLNSTLETLAAIRSEMDKLASTLPEYETVMSLYGVGRVMCSQLIAEIGDVRRFDRSKSLVAMAGIDPPPDQSGQHDPKSRSISKRGSPLLRKSLFQIMQVIIQKQPVNEPVYQFLDRKRTEGKPYRVYMIAAAHKFLRIYYARVMEAIA

SEQ ID NO: 114651 - protein, 325 aa, unidentified
MEDKKLCCGIDVSHGKLDVCYQNNLGELFHLQVANNNKGFEKIFEHTGPDYHFVMEATGVYYIRLAFYLHQQGCKLSVVNALSIKRYIQMHLERNKSDRKDAGWICRYAIEQCPPYWEMPDSAYFECKQLYNTIREYTEQAKRFNNQLHSLRLLPVPSKDTIKSLEKVKRQLAKEIDSLEQKLEALLQQWQPAQLKSVGSIKGIGKRATAMLIVFTQGFKNTHSHRQLISFAGLSPTEYSSGSSIHGKPRIYKRGGKNLRDILYMCAMNAIKTNTACKILFERLKANGKTGKQALIAVCNKLLKQVFAVVKNNTMYQPNYCSAKP

SEQ ID NO: 114652 - protein, 355 aa, unidentified
MISTKYIGMDVHKESISIAVRNSAGKVVMECVIETKASMILQFINGLRGDLQVTFEEGTSAAWLYDLLKPHVTKLVVCDPRKNKSMREGNQNDKIDARRLAELLRLNHLTPVYHGEHGLRTLKELVRSYLTITKDLGRVMTRVKAIYRSWAIPCTGKEVYAARHRAEWLAKINEPGVRRRAEFYYQQLDALRVLRQEVRCDLLAESKKHKAWKRRCQIPAIGPIRAAVLLGILQTPHRFRTKRPLWNYGGLAIETHSSADHRSVDGHLERAKKQVVVRGLNRNCNHDLKNLFKGAAAVASSKPGPFQEFYTALVAKGMRPEMARLTLARKIATIVLIVWKKGVCFDAQHLKPQTA

SEQ ID NO: 114653 - protein, 324 aa, unidentified
MSNSSYFVGIDVSKPFLDVHRLPDQAQHRFANTAAGHRSLVAWLAEQPIGLIVLEASGGYERAAVVAMVNAGLKVFLAQPQVIRDFARSLRLRAKTDRIDAAVLARYAQDRSGDVTPIDAIDPKQQALHALVVRRDQLIELHTMEQNRLQQAVGGFASTKDKTSLGSLRRSLRWLEREITRIEKAIDQTIAADPVLAARSTTLQQTPGVGPQTARVLIAALPELGYASPKRLNNLVGVAPYAADSGDKHAPRHIAGGRKLVRNALYMAALSASRCNPVIAGYYREMRSRGLAHKTALMACIRRLLAYFDKLIRQLSTASAPDVG

SEQ ID NO: 114654 - protein, 323 aa, unidentified
MLQLLALFIGIDVSKDTLDVAVFGPDGLLDTFKVSNDKKGFDQIHKRLSVKGAPQTWHINLEATSAYHRAFVLWMAELGVKVLILNPKQARDLAKGLGVLRKSDHTDAIVLGQCAKMAWREPTALASGKPYELQEISRRIGVLTRMRGSERKRLLKPGASEALVASLRRCIEFMTAELETLEAQWEALLAQCPEQSEIRKNILTVPGVGRASARVVVSELYATIGEHTSKQCVAYAGLAPQEQTSGTSLRRKGRLFSTGNKILRCALYMGAVSALRNDSESRDLYGRIVGAGKHKKIGIVAVMNKMLRRIAAVAKRKSPWLKA

SEQ ID NO: 114655 - protein, 365 aa, unidentified
MEVTTIGIDLAKSVFAVSGADSRGRVVIRRQLRRPQVLGFMRGLPRCVVGMEATGGAHYWARQFTALGHEVRLMSPALVMPYRKGNKTDRNDADAILEAVSRPSMRFVTVKSVAQQDLLALHRVRAQLVKSRTALCNQLRGLLRERGVAVRMGVAGLKRALPAALAYDSNELSGEMRELLSEMSQWLRTLEQRIASCEARITQKFKHDERCVRLAEVPGVGPLTATALVAAVGNAQRFKNGRELSAYLGLVPRQHSSGGKTVLLGITKRGDRYLRTLLIHGARSALRQCKLGDARNRWVARISAARGPNVATVAMANKNARILWALLSRGDRYRSSRVLTRAVLRPGSPPPVERARGAKLRVPKD

SEQ ID NO: 114656 - protein, 311 aa, unidentified
MTLPQTYIGVDVAKDWIDICDPATSRQVRIPTDRRSLRSFAETVGTSIVILEASGGYERPVISALSEAGRLVTCVNPRHAREFARATGRLAKSDRVDAQVLAEMGRALQLAPASQRSAERQRLSDLTAHRSNITTMIVAEKNRLRTTQDAWIRRNIARHIKTLQANLAKAEAEIEAVIQEQDDLREQAARLRQIKGIGPVVSATLIAQLPELGQLDRRRIAALAGLAPHANDSGHRRGKRSIWGGRGTIRRTLYLAALTASRFDPRFRAFKERLLAAGKAKKPVIVACARKLLTVLNAMIKTGTAYRDAIV

SEQ ID NO: 114657 - protein, 430 aa, unidentified
MKSNTQNAKIEAITEKTLVLGIDVGSETHYARAFDYRGIEYSKKPFKFSNTEAGFVTFKEWILDLKEKHEKDKVVPGMEPTGHYWFNLGKFLQDNEMKPVLVNPHHVKKSKELDDNNPTKNDRKDPKVIAGLVREGRYMIPYLPDGVYADLRTASNIRFQLQAELTRIQNRISRWFNIYFPEYKTVYGKPDAKSGMLILKHAPLPEDILTLGIDGVNQIWRDAKLRAVGKARAKTLIEAAEHSVGSKEGAVSARMEIRMLLEDYESRNIRLQEVMTLIEGLIKQIPMAEKLLEIKGVGIRTVSGFLAEVGDISRFNNPKELQKLAGLALVENSSGKHKGETTISRRGRKRLRYLLFEVAMSLVAKNPEFRELHNYYTTRRLNPLKKMQSLMAIAAKLLRVFYAILTKGVGYDPKKMVNDIRRPAAYAQAA

SEQ ID NO: 114658 - protein, 480 aa, unidentified
MNVKANQTKKQVNVENQANLLLSKEELRKRMEGVEKELKSYTWRELETNGKFAKNDKLSFITDDMLIVGCDIGSESHYIRAIDIRGRELGKGAFEFSNTAEGFENAKAWMLKHAAQNEKRQIVLGLEPTGHYWFALAAWMISKGISVVQVNPYAVKQSKEIEDNSQLKDDRKDPKLIANLVKDGNYGMPYLPEKTYADMRRLSMFRDQLTEDRIRNINRLHRELKIYFPEYMDAFGKIDGAFALEVLKVSCIPSEIAALGTEGLRNIWHDAKLRGRGYSRAGKIVNHAEKSVGLEDGTSAGREAVRWFSEQIMKLDEQLARIESTLHKKCMEIPYAENILEIKGVGENILAGILAEMGDISRFDDVKEIQKLSGMGLVACSSGKHRGQTKISHRGRKRLRYWLFQAAKSAVSHAEEFKQLHVYYTTRARNPLKKMQSLIVIACKILRVIYTILKTGATYDPQKMLKDIKRPEAAPAQMAA

SEQ ID NO: 114659 - protein, 343 aa, unidentified
MGYFAGLDVSLEETAVCVVDGTGRIVREARVASEPEALVAFFGACGLAMERIGLEACSLTAWLHAGLTEAGLPALCIEARQAKAAMGAMPNKTDRNDARGLAQIMRTGWYRAVHVKSPSCRSWRALLTARRLVLNKRRDVENGIRALLREVGLRVGTPSRRDFPARVRELVADDPVLAALAESLLSVIEGMTREAERLTKRVLDEVRREPTCRRLMSCPGVGPLTALAFRATIDRPDRFRKSRDVGAHLGLTPRRYQSGETDVQGRISRCGDELARTALYEAAHALLIRSAKWSPLRAWGMNIAKRRGMARARVAVARKLAVTLHRMWADGSEFRWGKQAARA

SEQ ID NO: 114660 - protein, 413 aa, unidentified
MKKDFIQFDQVVERGAGMDVHKEIIVVTIRGKGIKTETKSFKTFTSSLKKLREWLKKYGITHLAMESTGVYWKPVFNVLGDDFTIILVNARHVRNVPGHKTDKKDSKWLAKLLLSGLLKGSFIPEKEIRDLRDLVRTKTQLTGEISSAKNRFIKFMESANIKLSSVLTNVFCVSGQKIIAEILEGEYKPERLLYHVHGRVKAPRQDIIEALRGNLDDHHRFLMKTMLEHIANIEGIIAKIDEQIQQKTEKHKELLDLLETIPGVGRDGAVCIITEIGTDMEAFASHKHLASWAGMCPGNNESAGKNKSGRITYGNAFLRAFLVQMAWGAVRTKNTYLSSKYKSLVGRRGKKRAVIAVGHKILIAAYFILKNKVGYNELGEDYLSNFRKDKLVEYYKKQLEKLEPNVDFDNEAA

SEQ ID NO: 114661 - protein, 326 aa, unidentified
MTQPAISPARFIGADVGKAEIVVQDTGGTARRTILNTPDALAAFAADLDGACLVVCEATGGYEDALLAALLAVGCPAHRADARKVKAFIRSYGTLAKTDALDAKALALYGQERHASLPRWQAPDPARENLQTLVLTRVDFVTTRTAYRNRLAAPGSGPVHAQLEALITALSEQITALDEAITQTLHEAAALQRAKKALTSIKGIGEISAAVLLALMPELGRLDRRQAADLAGVAPHPNQSGTTERYRRTKGGRPQVKRALFLPAQTAARFNPVLKEAYQRLLKVGKPPIVAIVAIMRRLIVIANARLRDAYAQEAKLALTPEPKLS

SEQ ID NO: 114662 - protein, 516 aa, unidentified
MARSRRPARKYLIQKPNGQVTQRVQAVGPEHFGILCFDCAKARSKFMLANFYGSVLIAPQTVAHTRGQLQTTLDQVGQACARHQLADLIVAIERTGEYHRPVQRACQQRHLDTRLVHPLTSKQFRLPADPGDKTDDTDLAAIFRAALNGFGLVEPVWPEDYQQLQLLVRHRRDLVHKTTTLCCQIREHLHALMPGYAECFSDLWDSALALPLARVTGSAEPIRQGGGQNLLRLLTQHQLGTRRDSVAKILAWAEAAPPAHPQHALLLQILGALDEDRLRKNQEITALEQRCAHYLAGTPYVLLLVIPGINVVSAADVAGELGPIALYPHANAITGRAGLMPSRYQSDRVDRPDGPLRRRANRRLRTALVQIADNLIACNHYFAAKAVHWHRQGKDARWQRIKVAKAFSRLLYAMVAGRQLFPHPCRQERHYILHKLMEFHRDRHTPMSLTLADLDAATQQLPRSAYATEAQPLAERLKEVQHRKGPQPLADLIPIVLARLGVRSVQSPASEARGPS

SEQ ID NO: 114663 - protein, 315 aa, unidentified
MDDYDGKQIVGIDLHRRRSVIVRMTEAGEHLETVRIDNDPLTLGFEIAKAGEAPEVVLEATYGWYWAVDVLQDAGAIVHLAHPLGVKGFAYRRVKNDVRDACDLADLLRMGRLPEAWIAPAAVRQLREAVRHRAKLVALRSGLKAQAHAVLAKQGVAVTMTDLFGVAGTQLLDELRLDAAFAAHLTSLRRLIDALDFEIDIVGKRTAAKLADHPGYRFTRPDQLCCWAGMTPRHRESDTTVHRGRITKQGNRLVRWAAVEAVQRQHGGPIGAARTRITARRGSGIGKVAAARKLLTLVYWGLRDGHIRALAPRPA

SEQ ID NO: 114664 - protein, 359 aa, unidentified
MMEFPRFINAQRKGKSMSIITVGIDLAKNVFAMHGVNEFGKAELIKPRVARDQLLKLIAKLPPCLIGMEACSGAHHWARVFAQYGHTVRLIAPKFVVPYRLSGKRGKNDAADAAAICEAVTRPNMRFVPIKDAHQQATLCLHRTRQGFVAERTAAYNRLRGLISEFGVVLPQKIERLRRDIIAHLDALPAWTKRCAEDLLAHTRELDRRIDDYDKAISQSAREDARSRALMQLPGIGPVSASALLASIGIGHDFRNGRQVAAWIGLVPGQYSSGGKARLGRITKAGDAYLRSLLVLGARSVLASLGDKQDRFSRWARDLVERRGYWKAVIAIAAKNARQAWAVLHYGEDFRLTRNVVAA

SEQ ID NO: 114665 - protein, 371 aa, unidentified
MVKIAKYVGLDVHKDTIAIASCTGGPMEAAKDEGTVPHDLPRLLRKLLSLAPAEHLRVVYEAGPTGFGLCRELRAHGIACIVVAPNRVPQMPGPRIKTDKRDARYLAWQLRMGTLHGIAIPDEELEALRDLVRAREDLLHARRRTRQQLAGFLLRHGMPWRGKHSWGIQHVEWIRGLRLGSEAQDLAKKHYLEAIAYFDARIDELTADLERLAPQLQGVHGRLYRWLQAMRGVSTIVAATLVCELGDLRRFKTASRLMSYVGMVPREHSSGPRVWRGSITKAGNPHVRRVLIEACWPGRLRPTKSKALLRRQAGVDPAVIDIAWHSQKRLHDRYRRMRARGKPQNVTIVALAREMLGFIWSIGQHVEQQPA

SEQ ID NO: 114666 - protein, 365 aa, unidentified
MTKHTRTTKQSKKAQAPAERRWTVGIDLGDQWSRYCVLDEDGEIAEEGRFKTTPGALTKHFADSERMRIALEAGTHSLWVSEHLRQFGHEVLVANTREIRAITHSDSKSDQLDAEKLARYARVDPKILHPITHRSIEMQRSLNVVRARDVLVRMRTMVVNAVRGLVKPCGHRLPICSTESFAGRCRADLPEELLTIVEPLLKQIELATAQIALCDKRIEELADGVYRETKALRRIPGVGALTALTYVLTVADKRRFPHSRDVGCYLGLRPRRSQSGGSDPQLSITKAGDQYLRKLLVQSAHYVLGHYGPDSALRQWGQRIYERGGKNAKKRAIIAVARKLSILLHRLWVTQAEYVPFYEVEKQVA

SEQ ID NO: 114667 - protein, 343 aa, unidentified
MKVTTVGIDLAKQVFQIHGVDDHGKAVIKRQLKRAQVTEFFVNLSPCLVGMEACGSAHHWARKLQGMGHTVRLMAPQYVKPYVKTNKNDAADAEAICEAVARPNMRFVPIKNIEQQSILAVHRVRQGFVQARTAQANQIRGLLGEFGLVLPQGIHNIYRKTPELLEDASNELTGSFRLLILRLLDHLKELDKQVQEMEREIVQWHRQHEDSKRLEQIPGIGPITASALVASLGDAKSFQNGRQLAAWLGLVPRQHSSGGKQNLLGISKRGDTYLRTLLVHGARAVVQVADLKPDHSPTCRWASKILLRRNKNITAVALANKNARIVWAMLVHNRTYQIDYVPA

SEQ ID NO: 114668 - protein, 387 aa, unidentified
MLLDHPCDGAAAIRTHIGAIFMSLELSRSTWLVTSLSPGKGEKMSKHSVAAGDIAGLLQLFAELKRRAQARTGESYPIITIQEAGLDGFWVHRALQQEGIESHVVDPASIATPRRRRRAKTDRLDGETLLRALLAYKRGEPRVCAMVVAPSPEEEDRRRLCRERRTLIEERITHVNRIKGLLFAQGISDYAPLRRDRRARLVALRTGDGRALPLHVKAQISRELDRLELLLDQIKAVEAEQDALLAEASKPAEDAPPDPVTMLLALKGMGPNFAAVLWSEAFYRQFANRRQLAAYAGLAPTPWRSGSIEHEQGVSKAGNPRLRTTMIQLAWLWLRHQDQSALARWFKAQSQRGRKSAIVALARKLLVALWKYVTSGVVIEGAKMKSA

SEQ ID NO: 114669 - protein, 341 aa, unidentified
MGEYIGLDVSLKETAISVRRDGKRIWRGKCPSDPSLIAEVVRKHAPEPKRVVFETGPLSVWFYHALSAEGLPAICIDARHAKAALDMAPNKTDANDADGLAHLAEVGFYREVRVKGYDSMLVRTLVAARSRLVQITTELSNQIRGLMKTFGLVVPRSKGGTFEAEVQRLLVGQDELARIILPMLEAWRSVRTRASGLGRQLLACARQSAACQQLMSIPGVGAITATSFTAAIEDPANFKTSRSVGAWLGLTTRRYQSGEVDYDGHISRRGDAHLRGLLYEAATVILTRTHADSDLRRWGLMLRERIGFKRAAVAVARKLAVIMHAMLKSGEVFNRAVSAPA

SEQ ID NO: 114670 - protein, 405 aa, unidentified
MNAVGIDVSKGKSTVAVLRPYGEVVASPFDVAHTGSDLKALADSIKKLPGETKVVMEATGNYFEPIARCLHEQNIFVSVVNPVLISDFGGNTLRKPKTDKKDSVKIASYALTYWHDSKKYTPQEDLRKSLKLLNRQYQQSIKLKTMMNNNLISLLDLTFPGVNKLFTSPSRESDGHEKWVDFVLEFPHCDIISKLTIRAFARKYKKWCSNNSYHFTESPCEKIYAFSKECVSSVSSDEAIVFSVVQAAKMLVSATENCHAIQTEMNRVASQLPEYDTVMNMYGVGKAVGPQLMAEIGDPRRFHSRKAITAYFGYDSENNDSGQKTTRSNPMTKKGSGALRRTLFIIMKVLLQNKPQDNPVYDFLIRKQSEGKHYYSYMNAAANKFLRIYYAKVKEVLHTTETPLT

SEQ ID NO: 114671 - protein, 382 aa, unidentified
MNRFSGLDVHKDSVFLCIIDETGVIYREKFGVLTPDLERLSSTMKEYQVAEVAMESTSIYWIPIWRVLEGDFILHLVNPYFIKQLPGRKSDVKDAEWIATCLMKNLISDSFVPEEHVQQLRQYDRRIFDLSSDIVRKRGKIDAGLQRCNFRLSNYVSTTDSKSYTNVLKKIISGVTDPDVLIKEIHGRIINKHGRETIMAALTGVFAKSDIDTLRQLYDEVELASKHKAECMSAMDEICRTYFGPQYYALQTIPGVKARSAASIIASIGVDMSKFKSEKHVVSWAGLKPRNEESAGKVKSRRITHGNRQLRKTLIECSWGARKQNGCFFNRYSYIQCTVRKKNTMKVQVAIARKILVTAYFILLTGEPYRDYNDSTSDGKAA

SEQ ID NO: 114672 - protein, 428 aa, unidentified
MEEITEEPVQVAARVCAIDIGKAGLVACVRVPHASRPDRRVQEVREYATVTPALLELADWLRVERVELVAMEATSDYWKPLFYLLEAEGFECWLLNARHVKNVPGRPKTDRLDAVWLAKVVERGMCRPSLVHPKPIRQLRDVTRYRRSLVREQTREKQRLEKTLEDAQIKLDSVISDLHGVSGRQMLQAMIDGQRDPKVLAEMARGSMRRKIPQLREALTGHFAEHHAFICATMLRRIDALAADIADLDARIEQMIAPFVPAVEKLDEITGIGVRAAQEIIAELGVDMAAFPTAAHLVSWAKFCPIDASSAGRKKGNTTGKGNPWLAGTLGEVVAGLVRTNTFLGERYRRLARRRGKKRAIVAVGNSVLTIVWHLLSDVDARYQDLGPSYHESRTNQQRRQRDLIRQLEHLTGHRVTLQPQPELPAAA

SEQ ID NO: 114673 - protein, 339 aa, unidentified
MRYYCGIDLHAKQCFLCVIDEEEKILLKKALPNSLELIVQLLGAFASKPSVAVESTLNWYWLVDGLQEAGYEVKLAHTLGLHMITGAKVKTDRRDALSLARLLRLGAIPQAYIYPKEKRPIRDLLRTRSRMVSLRANAYGTLRRILMQYGHSSAVIKKFAEEQICRHFDHPAIQASCQLELERVRLYSREIAILEDYILHTVADQPVFDLLQTIPGVGKILALTIYYEVGDIGRFEDPRSFCSYSRVVPGAANSAGVVSRGKGSKQGNPYLKWAFTQAALYAVRFNAGIRKFRQAHLARRRSKSRKIVSLSIVAHKLAIAAYYVIKGQEPFKQELMFGQ

SEQ ID NO: 114674 - protein, 408 aa, unidentified
MTRIFGGFALIEEHELIDVFIGVDVGKSDHHAVALDRSGKKLLDKALPQDEAKLKEIIRSLTRHGRVLFVVDQPATIGALPVAVAQAAGILVGYLPGLAMRRIADLHPGEAKTDARDAYIIAEAARTMPHTLSSVEVADEQVAELSMLCGFDDDLAKQATAASNRIRGLLTQIHPALERVIGPHLDHQAMPELLAKYPTPAALRRAGHTRVETLLRKHAPRAGTRWAAEVFAALDEQTVIVSGTGAASIVLPQLARMLAQTRTARAEVLERVEAIVEAHPLHALLTSLPAVGVRTEARILTEVTGKEFKTAGHLGSYAGLAPVTWRSGTSIRGDHSSRKGNKILKRALFLSAFAALKDPASRAYYDRKRAEGKRHNQAVIALARRRCNVLFAMLRDGTIYHAQETQAA

SEQ ID NO: 114675 - protein, 365 aa, unidentified
MKKRSRMSQASTQWKPKPAITVGLDIGDRWSHYCVLNQEGDVVEEGRIPTTEAGLRRQFVGEPAHRVAMECGTHSPWISRLLQQLGHQVIVGNARKLEAISQNESKNDRVDAEMLARLAASDPRLLAPIRHRSLERQQDLNLIRTRDVLVRARTLLVNAVRGLAKSAGTRLPACDTAYFAPHARPALPASLQAAAAPLLDQIESLSKQIGALDKAIEKLSQHYPEIGILRTAPGVGPIVAAAYVLTLDGADAVSSSRAVGAFLGLRPRQSQSGDSDPQHRISKTGNIYLRKLLVQSAHYVLGRFGPDSALRRWGLRLAATGGKRAKKRALVAVARKLAVILNCMWRTGNRYQPFPRPQPTTTAVA

SEQ ID NO: 114676 - protein, 320 aa, unidentified
MTMYQIVIGVDIAKLKFDVASLNNGKYKHKTFTHNEQGYEQFINWIALLFANDKPLICMEATGAYSLPLAEFMVTQGYPVSVVNPAKIKFANSELSRTKTDKADAKLIARYAVTMQPPLWTPPPQNIRVLQALTRRVEHLLEMIQMERNRLETATPTIVDSITAVLATLETELKTTRQSIRDHIDNDPDLKQRHDLLITIPSIAEASIPHLLTALSDHHGFTSAKQVVAFARLAPAVRQSGQWSGKTHIAKNGEPTLRKALYMPALVAWRHNPPIRAFCQRLKANGKNGKAIACAAMRKLIHLAFAILKSGQPFNPNYAV

SEQ ID NO: 114677 - protein, 342 aa, unidentified
MAIVILGIDLGKNVCSLVGVDEDGAVVLRRRMRRQTVLTFAAKLPSCVVAMEACCGAHHLGRLLTAQGHTVKLMSPEYVRPYVKAQKNDDRDAEGIAEAASRPTMRFVDLKSQEQLDLQSLHRVRSRLVGVRRTLLNQLRAILLERGHIFPQGRRRFEAAIDTLVADPAYEISSRIRQLVIDIRSEWQALDSRIEALNGEFVAIARHDETARRLVTIPGVGVLNATALVAAVGDGAAFRRGRDLGAWLGLVPKHTTGGKPKLLGISKRGNKYLRMLFIHGARAAMPSLSASQSPLGEWLRGLLARTHRNIAIVALANKLARIAWATLRRKTSFDLRHLAVAG

SEQ ID NO: 114678 - protein, 342 aa, unidentified
MEKVSIIGLDIAKSVFQAHGADASGGVVFRKKITRARLLEFFASLPPCTVAMEACGGAHHWAREMAKLGHEVKLIAPKYVKPFVKRQKNDAADAEAICEAASRPTMRFVAVKSETTQASGLVFRTRDILVRQRTQIINAVRGHLAEYGLVVPQGASHFKKLVAYLEDPASPLPGEVRSTLSLLAKTASGLEEKISLLDKEITRRTREDEVARRLMTIPGVGPITATAIAALAPPAASFRRGRDFAAWVGLTPLQKSTGGKQKLGATSKMGERTLRRLLIIGAAAAVQQAVRRGAPPTTWLGRMLARKPRMLVTVAQANKTARIVWAILVKGEDYKSPEVAAA

SEQ ID NO: 114679 - protein, 377 aa, unidentified
MIRFTGKPPSSMMALMLAAGLTRVIQNHYYKEALMNIMHFIGLDIHKKIIAFCVKTKEGIIHSKGVIPATRPALIEWMKTLPQSWTVAIEATLFTGWIYDFLKPHAFEVKVAHPEMLKAITAAKKKNDQSDAQKICDLLRVDLLPECYMAPSDLRELRRILRYRTYLVRTAVQIKNKISGLLMEVGADYNKKKLHTKKYFFEMLENIEDVPPSVIDMLKLSRSNLEIFNGIQKKLVLVLKNNQLIRDRVKRLQTIEGIGEITALTWVLEIGEPERFSSIAKAVSYCGLCAAQKQSAGKEFRGPISKKRNKHIQTVLIEAAKLAPHWNPQLAEVHNKELTKGNRNRATLAVARKLVAYMLSVEKNKKDFHHIESDQAA

SEQ ID NO: 114680 - protein, 304 aa, unidentified
MRIIRIGLDTAKHVFQVHGVDENEQPVLRRQIRRSEMEKFFGKLAPTRIGLEACGASHHWARVLRGLGHEVVLLPPQYIKPYVKRGKNDAIDAAAIGEAMSRPGMRFVPVKSAEQQGALMLLKVRDLLVKQRTMLINAIRGHAAEFGLSAAKGPVKVAELLQRAHAETSGVPGLARDMLSLLSGQLDALDMKLKALEIRLMALHKQDPVSQCLASQPGIGPIGAVSFALKVSDPQGFRSGRHFAAWLGLTPRENSTGGRHRSGRISRQGDQTLRRLLVLGATAVIRFAKAGQASPPAFAGAGSG

SEQ ID NO: 114681 - protein, 460 aa, unidentified
MGLNKTNNRFNNIQGKKGSQFSSQLRGVLLERVLIVAIDAAKFYQKALLCNYYGDVIEKPFFFGVNRGGLDQLTMKIEKAKNEIQAERIFIGVEATGHYYEDIVRELGRRGYGVTIINAATTHEERASALNWSKTDDLDLYAIAHALMQNKGMENKLPEGSYRQLMTLTRARRNEVRKRALVRVHIRTLMDHIWIDFQGYEEVINNRPKKTLIFSDFWGKASLFFMEYYPHPTSVLELGEELLLQKVKEAKLRIGQTTIQTLLKVAEQSIVKPKETVAPELFLLRMAIQDLKRLDENVKILEKEIERALLQTDGRLLLTVPGIGVVTAAEFYSEIGDISHYEHAGQLIKKAGTNPIIIQSGGTEGFYGRISKQGNKNLRFVVYTVGKLLAQHNQDLRPYYEGLKARGKHARKAFIALGNKFIKIAFSMLKHKKPFESKQKGYSILQEVKKKLQHTKLILI

SEQ ID NO: 114682 - protein, 306 aa, unidentified
MIVIGLDVHKQTVAAVAVDAAGRPLDEQTIVVGSDELLGWASALGGERLWAVEDCRQLTGWLKRQLLDLGELLVRVPPKLTVPERRAGRTRGKSDPIDALAIARAALRERDLSRPRPGEQAYREIKLLVDHRDDLVDERRRTQQRLRWHLHRLDPTFVPLRMLARSSHLERVSRWLGRQEEQLQVRLARELVARCRSLNRAISELDQELEQRTAQTAPALLELPGCAAVTAAKLLAEIGPIDRFRSDAQLARHGGVAPLEASSGRVQRHRLDRGGNRQLNAALYRIAITQSRYHPAARCLPRTQEG

SEQ ID NO: 114683 - protein, 408 aa, unidentified
MYNAVGIDASKLKSTITIIQPAGVVIRKPFDVLHTSDELNTLVTYLKSLEGETRAVIECTGRYHEPVVKSLSEAGIFISAVNPKLIKGQKQNTLRKVKSDPADARKIAKYALDNWAELREYSSMDTTREQLKTLNSQFTFFMKQKVAAKTNLISLLDNTYPGVNKLFDSPTRDDGSEKWIDYAYSFWHVDCVRKIGLKAFTERYEAFCKKHHYNYQKNKPALLFEESKQLVAVFPKEKSYKLLIQQSIQQLRLASEHIEIIRKEMNELASTLPEYETVMSMYGIGETYGPQLIAEIGDVSRFTHREAITAFAGVDPGVNESGQFKQRSNRASKNGSTRLRKTLFQVMSTYLQNKPVNEPVYQFLDRKRAEGKPYLVYMTAGANKFLRIYYGKVKECLRNLEQSQIEES

SEQ ID NO: 114684 - protein, 429 aa, unidentified
MARVIIGMDPHKRSATIEVMDGREKVLARGRYGTDSSGYRAMLAAGRRFPQRVWAVEGCNGIGRHIAQRLVADGETVVDVPAKLSARARVFATGQGRKTDPVDAHSVAVVALRTTGLRQVTVDDDTVALRLMVDRRDWLGRARTDTVNRLHALLLDLVPGGAKKHLSALQARTILAAVRPRDVVGRTRRQLASELITELAVIDKKIKQSNAALTELIAATGSNLQQLHGIGPSVAARLLGDIGDISRFASRNHFASWNGTAPIDASSGDRHRHRLCRAGNRRINRALHIMAVVQLRHDTEGRAYFRRKLAAGKTPMEAMRCLKRRLSDVVYRQMVADTKVSPGGHSGATLTSSADDPTPTVDSSDKPQPGLTQEPTPATRLVETYPAPALTQAAKRPRTRTAKPARPAALTSMFGNTSTRPRKRSSSRA

SEQ ID NO: 114685 - protein, 323 aa, unidentified
MNKYKETFGVDISKDVFDVHGSNIGHSQYKNDETGFRKYLKELPQGSLVVMEATGYYHYRLAQFLYKNGVIVSVVNPLSIKRFIQMKLAKVKTDKSDAKAICEYALSNDVPLYNSLTDTQSECLQLFRLLDTYLKQRTATKNKIHGEAVLGIPSKFVHRSLVRNKKQLDKEVIAIESKILSLVKEDQQEQLTLITSIPGIGQKTALFLIVVTDGFSKFENASQLCSYVGITPTIRESGSSVRGRARISKVGNRKLRNLLFLCSFTACKHNKACKEVYERIVNKGKSKKLALIAVANKLLKQSFAIARSGLPYDEGFVSVLTRR

SEQ ID NO: 114686 - protein, 400 aa, unidentified
MLSIGIDVSKGKSTVCGMKPGGEIVYAPFEVQHTREGMSELVSLLRSSGEEVRAVLESTGSYHCPVVAALLENGIFVSAVNSLRMKRFCSQSIRKVKTDRIDAMQIALYGLAYWQELQPARLPEDTYRELQLLARQYYQMTSMLIKAKVDFNALCDQVLPGMQELMSDHAGRHKLSDFVLRYHHTTHILEMGETRFRKDYCKWAEKKGYRNCERMAAHIFATAQNGIPVLPNAPSTQIVITEAIRVLHTVEASRDAILTQMQALAKTLPEYSLVREMPCIGDALAPRLIAEIGDVRRFHSKRALIAYAGIDAPPYQSGKFCANNRHISKRGNRYLRKTGYEVMQSYVMHKPANDPIFTFIEKKRGEGKSGKLAMVAGLNKFLRVYYGKVTELYRSLPAIE

SEQ ID NO: 114687 - protein, 336 aa, unidentified
MPMYQLGIDVSKNTLDLCLLREGIKGGIKTRKLKNTADAAKVVAEWLKKQSCELGEVHIIMEATGVYHKPLAYGLHFAGARISLANPHRTREFARGMNILTKNDKVDAWMLACYGSLKEPEAWTPPPESVRYLRALLRRRDALVADSTREKNRLEKSVFTDSPDAVRASIENMLQELSNEIEHLDVLIQEHIKTHPELNQDFRLLTSIKSVGYLLGLNMLAILKSHSFESAEQAAAFLGVVPVERRSGTSVKGKPKLSKIGPPEIRTKLYLAALCGLRFNPVMKQMYTKLCQRGKSKMCAIGALMRKLVHWCYGVLKTQLPFDAEYNQQSYYKTIF

SEQ ID NO: 114688 - protein, 382 aa, unidentified
MDTSATRGMEYSAERALYLAFELGNKKWKLGFSTGLGQAPRIREMPAGDLGALQEEIHLAKKRFGLPEETKTLSCYEAGRDGFWLARYLAQAGIENLVVDSSSIEVNRRRRRVKTDRMDATKLVTMLIRYHGGDRKVWHVVRVPSVEAEDGRQPHRELGSLKRERTRHINRIKGLLAGQGIQIGIGKEFARDLDKVRLWDGSALGPGLRARLVREFERIELLRQQVRELEWEQREALRHSTRPEMAKVRNLVRLKGIGITSAWLYTMELFSWREIRNRRELGALAGLTPTPHQSGDDSRELGISKAGNNHVRAIAIELAWAWLRHQPDSKLALWYQERFAHGGSRVRRIGIVAVARRLLIDLWRYSETGVIPEGAVLRTRVV

SEQ ID NO: 114689 - protein, 338 aa, unidentified
MYYTGIDLYKFTSYLTTIDSDGCIVKQANIKNVDYNFLQYFSDLSGEHQTTVESTCTWYWLNDLLTSINIPLTLAHAKYVKAIAYAKVKTDKVDSHILAQLLRLNFIPQAHKISDENRTLRDALRARLKIVQRCTSVTNSMALVLVKYNLTEPEGLQDIPKLQYDQLSIHASLLKEQMLTLEKSLYPYLIPNEDIQRLLWIPGIGKMNAFTIALEADDINRFADVKNFFSYCRLVPSARNSAGKSKQRSSKDGNRYLKIVFTDAATHAVQYYSEIRKYHNSLLRKKSKQIAKTIIAKEIAEIVFYILKNKTNFNNKFKGVVLQHKKSLQWPRVVSPDV

SEQ ID NO: 114690 - protein, 484 aa, unidentified
MSRRAYVGVDLGGKFHQVQVTAEDGRRLGSSFRIGRGREGLAALQHGVRGAAGEGVEAIYTIEATQNFWQELVHPLRRAGAVVYLVSPAKTTALRTFYRRHTKTDTIDAAATSRLPAVDPGLHPVVLGDARFEALRRLARQSWQLREAMANRKRRIMSRVLMVYPGYDEVFRNRYCGASLLFCRRYLDPAKARRLGRGRLGTLLRKRALGKFDADRLARLWAVVENAPELAIAYEDLQRSVNLDLDLLEAEEHAQEQLRERIAELYSEVDPETLLTTVSGLGEFLAAAITAFIAEPGRFHNADQVVALSGLCARKKSSAGSDSANQPLTKHGDPTLRSCLYVAAEIARHYDPELRAFYARLRARGKHHKQAICALAAKILRRCWAVLQSQRPYVVEHHAKLEQAKQEGKTIRESVREVAERLNDRCGVPSPEAKPTQPEAAQQPRCGMRAAAGPNRLRRTPVQPRTRSAATSESGVPSAQGGLR

SEQ ID NO: 114691 - protein, 345 aa, unidentified
MTITTMGVDLAKNVFQIHGIDEAGAVVVRRTLRRRQMIPFFSKLAPCLIGIEACGTSHHWARELCGLGHQVKLMPPMYVKAYVKRGKTDAADAEAICEAVTRPTMRFVAIKSPEQQSILALHRTRDLLVRQRTQLVNMMRAQLAEFGIVLAKGIQHALRLARQLVEGLAPNIPPLAVKVVVTLAEQMGTLQVQIEDLEKDLKTWSRNNEAVTRLKSIPGIGTITASALAASVTDPHQYSSGRQFAASLGLTPRANSSGGKERLGRISKMGDRYLRRLLVNGMTSQLQAVRRHPDAHPWVTGLLRKKPAKLVAVAMANKAARIAWVVMTRGESYRTAQPQTEAAAG

SEQ ID NO: 114692 - protein, 375 aa, unidentified
MEHHSEAFVALDTAKLRNAVAIADAGRNGEIRYLGEIDNTEAETRKLVAKLASKHARLTFCYEAGPTGYGLYRLIKSIGHDCIVVAPSLIPSKPGDRVKTNRRDAVNLVKLLRAGELTAVWVPDERHEAMRDLVRARDAAVKDYRIKRQNVSSLLLRLGRHYPGKKTWGRTHINWLTGLKLEHREQRIAFEEMLLAVRQVRERIERLEQAMREAVADWTLAPVIEAVQAMRGIDMVGAIAFLAELGDLSRFENPRQLMAYLGLTPSERSTGESVKRGGITKAGNTRARRLLIEAAWSYRFPPRVSKDMQTRIGAAPRTAREIAWKAQMRLCGRFRTLTRKGKRPTIVVTAIARELSAFIWAINREIVGSYATANQ

SEQ ID NO: 114693 - protein, 322 aa, unidentified
MQSVCGIDVSKDRLDIMVLPEQQCFSVRNDAAGWAELVERLRGFSISAIGLEASGGYERGAMRALLAAGMPARQINPFKLRQFARASGVLAKNDPLDARMIASFVAIMPTQQAQPRAPAIDRLTEILAVRRQISAEKVAAENASRLLEDVMLQRLSRRRIARLEADIDMLDRHLTEIVGTDAALSYRYRLLTSMPGVGLVLACTLIALLPELGRMSRKQVAALVGVAPYAFESGKFKGRRCIWGGRAPVRNVLYMAAMSASNWNPVFKAFHDRLKAAGKLPKVAIVAIMRKMITALNAMVRDDVVWADHLSGRHSVPSHCAD

SEQ ID NO: 114694 - protein, 353 aa, unidentified
MEYIAFDAHKHYTLASVARPDGHVAREERVEHARGALRHFLERCEQGSPVAVETIGNWYWIVDEIEAAGCLPKLVHARKAKLMMGMINKTDTLDARGLNQLQRNGTLPTVWIPPGELRDQRDLPRTRMVLVRQRTQLKNRIHAALAKYALHDLEVSDLFGVQGRALLRQRLDLLPPHTAYATQQLLEQVEELDRRVRGFEQRMRTVFKMTPAIQLLMTVPGVGLILAVLIAFEVGAVARYATAEKLAAYAGTTPRVHASGGKTRFGRLRPDVNRYLKWAFVEAANSICLMRRRLPHRHVSRLYERIAQRKGHPKAIGAVARHLAEATYWILSKQESYREPTPSAVSSTRDKRA

SEQ ID NO: 114695 - protein, 361 aa, unidentified
MSRRETAITTIAHPEPIRVTVGVDTHGEAHVACALDQLGRHLAITRVATTPRGYRALLAWARSLGEVDAWGVEGTGCYGAGLVRVLAAQGQMVWEVNRPDRQARRQHGKSDPVDAEAAARAVQAGQATAIPKAGDHLVEMVRGLRVARTTAAKARTQAANALRALVVTAPAELREQLRDLPAAQLASTAARLRPGPIVTTTAATKLALRLLGERYQALDGELARVDAELDRLTTQAAPELRQLFGVGPEIAGALLVAAGDNPLRLRSEAAFSMLCGASPIPASSGKTVRHRLNRGGNRQANTALYRIVVVRLRWHQPTRDYLARRTTQGLSKKEIIRCLKRYIAREVFAALQAPTLPAQAA

SEQ ID NO: 114696 - protein, 372 aa, unidentified
MPQISRVFVGLDTSKLKISAALAEEGRQGEVRFLGEIDNTPEAVRRLVSKLASRYSEVLFCYEAGPTGYGLQRQISALGHECAVIAPSLIPKRPGERVKTNRRDALTLARLHRAGELTAIWVPDPGHEAVRELVRAREAAMADLRTKRQHLQSFLLRHGRIYSGSRPWTQVHARWLSNLSFEHPAQYLVLREYRQAIDDAETRLERLTQHVAEVVSSWSMAPVVEAYQALRGVAFLTAVTFVAEIGDVRRFETPRQLMAYLGLVPSERSTGAQVWRGSITKAGNPRARRVLIEGAWTYRYPARLSRTLQVRQESLPTVVRAIAWKAQLRLCARYRRLMAAGKRQTVVTTAIAREMAAFLWAIGHAVEPRPAA

SEQ ID NO: 114697 - protein, 362 aa, unidentified
MHNHRTLVGLDVHAKATIAAGLELDTGELRFRRINGPPRSAVNYLEELPGPVMATYEAGPVGYGLAREAAARRIEVRVCAPGSIPRKPGERIKTDRRDAERLVRSLLAGELSFVRVPTVEEEQFRDLARCREAARADLMRARHRLSKFLLRREIEFPGPGASWGVAHWQWLRSIELADHPSRSVLNDYLAAVLALEQRRDGLDAQIEIAAPRSPWALTIANLRCLRGINTVTAYGLCCEVGAFHRFEHPATLTAYLGIVPSEHSSGEQVKRGPITKAGSPHARRLLVEAAHHYRHKPAIYKDLARRQRGQDPRACEIGWRCQQRLHRQWQRLRLERGKPGNVVVIALARELANFVWEVGQLN

SEQ ID NO: 114698 - protein, 469 aa, unidentified
MDIVHPRVAGIDVHKKIIWVAVRLPGAEPGHRSVVVKHFPAFWRSLQKMAAWLAGLGVTDAAMESTGVYWWPVYHALAQAGVEVCVCNAAHMRNVPGRKRDATDCQWIAELHEYGLLRASFIPAAGVAALRQRTRYRKKLIGQRASEGQRLAKVLEDAGIKIDSVASQLPGVPGRAMIEALIAGERNPGVLADLAKGVLRRKADELQMACDGRFTRSHAQMCRLHLDAYDHLTGQIAELDALVAEAAAPFGRLIARLVTIPGIGRRTAEVIIAETGGDMTRFATSARLAAWAGLAPGDNESAGKRKKAPARKGDQHLRTAMVESAWAAARTATRPGARFRRLARRFGKGNEKRPRSPSPVPCCASPGRSCATTATTSMPASTTTSGATSATASIWSATTSRLWPASACKLSSPSLVTAARRPLQAPRPPQPPARPPDRHRTLTDGPPQPAPPALPRTWLGSPSFVTDLP

SEQ ID NO: 114699 - protein, 428 aa, unidentified
MSYRIAGIDVHKKMLAVVVSDVEIESEYQFERRMFSSNPEQLRSLAAWLVEQKAEEIVMESTAQYWKPVWETLERYWKPLCEKREGARRRSGTLHLAQALSNRGRRGRKRDFVDAERLVKRLVARELTLSFVPDTEQRLWRTVTRKKYQLRRNVVRLNNQLEALLEEAHIKLSSLVSDLLGVSARRMLKALADGETNPAALAALAHERLRATPEQLCDALGACTQLNPVYRRLLKMTLEHLQILEQQIGQLDQELATLLHPHQDAVERLAEVPGFAVDSAQQIIAEVGPAAATFPSEKCLSSWVGACPGEEESAGVNYSHRSPKGNRHMRRLLNQTANAAVKAKGSIFEIIYRRCVPRLGHNQAIGVIAHRQCRLIWLILHQGTRYEERGPAVTKRSRYQRTWRMIRQLRNLGYRIELPNPQASQAPA

SEQ ID NO: 114700 - protein, 336 aa, unidentified
MFQLGIDVSKKTLDLCLLREGVKGRVKTRKLQNDINAVSSVIAWLSKQHCKPEDVHIIMEATGVYHESLAYGFHKAGGRISLANPHRTREFARGMGILTKNDRVDAYMLACYGALKVPEPWLPPPEEVRHLSALLRRRDALVADSTREKNRLEKYLATDTPSVIAESVEAMIGQLNAEIKRLDSLIRSHLNQHPELKKDFDLLTSIKSVGYQLGLNMLVILRSHDFATAEQAAAFLGVVPVEKYSGTSVRGCPKLSKIGPPEIRAKLYLASLCGLRFNPLMKAMYERLCLRGKAKMCAIGALMRKLVHWCYGVLKTQKPFDVGYLSSDARSACKAA

SEQ ID NO: 114701 - protein, 411 aa, unidentified
MSDSIFVGIDVSVKSNKVCILDSLGNRLAKMTVHNNSHGSSQVVDRVTDILCKTGCTKVSFGLEATSVYGEGLIFYLKQDKSLKNYDTKVYLLNPKQVHNFKKAYSDLPKTDDVDAWVIADCLRFGRINLSETYFDERHKALQRLTRVRYHVVQNIVREKNRYLTNLFLKFSGLYQENLFSNKFGATAMEISNGAFSLDEIAHMPVDKLAQFINASGKGKFADPETLAADIQKAARSSYRLPKTIEDSVNRVLAVSTVSIKSYLEQLKSLDKSISALMETIPNTLTSIKGIGPVYAAGILSEIGSISRFKDQASLAKYAGLSWSRYQSGNFDSDNTHLINSGNRYLRYYLIEAANLVRRHDPEFKRFYELKYRETPKTPHKRALALTARKFVRLVYALLRDQRLYIPPRVE

SEQ ID NO: 114702 - protein, 406 aa, unidentified
MNNAVGIDVSKGKSMVAAVNFTKEVTLTPREFEHTEVGLERLIYNHLLTLDGGIRVIMEATGRYHEPIVAALHEAGIYVCVVNPLVIHDYGNNSIRRVKTDKKDALKIARYGIDNWAELREHTPMDAMRQQLKLIGRQYNFYMKQVVQQQNNLISLSDKVFPGVNEIFSSPMRKDGHQKWIEFFATFWHCDCISRTSKSAFTERYKKWCKRKGYNFSEQKVFDVYVDALGHWTTLPKNAYAKLLVTTACAQLTATLKGLAAIKAEFLRIAALMPEYEQVKALYGVGDVTAAGLIAEIGDVRRFDNRSSLIAFAGVDPSANQSGKYESKSGTTSKRGSSHLRKTLFQVVSTHLKRSPENEAVFQFIDRKRTEGKPYYVYMTAGANKFLRIYYGTIKPFLTTLETDTY

SEQ ID NO: 114703 - protein, 312 aa, unidentified
MENTIGIDVSKAKLDVHVLRGEKYVQFENATEGIKKCVALCQQVKPQLIVMEATGGYEYLATATLSAAGLPVAVVNPRRVRDFSRAIGMMAKTDQIDARIIALYASNCEPVPKGQIDDNSRKLKALTARRQQLLDMRTAENNRKEHVVDTEISRSIKMIIKTIDKELQKVERQIHDHIDNMPQLKQKTETLKSIPGIGDTTAAMLVSELPELGTFNRRQIAALVGVAPINRDSGTFRGKRMTGGGRKHVRNRLFMPTLVAIRHNPVLKKYYQRLVEQEGKIKMVAIVAAMRKLLCMMNAMLKNNQSWQPKIL

SEQ ID NO: 114704 - protein, 384 aa, unidentified
MKHVIAFDVSKGKSTIVIYNEDRQCEFEGELHHTRFDFEQLHQRIEKITALDGQPPEIVFEATGVYSKPVEEFLRDHGYTYYRMNPLEASLQMASMRRHKTDSSDAHELAKTHFKVERETTYVQDTYYEQMRAITRYYDEVDKEIILLRSRMHAILHGTFPELEQLITPSSALFLNFVQLYPHPALLLAHSKTIIKNRLKSNTRKKLSLERAEKKAIVLLEAAENSYPSIKPTDIRCIQVRDYARRIADLMETKDKLVKQMVTMSEDKKEYKVLLSIPGIGDTTACRLIGELGDIRRFQNAKQINAYAGIDIMRYQSGNTQYRDRINKRGNKKLRKILYFMVCTMLMAKGKGEENHFVDYYYKLKTQPQKKHHEVAIVACMNKS

SEQ ID NO: 114705 - protein, 415 aa, unidentified
MELLHERCAALDIGKKDLKACVRTPSVSRRKRSRSQEIRTFATTTNALLELRDWLVAERVSLVVLEATGDYWRGAFYLLEDDLNVILVNAAHVKGLPGRKTDVSDASWLCQLGECGLLRASFVPPEPIRQLRDLTRYRTTLTAERTREAQRLEKELEDAGIKLSSVATDILGVSGRAMLAALIAGEDDAVALAELAKGRMRPKIPQLVQALTGNFGAHHAFLCRLHLQRIDQLSATIGELSTRIEEQMRPFSHKLDQLQTIPGVARAVAEVIVAETGADMNRFPSPGHLASWAGVCPGHHESAGKRKSGKTRHGDRWLCGALGTAAMAAARTRDTTYLGARYRRLAPRLGKKKAIVAVEHSILTAAWHMLTDDVDYHDLGGDYFARLDPERAMRRIVRQANAIGYTVRFDPIQAA

SEQ ID NO: 114706 - protein, 386 aa, unidentified
MIVIGVDTHKGSHALAAVDEGTGKVRGSRQIKADGPGHLVAVRWARELDEERVWAIEDCRSCSRRLEQALLAAGERVVRVPPNRMGASRKGEREPGKSDEIDALAVARAVVKDGVERFPVAYLNEQAMEIRLLLEHRNDLVGERTRTVNRLRWHLLELCPELEASLKRKALNQPRTLDRVDRQLRKLPTGARVRIAREQISCLRGLNRDVEQLAAELAELVTAHRPQLLAEQGCGTLTAAILIGHTAGNERFHSEAAFGLQTGTAPIPCSSGKRTQHRLNRGGDRQLNHALHIIAVTRAQHDPATKEYLARKEAEGKTKKGALRSLKRHLARRFHQLLSEPPADQQPTAEPESVIEPELPAIPNRPKPQREVEQITAAPSPMLCIS

SEQ ID NO: 114707 - protein, 343 aa, unidentified
MKLHVLGIDLGKTVFHLVGLDSTGKAVIRKRCSRTQLLAFTANLQVELIGMEACSGAHFLGRALREQGHEVRLMPAQYVKPYVQTNKSDYLDAEAIAEAVQRPRMRFVPIKTEEQLDLQALHRVRERWVMRRTAVVNQVRSLLLERGLTLPKGRSHVDQQLPRILEDAELTLSGSFRVLLAQLQVELDQLTGRIEQMDAVIQKRAREDEACQRLTKIPGIGPVTATALIAAVGNGAAFRKGRDLAAWIGMVPRECSTGGKQKLLGISKRGNAYLRRLFVQGARSVLRQRHKQVPGIRVWLAQLLTRTHQNVATVALANKMVRMAWAVLYKNEYYRAPVLAAAA

SEQ ID NO: 114708 - protein, 340 aa, unidentified
MEELYVGLDLHSRNTYTGIMTKDFKRVFGKRLTNDLPVIVGALEPFRNDIQGIVVESTYNWYWLVDGLMDAGYDCLHLANPSAIKQYEGLKHIDDKSDSFWLAHLLSLGILPEGYIYPKEERPVRDLLRKRSFLVKQRTSHIHSLKSMIERNTGERISTRKLTGPDRIDLEQLLKEEYLFLSANASRSNIKFLSHHIKIIEKAVRKKIKIKKGFEFLKTVPGIGDILALTIMLEVGDINRFPKVGDFSSYCRCVSSKWTSNGKSKGKGNKKNGNKYLAWAFVEAAHFGQRFSPTIKRYYQRKSAKRNEIVGRKAIANKLARACYYIMRDRVPFKEEASFC

SEQ ID NO: 114709 - protein, 382 aa, unidentified
MSTSTDPSSAGPSSAGPSSTGPSSAGPSSAGPSSAGPSSAGPSSAGPSGLPSDRGTGGSPAGRIYAGIDVSKAKLDLARSGSDAVETFANDAAGIARIVEVLAALGPALSVVVVESTGGLERPLVEALLDAGLPVALVQPGRVRYFAKGLGVLAKTDRIDALVLRRFGELAAPRLLERRSKHQAELRDLVACRRQLVQTRAQQYNRRSSTFSKAALRSIDAVVGALDRQVESLDRQIRRLLDADDDFKHLDGLLRGVPGVGPALSATIAAELRELGRVDRQRACALAGVAPFNDDSGTVKGKRSIRGGRTSLRCVLYMAALSAMRSNPVIRAFAARLKAGGKAGKVVVTACMRKLLTLINAMVRDGLTWDQLDIVKKLATNG

SEQ ID NO: 114710 - protein, 332 aa, unidentified
MDNCIGIDVSKASINVHISKNSEDLEFVNSVQGFKALHAKLKKVYNKKIEDNIFIFEPTGSYSEILRKYCYQQKIKCFIINPKQFSNYAKALGVEVKNDIEDARVLSKALPLAKSHQVRIPMYDEDVERIKELMSYYKFTSKQTTQQKNHLESLTSKEGDLFSIRELKQSIKESKAKEERILDQMQMVIDDNPHYKKAYENITSIKGVGQIGGIALLHLFLKYPEANQRQITSLAGLNPIYKQSGTSVQSGYKISKAGSSMYRGSLFMGVLTAVRFEPTFQTFFNRLIAKGKHTTIAHIAVMRKIIITAHSLYKNDKKLEQNFGSQEMNMTE

SEQ ID NO: 114711 - protein, 397 aa, unidentified
MTSTTSPSTPAIPEAATIYAAIELSSKSWLVAIQAPDGKKISRHQVGAGDSDKLIAHLEQARARVQDATQAPVSVMTCYEAGRDGFWLHRVLRAKGIDNQIVDPASLLTDRKKKSAKTDRIDAHKILRALKLWHEGDAEACSMARVPTPEQEDERRAVREAQHMKKEQTRHLNRCKSLTALHGIWTFRPLRRDWRAQIEQMRSADARPLPPRLKAEIARECERLHHLRDQLRQLMREDRARRREAKGRAEGKPPEEKTALEQRAELIAHLQTLRGVGEVSASVLVDEVFFRDFRNRREVAGYVGLTPQPHSSGSKDTDQGLDKAGNALARWAMIELTWRWLYYQPDSSLSAWFHEQTGNARRRLRRIKLVATARKLLVALWRYVTQGIVPEGAVTTV

SEQ ID NO: 114712 - protein, 371 aa, unidentified
MTEAVKYVGLDVHKETIAVAVADGERGGEVRFVGTVANEDDAIRKLVKRLTGPGVTLNVCYEAGPCGYGLHRLLSKLGQNCIVIAPSMMPRRPGDHVKTDRRDAMTLARLLRAGELTAIWVPDEAHEAVRDLIRARRSAQDDAIGAKQTVRSFLLRHDRRFGGKAAWTKMYWRWLSEQRFEFPHQQLAFEEMQKRVLEAQARVARLEAALAEAVDAWCFAPLVRNLQVLRGIRLVSAATLVAEVGDLTRFDNPKQLMAYVGLVPSEHSSGARTKRGRITRAGNAQARTMLIEAGWSYRLPAREERRYRERVIDLPEDIQAIGWKAQVRLCQRYRRLAATGKPQPKVTTAIARELVGYAWDIARRVSPAIAG

SEQ ID NO: 114713 - protein, 393 aa, unidentified
MVCVGIDVAKDKHDCFIISSEGEILADVFTIPNNAEGFDTLLQAIRRSTRPEDKIKVGLEATGHYSYNILGFLLDKGLPTYVINPLHTNLYRKSLSLRKTKTDRVDARTIAAMLMSDVDLKSYTDTVYHNEELKSLTRYRFDKVRERAKLKQSVSRLVTILFPELEKLVSSLHSASVYALLSEFPGAKQISSTHMTHLKAVLKNASQGRYGQEMAETIRNAARSSVGSVMPAKSLELQHTIRLIRELDNEIAEIETAIQAIVDEMQSPITTIPGMGVRMGAVILAEIGDFSRFDSPDKILAYAGMSPSTYQSGQLSLSGAYSHMEKRGSRYLRYALYNATKHVCHWDPTFAAYLAKKRAEGKHYNVALSHAAKKLVRLIFAMEKSQRPYCAAA

SEQ ID NO: 114714 - protein, 318 aa, unidentified
MLNESFVGIDVSKDWLDVGWEPAQQAERLVHEDVAMVGLCERLVRERPCLIVLEATGGLETHLASALAAAGLPVAVVNPRQVRDYARACGRLAKTDRIDALVLAAFARAIRPQVRAPKDEETLELGALLARRRQLIDMRVQEKLRLERASPVQRDSIKEHIAWLTERIARLDTDLTHRLRNSSLWRDKEDLLKAIPGVGTITRVTLIALLPELGKLNRREIAALVGLAPFNRDSGQHRGERVIWGGRAQVRRVLYMAAVAAIRSNPVIRVFYQRLRAQGKPGKVALVACMRKLLTIMNAMLKHNSPWNPNALDLEHSC

SEQ ID NO: 114715 - protein, 352 aa, unidentified
MKVYIGVDFHARQQTVSYLTTEDGELHQCTLDHQKDDLSGFYRQFSGDVVVGMEASGYIEWFEEMLMEMGHEVWVGDSAEIRRRARRRQKNDKRDSLLILDLMVKGEFPKVHRQTTESRQVLKQLRYRHRLVKIRTIAKNNVQALALSAGLLAKRQYTSKWRQELRRLEREPMLGEQAKQLVKIIEEVTIEIKRVEQWLQKQAEADHRVMLLQTHPGIGLLTSLVLVHTLWPVERFRNGRKVTAYLGMDPVEDSSADRIRIGSISKQGSRLARYLVIEAASTAAKSDKGLKCFYRRLMSRQGKPKAKVAVGRKLLVRCFIMLRDQIDYEEFLRRGVEVRSSRLASGPECLNP

SEQ ID NO: 114716 - protein, 373 aa, unidentified
MEQKFSRVFGLDLSKKTYHQCMLFGPNLQERKFSKGEMNPQGRKDLAKGVKEGDHILLEAGSSSFTLARYLMTNTPATVTVLNPADLHIIFKTTCKTDKKDSMKIADLGRRYEIHELPTVDVPTEQEQAERSVVSQQADMAELRTAHVNRLHARFNSLGYCDISKADLKDPIKRIQLCKRCFKDPGNLRQAQMIIEHMELCEQHLAEIAEQMRCICLAHPREASSLLSIFGFGLVNTATFIAFLGDCSRFSHPRQVCNYAGITPRIDCSGQRNVIGGITHMGNRYIRRAIVQGAWAASKTKADSPLKRKYKKLVAKGKPKQVAAVAVARKMLTVAYTLVRSGELYRPMVIDEEGLIRYEQKIKGYGLGDLLKQ

SEQ ID NO: 114717 - protein, 346 aa, unidentified
MKYFVGLDVSLAETAICIVDENGVIVREAMVPSHPEDISDWLDSSAKDFERVGLEAGATAAWLYKGLRERGFNAICIDPRKLRAMTKTMPIKNDRNDARAIASCMRVGWYSVVHIKSEVSQELRMLLNNRKTLQDKQIDIENEIRGTLKVFGLKIAGRVTSGPFEGKVLDLIEGLPRIEAMVRPMLIARAILRQQCAVLQKMVLDVVRQHETCRRLMTIPGVGAITAISYLTTIDDPDRFHRSRDVGAHLGLTPKKYASGEIDRNSGISKCGDANMRSILYQAGLALLTRTTKVSSIRMWGLAVAKRRGLRRAIIAVARKLAIVMHRVWADGTEFRWPEKAAANPT

SEQ ID NO: 114718 - protein, 419 aa, unidentified
MESSRSKVCGIDVHKRFLVATILERNGPKKTEKFLNNLEHLLKLRAWIITEHCQAVAFESTGEYWVSLYDVLQGYVEIIVANSYHIKWIPGKKTDIIDSEWIAELALNDLISPSRILPKDMRDTRALTRLREKLVNERTDHKNRAHKVLDSACIRLSAYFTDLFGKSGLKILKCILSGVPPEEIARKLPKRLQARSDAILDAIRTQLSAHQLIQLQTSVTMIELLTGKIKELERTILNDLQKDRRKLQILMSIPGIGFVGATTILAEIGDVKDFSSPDKLTKWAGITPRVYQSADKLHTGSITKQGSKHLRWILVEVAHSCIRTKNTALRIFFDRIFNRSGYKKAIVALARKILKLVWHLLTNDELYEEKNTLLAKSCRLPIAIETGSFSVSAAIELLVKAGFQVIDGDNHPDKRVLGT

SEQ ID NO: 114719 - protein, 318 aa, unidentified
MLTHKDIFVGIDIGKRECFIATLGVNHVRKIKNTPEGHRECITLLSDLAQNRSLVRIGLEATGGYEWRLWAALDKAGFDVRQLAPAQVSAFAHACGGRAKTDVIDAHVIARLVQFRPDKGRRLPQENTRKLNALSAKRRQLVKMRSALNCQIAQHGDADVLTMDAALLALLKAQIKRLDQAIAALLAKDEALDLKSSLLRSIPGIGPVLCATLLGEMPEIGSLNDKTVAALAGLAPINHDSGLKTGKRFIKGGRKPVRDVLYRAALVASRFNPPLAKFAARLKAAGKPHKQVMIAVARKLIITANAVIKRQSPWVEPW

SEQ ID NO: 114720 - protein, 352 aa, unidentified
MKKKRKDIVLGEELFVGIDLHKLSWHVTIRTADIELFSGGIPGNWGALRRLLERYRGYKVQVVYEAGRFGFWLYDRLMEYGVGCIVTPPSLVPQEYGNRVKTDKRDSRKLAHLLARGMLKRVWVSTEEGRYHRQVGRRRRQLIGDRVRTQNRIKSELQLYGIYLEEPEGKWSRVYLENLHRIRFKNRWMQESFDRLLKLYGFLTKQIEEQTQLLRELSETELYREKVEILQSVPGIGMIIAMEILLELQDVSRFQRAEQLAAYVGLTPSQYSSADKIRMGRITGIGKNSLRTALVEASWKLIKKDGAMNEKYLRIKARAGAKRAIVAIARTLLLRTRRILTDGNSYAIGLIA

SEQ ID NO: 114721 - protein, 339 aa, unidentified
MKLYVGDDLHANNNFLALVDLKGKRVDQKKLPNDLFVIRDFLKPYQKDIVGIAVESTFNWYWLVDGLMDSGYKLHLANPSAIQQYSGLKHSDDKHDAFWLAQMLRLGILPEGYIYPREERPIRDLLRKRRHLVRLRNSLILSLQNIISRNCGVQFRANEVKRLKEDRVSPLLESNEDLALAGKTSKEMIDQLTRQIYRIETSIVQRVELKESYRYLLTIPGVGKILALTIMLETGPIGRFADVGNYASYCRKVSSRWTSNEKTKGKGNKKNGNKYLAWAFSEAAEFARRYDAQARDYYTRKMRKTNFMVAHGALAHKLARAAYYLMKEQVAFMPEKLFS

SEQ ID NO: 114722 - protein, 490 aa, unidentified
MVTHCRYEHAGQISLFPTGTPGQPALFSSTSIREVAAVEQPREVHDEEHERVWERVAAIDVAKGSGVVCTRVPDEDRPGRRKTHVHTVPARVNAITELGDYLRARQIQVVTLESTSDYWRIWFVILEAAGLKVQLVNARTVKNVPGRAKTGKNDAVWLAKLTERGMLRPSFVPPPEIRRLREFTRLRASLVQDRARYWARMEKLLERALIKISDVMSELNCVSGRAMIEALIAGQRNPRVLAGLARAGLRKKQAALTEALTGQFEDHHGELARILLDQIDALTAQVDRPGTRIGELLDQIPAAWGVDAGGATGPQAGAGPDAAVLPAVARLDEIAGCGLIAARAVIAEIGLDMTVFGSPHRLVSWARRCPQTRQSGAKTSHAPPGKGNPWLNGILGEIAASAARTDTFLGERYRRLARRRGKRKALAAIARSILVIIYHLLASPEARYHDLGPDHYDTRTDRDRKIRNHIRQLQALGLDVTICPQAEPAA

SEQ ID NO: 114723 - protein, 367 aa, unidentified
MNYKLKAAPTAISKEPNSQKGAKAKRIAIGVDVHLKSYQAARKIDNQAVGVVQTFRSKEALLLYAAKQLEQAEQVVVLYEAGPLGYRLYWDLKAMGIECLVCAPRSEEQKRKRRKNNSIDARTLTSDLSNYLNGNEHALQRVRVPSEAQEQTRVESRQEDALVEERKRIGAMGNSLLLSQGYGSWSNWWRPKAFQRLSKVVAPWIVKHLQCWVGVLRELDQQIHQAKVELTQQWQGPRPKGMGAVSLVQLSAEVLDWNLYSSGRKIGCLAGMVPSEWSTGKGQRLGAITKVGVPAIRRIITEMVWRMILFQPQYRAVQKWREVLAGANRGLKKKAVVAIGRQLIVDIWRLQTGRISAQELGLIMIEA

SEQ ID NO: 114724 - protein, 334 aa, unidentified
MEAKKWVGVDIHKKQMTVCFINETGQNEIKRYERNSAGIAKFLSEIDSETVIGIESTTWTWGLAKKAEKVAKDVLVLNTVELKNLMDKTKKTDRVDATKIAIIIRRFEKDELSICSIKSDKWALVKGLLNIREKLVRQKIETKNFIVASLDYWGVEIEKKLFMNHKRDKIVLDSLALCEDLKEEIIGQYELVELYDEKIKILDSKIQKLCETDQGYQSITENIKGIGKTSGAYLTSKIENADRFNDPKKLVSYLGLAPKVNSSDDKNKGGKISGNTDKALLRVLVQAAWASVRYDADMRKIYENLRTRMCVQKAIIAIARKLVVKVYYTMKSKA

SEQ ID NO: 114725 - protein, 413 aa, unidentified
MEVIHPRCAGIDCSKKDAKVCVRVQGRGRRGTAKTVTTWGSTTAEILALREHLVSEQVSAVIIESTSDYWKPFYYLLEDALEVMLVNAKAVRNVPGRKTDVSDAAWLADLGAHGLVRASLVPPPPIRALRDLTRARTVITRERTREIQRLEKLLEDAGIKLSAVASNIVGVSGRAMLEALIAGERDPVVLADLAKYGMRKKIPALTEALTGRFTEHHAFMSRLYLDCLDDHSAKISRLDERIEEAMAPFRPARNLLISIPGISTRIAEVFIAETGGDMSAFPSAAHLASWAGVAPGCNESAGRVKSSATRPGNRYLKAALGVAALSAARSKHTYYNAKYRRIAARRGGMIALVALEHQLLTDAYNMLVNGAFYRDPGPDYYTRHQPAKAKNRAIKQLKALGYRVTLEPLTDAA

SEQ ID NO: 114726 - protein, 379 aa, unidentified
MTTNIDTGDVCCTALELSKTSWVCAFAAPGDSQAIVHKIKAGDVDRLIGILNSSKAKAEHRLGRPLHIVLCYEVGYDGFWLARFLIARGIRTIVFDPASFLMPRRGRRAKTDRIDAEGMTRTLRTWLSGDREVARDVQIPSVEQEDAKRIERERKYLIEKRTSIVGRIKGLLALHGIWLTGKRIGKGLRERLDTMRTGDGRPLAPFLRRDIERMLRHYDFVSQQIEEVVADRKKALADRSGRFPQAEKVQLLATLGAVGETTATVLVAEVYHRSFETRRHVASFVGLAPSPYNSGDTDRDRGISKAGTKLARQTLVELAWFWLRYQPNSKLSLWWHERFGNMGMRGRKVGIVALARKLAIALWRFVEQGVVPEGATLKA

SEQ ID NO: 114727 - protein, 341 aa, unidentified
MGDVSTIGLDIAKSVFQAHGADAAGSVVFRKKLGRGRLLAFFAAQPRCVVAMEACGGAHHWGRELIKLGHTVRLIPPAYVKPFVKRQKNDAADAEAICEAAQRPTMRFVPVKSAEQQAAGVVFRARDLLVHQRTQIMNALRGHLAEYGHVAPKGVMYVDRLVDEIEDPDSEIPEAARISLKAMVRLLDRLGAEIATLDVEIARRAKEDAVARRLMTIPGIGPVTAAALVALAPAPQTFRCGRDFSAWVGLTPLQRSTGGKQKLGQITKAGERTLRRLLVIGASAVIKQALLRGAPAGSWLAQMLARKPRMLVAVALANKTARIVWALLAKGGVYRAPALAA

SEQ ID NO: 114728 - protein, 425 aa, unidentified
MQTTQTEIESGQAVWEAVLERGCGLDVHQKTVTACLLIGPLEEQPREFLRTFHTTTRGLLALKDWLQKNGCTHVAIESTGVYWRPVYHILEDLVTLLLVNARHMKQVPGRKTDLKDAQWIARLLRWGLLKPSLIPPTPIRELRDLCRYRRKLIQQTSSEKNRVQKVLEDANIKLATVASNVFGVSGQAMLKALLDTDMTPEEMANLAKGKLRDKIPQLIEALEGQISDRHRFLIRMHLEHMGYLKETVAQIDQRITEKIQPYENKVELIRTTPGFDRASAQHAFVEIGGDISLFPSENHLASWAGLCPGNNESAGKQKSGRTTKGNIWLKSILVQTAHASCRTKDTYLKSFYRRVATRRGKGRAIIAVAHKQLRAIYHELLEDKSYLELGGDFFDHLNQKALEQRLTRRLEDLGYRVELSPVSTT

SEQ ID NO: 114729 - protein, 416 aa, unidentified
MEIEHTHCAGLDVHKKTVVAAIIVPDGQGGLRKEVRTFGTMTVDLLGLSDWLLSFRVTHVAMESTGEYWKPIYNILEENFEVLLVNARHIKQVPGRKTDVMDAEWIADLLRHGLLRSSFIPPVGQRELRELTRHRTNFVRERASVVNRIQKTLESANIKLASVASNVMGVSGRAMLEAIVAGTTNATEMAGLAKGRLRGKREQLDKALEGRVKPHHRFVLAELLCQVDSLDESIARFDAEIEKYCHPFEEEVELLDTIPGVAQRIAEVIVSEIGSDMSRFPTADHLAAWAGVAPGNNESAGKCYSGTTRHGDRALTSALVQAAHAAARTRNTYLSAQYHRLAGRRGKKRAIVAVAHSILVISYHIIQRKEPYRDLGGDYFDQRRPEATAKRLLIRLQHLGYDISRIEQPATLSAVA

SEQ ID NO: 114730 - protein, 337 aa, unidentified
MKFCGIDLHSNNSVVVVTDETDRVLVSRRCPNQLTPILSLLEPHRAELVGVVVESTYNWYWLVDGLKAAGFEVKLAHPVAMKRYDGLKHSDDKDDATFLAHLLRLGILPTGYIHPPQERALRDLARKRIQLVRSRTQHILSVENIMARQFGQRVSCNEVKGLSATSVDRLGLPTDVALAMKANVAIVQALQIQIDFLEERLLHEAYLRPEFSLLKTMPGIGEVLATVIMLETGNIERFADVGHFASYARCVKSAHYSNGKKKGEGNAKNGNAYLIWAYIEAANFARRFSEDAKRFFEKKKAKTNAVVATKALAHKLARASYHILKEKQPFDARRCFA

SEQ ID NO: 114731 - protein, 368 aa, unidentified
MSKYATFVGLDVHARSVSACALDPMTGEVSHARLGPGAGPIAEWVLRFERPVCAYESGPTGWHLARELRALGVPCVVGASARMQRPPADRGRKTDRRDAEFLARLLSTGNVCEAWVPDEECEAARDLSRALEDARDDLQRARQRLSKFLLRHGHVYDEATPGGRRRSAWTRAHARWLDGISFAEPDDAATYEYYRECVARCEEAKRGLEARVAESAGRPRWRPVVDALRCLKGIDTVTAHALAAEVGDFSRFGSAPALGAWAGLVPSEHSSGETVSRGGITKAGNAHVRRLLVEAAWHVPASSARPKAPVAGRPVPPEVARHAAKGNRRLRDRRLALERAGKRPVVANCATAREMAGWVWALGRMARG

SEQ ID NO: 114732 - protein, 364 aa, unidentified
MNEFTHIGLDVHKDSIAVAVLQPGASECEERVIPNTAEAVRKLMSRFADQAALRTCYEAGPTGYETQRLLASLGIACEVIAPSLIPRRSGVRVKTDRIDARNLARLHRAGELVAIRIPSPTEEALRDLVRAREDLKSDRRIARQRIRSFLLRYGKRYPAPGARWSFRFEVWLRALHFAEPAAQAAFDHLVSAYSVRDAQLDAIDAQIEQAAAAEPLAADVARLRAFRGIDTLSAVTILTETCDFRRFATAASYMAFTGLVPAEHSSGASRHQGAITKAGNAHIRRVLVEAAWAYRHRPAVRGAHAKRLEGQPADLMAYSWAAQCRLHSTYRKLAARKNANTAVVAVARELSGFLWGAMTGRMGV

SEQ ID NO: 114733 - protein, 313 aa, unidentified
MYEEVFVGIDISEDQLDVHVLPKDMHFVSKNDSKGISKLIARLQKDRPTVIVMEASGGYETDVASELGSVGLPVVIVNPRQVRDFARGIGKLAKTDKIDAYVLARFAETTKPVVKPLPTEKERELKELVARRRQLIELRASEKNRSHRARSKRVRDSIATIIKALDQEIKEIDDDTQSLIKSSPLWREKEDLLTSFPGIASRTATTLVAKLPELGQADRQEIACLAGLAPLNKDSGKMRGKRMIAGGRAEVRQALYMAAVSATRFNPLIRSFYLRLIQAGKPVKVALVACMRKMLVILNAMIKRKQPFQASCP

SEQ ID NO: 114734 - protein, 343 aa, unidentified
MQRVTTIGLDIAKSVFQVHAVDAAGEVIIRRQLKRRYVRAFFEKLPPCLIGIEACASSHHWSRELQALGHSVRLMPPAYVKPYVKRQKNDATDAEAICEAVTRANMRFVETKTADQQSGLILHRTRHLCMRQQTSVINAIRAHLAEFGVVAPVGRNGVEELLRVVADPDDKRVPEVARVCLVALGAQLRRLKDQVLEFDRMIAAWHRSNKMSIRLDECPGVGPVLATALVATVADPKIFRSGRNFSAWIGLVPKQHSSGGKDRLGSISKQGDRYLRSLFVIGALAVIRYAKIHGTRHRPWLTALLARRPAKVAAIALANKIARMVWAMMAKCERYKEPVALAA

SEQ ID NO: 114735 - protein, 464 aa, unidentified
MKNSGKSGKTRGAVSNGLKAIRPMVAGIDIGSREHWVCGPALEDGAANVRVFGTTTVQLMELVDWLVAQGVESVAMESTSVYWIALYELLESRGIEAVLVNARQLHNVPGRKTDFHDCQWIQLLHSCGLLRGSFRPDGAIVAMRAVHRHLFNLVEERTRFVQWMQKALSQMNVQVHHAVSDLAGTTGMAIVRAIVAGERDPVRLSALRHPRCRKSAEEIARHLTGTWREEHLFNLGAALTLYDAVETQIASCEARLAAAIAALQPQERKDASVPVHPNPRKEKDIRGRGDQVARTALWRFSGVDLSRIDGVGTAVAQTVLTEVGPDLSAFPTEHHFVSWLRLCPRRPISGGKPLNKTRNALGANRISAALRMAATSLQRGRTALGAAYRRIARHKGASVAVFATARKLAQLIYRMLRYGQDYVDIGEQAYDQKFKARRIASLKEAAKSLGYSLTEAPASQGSPG

SEQ ID NO: 114736 - protein, 418 aa, unidentified
MDRMFEIAAGIDVHRDKLVVAVRRRHIGTKDSLETRTFETFHDGITAMTTWLQEQRVQVVGLESTGVYWHPVVRAIQQLVPSAMVWLVNPAQVRKVPGRKTDVTDSQWLSKLVMYGLVSPSFLASPELQELRKLTRHRTKLTADQTRYKNRILKHLESDGIKLATVCSDVLGKTGRSLLDAMLKREVLDEAAIDKIAHGNLRKKIPDLLRAVHCPLTPCTVVVLNQLLRRLDDLTTDISQLESEIRRLVSPMAADVQRLIQVPGIDDVASAAILAEIGADMSVFPSAKHVGSWGGLSPGSEESAGKSKKAPTRKGNKYVRAILVQVAISASKTKGTFWQRKFARLTRLGPKKAAVALARSLAGVVYHLLKDRVDYREPDTVLPPPHRIRTRVAALTRQIEALGFKVALTATPAQDAIS

SEQ ID NO: 114737 - protein, 370 aa, unidentified
MAQPTPLFVGLDVHKDSIAVAYAQGQSADPPVFVGAIGPKQSDLDKLIRRLQGKTPELVFAHEAGPCGYGLHRYLTGQGFTCQVVAPSLIPKKPGDKVKTDRRDAVDLARLLRSGDLTRVYVPTVEDEALRDLCRARDAARLTLKNAKLRLKAFLLRLGLNYVGRADWNDAHRRYLAKVVCPTPTQQIVFQESVRAVDEQVDRMHRLEAELLERAPAWRLYPVVQALQALRGVQFLVAITVVAELGDLTRFDSPRQLAAFVGLVPSEYSTGPSRRLGAITKTGNGRARRALIEGAWAYRHPAKVSEHIQRRIDTLPKPMQDIGWKAQVRLCKRFRRLTARGKHPNVVVTAIARELIAFMWAIAKEVPITT

SEQ ID NO: 114738 - protein, 342 aa, unidentified
MLIIGCDYHPSVQQIAWVDTESGECGERRLAHRDGQAEEFYRELKKKGVRVSVGIEATGHARWFERLLAELDYELWVGDPAQIRAKQVRKQKNDRRDAQHLLKLMLENNFPCIWVPTPENRDVRQLVLHRHRLVGMRMRVMNQLQAIAMNEGVRRKRGLWSEKGRAQLESLPLPPWTTRRRQELLELLDRFDPTIDELTEAIQQEAERVPEVQRLQTHPGVGPITALVFVLVIGTPHRFNCGKQVASYLGLIPCEDSSADSWRLGHITKQGNPLLRFLLGQAALAAVRCDERWHRQYARMSIRRNHAVAKVAIARKLAVRLFWMWRRGWDYQQLQKFGSYVG

SEQ ID NO: 114739 - protein, 368 aa, unidentified
MLARGTEDKEYAMSPKLNSAIAAIGIDIGKNSFHLVGQDRRGALVLRQKWSRGQVEARLANLPPCLIGMEACVGAHHLSRKLQALGHDARLMPAKYVRPYSKGEKNDYRDAEAIAEAVQRPTMKFVATKTADQLDLQALHRVRERLVGQRTGVINQIRAFLLERGIAVRQGLHFLRAELPSILAKRTDVLSPRMLRVIEDLAGDWRRLDERIENLSDEIAALARQDKGCERLMTVPGIGPIISSAIVAAIGGGDAFSKGRDFGAWLGLVPKQMSTGDRTILGSISRRGNRYLRWLFVQAAWVVLVKITPEGWERYGLRAWIEAAKQRLHRNVLAIALANKLARIAWAVLHKGRAFECVKTNATASQAA

SEQ ID NO: 114740 - protein, 342 aa, unidentified
MFYAALDVSLRSVAICIIDQDGKVRLERSVPSEVPDLVRCLREFGESIHQVGLEAGTLTQHLTYGLTEAGFDVVCMEARQVAAALSAMRNKTDKHDARGIAQILRAGWYSRVHVKSVESHHLRALLSCRKVMQRKCIDLENEIRGLLKIFGVKLPLRLSRGGFDIAVRDTIESDPALSHALLPMLQARRVLFDTFTELDRRVRKAAHADPVCQRFMGVPGVGEITALSFKAAVDDPARFKSSRTVGAHFGLTPGRFQSGEKDNPGRISHAGDADVRATLYAAANAMLMRSITWTSLKAWGVRLMKIKGRRRAIVAVARKIAVVLHRMWVDGSDFRLGSEAAA

SEQ ID NO: 114741 - protein, 322 aa, unidentified
MLYVGIDVAKNKHDVTALNVPGKTVLKPLTFSNNKAGFELLDLSLRQLNQDCLIALENTGHYSFNLLNFLHEQGYKVYTYNPLLIKEFAKSLSLRKTKTDKKDAHGIALKLLSDPNREQFQHDNRQVELKILARHIHRLKRKQSDWKVQYTRCLDIIRCLDIIFPELDKIVGKHSEYTYQLLTCYPNPQKRLEAGFDKLIEIKRLTASKIQDILSVAPHSIGTTSPAREFEIIENIKHYKRLIDKAEKCVNDLMAEFNSVITTVTGIGNRLGAVILAEIQNIHAFDNPAQLQAFAGLDSSIYQSGQIDLAGRMVKRGSPHLR

SEQ ID NO: 114742 - protein, 408 aa, unidentified
MDLTPMHKRVIALDVHQAKITACAVIEHDDGGVEVIKRDFGAFKRDRRALAQWALEMAPEVVVMESTGVYWKSPFAALEAVGLIAWVVNARHVKAVPGRKTDMADAQWLATLARAGLLRASFIPPVQMRQLRLVARQRQKLVGMCSAEKNRLHKVLVDAGIRINVLVADIHGQSARAMAKALIAGQPMHEVLDHKGRLRASRQELCEALSTEQFSAVHRFVAQEIVQHIEQIEQRIARMDQYLLQGLQPWQPQLRLLQTLPGIDEQGAAMLLVEIGADMSVFGSAERLASWVGICPGNNESAGKRKTGRIRKGNAWVRRLLCEFAQAAARTRCALKAKFDALTIRKGHKKSVVALAHKMLRTIYAMLSNGSHYQDKEVDYEALNVQRNAPRWIKMLRKHGFIATPAAA

SEQ ID NO: 114743 - protein, 411 aa, unidentified
MEVFCGIDWAEDHHDIALTDRDGRLLARLRISDDAAGLARLLELLAAHGDSAEDPVPVAIETPRGLLTACLRATGRKVYTINPMAVARYRDRHSVAGRKSDHGDSFVLASVLRTDLHAHRPLPGDSELAQAIAVLARAQQDAVWARTAAHNKLRSHLREYYPGFLAAFAGTRDGIMRPEARVILAAAPTPAAAAALPLARLRALLRKAGRSRGIDTEAQRLREAFRAPQMRQLPLVEDAMGRQTLALLRQLDAACDSAGDLEQAAVESFNQHPDAGIITSFPGLGPLTGARVLAEIGDDRSRFQDAKGLKAYAGAAPITRASGKTRSVTHRKVKNNRLAAAGYTWAFSALTASPAARAHYDRRKNAGDRHAAAQRNLFSRLLGCLHHCLATSQNYDEATAFPGRTTLPTAA

SEQ ID NO: 114744 - protein, 404 aa, unidentified
MYNAVGIDVSKGKSTVAVLQPGGVTIRKPFDVLHTSGELKALSKYLGNLEGDTKIVMECTGRYHEPLAIALYDAGLFVSLVNPHLIKNFGNNSLRKVKSDPADAKKIARYTLDNWAELRQYSSMDSTRTQLKTLNSQFSFFMKQKVAAKANLIALLDNTYPGVNKLFDSPVRDDGSEKWVDYAFSFWHVDCVRKISLKAFTERYRAFCKKHRYNFQPSKPEVLFNASKELIAVFPKEKTYKLLIKQSIQQLNLASEHVEQLRKEMDILASTLPEYTTVMSIYGVGKTYGPQLIAEIGDVSRFTHREALTAFAGVDPGVDQSGQHNSKSNRASKVGSARLRKTLFQIMTTLLQNAPEDDPVYGFLDKKRSEGKPYYVYMTAGANKFLRIYYGKVKECLRNLEQNN

SEQ ID NO: 114745 - protein, 371 aa, unidentified
MKQQTKSSHITVGLDLGDRRHRFCALDERGEVVEQDSICNDRVSLRKLAGRYHGALGVMEAGAHSPWISRFLEALGWRVVVSNPRKVRAIYQHERKSDQRDALMLARIGRMDLALLYPVRHGTAEAQQDLLRIKLRDSLVRARVAVINSVRFTLKSLGYTVRNPSSARFHKVVMEEVPESVREMITPSVQALAELTARIKMLELEINTLAQMKYPQSAQLQQIPGVGPITALYFVLKIEDPNRFAHVRDVGAYAGLCPRRDQSGESDPQLRISKRGDAYLRRLLVSAAHYILGPFGPQSALRAYGLMLAADGTARAKKRATVAVARKLAVLLLSLWKSQQPYQPFPGACLNGEQEDRRSGTIALHRMEATD

SEQ ID NO: 114746 - protein, 345 aa, unidentified
MINRNVIAIDLAKAILQGCVITKHGELLSNKAYSAKKLKELLINSVPSVVVMEGCGSCHHWGRFAQQHGHTVRIINPRKVKAYRQGHKTDANDALAIAAAYQHIGIKFCPVKSEEQQIMQTLETSRQLLTKHLTAMGNHLRAYVYEYGIVVRKGRKTLGESMTGILDEEENRLPDGLKAGLRILWEQYQNIEEKLKGIEKEKSAIVRQFEPCQRLLDLEGVGEVGASLLYINIGDGSEFKNGRQAAAYAGVTPKQHSSGGKTIMIGIQKHAGIKELRRVLYQGALAVISRLPEEPRTAKQKWLIDLVKRAGIKRACIALANKTVRTAWALLSSGKTYQPIMLNEA

SEQ ID NO: 114747 - protein, 341 aa, unidentified
MMLVMGMDQHRAQISAEWIDTITGEISRSRIAPADRMTVRRFLARFKGCDLEVALEATTGWRFLVEEIQRVGAEAHLAESAETSGLKGKKQRAKTDWADARHLRELLLIGRLPESWIAPAHLLDLRARVRCRHMMVHQRTEWQQRMHAVLYHHGVPHARKLLTLANRERVAALKLPAVAREQLTIALEMIDAIDVQIGPVDVALRAYARTQPGCRTLIKEIYGIGPLTSVTILAELGDTRRFQNSRDAVRYGGMDVTVYQSDQRRAAGHLSRQGPPALRWALYEAAQAARRPSSPDRPYYEQLAARIGGNRACVAIARKLLKRSYHVLRGLGDQALQPVTA

SEQ ID NO: 114748 - protein, 401 aa, unidentified
MVSDFRKGRYNLMKIYVGIDIAKLNHFAAAISSDGEIILEPFKFTNDADGFQLLVSKLESFDKNSIIIGLESTAHYGDNLVRYLVAEFYQVCVLNPIKTCQMRKNNVRKTKTDKVDTFVIAKTLMMQDDLRFITFFDLDMMDLKALGRFRQKTIKQRTRLKIQLTTYVDQVFPEIQYFFKSGLHQNAVYALLKEAPSPKEIASMHMTHLANLLKVNSHGHFTKEQAKELRVLAQKSVGANDSAISIQITQTIQQIELLDSQLEKIEAEMTDIMKFNHSVIMTIPGIGYINGGMILGEIGDIHRFSNPNKLLAFAGLDPSVYQSGNFQAKTTRMSKRGSRVLRYALVNAAWNVVRNNATFNAYYDAKRAEGRSHYNALGHCAGKLVRVIWKMLTDEVEFNLE

SEQ ID NO: 114749 - protein, 411 aa, unidentified
MPVYGGIDWADDHHDVYVTNDQAEKLAAFRVAHTVEGLATLRQRLREVSAEPEAVQIAIERPDGLLVASLLDWGYAVYPINPKAVDRYRDRHQTSGAKDDARDAMVFAHILRTDGHCYRRLAREGEVVMELRLTIRAYRDLVTESTRLTNQLRTCLADYYPTALTLFDDLDQPITLAFLQQYPTPALARSAGPKRLAAWCKRLGYSRPERIDALVAQVKAPALGTTDAVVRARSRQVLGLALQAVVDAKKTHERALKELLGKHPDGGLFLALPGAGVVTAAALLGELSEDRTSLPTAADLQAVGGTAPVTIQSGKSRRVVRRRACNRHLHEALIQFARCSLMRAGHGDERVAWVKEAYVARRQAGDTAQQAYRVIANRWAAILWAMWTRREAYDHARYAKARAARALPKAS

SEQ ID NO: 114750 - protein, 340 aa, unidentified
MNSTIFALDLAKHVIQAHWVEAETGEICRQTLKRGKVLEFFVNRSRAVIAMEACGSAHHWARKLMTLGHEVRLIAPQFVRPFVKTNKTDAADAQAIWETAQRPGMKFVPVKSVGQQSVLALHRIRSLLVKMRTMQVNELRGLLYEFGADIPQGRVKGMNCMPKELERLEDILPAMVIETMREQIKRIEALDKDIADTEKKLAAWKKDDQSATKLADIPGVGLLTATAAVATVGDAKAFSSGREFAAFMGLVPRQSGTGGRVKLLGISKRGDVYLRTLLIHGARAVIRCQKEREPWLEKLLARRPVNVAVVALANKMARTIWALLPITVRMNSDLTLVDSL

SEQ ID NO: 114751 - protein, 343 aa, unidentified
MKISRVGVDLAKNVFQIHGADSHGKAVWKRKLSREKWIEAICTAAPEGCEIGMEACSGAHHWARRLAERGFRVKLIPPQFVTPYVKSNKNDANDAEAICEAMSRPNMRFVKMKSVEQQDMQAIHRVRADLISHRTAKMNQVRGLAAEYGLVAPQRVYALRKALTLWLEDAENGLTDRFRHLLNDLRDDLIYLENRIASLDAEIRNIADTDPMAVRLQQLRGVGPLIATALIATVGNGQQFTKGRQMAASIGLTPKQFSSGGKDRLLGISKRGDAYLRTILIHGARAAIVHAKHRDDRLSVWVTDLSKRSHPNVAAVALANKTVRMAWAMMKYDTDYDEDRAAA

SEQ ID NO: 114752 - protein, 351 aa, unidentified
MMIIGVDFHPSFQQIAFLIEETGEYDEQRLNHEGGEAERFYRDLKQKGIRVRVGMEATGYARWFERLLAELDFELWIGDPAEIEAQRVKKRKTDREDARLLLRLMREDRFPKIWVPSPENRDLRQLLWHRHRMVQMRTRIMNQLQALAMNEGKRWKSKLWSKPGRAEFEALVLGPWASRRRRELLELLDRLNPSIEELTTAVEQEVKKRPEALRLMTHPGVGPITALAYVLIIGTPERFARGKQIGTYVGMIPTEDSSADKQRLGHISKQGSSLLRYLLVEAAQAATRFNPHWRRRYIHLAMRRHRSIAKVAMGRRMGIRLYWMWRNGCDYSPSFEFGSYAGQLAVRHGVQ

SEQ ID NO: 114753 - protein, 281 aa, unidentified
MKNTYYIGLDVHKETIAIAYACDAGREDGVYHGQCGGSIPVAVRALRKLAEKLEVEFQDLKVCYEAGPTGFVLARRLIRYGLDCVLMSPSKTERKPNEKIKTDRRDACKIARLFRNGDITEVRIPPVLDEAVRDVCRARTDATDDLSRSKQRLGAFLLRNGFNYTGRSKWSAAHMRYLRELVMPHDAQKIVLEEYIQAIDTGTERVARLVERMKQLLEGWEWEPVVRALMACKGFQEVAAMTVISELGDLRRFKHPRALMAFLGLVPGEESSGSKRRQGAI

SEQ ID NO: 114754 - protein, 338 aa, unidentified
MAMYCGIDLHSRDCWLAILDDGLKVVREAKVGNELSAILQILEPYREDLKGIAVESTFNWYWLVDGLEEAGYQMHLVNTWAVKQWEGLKYSDDRHDARWLAHLLVLGILPEGYIYPKQERSVRDLLRRRAFLVRKRTSFLLAMRGAFECRTGLRTTSREVKQWTVEEVESYLEDPVEALGITCLLEPMKSLDGQIRIIERKALTRARLRDEFAPLQTVWGIGRILALTMMYEVGEISRFKKVGNFASYCRLVKTARLSAGKRKGSGNARNGNPYLSWAFSEAAHFAVRYHLPAKKYFQRKRSKTNGIIAIRALAHKLARASYYVMKDQVDFDSERVFG

SEQ ID NO: 114755 - protein, 314 aa, unidentified
MSESFIGIDVAVAHLDIAVRPSGEQWRVANDGGGHVALVERLGSLAPALVVLEATGGAEVAAAAALAAAGLPVAVLNPRQVREFAKATGQLAKTDALDARVLAHFAEAVRPIPRPLPDTLTQELGAVVTRRRQVVDMLTAERHRLRTAAPRVRVLIEAHISFLEGQRTEHDRELAKLLQASPVWRTKERLLRSAKGVGPVMATTFLAELPELGTLDRREIALLVGLAPLNNDSGKHRGERHIWGGRASVRGVLYMATLAATRSNPVIRAYYQHLLAAGKLAKVALVACMHKFLTILNAMMRDGSSWTVRQRAAA

SEQ ID NO: 114756 - protein, 427 aa, unidentified
MKNHEVLSTLFVGIDVSSKSNEVCAIDFGEKRYLQTSYKNNQPGAVSLAENLANVMKNNPDFARLVIALESTSCYSTHIATFLSSTEILMPFKPYVHCLNPKTTANYKKSYIAEAKTDPIDAFVIADFARVGRIKTEPWRGSQFLALQRLTRHRLHLVEAITREKTYMLTNIFLKFSELAVSTTDDKPFSNNYGATASAVLTEFLSPDEIALMPSSDLVEFICKKSKNSFDNPAKVADLLKKAAIDSYKLDKCLYEPLTVSIASSFNCINAFEAEVKKLNKAIEKAIRGFNTNEYQSLASIPGNGHVFASGILAEIGSIKAFPSHDAVAKYAGLVWNPNQSGDFVADDTNMSKAGNRYLRYYLIEAANSVKNHNSIYYDFYRKKFCEVTKHQHKRALALTSRKLIRLIFGLLDKNQLYSSSVEQKIK

SEQ ID NO: 114757 - protein, 394 aa, unidentified
MKLVGIDVGKNSHHFCVMDKETGKLNITPSSFSNNKEGFDFLINSLKPYSKKSILLGMEDTGHYHVALLKFLLSNGYTVALINPKTTDLTRKMEGGITKNDKLDTITICDVLDTPERKKQYRITKVDRFDLYEQRQLTRHHHNLKEELNIYCNRLQKSIDLVFPEFNTLFGSKYGIVYMNLLKTFGSAEAIASTDIRTIRKCFEVKGRGCRISLTPEKLKECAKNSIGISSEVETIQIKHLVGLITLINEQIAEIDKKIEEFSIKNNSPILTIPGISHFSGTSILAELGDIGNYSKPSQIIKFAGVAPYHYESSQYNAQHTAITKKGSKYLRKTLYQIILPVINNNLVFKKYYRLKISQGKGHRCAQGHCIRKLLRIIYHLLETGQSFDPALLR

SEQ ID NO: 114758 - protein, 360 aa, unidentified
MAKARSLVGLDVHASKVVVAVLDAETGELQFFGMEMDVDRVAGFCAALPRPVRAAYEAGPTGYGLARELAKRRVECTIAAPSKIPRGSGERVKTDRRDAELLVRLLLAGKLHAVRVPGDEEEALRDLVRARDAVRRDLMRARHRLSKLLLRRGIRFDDGGAWTERHRRWLDQVVLEWPAAQATLLDARGAIDALCHRRDQLEREILALLPGSPWAREIGRLRCLRGIDTLSAVGLCCEIGDFERFAKPGQLMSYIGLVPSEATTGQQRRLGSITKTGSGHARRLLVEAAWHYRKTPTLGKKLAERQEGQPPAAVAVAWSAQRRLHRVWARMEQRNKRRTLIATAAARELAGFCWAICQIE

SEQ ID NO: 114759 - protein, 458 aa, unidentified
MSKKNQKIASAKGLAMMNPDAAGIDVGSKIHYVCVPEDRDEERIKSFGSFTEDINMMATWLKKCGIKSVAMESTGVYWIPVYQILEHAGFEVNLINAQHVKGVPGRKKTDVEDCSWLQKLHSYGLLRASFRPDDQICVLRSYIRQRTRLIESASSHVLRMQKALTEMNIQLHNVISNITGVTGTAIIKSILAGERDPIKLAKLRNDRIKNSEDIIAKALNGDYRTEHLFVLRQEFEAYNFYQQQIGDLDKVIEACYQELDKKENKQPLEKKKRKVSSSNIPKFNLRESLYALTGVDFTAIPGLNELTVQVITAEVGTDMSKWPTEKHFTSWLGLSPTNKISGAKILGSRTRKVKNNASKAFRLAACSAGKTQTAIGAFMRRIKSKAGAPKAITATARKLACLFYRLLKYGKDYVELGIECYEKKYKANLVGKLEKMAKHLGYDVVKKIEKQEVSLSVS

SEQ ID NO: 114760 - protein, 387 aa, unidentified
MPQPNDLSRSLVALDQNSTVIAVVELSQSSWLVAGVLPGIERQPRKKLEPSPERLLAVLHRWRDEAVKADRTITRIALAFEAGRDGFWLARWLEARGVEAHVIHPSSVAVSREHRRAKTDRLDTELLKRGFLGWLRGERGHCNMARVPTIAEEDAKRPNRERDCLVGERTRIVNRIKSTLARLGIRNFKPTLRKAADRLATVHTPEGMPLPPNTFAELQREIARLGFVVSQIREIEEARQRRLGQQHETGPHAMVRLLARIVGVGVETADMLVHEVLSRPMRDRRAVARYAGLTGSPDESGAQRREQGLARAGNARVRRGMIQLAWRFLMFQKDSALALWYRARTADSRIGTRKTMIVALARKLIIALWRLVTTGEALEGVVLRPAS

SEQ ID NO: 114761 - protein, 345 aa, unidentified
MQKISTTRTNGRKIFKGQLTIGLDLGDRYSSYCVLDEAGKILLEQKLPTTQETMKQIFGRMARCRIAMETGTHSPWVSRLLTALGHEVIVAHAQNVRLIVKSRRKDDRIDARTLARLARIDPELLSPVRHRSAQAQLHLTEIRARAGLVSARTALINAARGLVKSYGERLRKCGSFQVSREIGSGLSTELREALQPLLREVESLNERIQEYDRRIEKMAKERYPEVALLKQVKGVGDVIATTYVLTIEDPHRFRKSRDAGCFVGLQPGRRNSGDSEPQLHISKQGDEYLERCWSRERTTFWDLLGKIVIYGAGDRNSPSEEVRTPRNERWWRWHASWQYCCIGCG

SEQ ID NO: 114762 - protein, 316 aa, unidentified
MTYTQQPTALYVGSDVSKETLAVATYPTPKLEVIPNDADHGEALAEQLAHQPVQLVLLEGSGGFEKPIVHALQQAGVPMAIVPPQRARYFAKSLRGNLKTDRVDAPMLARFASCYPAPEATEVPAVQAQLKELWARREQLVQMLESEKKRLQVATHPLVRASLERTIAVLHEALAQIEAAIEALVAPDEALAQKAALLQTVVGVGWVLASGLLAELPELGCVSHEGIAALAGLVPVRRESGRWRGYARIGGGRCRVRRLLYLVVAVTHDARWRAVYEGLVGRGKPKKVALCAVARRLLVVMNAMVRDGRAYEWLEA

SEQ ID NO: 114763 - protein, 464 aa, unidentified
MNRAIGIDPDSKGYLCCLVDAKEDRGKRMGYLTTVRDLESLIRWVKKEGEPIVAIEGSNGISKPVEDAFRKEQIVFHSLRPSDVSKFRKVVLGQNKNNEKDAESVARYALALQAQGKLQQFRRVWFVDESLRLLSRGYERKNKELTSELNRMWKLLRTASPDLYLAFRGSNVEVEISDNGLKNQGILSLLEQKPDLFEWKNLSTEDFRAAMGGRNYRGRQRLISELQKLSDAFSSTPPGVSLMIRSSAQTILQAKRQLSEMKKLIREITAKNPAVKALEQIKGISVITSSTLIAEIIDIRRFADDDRLASYSGLGRSEYSTGERSRMIANPQFNHRLKDAFITAAKNFVRYNPDSHLSGYFRNLVKKRGMKANEAYKRVARALVRVIFKKLRCVIEESSEEQKRSESDMASGSDFRSDISHESNISLSTPNKNDSKSEGKIKGRMRNELEEQTMILMKKFSNFS

SEQ ID NO: 114764 - protein, 365 aa, unidentified
MGLIRTKTPTRHPHDTHTAAVLDATGRLLGHRQFPTTPAGYALLLEWLRAHGEVDKVGVVDKVGVEGTGVYGAGLGLSLRVAGVELVEVDRPDRKTRRRQGKSDPVDAEAAARAAQAGRASGIPKDHAGAVEALRALRVTRRSAVTARAQAQTQMKSLLVTAPDPLRSQLREMGERQLVAHCATRRPDRRPERGALADPTTATLIALRALARRHQQLSAEIGELDALIAPLVTQINPALCALLGVGPDVAGQLLVTAGDNPARLRSDAAFAMLCGAAPLPASSGRTQRHRLNRGGDRQANCALYRIVLCRLRWDPRTRAYAQRRTAEGMSRKEIIRCLKRYVAREVYTALLNPLPSSVPASTCPA

SEQ ID NO: 114765 - protein, 321 aa, unidentified
MDTPEHAAAAAIVVGIDVSKAALDVALRPGRDAWRCANDEAGIAELLDQLRPLGPSLIVLEATGGLERLVVAALALAGLPVAVVNPRQVRDFAKATGQLAKTDALDAAVLAHFAEAIRPEPRPLPDAQSQALAALVERRRQVVGMLTAERNRLQQALPPVRPKVAEHIAWLEQALKELDRELDQRLRASPVWRERDQLLRSVPGVGPTVSRTVLAHLPELGQGSVKHIATLVGLAPLNRDSGAWRGTRAIWGGRRQVRAALYMAALVGVRHNPALRAFYGQLIARGKPKKVALTACMHKLLIILHAVLRDRTPWQPTPLAT

SEQ ID NO: 114766 - protein, 351 aa, unidentified
MPILAEQFVHVIGVDTHKLTLTAAALNAGGGCLEVLEVRADSKGHRRLMQLGSRLAGPLLWAVEGTGSYGASLTEHLLANGQTVTEVDRPKRPPRKRGKSDEIDAIRAGRDALAMKRLNPPRRRQEREQLRILFTTRQELVSNRTRLANHLMQLVVTASENVRSRFLDFGSHSHSAERLVRKCLASRCSSSLSAEDRTRLRTMRELARMIRNLSVDADRYEHELAVLVEQIAPGLRAQPGLGALTGAQILLSWSHAGRMPGEATFAALAGVCPIPASSGQTIRHRLNRGADPRRPATTSCVAPPKARRCLKFDAVSRDMPPGSCSGSSTALTGHRSVLSFGSPPPSRPYLF

SEQ ID NO: 114767 - protein, 419 aa, unidentified
MNQRSDQPGLFIGIDWADQKHDCYVIDRDGKGFHQEISHSPEDIDFWIGEMLKLADGKPIAIMLEQSRGPLVYSLMFRENVLLYPVNPKQLVRYRESYPGGGKDDPTDARYLARMLRERIATLTCWQPDDDNTRLLARLSEQRRKLVDGQTKLRQQLNALLKSYFSVVLEIFAKDSQLPVLLNVLGRWADPRELRRADRRLIRRVLNEHLIRNEKQQDEVIKRMRSAKLLCDDDALITPSAMAATLLVKQIQQSRKTIQEFDTKIAEVMKQHPDAHLFTSLRGAGPVLAPRLLCAFGSQKDRWEDADSLAAFSGIAPVTRKSGKQCQVHRRFACPKYLRQTFHEFADSARKYCPWTKARYRMLRDRGMKHHATLRKIARSWIRILFRVWQTGTPFDCDRYIAQLKKRCPEITPYLEQEK

SEQ ID NO: 114768 - protein, 452 aa, unidentified
MCPGAVGRAENPVGSLRLHPSASTGEDVPRGRLRKGDHLQSLAPNPFHFFTGIDWGSQRHRVCLLNREGILMEERWIDHSGSSLADLVSWLRTQTAVSPGEIAVAIEIPRGSIVETLLEQGFAVFSLNPKQLDRFRDRYSPAGAKDDSRDAWVLADSLRTDLHCFRALRMDDPTLLRLRELSRLEDDIAQEQNRLSNQLWEQWHRFFPQLLQLSPAADEPWVWELFRAAPLPAQAAKLSGNRIGRILSRHRIRRLDAQEVQEALRSTPLTLASGAAEAASEHALLLLPRLDLLHQQRAEIARRVQALLDELAAPGEATGPSEHRDAAVLLSLPGVGRQIAATMLSEASQAIAERDYHALRCYAGSAPITQQSGLKTTVRMRRGCNERLRSALYHWSRVSITCDPRSKKLYKEMRARGHSHGRALRGMADRWLAILMSMLRHRTLYDPKRRPA

SEQ ID NO: 114769 - protein, 408 aa, unidentified
MGASGEGGHSSLLNRWMERLMSQSNDLSRSLTAFVQGTTLVAVIELSLSSWLIAGVVPGVARQPLKKLAPDAAELLRLLHRWRDEAVRSGATIERIAVAYEAGRDGICMARWLLAHEIETHVIHSTSVAVSREHRRAKTDRLDTAMLLRVFMGWLRGERGHCGMVAIPTMNEEDAKRPHRERENLVGERTRIINRMKAAMVRLGIRGFKPELRRAPGKLDGLRTPEGLPIPTNTLEELRRDMARLAMVREQIDLIEQARLARIAQAPAAGPNAMVRLLASIVGVGVETADMLVQEVLCRNLRDRRAVARYAGLTGSPDESGAKRREKGLAKAGNARVRRGLIQLAWRFLLFQKDSALAQWYRTRTEGRQGARKTTMIVALARKLLIAMWRMVTTGVIPDGVRMRAIAA

SEQ ID NO: 114770 - protein, 436 aa, unidentified
MRGCRCSMIMGFTKPIEHFILQRKKVITMNTLYVGIDVSSKSNVVYLMLPNGDKHSNFSVANSHEGSTQLVKRILSALTSHSLDTVLIGLEATSVYGDNLVYFLREDATLAPFNRKIHVLNPKQVKKFHDAYNDLPKNDYVDSFVIADCLRFGRINKEVYLGDYRYKALQNLTRARFFAVQNLIKEKQRFMNVLFKKYSTMTQEKVFSDTFSTTALAVYDEFDSAEALANMDLHELTDFIIEKGKNRFPDPDAVAKAIQKAARSSYRLPKTVNDSVNQVLSISITSMKALESQIKEFDKAIKAQMELLPNVLISIPGIGPVYSAGIMAEIGDINRFDNQAALAKYAGLVWKQHQSGSFEAEVTRLIPSGNRFLKYYLYEAAFSLVRCDKEYSDFYHLKYKEVNRCQHKRALALTARKFVRLVFRLLKDNRLYVPAK

SEQ ID NO: 114771 - protein, 438 aa, unidentified
MKVLHEHVAGIDVHKDMIKVAIRSPGEKPWTRKTEVLEFRTFYGVLQEMARELRRRGVTHVAMEASGVYTEPVYHALCEQDFTEVIVVNPAHVKALRGHKTDARDCARIAELLECGLLHGSFIPSAEQKEVRDLTRYRMKTVQARTSEIQRLHKALESAGIKLGSVLSDITGVSGRLMIDALIDGERRAQVMADLAKGTLRQAGKQADLSMALAARFTDHHAMLCRLHRDQIKLADHAIAGLDAQIADRAGRWPRELGLLDSVPGFGDVVSAAWLAEIGPAPHRWFPSHGKLASWVTLCPGNNISARKRKHGRTGDAGTYIKPVLVQAAWAAIRVRGRLQARYRRLVRRFGGDKNPGAKKKAIIAIAHTLLKIAYQVLKTGQPYTDLGADFYTRRQSPEQQQAYLERRLQKLHPGCTVTITISPPPGSPPPSAPAEAA

SEQ ID NO: 114772 - protein, 348 aa, unidentified
MTVYIGVDFHARQQTISYLTTEDGAIQHLVLLHDKPASVRAFYEQFAGQRIVVGFESSGYAAWFEELLEELGCEIWIGHATYIRQFAKRRQKNDRRDADLILELLHTGDFPRIHRYRRPTRELLQQLRYRQRLVKMRTMAMNMLLFMASSRGVSLRTQLQSKRGQAKLKQLPLPATLGTQRDELLSLLQTLDEKISTIERWLAKETKEDEAVQRLQTHPGIGLLTSICVRYTLEDASRFANSRKVSAFAGFDPMQDQSDERNRMGAISKQGSRWLRFYLVEAGQVAIRKDADLQRVYQRVSRRGGHAKAKVAVARRLLVRAFIMLRDEIDYAEFQRRGVAARSSRGTA

SEQ ID NO: 114773 - protein, 331 aa, unidentified
MEQIYGIDLSQTKFDVNFKDQNGNLKSFIVKNTLSGIEKFLDRIEPGSILCAEHTGVYGELLLFLTNLRNIKISLVSGYQIKHSLGLKRGKSDKLDAMKIREYAERFIDKLHFLAPEIEDLKELREIYSLRAILVQERKMILTRERGKAFLPYNSTLVKQVTNDMLLKMDEQIDKLEKEIIRIISSNEALNNSYELITSIVGIGKVTSCELIIKTGNFNRIPTARTAASYAGVCPFPNSSGKMVKKSRVSPLGDKSLKSLLFLCSRIAVRYNKEYRLYYTKMELNKKQYYLIMNNVANKLLRTVYAIIKAGKPYDPNHICLDPREEIKKVA

SEQ ID NO: 114774 - protein, 396 aa, unidentified
MRLRASRPDEVTSTRLWAVEPVGQIGALVRFGFSATVRTVTWAGRAIRVAEPAYEVGHAMNQVHEYFLGIDVSKHKLDVALLRMGKTRSKVVSNTAEGYAQLEAWLRAQGATAEATHVCLESTGSYGEGISFHLSDAGWYVSVVNPAQVTGFAQGELQRNKTDRNDAALLARFCERMRPGRWVAPSIEWRQLRAKVDRLESLKAMRQQESNRLEAQRAGHDGGLISDIEEHIDWLSEKIAALEDDINNHIDGHPHLKADAELMKSVPGIGNLTTMKLLSYLGDLRRFDSAKALAAYIGVTPRRRESGSSIKGRSSITRAGNAAVRHALYMPGLVALRYNPVMKSFGERLAAGGLAPKAVVGAAMRKLVHILYAVIKSGKPFDPEFRPKGVALQDGI

SEQ ID NO: 114775 - protein, 307 aa, unidentified
MRFSTKQHQFYCGIDLHARTMYLCVLNQDGEILVHRNMPAGPEPFLKAVAPYRTDLVVCVECIFTWYWLADLCAREGIPFVLGHALSMKAIHGGKAKNDKIDAQKIAVLLRGGMLPQAYVYPADMRATRDLLRRRIHRTRKRAELLTHVQQTNSQYNLPEIGKKIAYKANRSGVAERFADPAVQKSVEVDLALLDYDDQLLRDLEFAIVKMAKQHDANTLYLLQTVPGIGKILSLVLLYEIHDIARFPRVQDFVSSCRLVKCAKESAGKRYGTSGTKIGNAYLKWAFSEAAVLFLRNNPAGQKYLAR

SEQ ID NO: 114776 - protein, 345 aa, unidentified
MQTMYYIGLDVHKRTISYCVKDGSGTIHVEGTVPATRFDLDRWMKTLPQPWSAAMEATVFTGWIYDHLQPHAAALKVAHPLMLRAIAAAKKKNDRIDASKICDCLRCDFLPECYMASTAIRERRRTLRYRNLLVRQMVQMKNKISTLLMEAGVSYNKQKLHKAGYFRELLATNQDINEGLCSLLRLCRETVVRLQRTESALVRSLERDSLLLDRVERLMTIPAVGPITALTWALEVGDAKRFSSIKKAISYCGLCGAEKSSANTVQRMPLSKQRNKHLQTTLIEAAKMAPRNSPELAMLYDKKKQKGNANRATLAVARKLVAYLLAVDRGQRNFQVVEASNCIAA

SEQ ID NO: 114777 - protein, 463 aa, unidentified
MVMKSLNHIQGKNGSEWGQFIRETGTESILLVAIDAAKYTHAFTIANYFGDILKKPCEFDASLTGFNWLKQEVNVLKKQYQMKAVVVGIETTGHYYEDLVRWCQNEGFYVRTINSATTAEERKALLNYSKTDNIDLMVILQAIIHGRGTFNELPSGKIYHLQRLTRARRELVCERTALQNHIRVYMDQIFREFQGKSIWIEGKRKHVQPFSTIFGKTGCYLMRHFPHPSDIISLGVEGLRSLSQRENLKIRDTSIQLLVEFAEQSISQPKEELKEQIFLLSLSLDRLELFNEQITCLEERIEDLFIQTPGAVLLSIPGIGAINGAEFCAELGDISDFDHAGQLIKMAGTNPIIKQSGGRNPTYHRISKQGRRPLRNITFQVGKSISINNPEMRQKYLALKERGKHTNQAYVAIGNRMIRLAFSMIKKQTLYQSKQESYVLQNEIKKKLHKQNVLQFFEKIVAI

SEQ ID NO: 114778 - protein, 387 aa, unidentified
MARKRTLSTLDTSIAYEAVGLDLAKEDTAIAAFGPDHEGPYLIDRMPYDKLYELLADMAPTLVAMEPCSGAHQIAEQIQELGHEVMMISGRHVQAWVKDHCNGQKTDLNDAFAILNLAYDRWLTPIRGKTREECRLLALQASYRQLKGQRTKTMVHVKATLHAWGFPIRAGSFNQKVLHELIDANREAFGDEVVETLHLMINRVHDLDHDIATVLKLLTEATQRDPRASLLRSIPGFGVLTTSRWCAVVGDIARFDSPKQTMAFIGLVPNNRITGHHTETSSGREARGQGKMSKRGDKMLRSLCILGAGALCLMVRNDRLPDCPFVASIKERLASPRPWFKVLVYVAAKLVRIATALLKYGETFSFEKAGISKAVLKQWELEQAKAA

SEQ ID NO: 114779 - protein, 371 aa, unidentified
MEGAKYYVGLDVHKDTIAIAYAEASSREEPRFLGTTTHRVGAVTKALSKLGEPAEFCMCHEAGPCGYGLVRELRKRGFDCVVIAPSRVARKPADRIKTDRRDALLLARLHRAGELTAIAVPDPEDEALRDLVRARDDAVHDQRQVRQRLRAFLLRQGQVYDRKKAWGPTHELFLSRIKFENPAHHIVFSESRIAVKSAAERVARAEEALRGQAETWRWMPVVRALMALRGVDFIAAITIVAEIGDLRRFPHPRELMGYLGLVPSEYSSGDSTHRGQLTKTGNGRVRRILVEAAWNYRFPARIGETITPRLEGLPQGIVDIGWKAQLRLCARYRRLRARGLHQNKTCAAIARELAGFVWDIGRHVSPASSIH

SEQ ID NO: 114780 - protein, 412 aa, unidentified
MEVVYPCCCGLDVHKKSITACVLWAEAKGKSRKEKKRFGTFTHDLLQLADWLAQCGVTHVAMESTGVYWKPVWNVLAEQFEALLVNAQHIKAVPGRKTDQKDSEWIADLLQHGLLRGSFVPPRPTSELRDLTRYRVSLVQEINRIANRIQKVLEDANIKLASVATDALGASGRAILEAMLAGERDSARLAEMAQGKLRNKIPELQLALEGRMTEHHRFLLRQLFDHLRFTESKRSEIEQEIDKRMRPFQDEVIRLCTIPGVDRVTAWGLLAEIGLDMNQFPSSGHLASWACLCPGSFESAGKRLSGKMRKGNVSLRRCLSQAAWAISMMKNNYLSALYRRIAARRGAKRAIMAVAHALLEIAYHMLKRKEDYRELGADHFDRIDVKRIRRSLVRRLERLGHKVTLEPLAQTA

SEQ ID NO: 114781 - protein, 347 aa, unidentified
MKVSTVGIDLAKNVFQLHGVNELGKTVFKKQLRREKMAEFFVNLPACLIGMEACSGAHYWARKLQGFGHTVKLMAPQFVKPYVKTNKNDAADAEAICEAVARPNMRFVPIKDVEQQGVLALHTVRQGFVKARTAQANQIRGLLSEFGLIIPQGIWHIEKRVPELIEDASNELPGNFRLLIQRLLDHLKELDTQVDELESQIVKWHRQSSASSKLAQVPGIGPITASALVASLGDAKNFDNGRQVSAWLGLVPRQHSSGGKQNLLGISKRGDTYLRTLLIHGARSVIYYASAKADPNSTCKWINGIVSRRNNNVAAVALANKNARIVWALLTHDREFRPDYTREPVGV

SEQ ID NO: 114782 - protein, 365 aa, unidentified
MKRILFVGMDVHKNSISVGLAEEGSGEARFYGQIPAKLEAIDVVTRKLASRGNELRFAYEAGPGGFCIQRHLQSKDLHCIVAAPSLIPKKAGDRIKTDRRDAVNLARLFRAGELTAIGIPDEADEAMRDLFRSRSDAKVAQRRSRQQMQAFLLRHGVVYQGTTNWSKMHYRWLHDANMGEPLKQIVLQEYIDAERQAAERVERISQQISLALPDWRRFHEVCAYQAFRGVSWLTAVGVAAEIGDMGRFNNAKYLMAFVGLVPSERSSGDSVRRGGITKTGNTHVRRLLVESAWSYRLQARKTSLLLKRQADAPEVVRELSWKAQLRLCGKYRRLRAKGKSKQHVVTSVARELTGFLWEAGRVVNA

SEQ ID NO: 114783 - protein, 434 aa, unidentified
MLKAIVERGAGIDVGKRELVVTVMTGAAAEEPKISTKSFPSTNRGIEDLGRWLSEEGCTHAVMESTGSYWKPVFHKLEGLLKVLLANPAHVKNLRGHKTDCKDSQWLAHLLRHGMVRASFIPPEDIRQLRDLTRRRKRLRGNGASEKNRLAKVLEDANIKLGSVMSSLFGASGQAMLERMLKGDFHAGEIAELAQGSLKGKVEALAEALEGHRMNRHHRFLVQQCINHLRFLEEQVAALDVEIERLLEPYREVYELLQTMPGVRKESAAVLLAEAGTDMSVFPTPEQFTSWAGLCPGNNKSAGKQGSGRTNRGNAWLKATLTECSWSAVRKKNSYFQRRFHRLKPKGAKKALVAVSRSMLVVAYYIMKEKIPYINPPAEQQREREREDAVRHHCKKLRQLGVPVELIRQAEQAMGVEPGPQRAKPRRGKLGLAM

SEQ ID NO: 114784 - protein, 361 aa, unidentified
MCTERTTAGLDVHARSVVAEAVDWATGQVFSQRLVPANDVVLGWVAQLPGPVAVAYEAGPTGFGLARAFGSAGVRCEVVAPSKLQRPPGDRVKTDRRDARRLARLLHIGEICGIGIPSVIQEDARDLVRAREDARADLMRARHRLSKLLLRHGIVYYGGRAWTGLHERWLRAQRFELPGTRAAFEEAFDAVLSVSARRDRLDEAITVTAAAPQWAPVVSRLCAVRGIATLTGLGLAVEIGDWDRFTGASIGAYLGLVPSESSSGASRSQGPITKTGNTHARRLLVEAAWHHQKPLRTPGKALAARRAALPPAVRARGQAADRRLHHRWSTLAARHKRPTVIAVAVARELAGWCWSLATLND

SEQ ID NO: 114785 - protein, 410 aa, unidentified
MKVAGIDVHKKVLMVVVVDASMPEEKPARRRFVTLPSELHRLLTWLREQGVEEAVMESTAQYWRSVWLELEPHMRLHLAQAFSNRAPRGRKHDFKDAERLVRRLIANELILSFVPSGEQRIWRSMTRMKLQLTRDRVRLQNQIECLLEEMRIKLSIVVSNLLGASGLRILHALADGETDPKKLAQLGGERLQCTEEQLVDALTGRAQPVHGAMLALQLQRLQLIDQQMARLNSMIAAAMKAHQDAVIRLAEVPGLGVDSAQQIIAEVGAQASTFPSAAELTSWVGTCPGKEESAEQNHSSRSAKGNKYLRRVLNQAAHAAVAKKGSHFQAVFRRLLPRLGYQSAIWAVAHRLCRLVWKILHEGVRFIEQGAEVGPREKKKRAQMLARALRKLGYEVTITPINQLAPKPVV

SEQ ID NO: 114786 - protein, 315 aa, unidentified
MSSQVFVGIDVAKAQLDIALRPTGERWALANDDCGIAALVERLQAVQPNLIVLEATGGYQRAVVAALAAAGLPVAVVNPRQARDFAKATGQLAKTDALDARALAHFAEAVRPTPRPLPDAQTDELRALLARRRQLVAMRTAEQNRLGNAPPRLQTDIQAHITWLNTRLAALDDDLDTTLRASPVWREREELLRSVPGIGPVCTRTLLLDLPEVGTLSRQQLAALVGVAPLNRDSGTLRGSRTIWGGRASVRATLYMSTLVAVRYNPVLKVFYARLRAVGKAAKVALTACMRKLLTILNAMVKHHTPWQPKEVSIA

SEQ ID NO: 114787 - protein, 346 aa, unidentified
MEHYVGLDVSLKLTAICIIDRTGKIEREGVVASDPEAIATFIKSSAPHVVRIGLETGATSTWLWTELNKMGLPVICIDARHAKAALKMQINKSDRNDAVGIARIMQCGWYKEVRVKDLESHATKALLVSRALLVKIKRDIENQIRGLLKNLGLVIGRAKMNTFAARAAELAQDRPELAAAVDPLLKAREAVEQQILDLHRKVLRLARNNARVRRFMTVPGVGPVTALCFLATIDDPARFKRSRSVGAYAGLTARRYASGEIDWTGRISKCGDKMLRSYLYEAANVLLTRVAKWSTLKAWGVRLAKRSGLRKAKVAVARKLAVILHRMWIEGTEFKWSSKEAANQPA

SEQ ID NO: 114788 - protein, 347 aa, unidentified
MPTYCGVDFHSRQQLVVWCDTSDGEIQIVKLDHSEIENVRAFYASLHGPVIVGLEATGYSQWFEDLLFELKHEVWIGDAAEIRKRARSRQKTDRRDAETILDLLLKNEFPRIYRPDAASRAILQKLRHRHRLVQLRAKAINHLHAIAISAGLSIKSKLMTKDGRRQLKALLLSDTHQQQRDQWLALIDHLTPIIQAIEKELIPIAEQEPRVTRLMTNPGIGLLTALAIVHTLGPIDRFSNARKVTAYIGLDPVEDSSGDRKRIGSISKQGSRLVRFLLVEAAQTAARRDQDLKRFYHRVMQRRDKPRAKVAVARQLLVRAYILLRDEIDYAEFRRRAVKVDVARVTQ

SEQ ID NO: 114789 - protein, 344 aa, unidentified
MVTFGVDAHKRTHTIVVIDDHGKPLGQTTIGTTSKDHLGLVQWAARFGAERRWAVEDCRHLSRRLERDLLGAGEQIVRVPPKLMAHVRDSARTYGKSDPIDALAVARAAQREPDLPAARLDGPERELRLLVDHRESLVAERTRAICRLRWHLHELDPGWEPKARSLDAQRTLDEVQRRLDDQSGLVARLARELTSRCAELTVSIKSLEVEIADLARQLAPTLLAIPGCGTLTAAKILGETAGVERFKSRDAYARHNGTAPLPVWSSNKARHRLSRTGNRQLNAALHRIALTQARWHPPAQAMIERRRSAGNSGREAMRILKRRLSDAVFQAFRTDQLEQLSPAT

SEQ ID NO: 114790 - protein, 342 aa, unidentified
MGEVSTIGLDIAKSIFQIHGVDADGAVVIRKRISRAKLLEFFATLPACLIGIEACPSAHYWSRQLQALGHTVRLLPPSYVKAYLKRSKNDANDAAAICEAVTRPSIRFVARKSQQQQCGLMLHRSRQLLVCQRTMLSNAIRGHMAELGVIAAKGRNGTAELLKIIADEHDDRIPAAARLSLDVLARQYAAVRAEIVAIEKRIHAWHRSSEESRRLEEIPGVGPIVATALVAEVGDWKEFTSGRSLAAWIGLVPRQHSTGGKQRLGGISKQGNRHLRWLLVAGAMAVIRYARQRGTKRPWLARLMERRPIKVAAVALANKIARMAWAMMVRGERFKEPKLLPA

SEQ ID NO: 114791 - protein, 384 aa, unidentified
MKVVCGLDVHKDSVFCCILCANGEKIQHKFGVLTEELVTLRDLMVSEGVEECAMESTSIYWIPIWRVLEGSVKLHLVNPYFIKQLPGKKSDVNDAEWIATCLSKELIASSFVPDDKIQRLRQYDRRIFDLNVSISRNLVKLDQCIQRCNIRISNYISTTDSKGYRSIVKLISQGVTDAEVLVKELHGRTINRHGRETLVKALTGVVSETDIDIINQLVEEIELQQRHKDEAQEKMTALCMEWFPQEVENLQTIPGVKERSSTSIIAEIGTDMTHFQTPKKLVSWVGLRPRNEESAGKIKARGITHGNRFVRKTMIECSWGAARMKDSFFAEFSYRQCIERRKNKMKVQVAIARKILVAVWYVLSQGTQYIKPTDHYTATDMTAV

SEQ ID NO: 114792 - protein, 450 aa, unidentified
MGNASGVSRGDRNRNARLARLRSLVPVTNAIVGIDLADAKQMVVVTDHDSQVLARKTFRCRAWDLGAALGWAAERAAAKGFSGVTVACEPTGHRWRVLGQLAADRSMPFVCVQPMLSSWARRSEDLTSDKTDEKDAVLIARLTAQLRCYVPEPVDETWGRLRHLGARREQLIVEMVSQIQQMRALLECVWPAALDTAKQPFRSKTWVAAMSAICERDGGDLDRTRRLGPARFEQAVRREILKRGGQKPSLRIARRLFAALTDPTGVIAHRPGALERVAFLLVDWHTAGDKLTDTEARMISVLGELKLTALATSIPGLSPVGAAAILAETGDPNRFASGRALVKHAGLAPREKLSGTFVGRTKLTGAGRPGLRLAAWRAVWGTQRGNTVYAARYRHLTSREQNKLTATQAQTVIAAAILRQLHAVITTGQAWDPDIATHGTGHRKQMPIAA

SEQ ID NO: 114793 - protein, 337 aa, unidentified
MAKNKVTRMVGVDVSARWLDVSRGASDEAVERRQFANTDGGHRELVRWVTQSGRPARVVLEATGLYGLDLALTLQRTRGVEVMVINPRASKEFAGACGQRARTDATAAEMLREFATRMAFTAWTPPSATALALRTIMRRVVSLIEMRVQEANRLHAVSVTEALPVVVRTDIRQHLRSLSRQILRLEQEARAIVESAPALCTRYRHLCSVKGIGRRSALMILAEVDVLPPDLTVRQWVAYAGLDPRPIQSGSSVRPPVHISKRGPAYLRRALFMPALVAVRRNPPVQQFAAELAARGKAPLAVLVAVMRKLLHAIYGMFQSDTDFVPDKFRQPARTAA

SEQ ID NO: 114794 - protein, 434 aa, unidentified
MKSDFAAFVAIDWADQKHAWMLQTASSTARQAGTIDHTPEAVAIWASELRLRFDGRSIAVAVEQSRGSLVFMLSKYEHLVIFPVHPTTLANYRKSFRPSGAKDDPNDAALLLDLLTLHYDKLRRRQPDTPETRTLQFLVEERRKFVHERTRCSNRITSHLKLYYPQVLEWFDEIGSNIAAEFLERWPSLDKLQRARPATIERFFVDHNSRNAESIARRLDQIRKAVPATTDSAVIASCAAAVIAWAALLKQLVLTIESYDKNIDALARQHPDYAFIKSLPGAGPALTPRLIAALGSQRDRYQTAHELQCYSGIAPVVASSGKQRWVHWRWCCPRFLRQTFHEWALHSVAYSTWAREYYDRQREKGKRRNTVIRSLAFKWIRILFRCWKDRTPYNEATYQQAIAKRHPNKAKGAQAVDLRWKKIAGFSKIMAVSA

SEQ ID NO: 114795 - protein, 351 aa, unidentified
MKTEQTAQPKLYIGIDIHKRSWKIHCATDLFSGKSFTMPPKPDLLRTYVETHFQDYDVSTAYEAGCCGYYAHRSFEGYVWRSLVVNPADIHRKGKERFTKTDKIDAQLIARELKDGRLESIYIPEVEREQLRSLFRRRNDLVKDFRRVKSYIKMQLLYFGVTVPEEFDNDHWSHAFRVWVDTIIFNHPTARETLDSRMRSFRFIDKELRDVSTKLRAYCRKHYKTDYYLLRSIPGIGGIVACGIICELGDLRRFNSIKHLAGYVGLAPGVHQSGDNQRHTGITMRAHRLMRSYFIEASWQAIRTDPVMQAYYRKHVGKNVKSVIVKVARKLLSRTLAVIKTETPYTIGVIE

SEQ ID NO: 114796 - protein, 383 aa, unidentified
MSALPQKSDITDFMMGWTPRRRHRCAKVEVLSTTLREASVSEVSIIGLDIAKHVFHAHGADERGRVIFSKRIGRGKLLDFFAAQPSCTVALEACGGAHHWARQLTQLGHDVRLIPPAYVKAFVKRQKNDAIDAEAICEAAQRPSMRFVAVKSEEQQAAGLVFRTRDLLVRQRTQLINAIRGHLTEYGWIAPKGPSHVAMLADLIEEDEMANALPEAAHAMFRLMLDLLAGLNGKIADLDKEIARRAREDEVSRRLMTVPGIGPISATAIAALAPPVETFAKGRDFAAWLGLTPLQRSTGGKQKLGATSKMGERTLRRLLIIGSSAVVQQASKRGAPKGSWLEQMLARKPRMLVTVALANKMARIVWALLVKQENYRTPVAAKT

SEQ ID NO: 114797 - protein, 711 aa, unidentified
MIDVALLSVIRRWRLRDGLPIREISRRTGLSRNTIRKYLKSQVVEPKFATPKRASKLDAFEGKLKRWLEGEPRKRRKQRRNLRQMSGDLVALGYRGSYDRVAAYARAWRRRQRAQARLAGGGTFVPLVFAPGEAFQFDWSTDWAVIGGERMTLKVAHFKLSHSRAFVLRAYRLETHEMLFDAHNHALRVFGGVPSRGLYDNMKTAVDRIGRGKARVVNARFQAMASHYLFEATFCNPASGWEKGQIEKNVQDARRRVWHDVPAFASLAALNDWLEQRCAALWQEVKHPEYKARTIAEVWADELPHLMSLPPPFDGFVEQTKRVSPTCLLAFERDRYSDVMDTSPFLTKGISPGRMKVRIQSFLEASIMSNVITIGLDLAKSVFQVCGLNRAGKVEFNRQVNRKQLMACLMAHPQALIAMEACGSAHYWGRRLEAADLSVKLIPAQHVKAFTRGNKNDANDALAIAEAASRPNLHPVSVKSLAQQDIQTLMRIRSRHQHARTDAVNQLRGLLSEYGIVIPQGIKQIGRRLPAILEDAENGLTAIAREGFYTLYQDYLSLSEQLATAEKTLERLAKTNPRCRMLMRFRGVGVMTSLALFSAVGDPASFKNGRQFSAWLGLTPKHEGTGGKVVMGAMSKRGSSYLRTLLIHGARTVSRWLDKYDDPFSQWAMAVIARRGKHKAIVAMANKNARLIWVALTKGIEFVPSYHLSPA

SEQ ID NO: 114798 - protein, 539 aa, unidentified
MKISRKADSAPSPLLADISLAVMHRRAEHSAVAQARRSELVNNCAAGENFAGERPALARSRSPLSNRKTVRRRLPAEPVALAPTSNRKAPQEGQNISSMDSRVKRRKNHQYKNKAMNSSEQWQQYRAFGGLDWASQAHSVIVVNQAGKVLEEFEIEHSALGWKKFREKLQPYGSIPFALETSQGVAVDQLLEAGMLVYPLNPKSAQAYRERKAPSGVKDDRLDAWSFADALRVDGQGWKGLRAEEPLIKELRLLCRDEVALIEQRTAFIEQLRHALAEYYPAALEAFKDWTRVSAWMFIERFPTPDSLAKAGKRRWQNFLHSRRLWGSDQGPRRMEIFARAEEFAGTPATRRAKSLLALSLVKMLFAVEEQLALYRSRIEALFARHPDHDLFGSLPGAGPKLAPRLLAEIGEDRERFGGDAQNLQCLAGTAPVTRRSGKKGKKNYWHVHQRWACDKYLRHALHLFSEQSLTRCVWAELYYQHHRQKNQSHASALRRLANRWLKIIHKMWIDRTPYNPELHHRNQVQHGSWIFQLQKLNP

SEQ ID NO: 114799 - protein, 418 aa, unidentified
MGLQVWYARCAGLDVHQKTVVACVLLTQADGQERKAIRTFATTTMSLLSLADWLASEQVSHVAMESTGVLWRPVFNILEGQFQVILVNAQHMKAVPGHKTDVKDSEWIADLLRHGLLKASFIPPKPIRDLRDVVRYRKALVREQNREINRLQKVLETANIKLSSVASDVMGKSGRAMLEAMLAGESSAEVLAGLAKGRLRSKREPLREALEGRVEATHRTLLRHLLDHLACLEEQIAQLEGQIEQHLVPYQHQMNTLLQIPGIGRTVAASILGEIGVDMRCFPSDRHLSSWAGVAPGNKQSGGKRLKAGSTTGNTHLRAVLAEAVWAISHTHDNYLSAQYHRLAHRIGKKRAIVAVSHSLLIIIYHLLRDQQQFHDLGPHFFEQLDHERLRSSAVRRLEALGYRVTLEEQDQQQEVND

SEQ ID NO: 114800 - protein, 374 aa, unidentified
MIKENYIYVGIDLHKETHTAVMIDCYNQKLGEITFPNRPADFPKLVAKVKKCNTDGKTIVFGLENAYGYGRALAVWLIDKGYLVKDVNTAISHRQAKHRGAMYRKSDSDDAEAIALATLNMLDKLPDAYPNDAYWSLGQLVHRRDNIMKQRTRLVNQLHEQLCIAYPSYKQFFNDISRPTALYFWEHYPSRKYLKGKSVEDLRAELVPVSHNKCSTKTCEKILDAVASDKVKNNAYQDARDMVTLSIVSDLQHYDKQLAEVDKMLEQMYKMLGCTLTTIPGVNVITAVKILAEIGDIKRFSNANKLAQFAGIAPLHLSSSGKGKDVATKQGNRRLQATIYFLAIQMVQISSKGTPRNPVVRAYYEKRKAEGKTS

SEQ ID NO: 114801 - protein, 336 aa, unidentified
MTLTTISLDLAKYVFQVHGVDAEGNVIEKRRLRRGQVIAYFASIPPCLVGMEACATAHFWGRELSKLGHEVRLMPPQYVKAYLKRGKNDAADAAAICEAVGRPSMRFVAIKAEEQQAVLVMHRARDLLVRQRTQLINALRGHAAEFGIVGAQGRWNVARLLVTIREGCAVPELARAIVEMLALQLDAISERIDEVDARINAWHKANPVSQRLATIPGIGPLSGTAIAATVADPAAFRSAREFAAWVGLTPRQKSTGGKQRLGRISRQGDQYIRRLLIIGAQTTLLRSKAARANPWIQSLLARCPRLKVAVALANKTARIAWALMAKGESYRQMASA

SEQ ID NO: 114802 - protein, 414 aa, unidentified
MDLIYQHVAGLDVHKKTIAVAVRLRQPPGKVHEEVRTFETMTRDLLQLSDWLSSQGVTHVAMEATAVLWKPIWNILEGAFTLVLVNPCDLKQVPGRKSDVRDCQWIAQLLHCGLLRSSFVPPRPQRELRDLTRHRAQLTSEHTRVANRIHKTLEDANIKLGSVATDVLGKSGRKMLRALVAGHSDPKQLAGLAEGRLRAKLPALQQALEGHFTEHHRFMIDSLLGHLEYLEQQIDSFSARIAECLRPFLSDEDVDRLDAVPGVNRRTIENVVAETGTDMGRFGGAEQLSSWGGLCPGNEESAGKRKRRRITPGNAWLKRALGEAACGASRTKGSYLGAQYRRLAGRRGHKRAVIAVAHSLLVIFYHMLKEPVEYQDLGADYFKRQNPEPLKRHLVERLRALGYDVALSPREEVA

SEQ ID NO: 114803 - protein, 438 aa, unidentified
MKVLHEHVAGIDVHKDMIKVAIRSPGEKPWTRKTEVLEFRTFYGVLQEMARELRRRGVTHVAMEASGVYTEPVYHALCEQDFTEVIVVNPAHVKALRGHKTDARDCARIAELLECGLLHGSFIPSAEQKEVRDLTRYRMKTVQARTSEIQRLHKALESAGIKLGSVLSDITGVSGRLMIDALIDGERRAQVMADLAKGTLRQAGKQADLSMALAARFTDHHAMLCRLHRDQIKLADHAIAGLDAQIADRAGRWPRELGLLDSVPGFGDVVSAAWLAEIGPAPHRWFPSHGKLASWVTLCPGNNISARKRKHGRTGDAGTYIKPMLVQAAWAAIRVRGRLQARYRRLVRRFGGDKNPGAKKKAIIAIAHTLLKIAYQVLKTGQPYTDLGADFYTRRQSPEQQQAYLARRLQKLHPGCTVTITISPPPGSPPPSAPTEAA

SEQ ID NO: 114804 - protein, 352 aa, unidentified
MEFFCGLDVSIEETAVCVVDGKGDVHLQTKVATEPEAIRAVLKPFLGRLRRIGHEAGSLSPWLHPELLQLGLPAICLETQHVRAAMSAQRNKTDAADALGIAHIMRTGWFRQAHIKTEACYRMKLLLTHWRNLKRKFLDLENAIRHSLKSFGIRLGKVGRGAFDQAVRDAVADDALTAELMDAMLTAQAALWKEYCRLHDMVVKIVAASELARRFMAIPGVGPVTALSFIAAIDDPSRFRRSRDVAAYFGLTSRRWQSGTSIDIKGHISKAGDPDVRRALYEAASGLMTRFKGKDKVKAWGQKLTKRGCHKKAVVAVARKLAVLLHRLWVTGDVYEPLRNSLSLPSVAATAA

SEQ ID NO: 114805 - protein, 337 aa, unidentified
MYVGDDLHGNNNFLAIVDLEGKRVSQKKLPNDLFVIGDFLKPYQKDIIGIAVESTFNWYWLVDGLMDSGYKVHLANPSAIQQYSGLKHSDDKHDAFWLAQMLRLGILPEGYIYPKEDRPIRDLLRKRRHLVKLRTSLMVSLQNIISRNCGVKFRANEIKRLKEDRVTPLLESNQDLALAGLTSKEMIDQLTRQIQKVEAFIVQRVQLREAYRYLPTLPGVGKILGLTIMLETGPIGRFAEVGNYASYCRKVPSRWTSNEKTKGKGNQKNGNKYLAWAFSEAAEFARRFDVQARAYYTRKMRQTNSPVAHSALAHKLARAAYYLMKDQVPFMPGKLFS

SEQ ID NO: 114806 - protein, 309 aa, unidentified
MNKAVVYIGVDVAKASLDVAWAERSRRFANNKSGLSALTKWVKQSPFAVHLICEASGGYERGLLDAAEQNGIKVSLVQANRVRQYARAAGILAKTDKVDARVLCAFGSAMQPEPTPPLSAQQKRLRELETQRQHLSRMMVAEQNRLAQLNDKELQRLTRSLLATLKKQMAAIDMRMGGLIAEDQTLKQKAQKLTAIVGVGTRTAVLLLARMPELGTLNRTQAAALAGLAPFNRDSGTLRGKRTIFGGRRALRCGLYMAALVAARHNLILRNFYQRLRSNGKPHKVALTAVMRKLLLALNHTLKPAASFA

SEQ ID NO: 114807 - protein, 368 aa, unidentified
MDSPFQDGIECAKLEDQPTSVQPKGGVIMKRTTIGIDIAKNVFEIYVEDGATQGVERKRLSRKKLLPWLANRPPALVGMEACGGAQYWARELTKLGHEVRLMAPQYVKPWVQTNKSDAADARAICRAVQEPGMRFVRIATEAQQDVQAMHRVRSRLKGNRTALVNQIRGILLEYGVAVPQGVASLRNALPSLLAEERWSPLMRQFLTEQQAELTACEAQMAAVTVAITRASATQPVCQRLEQVRGIGPLGASALWLKLAGGAYQNGRHVAAALGLVPKHTGTGGKVRLGGISKRGDRYLRQLLIHGARAVVAQVGEKPDALSGWLRRLVARRGMNKAVVALANKNARVAFALMHGEHPYEVTKMCRVA

SEQ ID NO: 114808 - protein, 343 aa, unidentified
MARFVGLDVSQKLTSICVVDDTGRRVWRGQCASDPEQIARLISRYARDAAGIGIETGPMTPWLVHEFRARGLDVTCLDARHASAALKMQMNKTDQNDAEGLAQIMRTGWYRSVHVKSLDAHRARALLGARAQLVGMTTRLSNHIRGVLKTFGLLPGAMRGLPFDRRVETLLADRDDLTSIVRPMLLAWRQLREQIAAFDKEVRALAKKDPTCRRLMSVPGIGVVSVLAYVSTVEDPKRFARSRSVGAHMGLTPRQYQSGEIDRSGRISRCGDTLARTLMYEAAVVILTRVKRASNLKDWAQAIAKRSGPGKARVALARKLSVILHSIWRSGETFRWSKQPAVG

SEQ ID NO: 114809 - protein, 405 aa, unidentified
MIYIGIDVAKDKHDCHIMRDDGEVLLDNATFANSREGFGVFAEMVRGKRRRKEEVKIGLEHTGHYSHNLFEYLKAQDYTVIALNPLKVNLYRKSKSLRNTKTDKSDARYIAEVTAETEVEKKRRVINDIHVMKSLTRYRYRVQKTVQATKNRYRRVLQVVFPEFEKHFNVNYRSAIELIGRYSSPKEVLAADRKNLVKNLDKISYGRYGKRADELIDAAEESIGVSNAGDTYELKHLARFITFLEDELALIEEKLRAILDRLKNPILTIPGIGVTTGATILAEIGNIKNFETSAKLLAFVGSEPTIYQSGKYLLTRTPMVKKGSKYLRNAIFQATKAAYVVDPIMRTYVDKKRAEGKHFFVALSHGMKKTVRRIFSVLKSGKSYQAPSQAHNQAPTDAALDNYEL

SEQ ID NO: 114810 - protein, 319 aa, unidentified
MGIDVSKQTLDVSVMIGGKPLGKQVPNNDEGYRALVAWLQHRKVAVVHVGLEATGHFSLGVALALHAAGHTVSIVNPAQIRDFARSRLGRNKNDRVDCTHIREYVALFAPPAWRPPSPALRQLCALQTMRAGFVASHVEWRNRLGSGGTDAAALALARTTIAHFEAQIAAVNAAIAQVIDDDDELRGKRDLLLSVDGVGETLAAIMLAEMPGPDVIASSAAAVAYAGLNPRQFQSGSSISHPTRISKIGNATLRTALFMPAMVAMRHNPAVAALVARLRKQGRLKGKQIVVAAMRKLLVICFGVLKSGKPFDAALAMPA

SEQ ID NO: 114811 - protein, 416 aa, unidentified
MISSPKANPFERYLAIDAHKRYVMVGGLNAQQEPILLARKIGVDDYPKWAKANLKPGDAVVIEATTNTWTLYDATAPLVGKVVVAHPFEVKQIANARVKTDKLDVYRLARLLAADLVPEVWVPPIEVRELRTLIAHRRKLVKLRTMTKNRLHSLVHRNNLVPPQGGPFVDKNRVWWEGLPLSQVEKLRIRQDLALLDHLEPQISEVDQELARLSTLSPWEAYTPYLMQLPGFGLINTMTTLSAIGDITRFPHAKKLVGYAGLGSSVHDSGQTHRSGHITKQGRRELRWALVEAAWVAVDTHPHWKEQFQKLTRRMKSNKAIVAIARKLLVVIWHVMTERVADRKADPDMVAFKLMTWSWKLNDFQRGGLTARQFVRYCLMQLQLGENLTHVRRAGQRPIASVEEVLALRPDLRSSV

SEQ ID NO: 114812 - protein, 383 aa, unidentified
MKKRNEKQEKRRRKDKARDIFHIINVNAAGIDVGSAEHWVAVPEGRDEQPIRKFGCFTADLYALSEWLKKCDIETVAMESTGVYWIPLFQILEGRGFEVKLVNARHVKHVPGRKTDLLDCQWLQQLHTYGLLSGSFRPQDSICVLRSFCRHRENLIQYAAAHVQHMQKALIEMNIHLHKVITDITGTTGMRIIKAMVAGERDPLTLAKMRDPRVKNSAETIAKALQGDYRHEHLFALRQAVELYETYQRQIQDCDQHIEAYLATLDSKVEDKALPPSRARRRKPQGNTPHFDLRSHLYRISGVDFTQIDGLDALSVYNLLSEVGLDPRAFPTVKHFTSWLALCPNNRVTGGRVKSSTTRKAKNRAAGTFRLAAMSLANSSSAL

SEQ ID NO: 114813 - protein, 243 aa, unidentified
MAMTVSQSIIGVDVAKAEVVVYQSETAETKIVPNKKNELKAWLKSLPAGSAIAIEATNIYHVDTVNLAHSMGHIVYVIDGYRLSHYRKGTGGRAKTDLSDAQLLARYLKNEQADLRVWNPPPKIYTKLQSLLRRRAALVKMRVALNQSWAGEPLLKASSKSISACLDRHEGLIEKRILEAVTEAGLLHQVKRCQAVEGIGFLTAVALTMAFQRGEFENADAYIAFLGMDLRVSDSGQMNGRAR

SEQ ID NO: 114814 - protein, 344 aa, unidentified
MQIAILGIDLGKNSCSVVGLDNSGHVVVRRRMHRTSVIKFAGGLVPCVVAMEACCGAHHLGRLLRTQGHEVRLMSPEYVRPYVKAQKNDERDAEAIAEAATRPTMRFVELKAEEQLDMQTLHRVRDRLVGERTALLNQLRAVLLERGIAIPQGRRKLEQHLDAMLGGPESADVAPRMRRLLRDMRTEWQALDRRIEAFDEEFAVKVRTDPVACRLATIPGIGVLNATALVAAIGNGENFARGRDLAAWLGLVPRQATTGGKPRLLGISKRGNKYLRKLLIHGARAAMPSLARSGTALGAWLRGLLARAHPNIVVVALANKLARIVWAVLRHGREFERADVVAST

SEQ ID NO: 114815 - protein, 350 aa, unidentified
MLLLGIDIAKLNHVASLVDSESGELVFSNFKFQNNMPGFFSLYEKIVDFSIKDIIIGLESTAHYGENFINFFFQKGFKIAVINPLQTSHLRKANIRDTKNDHLDSITVAKALLFDNFKFISQNNVSNFALKKLTRFRKSLVKQRSRSKIQLVSLLDIIFPELQYVFKAGIHTKALYALLKKYPSTEKIAALREKSLFSILSKASKGHYDLDSALLLKSHARSSVGVKDTSISIHIPQLIELIELLDKQIKSIEEEIEDSLDNESPVLTIPGISNVAAASIIGEINDISNFDSPSKLLAYAGLDPKVRQSGNFNASSCRMSKKGSPYLRCALIFTAWNLVRNSKRFKELFQ

SEQ ID NO: 114816 - protein, 336 aa, unidentified
MRYIGVDLHTTQITICYLKADSEFEIRKYQLIEMEKFVNTLEKTDEIAVEATGNTRWFAEQVAEKVRRVVVVNPRRFEVVKNSVKKTDKHDALNLARFLRADLLPEVRAKREEATTVQSLVNTRTKLVRLKTSLINKIHALFVSNGRKLKKTSLASEKGLEKVLLSEWSAIERIELEIIIEQIRSLKVSIKKLDTAIEAESGKLNGFENLKSMSGIGSLSAGILLSVIGEIKDFETADKLASYFGIVPRVSNSNETIKHGRITKRGNRTGRTTLVQCSLAAIKKSEYLKNYYEQVKARRGHGKAKIALARKYLGIIYNTLTNNWVFRDFNNFELAE

SEQ ID NO: 114817 - protein, 336 aa, unidentified
MGSYVGIDLHRRRSVIAVLNDDGDRVSWCRIDNTPANLAAEVVAAGADAEVAMEATWGWYWAADVIAECGARLHLAHPLGIAGYENRRVKNDIRDATLLADLLRLGRLPEAWVAPPEVRELRELVRYRAKLGRMRSGLKTQVHQTLGKEGVIPELDDIFRGSGPRWLDDLQLGDVYLERIESLRELIELHDRQIRHCDARIHRRLKGHPGYEAVQVLRGVGPVLAAVFVAEIGDVSRFDNPRRLCSWAGLTPRLRESDAHSHRGHITKQGSRLLRWAAVEAVSGAVRDPQIASIKARVGARRGRNIGRVAAARHLLTLVYYGLRDGEIRCLAHDAA

SEQ ID NO: 114818 - protein, 344 aa, unidentified
MDNHTQYLGFAGVDLAKKVMQIHFVTEDGEITDKSAKRAEFLDFFRNRGKCLIGMEACGSSQDWARKLEAMGHEVHLMSPKAVKPFVSGQKNDHNDAIGIYKAMLNGVRRVPVKSTEIRDLQTLRRIRSQVMKDRVKEINHVRGLLAEYGIVMGRSITAFNKGIFSALEGLKERGDVSPLVAEELWTTVEAIKRKIERQKKLDREIEQLARGCKNYENFLKTPGVGPFTAAMLCVLLCDPGIFANGRKFAAYIGLAPRSRGSGGKNFVTSIPLKFNCDSESRAVFVECAQAIARYKNKSFWVDDILRRKPKKVALIAIANKLARQVWAMANKGESFKPKAILTA

SEQ ID NO: 114819 - protein, 388 aa, unidentified
MIYVGIDIAKLNHYAAILSSDGLILTEPFKFSNDYDGFNRLSSELSDFPPESVIIGLESTAHYGDNLVRYLVANDYKVCVLNPIQTSSRRKDRIRKTKTDKVDTIVIAETLMMQRSYRFMTFYDLDVMDLKTLGRFRQKSLKQRTRLKIQLTSYVDQVFPELQYFFKSGLHQKSVYALLKEAPTPKSMASMHMTHLSHLLQVSSHGHFDKETARQLRALAQKSVGNSDSTISIQITQTISQIELLDSQIDKVEAEMTEIMKFHDSVIMTIPGIGYVNGGMILGEIGDIHRFSKPHQLLAFAGLDPSVKQSGNFNASRTRMSKRGSKVLRYALINAAHNVVKNNATFKAYYDKKMAEGRSHYNALGHCAGKLVRVIWKMMTDDIDFNLD

SEQ ID NO: 114820 - protein, 355 aa, unidentified
MESTKYIGMDVHKDAISIAVLNSSGKLVMESIIETKAITILEFVHGLRGSLYLTFEEGTWAAWLYDLLKPHVTKLVVCDPRRNDYLKQGSKSDRIDARKLAELLRSNLLRPVYHGEHGVRALKELARSYLTITKDQARVMTRVKAVYRSWAIPCAGKQVYGQRHRLEWLGKIQEAGVRRRAEFYYVQLDALRSLRLVVRRELLLESRKHGASKLLSQIPSIGPIRAALLIALLQTPDRFRTKRQLWAYSGLAIETHDSAENQYVNGQLQRSRKQASIRGLNQNHNHDLKNLFKSASAVAAAKAGPFQKFYDAQIGKGLKPEMARLTLARKIAAITLIVWKKGVSFDARYLNPQTA

SEQ ID NO: 114821 - protein, 295 aa, unidentified
MDAHSSICVFSVVDEKGTEVNQAKIATNGLLLVEYIRSIKGSKKLVFEECELSAWLFETLHGEVDELIVCNPTRNQQYKKAKTDKLDAQNLARLLRGGFLTPVYHDGSKTEWLRALMSGYQDVVDTGVSVKNRYKSLFRKAGLPARGTKLYDDSSLLEDLPRPDQRFVGHSFYRLLEALEKEREQYVAAIGKLGRTFPEIKLLKGIPGIGDISAAKIIAQVISAQRFKDKHKFWSYCGLVRHRMESGGHVYGSRRGWGNRTLKCVFKMAAKSVLTGENELRAHYDELRAKGATRP

SEQ ID NO: 114822 - protein, 436 aa, unidentified
MDEVTDEPLYRDRVCGIDIGKAGMAVTIRVPSDKNPSRRMAETREFGTTKREVLALADWLRCWQVPAVVMEATGDYWKPVFYRLEAEGFECVLADAKQVKNLPGRPERDPSDSRWLAACFERGAVTGCFVATPEFRLIREHTRYRRDLTGERTREKQRAEKLLESAAVKISSVITGLHGMTGRDIMDHLIAGERDPRALAELARGKARPKIARLAEALEGAEFFTPEHAGLLETMLRRIDSIDAEIARLTAVIERLLAPYEEQLQQAESMPGWGRRAAQDVIAETGVDMSRFRTPGHLASWCGRTPLDRQSGKRAGQARHKKGNKYVAAVVGETSVAAGKTDTREGARHRRLSRRRGKNKAVVATGNTQLRVLRVLLSSPGTRYQDLGADYYERQREAARQVRHHVGKLGALGYEVTLCRLPGADPDAAETGTQTA

SEQ ID NO: 114823 - protein, 356 aa, unidentified
MATYYIGADVHSNSIEIAIRTRREVVQRYSITPSIQAAAEVLSSLQGTRHMAIEEGPMAGWLYRNLRQKVDSFVVADPRRNKLISSDGDHDDKIDSAKLALLLEGGYLRAVYHSDDDRRVELKHWVALYHDRVHDAVRHMNKIRARCRMHGIRIPRKVLRQPEHRAAWLSKLKQPALAKQLLMLWIGYDATAKQARMAKQHMIRLSREYPVIALWQQLPGIGTVRAATVFAYLDTPWRFKRKNKLWKYCGVGLQRTASGTDKKGKPKPARLQMPWAANRTLKDAILGAALTAINQKHNAFKDDYERMVRNGLIPSNARHTVARKLLTVMWGVWKTSCQFDQSKGALSKSTEQCHCI

SEQ ID NO: 114824 - protein, 344 aa, unidentified
MDHFAGLDVSVKETSICIVDDAGRIVREVKVASEPDALLAVLTNPAYRFKRIGLEAGPLSQWLYSAFAEANLPVICVETRHMRAVLQAQINKTDRNDARGMAQMMRAGLYRPVHVKTLRSQKLRMLLVHRKLLQSKAIAVENDLRGTLRNFGLKVGIVGKLKFEARIKELVESHPDLAALVEPLLVVRRVLREQTAVLHRRLLAIVRGDEVCRRLMTVPGVGPVVVLTFRATVDVPARFTNSKAVGAVLGLTPCKHQSGESERTGAISKCGDEMMRVMLYEAAQILLVRSKRWSWLKAWAMQIARRRGTKKAIVALARRLAVIMHRIWVDGTEFRWTRQEAAAA

SEQ ID NO: 114825 - protein, 387 aa, unidentified
MTIPAQVFEIIPRHYEIFGGLDVDKKNMAVTFTDHEGLMRSLRVPYSSGHLLHYVRKHFPDRRVAFVYEAGPTGFGLHDDLVTAGYRCLVVAPSMVPTAPGNKVKTNRLDSRKLSVQLRGGQLRGIHVPGPRYRELRHLVQLRDTQVGQLTATKCRIKSLLLCEGLAFPPAPESSQWSARVLDELHELPCSQAVRFKLDQLIGTLHFHFNSAAAAQKQIRYFCQNDPELRQSISLLNSLPGIGVIVATHLVARLGDWREISNVRQIAAFLGIVSSEHSTGEKENRGPITRAGDSRLRNKLIQSAWTAIRKDPELRAFYLRIYHRHPKKVAARKAIVAVARKLTTRIYAVLKEQRPYVLRPENFAAPLTAEETVGPRERLDSPQNEQP

SEQ ID NO: 114826 - protein, 452 aa, unidentified
MAKKNKKQQKTINSRKAVLERIRLNAAGVDIGSEEIYVATVEGPVREFSTFTQGIKESLKHIKSEGVDSVVMETTGIYWWPIYEIYTTAGLEVYIVNACHAKNVPGRKTDVLDSEWLRELHTFGLLRSSFVPASDICKLRVYMRSRQDHIEMASAHVQHMQKHLDAMNVKLHNVISSLTGESGMKIIKAILAGERDPKKLTALCSQRIDAKKLSDVELSLDGHYKEEHLFGLQQALDIWFQYQSQILECDRKIEGFFNLMIKNKPVPEKIKSPKPISNPNKLQIKGLHEMLMIYTGGKDASQLPGFNDYSLTRVISETGIDMSPWPTEKHFTSWLNLAPWQNSSGKKKKTRRRKIQNRAGQMFREMARSVGNSKYQALGGFYRRIKSRNGARVANKATARKIAVLYYRLMKFGFDYVEQGLEEYEKIYQERMIRSLTKKAKQFGMRIIPEAA

SEQ ID NO: 114827 - protein, 353 aa, unidentified
MEHFIGCDAHKKFSLFVAMNEDGEYGRAIRVGHERERMRAFLEDLPAGSQIALETSGSYYWLVEEMERAGHVPQLAHALTAKRRMEGRHKTDERDARGLAMLLRNGTLPRVWIPPAELRDQREMLRLRMSLVESRSQAKNRIHGALLRYNVELKAKDIYAAGGREELAGQLAQLPEWTRQSVLRQLETVDYLEMQIEACEQSLETMLAPSAERDLLKTLPGVGKILSAVIALEIGDIARFGNAERLVSYAGLVPAARESAGRKRPGKCPSACNTYLKWAFVEAGNVIATHHHKWPERHVAQLYVRVKHNTKMHGKATVAVGRHLAEAAYWILSKQELYREPKSNRQALSSTHG

SEQ ID NO: 114828 - protein, 483 aa, unidentified
MAERKKNTFQRLKKGQLNRKERRDLERRLSTEAPGLEIVNRNVAGIDVGNESHYVAVPPSRDPQPVQEFGSWTADLERMADWLKMCGIETVVMQSTGVYWIALYDVLEKRGFQMCLANARHTKNLPGRKSDVQESQWLLKLHTYGLLRNSFRPPDEIRALRSLWRLRDRHVKEAARTVQHMQKSLITMNVQLSNTISDLSGTTGLAIIRAILTGERNPEKLAKLRDWRIKASEEEVARSLEGNWREDMLFELRQSVDAYDFIQKQVAECDQRLQTLMAELPMREAPAAVPAVRDGVKPPVRKKKSTRNKKNVPRFDLKAELQRVCGLDLTSIDGIDVMTAQTVVAELGTDFSRWKDEAHLTSWLGLAPCRDISGGKVLKQTTLRVKNRVAAALRGAANTLLHSDSYLGARFRSLRTRRGAPKAIKAMARYLACIIYRMFTRGQAFVDRGAQQYENSRAQRELAALQFKAAAHGFRLVDVQHPA

SEQ ID NO: 114829 - protein, 297 aa, unidentified
MEQTIRHSVGLDVDKRSFKSCLKTKELDHRSKVKATKTFNNNPEGFKELHLWIKKNVKSPSQVSIVMEATGVYHEHLAWHLHKLGYLIHIVLPFRAHRYMQSLGIKSKNDKIDAHGLADMGMQQELEPWKPCSEDLLLLRSLTRQYEMFQKTKTVVTNQLEAAMHLAICDKMITKNLKSLIEKISKDIEKLKVRIEELILKDPVLHQKFTLVEPIKGLGIVSFAILVAETGGFELFENQKQLVSYAGYDVVENQSGLRIGKTKISKRGNGHLRRILFMPAFNIVRYKVAPFHQAYER

SEQ ID NO: 114830 - protein, 399 aa, unidentified
MACVRHMANGLVRREVRTFKTTTKELLALSDWLAGEGCTDVAMEATGVYWKPVWHILSDGDVTLVLANAAHVKNVPGRKTDVNDATWLADLLAHGLIRGSFVPDEQTQEMRTLLRTRKQLVRECSRHVQRLQKTLEDANIKLDSVITDIMGLSGRRMIEALIAGESDPGRLAQLAHPRLKATPEALREALRGRVTRHHRLLLRLHLQQIAAINAAIEQIDREVDAQVEPFRAMIALLTTIPGVDELSARVILAEIGRDMSRFPTAAHLISWAGLCPRSDESAGKRRSTRMRKGAPWLKTTLVQCAKAAARKKASYLQAQFHRLRARRGAKKATGALAASILTIVYHMLTNGELYRDLGPDHFDHRAKAANTRRLVTRLQNLGYTVQITPLAAYPSFVSF

SEQ ID NO: 114831 - protein, 321 aa, unidentified
MTYVGIDVSKATFVVAYSSAKTGRTKTFKNTVKGVHEFIQTISVTEHHCLLEATGNYSALLVYLLSEAGITVSLENPLKIKNFARAMLAVTKTDEIDARLIALYGERMQPAPYKLRSDSILVLKQKRTVLRQLKKQLVATRNLKGSMEALPFFDPKCKKTIERTIAFLDKQIKGMEEEIASLAQGEYKKQMDLLTSIKGIGVTLAAALIVATGGFTYFDNAKQLTRYLGLSPTYQQSGTSVNVKGHINRNGDSSLRSQLYVAAFSSLRCNTECKACFDRLRSNGKPGKVVVIAVANKLVRQAFAVVTQGKPYVDGFKSEKP

SEQ ID NO: 114832 - protein, 346 aa, unidentified
MEHYVGLDVSLKLTSICIVNRTGKIEREGVVASDPEAIATFIKLHAPHVVRIGLETGATSTWLWTELNKMGMPVICIDARHAKAALKMQINKSDRNDAVGIARIMQCGWYKEVCVKNLDSHATKALLVSRALLVKVKRDIENQIRGLLKNLGLVIGRAKMNMFAVRAAQLAENRSELFAAVDPLLKAREAVEQQILDLDRKVLRLARNNVQVRRFMTTPGIGPVTALCFLATIDDPARFKRSRSVGAYAGLTTRRYASGEIDWTGRISKCGDKMLRSYLYEAANVLLTRVAKWSALKAWGIRLAKRSGLRKAKVAVARKLAVILHRMWIEGTEFKWSSKEAADQPA

SEQ ID NO: 114833 - protein, 463 aa, unidentified
MSQKTRGKVKPKKLPKSLAGLQRINLNAAGIDISAGEHYVAVPADRDPQPVQRFGTYTSELHRLARWLKDCGITTVAMESTSNYWVALFQILESAGLEVLLVNARHVKNVPGKKSDVLDCQWLQELHTYGLLRGSFRPSDQVCQLRSYLRHRDNLVRGAGRHIQHMQKALTEMNLPLHRVFSDLTGLSAMLIIEAILQGERDATKLAAMKDGRAKASVEEIVRALEGDYRAEHLFALEQAVRLYRTYSTMIAECDSKIALQLASFAPKVDPSAQPLPEKARKKTAAAQADFQMRTQLYSICGVDLTRIPGFHLLTVQALISEIGLDMGRWRSEKHFSSWLNLSPGNKISGGKRLTLVPIKGHNRAADLLRLCASAALKSKTALGAYGRRLKARLGPPKAIKALAHKLARLLYRMLKHGAAYIEAGERYYEEKYQRHILARLHKQAAHFGFQLTPTQGKLATVS

SEQ ID NO: 114834 - protein, 400 aa, unidentified
MDRNRTVAGLDVHKDSIYLCIMGHDGAIIFEKTYGVLTPDLRQMCDDMVCRGVAEAAMESTAVYWIPVWNELCESMELKLVNPYFIKQLPGRKSDVKDAQWIAECLLKNLIKGSFVPEATIQDMRKLNRRIMDLNEDMTYNANKLDTALQRCGFRLSNYVSQVKGKSYQSVLQAIIGGTTDPEELVRLVHGRTVNKHGRDTIRAAVTGLFSKTDLVVVRQTKEVIDMIEMQIEECQRELTALCQEHFAEQYRRLQTIPGVKERAATAIIAETGVDMKMFATAASLVGWCGLRPRNDVSNGRYKSRKVTHGNRYLRQILIEISWVASRTRNCFFSNFSYIQTTVKKKSKMKIKVAIARKILVAVWHMLSKEEDFIDLYRKRLEKEREMEEKLQAIEAKAVV

SEQ ID NO: 114835 - protein, 457 aa, unidentified
MPKRTKSRSKSKQDPFAGLPPLNLNAAGIDVGNAEHFVAVPPNRDPEPVRRFDCFTVDLHRLADWLQSCNIDTVVIESTGSYWIPLYQLLEARGFTVKLVNAHHVKNVPGRKSDVQDCQWLQKLETFGLLKNSYRPPSEIAVLRTYWRQRDNLVKSASTCIQHMQKALTEMNIQLANVISDISGVTGLKIIRAILDGERNPHKLAQLKDYRIRSSQDHIAKSLHGDWREELLFVLHQSLQMYETYHRQIADCDRAIQAHLQTLDNKTDTKAPSLPPSTSWKPRGNAPRFDLRSELYRIAGVDLTSIDGIDVMTASVVISEVGVDVSPWETEKRFTSWLALAPDNQITGGKVIKRGTKRVKNRAAHALRMAASTLLHSKSALGANYRRLRARVGPAKAITAIAHKLARIIYRMLKYGQHYTDKGMQYYESKYREQRLRWLHKQAKQFNMQLVPSTALT

SEQ ID NO: 114836 - protein, 347 aa, unidentified
MRFYNRQHQYYCGIDLHVKTMYVCILDTTGQVLVHRNVPSTPAAFLEVVAPYRADLVVAAECMFTWYWLADLCAAEGITFVLGHALAMKAIHGGKAKNDKIDSHKIAVLLRGGMLPQAYVYPAAMRATRDLLRRRLHLVRKRGELLAHIQNTRAQYNLPAFEKRLAYPGNREGIVEHFPDPSVRKSVEVDVALIDQYDALVNDLELTIVREAKRHDGDAFHRLRSVPGIGKVLGLTILYEIHDITRFGRVQEFASYARLIKCTKMSAGKKLGTSGAKMGNVHLKWAFSEAAVTFLRHNREGQKLLARLEKKHGKGKALSILAHKIGRAVYYMLSRGTVFSMEKFLAA

SEQ ID NO: 114837 - protein, 346 aa, unidentified
MILIGCDFHPSWQQICWLDTATGETEERKLEHALGEAERYYRGLPGPARIGMESTGNCQWFVELLTRLGHEVWIGDAAKIRACDTRQQKHDRRDAALILKLLAEGRFPRIWMPSSQERDLRQLLLHRYKLVRMRVQVKNELQHLAMNQGITKKRKLWSAAGEKVLCALPLKPWASRRREDLLRLRSVLDEQMALLDEAVKKVAAENEKAQLLMTQPGVGPITAMAFVLTIGDVHRFPRSKQVASYLGLIPREYSSGGHQRFGAISKQGNRFMRMLLVEAAQSVVRYDPEFRNEYLHRCHKKPKGVAKVAAARKLTVRLYWMLKTNTAYPEIARIESSSRVPLASAS

SEQ ID NO: 114838 - protein, 337 aa, unidentified
MDKYIGIDVAKSTLQVFIPRNDLNVEIENSPDGLKKLYSKLKKHYRKSINDIVFVYESTGSYSTILEQYSQDKEIKCFKVGAYQSASFSKVVKNRSKTDIVDARMLSQMHILAKEGDVKVPYRNKEAHQIRSYIKYYQSLVKEERRKSNYLEAADFNLEDSYVLKQVKKHIKRLQKEQIEIIDIIMELIKDNAKYYQAYKNIISIKGIGDKSAIILLYLFLRYPNASRQHITALCGLDPVQRSSGTSVQHKERISKQGLSLVRDILYMPTLVSVRYNEEMKWIYDRLVQRGKPKMLAQIAVMRKLVLLAHSLYKNNETYDDQRYLQFTQFSEVENMV

SEQ ID NO: 114839 - protein, 351 aa, unidentified
MQEITRVGVDLAKNVIQIHAVDAQGKTVINRQLPRGKFKEWCVQLPAGCQVAMEACGGAHYWARALRSHGIAVRLVAPHLVTAYRLQGKSGKNDANDAAAVCEAASRPQMHFVPVKTVEQQSVLGVHRLRESLKDDRVGCINRIRSMLAEFGVVIAQSPEVLRKVLAEHPEDASNEMNGLARTTIQRMYEQWLQLEEHLKWCDERIAAHLKTDARARQAQQLLGVGPISASALLVTVGDFKQFASAAQFSAWLGLVPKQNSTGGKSKLGSITKRGDIYLRMLLVQGAKAAVLAHWRHDSPTSQWLERLKERSGWQVAAVALANKNARILWAMFARDKAFDPHHISIRPASG

SEQ ID NO: 114840 - protein, 322 aa, unidentified
MDTFQLGIDVAKAKLDCALRLPEGKLRHKGVENTQAGFLALRAWLDKQGVRTLHVCMEATNPYWEPVAEFLAGVEAVTVSVVNPAQIKAFGASRRVRTKTDKADAKLIAEFCAERRPAPWQAPAPAEQALRALVLRLEALQGMRTQESNRLDIARPTVKEGIAQHLQWLDKEIKRIIQAIRDHIDNDPALRDKQRLLDSVPGLGERTIAVLLAFYATPGRFGNARQAVAFAGLDPRQQESGTSVKGKPRMSKVGHAFLRKALYRPAMVTLYRTDWGKQFRSRLAVAGKPPMLIIGAMMRKLVHVAFGVLKSGNTFDPARHGA

SEQ ID NO: 114841 - protein, 354 aa, unidentified
MLQGKESQSYPRRCHMELCCGMDLHSSNTVVGIIDEKRKHLIDRKLPNDPELIRSFLKPYKPDLKGIVVESTYNWYWLADLLQEEGYPVHLSHPVANEQYNGLKHSNDKHEAFWLAELLSLGILKEGYIYPRQVRSLRDVLRKRAHLVRIRSGLLVSLQHMISRNCAVKVKAGDMKRLTADVISPLLNREEALLLAGKSSKEVIDCLTRQIDKIERWALKRLRREGVFIRLVTLPGVGDVLGMTILLETGPISRFRAVGNYASYCRKVSSQWTSNDRVKGRGNIRNGNKYLAWAFSEAADHARRTNEACRRFYDRKLRQSNTKVAHNALAHKLARAAYYIMKDHVSYQEEKMFS

SEQ ID NO: 114842 - protein, 423 aa, unidentified
MRKHTYKSVKINDVNREKLFEMVQGIAVTVGDDVAKKTHFAALMNAERKVLVTIRWDMPNELATFVGLVSSLPASSRVVVMEPSGSYGDPLRYQLERAGIEVRRVSPKGVHDSTEVYDGVPSSHDGKSAHLIAKLHLDGRSEPWPMGSDDERDLSSLVSTMDRYAQQVQQNVNRLEGILARVWPEATRIAELTTVSLWKLLSATGGPEGVRKDPWEARHVLRKSGQHFLTDEKIEMLVKSAQTTTGCPMTDRECEELRDLAEDTIDAHKKLLKWRSKVEKQAEDTPSSRGMSSVVGKATAAVLVSELGDPGNFPNAKAYEKAAGLNLRERSSGTHKGEKTISKRGSSSARRWLYMAVLRLIQKDGVFRAWYARKVARDGGRFKGLAIVALMRKLIRGLWHAGRGEVFDSTKLFDVRRLGLENP

SEQ ID NO: 114843 - protein, 402 aa, unidentified
MTYDYVIGMDVGKYFHHACVLDIDGTQVLSKRINQNEQSLRALFSAFSAYDHKVLVVVDQPNNIGRLTVAVAQDIGIDVRYLPGLAMRQLSRIHAGNAKTDIRDAYIIAHAAKNLPESLRSVDRVEEAFLQLKVLNGIDEDLARSYTRLINQIRSALVGCYPQFEQALRGQIIHRKWVLHLLARYGGPTKIKRLGKAKAAAFARRYKARNPEPVLDAIFAAISEQTVTIAGAHYAEMGVAMSAKDALLKLEHRQQIEKEVIELINDIPHTQFLLSMPGIGPKTAAQILMTAGDMSDFPSAGHLASYAGLSPRTNQSGTSIMSNSLNRAGNKKLKNALWQSSFASIRSHERSRQFYERKRREGKRHNAAVVALARRRLNVLYAMMRNHEHYHDPAPSQEDLAA

SEQ ID NO: 114844 - protein, 347 aa, unidentified
MDVHAATISVAVRDAAGKLIMESVLETKASTILQFIHGLRGELHVTFEEGTWAAWLYDLLKPYVTNVVVCDSRRNALLKEGSKSDRIDGRKLSELLRANLLRPVYHGEHGLRPLKELVRAYLTLRQDLTRVMNRVKAIYRGWGIPCAGQSVYHPRHRDEWLSKITQAGVRRRAQLCYLQLDMLVGLRQQARQELLVEAKKHPAWKLLRSIPALGPIRAAVLMAIVQTPHRFRTKRPLWKYGGLAVVTHSSADHRYVEGQLQRAKKPVSVRGLDFSHNHDLKDLFKSAAIQASTREGPFREFYDALVAKGMRPEMARLTLARKIVTIAFTVWKKGVVFDAKYLKPQTA

SEQ ID NO: 114845 - protein, 365 aa, unidentified
MKKIAYLGIDYHMNVVAIAVIPDGEKEFYDTIRLKNSDKLIAKYMEKLAHHFTIKACYEASSSGYCFQRKMQAWGYHCDVIAPSLVPKKPGSRRKNDFRDARELAQHYANGLLTVVHPPSEQDEAARCLIRCRQSLKEAEKRVKNQINSLLLSQGLHWQKSKWTLRHRQWLASMHLPHPYLQQVLDEHLALLHYLASRVQHFDRQIEALAQSDLYAESVKKLCTLKGIRTLTAMILIAEITDFRRFASPRALMAFLGLIPAEHSSGDKQNGNSITKTGNKRCRTQLIEAVLHYVKKPIISARIKTALADVDAATSSIALTCMQRLHKRYWALVMKGKEPKVARTAIARELAGFIWALMNQQPAPA

SEQ ID NO: 114846 - protein, 315 aa, unidentified
MICGVDVAQQSLEARIEQGGPGASFPNTKAGIFQLAEFCRAHQVHLVAMEASGGYERLALLLLSAEHIPVAILNPRAVRKFAEAMGYLEKTDALDAGVIAHFAHTRKSPPSSPGSAQLQHLRALVTRLRQLTDLQTAQRNQQLLVTDPTVQHLCQQLLEVVKTQIRSLEKAIAQLVDADPLWQQLNQSFRSIKGVASRTVSRLMAEMPEIGTLSHKQIAKLAGLAPLACDSGKARGKRVIAGGRRPIRDTLYMVAGIVARFHPDFIAFRQRLTAAGKAKKVVRVALAHKLLTRLNAKAREVRLKFAQTTLLEQPS

SEQ ID NO: 114847 - protein, 341 aa, unidentified
MTEVSIVGVDLAKQTFQLHAAARDGSVVFRRKLSRSKFVEMMAKLAPCVVAMEACATAHHWGRVVGAQGHEVRLIPPVYVKPFVKRQKNDAADAEAIVEAAQRPTMRTVAVKSVDQQARAMLFRTREMLIGQRTQLANALRGHLAEHGHLVPQGLGNVARFAAIIASADNDLPDLVRDMARLYLDQIAHLSERIKTLEARMAAEAEKSAVAARLRRMPGIGPVTAMAIETFAPAMANFRRGRDFAAWLGLVPRQHSTGGKQRLGRTSKMGQRDIRRLLIVGAMSVVTWKGRRSSPGSWLARMLARKPRMLVAVALANKMARAIWAMITYERDYQGPAAAVC

SEQ ID NO: 114848 - protein, 452 aa, unidentified
MKVMHERVAGIDVHKDMVKVAVRSPGEKRWARKTEVLTFGTFYGVLREMARELRRRGVTHVAMEASGVYTEPVYYALMEEDFDEVLVVNPAHVKAIKGQKTDAKDCARIAELLECGLLQGSYLPPPELKEMRDLTRYRIKKVQARTSEIQRLGKTLESAGIKLGSVASDITGTGPLEMIESLVNGERDGVVMAGLARGRARTPQKMASLSMALEGRFTSHHAAMCRLITDQVNAMNAAVAGVEMQIAAKAGAWEREIALLKTIHGFGDATAWTWIAEIGPAPHQWFATHEKLACWAGLAPGNHVSAGKRRYGRVSDAGTYIKPALVQAAWSAVRVKGRLQARYNKLVRRMGGPKNPAARKKAIVAIAHTLLKIAYSVLKSGRPYQDPGADFYARRESPAQQQAYHQRQIQKLYPGCTVTVTITPPPGGRTEAPPGTGQLGAPPPPGHVPEAV

SEQ ID NO: 114849 - protein, 418 aa, unidentified
MKPWTEITHYAGFDWARDHHDVVIVDRQGQIVADFRIEHSLAGWQEFRDQVKPYPVLGVAIETNQGTAVDHLLSLDGTIYPVNPLSAKSYRERKAPSGHKTDRLDAWSLAEALRQDGQQWKALQPLDPLTQQLQLLCRDEIGLIEQRTALINQLQQAMVEYYPAALAAFEDWTQPFCWDFIIQFPTPEKLADAGRRRWEKFLHTQKLWRPETASKRMEIFQNARQFCGPAAVTSAKSLLALSLAKLLNALQLQLDQYRQQIEALFKQHPDHDLFGSLPGAAQTLAPRLLGEIGGDLQRFEDTEALQCVAGTAPVSFQSGQIHRVHVRYQCNKMLRHTVHLWAQCSLRVCPWADVYYRQKRAEGKSHACALRCLGQRWLKILWRMIQTRQPYDADLHARNQKQHGSWVLTLMKPAPQAG

SEQ ID NO: 114850 - protein, 405 aa, unidentified
MRFIGLDVHLDFCEVAICEAGRVRSGGRVPTSPHGLELLADSLAPDDSVALEATGNALAIARSLEPHVARVVVATRTELRAITEAKVKTDDRDARTLARLLAAGLLRGCWLPDEPTRALRRRLARRAQLVRQRTRAKNEVHAVLMRTLKGRPPMSDLFGRGGRVWLGELELPADERETVDGCLRQIDFLDAEIAILERGIAEHALGSDAIKRLMTVPGVSLMTAATFIAAVGDVRRFRDPGKLVSYLGLDPKVRQSGSGPARHGRISKQGASEVRHMLAEAAHVAVNTAGPMRAFYERVRVRRGRQIAIVAVARKLAVLFWHLLTSEQDYAFQRPSLTRKKLRAVELRAGATPTPGRRDLATKNTYSQREHRERERELSEHAEIAYRRLVTDWKATAPNKDAAVT

SEQ ID NO: 114851 - protein, 414 aa, unidentified
MFAVGIDVSNGRSTVAVLQSKTTVTLKPFEVSHTPEALGRLVNKLNGLNGETKVIMEHTGRYYESIAMFLNSAGIFVSAVNPILLNEYQDGMSVRKVKTDRADAIKIAKFGLDNWDLLRQYEPMDTIRYQLKTMHRQFQLASKSETAFTNNLIALLEQTYPGIRKLLSSPARPDGSQKWVDYVGTFWHVDCVRKHSLNAFKERYLKFCERHKYYFSDEKAAELYRHAQNAVALVPKSDVSKMMVKEAVSQLNAISRTVETYRAEMNRLASQLPEYETVMGMYGAGPSTGPQLMAEIGDIRRFPKKNSIIAYAGIDPGKDDSGDVVKKSNKSSKRGSPYLRKTLFVVMDVLIQNKPADDPVYQFLDKKRSEGKPYYVYMTAGGTKFLRHYYGKVRDCLKEKGLWDQPVNDDQVSE

SEQ ID NO: 114852 - protein, 349 aa, unidentified
MGIVCRIGLDIAKNYFQAHGVDKHGKQVFNKKLKRADVLPFFANLTSCLIGIEACGSAHYWARELRKLEAGHDVRLISPRHVKPFVINNKTDAADAKAICEVVGRPSTCFVNIKTVEQQDLTAWQRMRERKVKERTALANQIRALLYEQGLIIKQGIEHVRKELPYIYENPDNNLSLQARDYLSELYGEFVDCDALVVKYESRIKMSVSTDEACRRIQKIPGVGPITAAAIVAYVGCARHFNNSRSFAAYLGLTPREHSSGGKQKLLGITKRGNSYIRSLLIQGAQTVMRPYLHKPPEQVEPRLRWMQGVAARRGWQIASVALANKTARIIWALLARGEEYKPSVASVV

SEQ ID NO: 114853 - protein, 316 aa, unidentified
MQSPLFIGVDVAKAEVVLACSQNSFPVQTVANALPALRKFLNTLPPGTHIAMEATSLYHQDLADLAVKMGFSVFVLNPKDTWHYAKGIGMRAKTDRVDAQMIARYVAHEVAHLRAYEPATPEQRAMDQLLKRRAKIVSLKTALRLSCDGVPSLNAKATKLIAGFTELLKHIDCEIAVLNNAIPQRAEQIERLKSIAGVGPLTSAWLANLLDRVKFKNSDAAVAFVGMDPRPCDSGQKRGRRRLSKRGPSEGRRLLFNAAMAAAKSPIWAPTYAHYRQLGWASTAAIMIIARKILRIAYILTKNGSSFDPHFVSIKA

SEQ ID NO: 114854 - protein, 351 aa, unidentified
MITQITAVPKLYIGIDIHKRSWKVHCATDLFSGKSFSMNPDPEQLKGYVDKHFAGHEVSTAYEAGCCGYSAHRCFESYGWTSLVVNPADIHRKGKEKHTKTDRIDAQLISRELKDGRLEGIHVPDVEREELRSLFRRRNDLVKDFRRIKSYIKMQLLYFGIKEPEEFDNDHWSHKYRKWLDGIVFENPTAKATLESRMRFFRFVDQELRDVSTQLRRYCKTYHKKDYMLLRSIPGIGGIVACGILCELGDLRRFNNVKHLAGYVGLAPGVHQSGSNYKTLGITPRAHRLVRSYFVEASWQAIRVDPVMQAYYRKHQGRNVKSIIIKVARKLLSRTLAVIKTETPYCIGVLE

SEQ ID NO: 114855 - protein, 419 aa, unidentified
MNETLSWDTITHYAGLDWAKDHHDVVIVNAQGRIVQDLTFGHTVEGWARWKEIVANYPHLAVAIETSQGAAIEQLLLSAVAVYPVNPKSAQRYRDRKAPSGTKTDDLDAWSLADALRVDGHGWRALKPMDPLIQELRLLCRDEVELIAKRTELINQLQAALGEYYPAALQAFEDWTATPSWSFVQQFPTPQFLQRAGRRKWEKFLHVQRLYRPELNEQRLAIFAKAHEFCGSAAVTRAKSRLALALVQLLQALENQLQEYRREIRRLFNEHPDHDLFGSLPGAGEKLAPRLLSELGSDRDLFQSAQALQCYVGTAPVSFQSGQINLVHVRFMCNKSFRYAVHLWADLSRKFCSWAQVYYQQLRARGKSHATALRCLGQRWLKILWKMWQTKTRYNPDLHMANQLKHGSWVLAVKPDKSV

SEQ ID NO: 114856 - protein, 333 aa, unidentified
MSNYSLFIGSDISKSVIDVSFHYEGLACYLGQFANNENGYSAFVKALSKMVSIPKNEWFVCFENTGVYSKPILNWLIAKNIACREENALNISKSLGIRRGKDDKVDSLDICQFAYEKRDSIRPTILPEQHITRLKKLLSRRDFLVRQRQSLKVSLKEQDGFISAEILEDLQQGNDNLISTYDAEINNLDTKIERLIQSNEDLSKNDKLARSVKGIGPVTSAYIIATTHNFTIFDNPKKYACYCGVAPFPNSSGTRTGRKKVSHIANKKMKSLLSNCAMTAKNHDPELSKYYKRKIEDGKQKGIVINALKNKLINRVFAVIKRGTPYVQLMNYA

SEQ ID NO: 114857 - protein, 346 aa, unidentified
MIIVGCDFHPAWQQIAVFDGETGEITEHKRMNGNGEAEQFYRELPAPLLIGIEACGNSQWFVDLLQRLGHEVWIGDAAQIRASYVRKQKTDRRDAAHILKLLMEGRFPRLWMPGAEERDLRQLLVHRHKLVAIRTRVKGGLQHLALNRGLQKKSNLWTEAGQKALRELALDTWAACRREDLLGLLASLDKQISKLDVAVERAAEDSPQARLLMTQPGVGPITSLAFVLTLGDVSRFKRGKQVASYLGLIPRERTSGGKQRLGAINKQGNSFMRTLLVESAQSVTRLDEGFRKQYLHRCHRMAKGVAKVAAARKLAVRLFWMLRTNTKYPEIVHIESSSTLAVVGES

SEQ ID NO: 114858 - protein, 342 aa, unidentified
MTITIGIDPHKGSHTAVAIDSNEHVLDEIRVRSCSTQTERLREWADRFEERTWAVESAHGLGYLLSQQLVAAGEDVVDVPPVRASRVRVLGSGKSQKNDPNDARSIAIAALRADDLTAVCADDHARVLKLLSKRHRDLGRLKNKASCRLHALLLEMVPGGASFRITSVTRVNAVIDDYEPADAMGRQRQEIASELAGDIDRYNDLLDASKQRIQSALAASGTSLRTISGVGPITAAMIIGESGNIERFASKHHFASYNATAPVEASSGSKVRHRLNQRGNRKLNWALHVIAISQLSHDTAGREFFDRKVAEGKTTKEAIRSLKRQISNVVYRHLVADARQQS

SEQ ID NO: 114859 - protein, 368 aa, unidentified
MEKFITFVGLDVHKNTIDVALADAGRNAEVRHYGTIGGGLDDLDRLVKKLSSPNKRLHFVYEAGPCGYDIFRSLTGKGLDCAVVSPAHIPKSSAAKIKTDRRDAMMLARLHRAGELTYVFVPRADDEAMRDLTRAREDAKKAQRVAQQQLSGMLLRLGFRYPKDNWTKQHFLWLADQKMPMPSQQVVFQEYINAINETIARVERLTRQIESLVPTWRMAPVVDALQALRGVSLIVAATTIAELGDLTRFEHPKKLMTYLGLVPSEHSSGEKKQRGKITKTGNGHVRRVLVEASQAYSHPARVTRPLLKRQEGLSQAVRDIAWKCQVRLCARFRRLMAKGKNRNAVITATARELAAFMWAIANHAPIAA

SEQ ID NO: 114860 - protein, 317 aa, unidentified
MTETSTIAAGIDVAKAKLDIAVAGCSERWQVANAAAGWRDLVGLMRRRKVARIGVEASGGYERDVVQHLRKAGFAVVVLQPMQVRAFAAFTLCRAKNDKIDAGLIAACVAYRASDREPPDPRLSPLADLLTFIEQIEEDIACNKVRLEHARNADQRRFLGAEVKRLKRWRAKMLAKLTAALRLHDDLAHRLDLVVSIDGIAERTGLALVIRMPELGRLTREQAGCLAGLAPFVRESGERKGEAHIAGGRERLRKSLYSAALPAAFFHNAQLIALYRRLTQAGKPHKLALVACARKLIVFANTVLARATPWTSQAATA

SEQ ID NO: 114861 - protein, 334 aa, unidentified
MQVSTIGLDLAKNVFQAHGVSAEGKVVLKKQLRRGQVLSTFAKLPPCLVGMEACAGAHYWARELRKLGHDVRLMPARDVKAYVKRDKTDAADAAAICEAVSRPSMRFVALKTPEQQGRLMQHRVRDLLLRQRTQTINALRAHMAELGLVAATGRQGLGLLLAILADAKDERLPQASQITALQAQIDTLDKRLHAQHRQCPASRRLETIPGIGVIGATALAATITDPKAFKSGRDLAAFIGLVPRNNSSGGKQRLGPISKQGDRYLRRILVVGAHSILKQARTRPDKHPWLARLMARKPGKLAAVALANKTARIAWAVLARGESYRAPTAPAAAG

SEQ ID NO: 114862 - protein, 306 aa, unidentified
MEAMIERCAGLDVHQETVVACVLFGPLDKKPKTSIETFSTTTTGLLALSDWLTTLQVSDVVMESTGVYWKPIWNILEDSFHLVLANARHVKNVPGRKTDVKDAEWLAKLLRCGLIESNFVPPEDIRDLRDLTRYRKKLIHHRTSEQNRIHKILQDANIKLTSVLSDIFGVSGRRILEAILNGEKIETDGLRKMVDWRTKASITDIASAINGRIRRHHRDMLRYHWEHMSYLEKAIEELEKQIDQLLSPYHKEVELLDGIPGVNKAAAATFIAEMGVDMSVFKSAKHLASWAGVSPGNYESAGKKNE

SEQ ID NO: 114863 - protein, 310 aa, unidentified
MTDTIGIDISKTTLDIYRLSDGKRARFGNDASGLKAMRKWLGAVPLRVVYEATGRYHRDLEAALAASGHHNVKVNPARARRFAQATGQGAKTDRVDAEMLARMGAVLGLEATPVKTDELHEIKELHVARVALIKDRTACRNRIGMARNKIVLAQLRARLRQIDTQIAQIDKELRFRIRADPGLARRYEILTSIPGVGTVAAIALIIEMPELGAMSSKEAASLAGLAPITRQSGTWKGKARIGGGRTALRCMLFMPAVIATRFNAPLQQVHRTLIAAGKPWKVAITAVMRKLIVLANALIRDDRKWAEINP

SEQ ID NO: 114864 - protein, 375 aa, unidentified
MPRMPQAPEPSHAHVDATAVDPDVVDPDEVVLGVDTHKGVHVAAVISALGVLLGTRSFPTTASGYQQMLRWATGFGAVRRAGVECTGSYGAALARHLVGEQIEVIEVNQPDKATRRRRGKTDTVDAEAAAHAVLSGRASASAKAGDGPVEMVRIFKLAKASAIKSRTQAINQLKAVLVGADPQLRDSLSGLSNPTLIRRCSQLDAGTPRDATTAAAYTLALLARRILELTTEIDDLNRQITDTLSAHAPRLLERNGVGPDTAAALLITAGDNPERLHNEASFAALCGVSPVEASSGKTQRRRLNRGGDRRANSALHTIVLSRLRWDPDTRAYLARRIANGKTRREAVRCLKRYVAREIYQLIAQPTEPTPCARAA

SEQ ID NO: 114865 - protein, 339 aa, unidentified
MKNKKYFIGLDVHKKKTTHVVRDRIGNVILEGETATLYSELYERLEPYLKSSVIGLESCTSYYTLYQNFLKNNYNIKVANTIQLRQLIAKNDKLDARRLAEMLRLGTFPCSYIPGEKIQRLRSLLQVRHGLVEEKTRCNNRIQAFLDRNGVVMPDQDAFGKKWRQALLQSIGSGEVSLELRYEYDHFVYLEKKSEHLGQEISGYTMKHWKKEYILLQSITGFGPVLSCYVIANILPISRFSSNRKLRRYAGVVPAFQESGGKKSKGHIPKTSSRKLLRWALIQAANSAGRTNTKLGYYYRKKKKQKNNAGIAHVAVASSMIDIIYKVLTTKKPYNPKIC

SEQ ID NO: 114866 - protein, 347 aa, unidentified
MRFYNRQHQFYCGIDLHVKTMYVCILDTAGQVLVHRNVPSTPAAFLEIVAPCRAELVVAVECMFTWYWLADLCAAEGIAFVLGHALAMKAIHGGKAKNDKIDSYKIAVLLRGGMLPQAYVYPAAMRSTRDLLRRRLHLVRKRGQLLAHIQNTRAQYNLPAFEKRLAYPGNRDGVVEHFPDPIVRKSIEVDVALIDQYDALITDLELTIVREAKRHDADAFHRIRSVPGIGKILTLTILYEIHDITRFDRVQEFASYARLIKCTHTSAGKTLGTGGAKMGNVHLKWAFSEAAVLFLRHTTDGKRILARLEKKHGKGKALSILAHKIGRAVYHMLARGTVFSMEKFLAA

SEQ ID NO: 114867 - protein, 347 aa, unidentified
MNYIGVDCHITSLDFAVVNEKGHTTRRARVETSVKEFMKFVKNIPKPRRIFIEEGELASWLLETSLTFGEELIITDPKTNKWIGKSGQKDDAIDAEKLAQLARGRYIKEIYHPVNNRRRFKELVYAYHDTVKSQTRIKNKIKAKFRREGIRCSGATVYSEKHRKEWRKKLPGNKVVHLIVNELWGQLDQIQNAREGLKRNIRIHGKQYPEIKRFRNVPGIGLIHASTISAIIETPHRFANKKKLWMYAGIGLAERRSGEKVYSRRLTREYNRLLKNAVKQASEAAIYSKDNQFRRQHLRLTIEKGIPSHKAKLTVARSLLAALYGMWKKGEAYDPEIDNKRRKENKK

SEQ ID NO: 114868 - protein, 347 aa, unidentified
MRFYTKQHEHYCGIDLHTNKMYLCIQDRHGETLFHRNIKTSPEHFLHAVKPFRDDLVVSAECMFTWYWLADLCEDEKIPFVLGHALYMRAIHGGKSKNDKIDSLKIAALLRGGLIPQAYTYPRKMRATRDLMRRRNHFMRKRAELFAHTQNTASQYNLQEPLGRIANPNNREGTVERFDLPCVQKSIETNLEMIATYDRVIGSLERYIVRTAKSHDPISYALLKTIHGVGRIIALNLLYEIEDIARFPRVQDFVSYCRLVKCAKESNGKKIGTVGKKIGNAHLRWAFSEAAQQFLKHNEPGRKYLQKITNRHGKGKALSILAHKLGRAVYHMLKNRKAFDMNKFLAA

SEQ ID NO: 114869 - protein, 410 aa, unidentified
MYNAVGIDASKFKITVTVIQPAGIVIRKPFDVLHTSNELNTLVTYLKSLEGETRAVIECTGRYHEPVVKSLEDAGIFISAVNSKLIKGQKQNSLRKVKSDPADARKIARYALDNWAELRQYSSMDTIREQLKTLNSQFDFFMKQKVAAKANLISLLDNTYPGVNKLFDSPAREDGSEKWGDYAYSFWHVDCVRKIGLKAFTERYEAFCKKHHYNFQKGKPAELFETAKQLVAVFPKEKSYKLLIHQSIQQLNLASEHIEILRKEMNQLASTLPEYDTVMSIYGVGETYGPQLIAEIGDVSRFTHREAITAFAGVDPGVNESGQFRQRSNRASKNGSTKLRKTFFQIMTTYLQNKPVNEPVYQFLDRKRAEGKPYLVYMTAGANKFLRIYYGKVKECLHNLEQDSLPPEES

SEQ ID NO: 114870 - protein, 353 aa, unidentified
MYYFILYVYTILTLLFKGIGSSEHYVRAFDYRGRELTRKVFRFSTDINGFNSFYDWVTQICIKHGKNEAMIGCEPTGHYWYTFYQFVKDHGMKLAFVNPASVKKAKELDDNSPKKTDLKDPKTIAKLVIDRRYSFPYVPEGIYAETREVTSSRDLIMKELNAASNRIQRWLKIYFPEYLTVYKKFDTTTGMMILEEVPLPTMVTALGVDNIIKIWREHKVRGKGASFNRAKTLVDAAHDSVGKSGGQGAVMEIQMLLEDYKVKKQQLEMVTSVMEELIMQIPNAEKMLSVDGVGLVTVAGFISEVGDISRFKNPKQIQKYVGFELVENSSGKHKGRTTISKRGRKKLRKSYIR

SEQ ID NO: 114871 - protein, 357 aa, unidentified
MVDILTEAKSSEVGVTNPYRRTEHCGKIHACRCDKEVGVIRIDVSKDHLITSRGRMRKYENNKRGYEEILKMKPCAIVLEPTGVYAIRPCQYFKEKGIKVLQVSPNVLSREKEFRGKKTDFYDAEKLENMVDKAKEYEYNPLRELVTLYLFLKDIEVKYKNRLKRALFLVSDNDKLNKDRLERLAKGDFTQEELYQLEYTPIVLEEIKVLAKTLLEMQEKLKEVRRMIEEQVPQDHVLLTIPGVGRLAAGIIIGIVGDVKRFPKPESFVAYCGLDPVIERSGRAIISRGISKRGNKYLRSLLYFLAGRNYSRNPTLLKFYESHKDRLQGKKLYTALARKLARIVWSVWYNNRPYEPK

SEQ ID NO: 114872 - protein, 335 aa, unidentified
MQIYGIDLSMEKFDVNFIDAKGKERNVEVKNKLVAISKFLEKVPKESILCAEHTGSYGELLLYLCNQMDIFIALVPGYTIKHSLGLLKGKSDPVDAKRIREYGERFTDKLASREYDSEEITELKQLYTLRAQLVKSRKSLITSNKGRSHLPLQSISVNSHLQTVLSTLDEEINAIEKELEALIKANSSLNENYELVIGIKGIGPVIATDLLIKTSNFQAIDTARKAASYAGVCPFPDTSGKMVKKAKTSPFADRKLKALLYMGAKSAVKHNKEYRLYYQKKKQEGKPHFLIMNNVSNKMLRTIYSVVKTKIPYTSDHICLDPRERNLNSSTEKVA

SEQ ID NO: 114873 - protein, 361 aa, unidentified
MSESMALVGLDVHQAQSVAAVLDPVTGELSVQRLRGAPAAVVPEFLAGLGRPVRAVYEAGPTGFVLARAATERGLDVRVIAPGSIPRAPGDRVKTDRRDATRIARLFAAGELSFVFVPSEPDERFRDLVRCIDDARRDLLRSRHRLSKFLLRRGLRFPGSAWTQQHAQWLRRLSFDDALSNAVLVDYLGAVEMLVDRRRTLITVLEDAVPESSHAPIVARLRCFRGIDTLSAAGLCAEVGTFERFAKPSLLSGFLGIVPSEYTSDSKRVQGQITKAGSTHARRLLVEAAHHYRHRPTVGKPLAARQAGQDPRVIAIAWRAQRRLHQRWAHLRNERGKPSGTVAVACARELAAFCWEAAILN

SEQ ID NO: 114874 - protein, 330 aa, unidentified
MSLLGIDVSKETLAVALQLDERKRPYEREVRNDAGGIARLQGWVRERGCELAQLVVVMEATGVYHERVAQALYDAGCKVIVANPKRVRDYAAGLGLLHKTDKVDARALVRYGKEKGSELVSWSPPPEEVRILRALYDRLSAVQEDLQRELNRRDQAAASMEPALVIDSLDTSITRLREECERLKRAIEDHFDQHPGLKAQRELLQSIPSIGPVSGDLLLCLLLAHRFNSARQAAAFCGLIPKAHQSGTSVRKAPRLTKQGDGRLRAKLYMAAVVAIRRNPELRQIYQALLTAGKSKMSALGALMRRLVHIAYGVLKHQTAYSSQLVLRGA

SEQ ID NO: 114875 - protein, 352 aa, unidentified
MKRETKSAYDNKHLFVGIDVHKKRWVVSVRTYDLELKTFSMFPIAEELEKTLINTYPGALLHIVYECCFSGFWIYDYFHEKGYDIIVTPTNRIYRDGSIVKTDKIDSRKLAFQHSRGLLREVKVPIMKIREYRSLFRIYDKEKMREGQILRQVRCILECKNHELKWEKWNKEFIEKLKTVRFQEDIFNRKFEVLIKEYEFVKEQIKDTEKRIKEIGEDEELGTKVKRLEQINGIGIISAVRLTVYLFDMKGRFESGEKLVHYVGLTPGEHSSGEEIIRSRTGLIGSRQLRSIIIQLAWVAVRKDGNLLNKFDRVYKNTGCKQKAIVAVARKLMMKVHAITEKEEAYEINKAA

SEQ ID NO: 114876 - protein, 370 aa, unidentified
MSVRRILAKTIDTDLEYEAIGIDLAKNCVSAALLTTDGEVVCIDRLDYSELEKSAQALSSTTFAMEPCTEMNYLVQKLEAWGHRCLVIGGKNVQNYVENHFSGQKTDLNDAQALAFLAQDTQLRTIKAKDVEQQKYASLTTLREQYIKQYRQTIVSLKGICQAWGLNISKGISGKARLKDLIENHAAFPEELKESLVDMVTHAQTAQKALNKITKTLEELAKSDKVCQLIQTIPGLGSICSCRLRATVGDIKRFKSPKDFPAYYGLVPRSIATGHNEKKGKITHRGDRTMRSLMVQAAGSLVNMATKGKLKSKQLTKWILKKQKEKMPWGKLVCAVAAKLLRIVRAVLISNKPYNPKIAGVAKCSLSKGS

SEQ ID NO: 114877 - protein, 370 aa, unidentified
MNEDIKFFVGLDVHKDTIAVAVAESGREPARLVGSIAHDVARLLKRLTRYGEPGQVQVVYEAGPTGYGLQRALARRGYQAQVIAPSLIPKRAGDRVKTDRRDSLRLAELARAGELRAIWIPDPADEAIRDLARAREDAVNGRTQMRQQLKGFLLRHDVRYARPTSWSRTYYRWLATLSFAESGAQTAFTDYWQAVSGADERVARLTVALAQSIAGWRFEPVVAALQALRGIDQISAIGLVAEIGDIGRFAHPRQLMAYLGLVPSEASTGERVIRGSITKTGNAHARRLLTEAAWNYRFQPRIGARAQRRAEDLPQAIRDIAWTAQLRLSGRFSRLRARGVHLNKVCTAVARELAGFVWAIASARARLPQS

SEQ ID NO: 114878 - protein, 394 aa, unidentified
MGKVYVGIDIAKDRSTAHGIEEGGGSLFELTFDMNGGGFAELLKRIEASAGSLGNVVAAMESTACYHINLYSFLSAKGIEAVIINPLLIANYTKLTLRKTKTDRKDAKTIAQFILVHKDSVTQLAVSQDLQDIRDMARERESLCHQISSAKVEIQRILQTTFPELAALTNPLTKVMLHFIQRFPSARLVSIAKPSAIEKTLRERPCSCRLRFTPKDLIEVARKSIATVSPAKEIILSGKIETLLHLQKRSDELTKALTKYCEATVVEDLRIVTSIDGINNKMATMLLAEIGQIANYHSYKNLIAFAGIDPTVYQSGKYEGASRISKRGNRHLRRVIWLMAISVIHHNTLFRNYFLKRRNEGQPFKKAVFATAHKLMRVIFAMLSKKTVFAAECI

SEQ ID NO: 114879 - protein, 340 aa, unidentified
MILKYSVGLDVSGKDIKFCISTIDYCQEVRVLSRLTILNKQSGFAQAAIWINQWHKEKKIPLVLCMEATGVYHENCAYFFYDKGFQVSIILPNKSKKYLQCLGLKSKNDEIDAQGLAQMGAEQKLPHWKPTVKFYGILRILTRQYQSLQEQINGESNRLHAASSSALQSKFEIRQTCKLISFLKKQLKEVAAEIKKHCESEPEMKNKFTEVCKIYGISILSAATVIAETNGFELFENYKQVVSFAGYDVVENQSGNHTGKTKISKKGNSRIRRILHMPALVAIKQKESKFGKLYQRVSTKSGVKMKGVVAVQKKLLVMIYHIWKKGLSYDPNFGIIPKEE

SEQ ID NO: 114880 - protein, 404 aa, unidentified
MLYAGVDWASRSHELAVVDSNGQVVTSFGFAHSEQGVLGMLGRLAALAPPEEIRVAIERPNGLLVERLLAAGHGVYPVHPNAFAAARPRWGASRAKSDPGDAYRLADYLRTDGHRLRLLQPAEPYLAKLRALCRLRDIHQKACMAASNQLGSLLELYWPGARYLFAHLHSPVALAFLTRYPTPESAAHLGEGRMAIFLKREGYSGRRSASELVERLREAPQPISPLDPEILAVLVEAQVGLLRTLRGTLADLEAALKVRLAGCEKARLLASLPRVGEVNLAQIVAEVGPILERAESVELVSAEVGASPVTRASGGYRNVSFRHACNTKARKALTTFADNSRRASPWAAEVYRRARERGCRHPHAIRILTRAWLRVIWACWHSGRPYDPAHHGVTRPLILAEGLT

SEQ ID NO: 114881 - protein, 408 aa, unidentified
MSIRRSSRLPFSGWDGTKIQQKFPRTPDELLGLKDRIFEHNCDVIACESTSDYWVCIYDLLSDRVPMIVGNAHDIKVLAHKKTDKIDSEMIALLALKGMITPSRVMPRHHRDFRKMARLRHFLVRKRTDIKNRIHSILDGELFHLSRLLSDIFGVWGKRIMQGAVDGASVDDILRSIPLHARARKEAKLRELLTQTLSPGALMQLDHCLRVVKQLDEEIERITDEVRAYVLQKYPREYQILITIPGIGTIAAITLLAEIGNFKEFLSGDRLASWVGIVPKVYQSANHAIKRSITKRGSRLARWVLIQAAHAAARARNSVLRDWYVIKKTVLGTGKAIVGLARKMITIVWHLIVNDEGYVDKYTEPESLRSQKMHTIRIPTSSDYTLEEVLALLADALGFLKKRDLDTI

SEQ ID NO: 114882 - protein, 304 aa, unidentified
MNGIGIDVSKRQLDVGTTDRETLQVSNSPSGFVELDAWLKKRPAVQIVLEATGGYEQPVLDFLHKAGHRVVRANAFRARKLAQGLGQIAKTDRLDAYALAQMAALVTLPAYQPLEPWQQKLREFVRARRQMMQALTVARQQQEMVRDRELRRLLQTNITRLQTLLERLGKQIAEQVAQQPQLTILKSMKGVGPGLQAVLASYLPELGQISGKAIASLVGVAPMSHDSGTIRGKRSIHGGRADIRQVLYMASMSALQHEPRLRDFYRSLRARGKEGKVAIVAVMRKMLVILNARVRDAQSGLIPA

SEQ ID NO: 114883 - protein, 435 aa, unidentified
METHKKLKHIYVGIDCHKTTHTASIINAFNDELGNITFNNDKEGFNSLIKLVSENLTEGVTPVYGLEDCNHLGHALSSFLLAKSCFVKVVNATYTHSERQNSPIISKTDKIDSSCLAKVTLDRLDKLPNASNDDIYWTLKQLSKMRESILNSNIVYKNKLHAQLLHHYPDYYKFFCAFDCTTALALWENYPNPNILKSVSISEIEELICISSKNYFKPSKVKYILDLVNNYDYATIDYQQERDILIKTLVRQIRYNKEQLKLIDMEINVVVQKTGYKLDTFIGIDKILSAKIISEVGNIGRFSSADKLAKYAGIAPISFSSGKKDKDVNNKYGNRTLNSYIYLVACVNINPGCKNANKICNPIFLDYYKKKLSEGKTKHQAILQVMRRITNIIYGMMKHRTEYVHPKVLNDKLQKLHRERIDNERQDAENVEKEL

SEQ ID NO: 114884 - protein, 349 aa, unidentified
MIIIGVDFHPEFQQIASVDTESGEFEERRLQHREEAERFYRELGSRGVAVRVGMEASGHARWLEHLLKELQFELWIGDAAEIQTKRVRKQKTDRQDAQLILKLLLEDRFPRIWVPDAENRDLRQLLCHRHRMVQARTRIMNQLQAVALNEGLRCKKKLWRERGRQQLESILLLPWASRRRSDLLQLLDRLSPTIAELTDAIEQEAEKRPEARRLMSHPGVGALTALAYVLIIGDPERFRCGKQVASYLGLVPLEKSSGRRRRLGHITKQGSSILRFLLVEAAQATVRSDPNWRNKYFHLAMRRGRKTAKVAMARRLAIRLYWMWREGRDFEQQIKFGSHAGQPENRYGV

SEQ ID NO: 114885 - protein, 340 aa, unidentified
MYYIGLDVHKKTISYCIKRVGGEVHAEGTIDAHRLALNDWLATLPQPWTAALEATLFTGWIYDHLKPHAAAVKVAHPAMLRAIAASKKKNDQVDARKIADLLRCDLLPECYMAPSEFRERRRTLRYRNLLVRQNTQMKNRTAGLLMETGVTYNKEKLHRKGYFTQLRKSPEVPDCIQPLLQIGRESIERIGRLDRTLMRTLERDPALAARVERLKTIPCVGPVTALTWVLEVGEVSRFSSSKHAVSYCGLCSAERSSAGIQKRSPISKQRNKHLQTVLVEAAKLSNCFNAELTRVHEKALLKGNRNRATIAVAKKLVAYLLAVDRRETDFREGEESTEAA

SEQ ID NO: 114886 - protein, 351 aa, unidentified
MELIAFDSHKKYTLARIESEDGRTHREARIDHAPGVIRRFLERCSKGSPVAVETIGNWYWIVDEIEEAGMIPQLVHARKAKLMMGHTNKTDRLDAQGLNRLQRTGTLPTVWIPPMELRDLRELLRTRMDLVVQRTQLKNRIHAALARYCLRLEEANDAFSIVGRQELAQLFEKLPPQTRFANSLLLEEVDAVQKQIDRLEERMAEVLDDTPAVKLLMTLPGVGRILSAVIALEVGDVRRFPSAGHLASYAGTTPRVNSSGGKTHYGKLRGDVNRFLKWAYIEAANVVGRFHRKHPEARLSQVYIKLRKEKGHAKAVGAVARQLAEATYWMLTKNEGYKEPARTGTGSSTEA

SEQ ID NO: 114887 - protein, 362 aa, unidentified
MESEYVGIDLHRRRSVIVRMSPDGEQLSTVKIDNDPLALAAAIAPAGPNPHVVVEATYGWYWAADVLEECGAQLHLAHPLGMKGITSNRRVKNDVRDAVLLADLLRLGSLPEAWIAPPATRELRELVRYRTKLVNMRASLKSQAHAVMAKEGVLPTLSDMFGPAGQKALDEMDLGRAYTIRMESLRDLMEAYDAQVTMLEKEIHRKLKDHDGYRAIQAIDGVGPVFGAIFVAEIGDVHRFSGPEKLCSWAGLTPKHRESDTTVHRGSITKQGSRLVRWAAIEAVAKRRGGPKLRADFHRIAERRGKPKARTWRWPGDFSASSTTACVTARSVAWPRRAEHHRRGRLRARYRHGSPRASRVSA

SEQ ID NO: 114888 - protein, 400 aa, unidentified
MDKDRIVAGLDVHKDTIYLCVMDNTEAVIFAKVYGTLTPDLELMCSDMVSHGVTEAAMESTSTYWVPVWNALCESMSLKLVNPYFIKQLPGRKSDVKDAQWIAECLLKNLIRGSFVPDKTVQDMRKYNRRIFDLNEDLTYNSNKQDAALQRCGFRLSNYVSRVNGKSYQKCVRAIITGITDPEELVKLIHGKTLRKYGRNIIKDAVTGDFHQADICLLKQYAELIGVIERQIEECRNALIAMCQEHFPKQFKRLQSIPGVKERAASAIIAETGADMKPFEKATNLVGWCGLKPRNDISNNKVKSNRTTHGNRFLRQILIEISWVASRTRNCFFSNFSYVQCTQRHKNKMKIQVAIARKLLVAVWHMLTKDEDFIDVYLKRLEKQAEWQNDIQALESLLVG

SEQ ID NO: 114889 - protein, 328 aa, unidentified
MHVAAALDPIGGLLGVREFPATAAGYGRLLSWLGGFGTVCLAGIEGTGSYGAGLARHITTAGVRVVEAGRSGRQDRRRQGKSDSLDAVSAARAAQSGRARGASRGRDGAAGAIRALMAGGRSAAGERTQTNGQARALVLTGPDDLRARFTGHAAAALVAGLASLRPRPGSTVGYATRIALRELGRRAEFPGGQLERPGELIGPLVAARAPGLLALYGIGPHTAALLLIAAGDHPERLRSEAAWAHLCGAAPIPASSGKTVRRRHGPGGDRQAGHALWRIVFTRLSSDPATRAYAGRRTAGGKSRKEIIRCLKRYAARQVYPHLRGTAG

SEQ ID NO: 114890 - protein, 407 aa, unidentified
MDVVHLKCAGLDVHQQTVVACARAGSGKTVAYDVRTFGTSTPELLALSDWLTARGCTHVAMESSGVYWKPVWHLLDGDFELVLANAMHIRNIPGRKSDVNDATWIADLLAHGLIRSSFVPPASVQELRDLTRTRKQLVRELAQHTLRIQKTLETANVKLTSVLADIMGVSGRAILAALVAGETRPERLALLANDKVKASRAEITAALQGRVTAHHRFMLKLHLTQIKTLEAAVREVEARLGEALAPFRAAVDHLITMPGVSETVARVIVAEIGFDMTRFPSAAHLVSWAGLCPRLHESAGKRLANRTRASNPWLKTTLVQAAWAAARKKDSYFRAQFLRIKSRRGPKKAVLAVAASMLTAAYHMLRDDADYRDLGAAHFDRRDKAKLAKRLIARLHDLGLVVDVRAA

SEQ ID NO: 114891 - protein, 338 aa, unidentified
MSIYAGLDVSDKTTHVCVVDANGTVLKRDVAASDPEVLAKWLSRHCKGLVRVVLETGPLSTFLFHGLHERGIPVDCVCARHAKGVLATRVNKSDVHDAEGLAQLARTGWFKRVHMKASATHIDRAALRIRAQVITTRVAMANQLRGLLKLFGLRLGAARTPGKRRERLAALYQQRPDLEPLFAPLVASMEVVEEQLRASNRLLESRATTDPVCSRLMSVPGVGPITALTFTASVEDPHRFNRSEDVGAYAGLVPRRSQSGERDVRGNISKAGDPMLRRSLYEAANIVLCRVQRPFALQEWGRRIAENKGNKRARIAVARKLAVLLHSIWLNETEFRWA

SEQ ID NO: 114892 - protein, 338 aa, unidentified
MKFYGGIDLHSNNSVIALIDKQDKVIYKQRLPNDLTLILTELRPYKRGIEDLVVESTYNWYWLVDGLMEAGYPVHLANMAAITQYAGLKYSDDETDARWLAKLLRLGLLPEGYIYPRAERSVRDLMRKRSQLVHQHTSNLQSIQNLLARNCGHSMIANQIRQLKYEAVDRLLPDTELALALKSNLAVMHTLDELIDRIEKTALRKIRLREEFKPLLSVSGIGNILGLTIMLETGDIGRFAKVGNYASYCRCVGSEYLSNHKRKGRGNTKNGNKYLAWAYLEAANFAVRYNPQIKRYYQRKRARTNGIVAIKTVAHKLARACYYILRDQVPFDVNKAFV

SEQ ID NO: 114893 - protein, 414 aa, unidentified
MEVLNPRCAGLDVHKKTVVAAARLVEDGKASVEVHTFETTTAGLMALAEWLSSHGVTSVAMEATGVYWKPVWHILSSAATFELVLANAQHVKAVPGRKRDVSDAVWLADLQAHGLIQASFVPPREVGELRSLMCTRKQLTRERTSHIQRIQKTLEEANIKLDSVISDVLGQSGRAMLQAIIAGESDPKRLAALASSRIQASPATLAKALDGRPTEIHRVLLRLHLDQIDALDRSIAVIERHVETHLDPFRTAVEQVVTIPGMGRRSAAAVLGETGIDMSRFPSEGQFLSWACLVPRNDESAGKRRSSRLRPGANWLKTTLVQCAWAAVRNSGSRFNALFNRLKPKRGARRAICAVAAEMLRTIYHMLKHGTYYEEQRLEPRRQANPQAEARRLIQRLARIGFTAEIKPVPSPAG

SEQ ID NO: 114894 - protein, 455 aa, unidentified
MAQRNRSVSLKPVKSRAALTITHPNAAGIDIGNAVHYVAVPPDRDDEPVREFPSFTVDLNAIADWLKVCGVDTVAMESTGVYWIPLFELLESRGFTVLLVNARHVKNVSGRKSDVLDCQWLQQLMTYGLLSGAFRPTEQICVLRSLWRQRVMLLRSQGRHVQHMQKALTQMNVQLANVISDVVGETGQKILRAIIAGERDGQILGAMKNARIRASIDEIAKSLQGNWRDEHLFALKQAVDAFDFIGKQLAECDREIEQQMQCLQAHEGEPAKGKQRGRTRNAPKFDLRTQLFKMCGVDLTRIDGIDVTTALAVISETGTDMSRFPKVGNFTSWLGLCPGTKITGGKVMSGKTKRVANRAAQALRLAAAALRSSQSALGAYFRRMCSRMDKAKAVAATAHKLARLVYTMLTKGEEYTDQGQDYYEERYRARVLRQLSLRAQKLGMTLVATEQPGPA

SEQ ID NO: 114895 - protein, 374 aa, unidentified
MQSIVYVGMDVHVENFTFACYEEGKGIYAQNQVKDADWKSVVKYLEKVQKNRPGEEIHFVCGYEAGCLGYSLYHDLLKAEAKVSLDCVIMAPTTMAVQGNKPKTDRRDACMIAKNLCYGTYSKVYVVDDEDNGVKDFIRMRDDTKARCKSIKQQVLALCLRYGKRFNGGTNWTNKHREWLGKVDFGEKNSNRALQEYLRQLSIVEEDLERYDREIKEIAQGERYNEKVGQLKCLKGLQTVSALATIVEIGDFHRFSTAEKFAAFLGLVPGEHSSGGTINRTPITKQGNTHLRRLMVEAAQSYSKGNMYLKSKSMKLKQAGQDQDIIDYCDKQNLFMMKKYHRLCAREKNSNVAKTAIARQLACSIWGIMTGNIA

SEQ ID NO: 114896 - protein, 360 aa, unidentified
MHATTVAVDLAKSVFQIAVADEHWRIVETQRLTRSQFERWFANRSVDLVVMEACGSAHHWARWLNGLGITVRLLPAQYVRAYVRRNKTDATDAAALLEAARAADIRPVRVKSVEQQALQGLHRIRSLWMGTRTSRINALRGFCREFGITIPQGARTGVETIGRVLADPRSAVPDLIRHTAGMLLEEIRLLEARIAQVERELATVARQSPACTLLLSVPGIGLLTATALVAATSGDVTHFVDARHFSSWFGLTPREYSSGSSRYLGRISKKGDRYLRMLLTHGARSVLRAAKVAEGAGKDVCGIRRWALDVQGRSNHNKATCALANKLARICYATLRDHAPFDEAARLTKKQSRQSFALPA

SEQ ID NO: 114897 - protein, 320 aa, unidentified
MAMTVLQSIIGVDVAKAEVVVCHIETDELKIVPNNKTELRAWLKSLPVDSAIAIEATNIYHLDTVNLAYGMGHKVYVIDGYRLNHYRKSTGGRAKTDASDARLLARYLKNEQADLRAWNPPPKIYTKLQSLLRRRAALVKMRVGLNQSWAGEPLLKASSKSVAACLARHEGLIEKRILDAVTEAGLLHQIKRCQAVEGIGFLTAVALTMAFQRGEFESADAYIAFLGMDLRVSDSGQMSGRRSLSKKGDSEIRRLLHNAASAGIKSNAWKPLYEGYLARGLKTTQALVIIARKLARIAFSLMKNLSEYQSKAVLGASPQP

SEQ ID NO: 114898 - protein, 344 aa, unidentified
MEYFAGLDVSLRSCAICVVDAKGKVMLEKELSCEVGDIADCLNSSGYPIERIGFEAGTLSQHLFYGLTSEGFDVVCMEARQVNAALSAMRNKTDKNDARGIAHVLRTGWFSPVHMKSREAHGVRALLSTRKALLNKTIDLANEVRGLLKIFGLRLPKTVQHGSFDSLVRPMIEIDEVLAHAIIPLLDARLTLYQHFLELDRRVKRAAARDEVCLRMMTVPGVGPIAALTFKAAVDDPSRFKRSRTVAAHFGLTPRRYQSGEHDNPGRISKAGDRDVRATLYAAANALLMRTIAGSQIKSWGMRLVRTKGRRRAVVAVARKLAVLLHRMWTDGTEFRPAQVEGTA

SEQ ID NO: 114899 - protein, 352 aa, unidentified
MIIIGVDFHPEFQQIASVDTDTGEFLEKRLAHPEEAEKFYRGLTGKKVRVGMEASGHAHWFERLLAELQFELWIGDAAVIRTKRVRKQKTDRQDAQLMLGLLLEDRFPRIWVPSGENRDLRQLLWHRHRMVQARTRIMNQLQAVALNEGLRCKKRLWRERGRQQLESFPLAPQANRRRHDLLELLDRLSPTIAELSQAIEQEVEKCPAAQRLMTHPGVGALTALAFVLILGDANRFHCGKQVASYLGLVPLEDSSGNRRRLGHITKQGSSILRFLLVEAAQVTVRSLPEWRSKYFHLTLRRGRKIAKVAMARKLAVCLYWMWRKGWNYEQVRKFGSHAGQPGNRHGVQSNTE

SEQ ID NO: 114900 - protein, 338 aa, unidentified
MNQVTTIGLDLAKNVFQVHGIDAEGKVLMHKQLRRVDVLRFFAGLPPCLVGMEACATAHYWARQLTSLGHTVRLMPPAYVKPYVKRGKTDAADAEAIAEAVTRPTMRFVAVKTTDQQAVLMLHKVHKLLVRQSTMLINALRGHLAEFGIVRPRGRSGVKAAIEALHEAQDGLPKLARIALHGLVDQLRIVRAEIAKVEKRIVAWHRGNDVSRRLATIPGIGPITASAIAAAVPDATLFRSGRQFAAWLGLTPRTHSSGGKERLVGISKQGDRYIRCLLVVGATAVIRFARQDNASKTWAAKLLERKSARLVSVALANKTARTAWAVLARNQSYVAPAM

SEQ ID NO: 114901 - protein, 414 aa, unidentified
MEQLVERCAGLDVHQAEITACARIPGEHGGVVEIVQEFRTTTPDLLALLDWLVALGVTEVAMESTGVFWKSPYYVMEGHFDRVLVVNAAHIKHVPGRKTDVIDAAWIAQLLAHGLLRGSFVPPPAIRELRDLTRYRKALTEERNREVNRIHKILEDAGVKLAVVASDVMGVSGRAMMRALIEGQADPEALAELAKGRLRAKLPELRKALTSRFRGHHAFLLERMLAHVVDLESDIEAVQERIEEAVAPFGRQVEILDSIPGVGRIAAQAILAEIGTDMRVFPTAEHCASWAGMCPGQNESAGKRKSGKTRKGSRWLKTILLECAHAAGRSKGTYLSERYRQLARRRGKKKALVAIGHDIVTIAYHLLSTDQLYQDSGPDRVKSEAEDLAKRRAIRQLTALGYRVSLTPLPGRAA

SEQ ID NO: 114902 - protein, 376 aa, unidentified
MERGSLMLNTTTFVGLDVHARSIKAVALDAMTGEVRSATFGYDAAEVAGWVSSVDPSAKCVYESGATGFDLQKRLSSMGIDCVVGAVSKMIKPPADRKRKNDRNDAEFLARMLSVGNVVEVWVPDDGCEAARDLSRALDDAREDLKRCKQRLSKFLLRHGYAFSETTPTGRRKGSWTAAHWAWIKSISFPEKADNDVLAYYVDAVRQAMEDKARLERLVEAEASKPRWKRRIDSIRCLKGIDVTSAADLVFEAGEFSRFKSARSFAAWLGLTPSERSSGESVRQGGITKAGNKHLRRVLVESAWRYLGCSPHSKDLAKGQVPDPAARRHAAKGVRRLVERRRAMLERGVHKNKANVATARELACWCWAVGRMVENG

SEQ ID NO: 114903 - protein, 351 aa, unidentified
MMLIGVDYHPSFQTIAFFLEETGECGEQELNHSDGQAEKFYRDLKRRGISVRVGMEATGYSRWFERLLAELGFELWIGDPAEIKAKRVKKQKFDREDARLLLRLLRENNFPQIWVPGPENRDLRQLLWHRHRLVQMRTRIMNQLHALAMNEGYRCKKKLFSEAGRAQLEKLALAPWASRRRRELLELLDRLNPTIEELSTAVEREVRKRPEAMRLMTHPGVGPLTALAYVLIIGTPTRFQRGKQIGTYVGMIPCEESSARKQRLGHISKQGNSLLRFLLVEAAQAAARKQPDWRRRYIHLAMRRSKSIAKVAMGRRLAVRLYWMWRNGCEYSPSLEFGSYAGQLGIGNGVK

SEQ ID NO: 114904 - protein, 386 aa, unidentified
MRRAQKRGPGPSSVLITPDHAGNVVGIDPHKQTLTATVVDPRGGIAASEHFKVSGGGHRALETWARQFGPIARWGVENAAGWGRHTAIFLAGRGYDVRDVCANRTPRQDRGRQRGKSDTLDSERIARETLAHPLLPKAFKRAGQDQGPDELHQLLALWHNRRRSILTSRQHLVNEAENLLCELPLQLREQLPDSKSVRPRLAALQCRNRRRRYDPPTRLRLELLDGYHTQIKALDGQEKQVTAHLDELVRQSGSTLGELCGLSTRSVAELLVEVGDVRRFTEGGFRRFNATAPLPASTAEGPGEPVRHRYNPGGNRRINAVLHRMAVTQLRHEPRAQQVYANARANHHTKKEARRVLKRHLSDVVYRRMIRDLAAASHPSQPLLAA

SEQ ID NO: 114905 - protein, 365 aa, unidentified
MNHVTSIGLDVHARSVTAVALDSITGEVRSQKFGYSPAEIAGWILQLDSPKAVYESGVTGFHLVRELREMGVDCIVGAVSKMHKPASDRRKKNDRNDAEFLARQLMAHNIVEVFVPDVETEGARNLSRALEDVRDALPRAKHRLTHLLIRWGYVWNEFNEDGKRRGSWTRAHWEWIRGIELPDAAARESLDYYISEVRHIESQKKAIEKRVAQCASRPRWRDRVEALRCMKGIETVTAFALTVEAGVFSRFESWLGLVPSEHSSGERASRGGITKAGNSHLRKLLVEASWHYTRATKERKRSLYDESVPASVSNHAAVGVKRLVERRRHLSCELRKRPVVANVATARELACWIWALGRMSEGALA

SEQ ID NO: 114906 - protein, 328 aa, unidentified
MKLQHIIGADLSKKSVDLVCHLLKSHIQIENTATGFKDLLQWFKQQGINASKLMIVMEHTGLYSYCFESFLHKHQIAFCKVNALAIKRSIGLVRGKTDKLDATRIAAYGHEKKDQLTTDVPASDALKRLQMLHSTRDRLVRQKASLTCAIKEYRHIGIPEKDIIVQTQLQLIKNFEKQIDKLMAEIQAILEQEPLKQNFHLLQSIKGVGKILALTVIIKTHNFTRFVNARKFACFCGTAPFEHSSGTSIRKKSRVSHLADKQMKTLLDLSAKTAIQYDKELREYYLKRTEGGRSKMSTINVVRNKILYRMFAVIKRQTPFLENYLQAA

SEQ ID NO: 114907 - protein, 393 aa, unidentified
MTETYYIGVDIGKFSHWAAVMTNHGELKVDSFCFTNDKQGFNTFYQTVKPYLSHDHLIGMEDTGHYADNFRHFLLKKNLNVVMINPLSTDAFRKALLKSTKTDKEDARFICQVIMNPQLYRKVKLSDYDYHQIRELTRYHHNMKEANTRYKTQLQKDLDRVFPEFNSLFSAPYGPTYMRILSEFQSAVIISDTDIRTLRKVLKNTGRGRSVSFTAEELKRLAKSSVGQPNTILEMEIRHLVTLIADIDSCIAEVDKKIEEFSLDLNSPILSIPGISHFSGTSIISEIGDVNRFSDVNKLISFAGVNPIVYQSGNTNLKMTRLSKKGSKYLRKTLYQIITPVIQNNTVFMNYYNKKISQGKSPRCAQGHCVRKLLRIIYHILKTGNSFDPDIIR

SEQ ID NO: 114908 - protein, 349 aa, unidentified
MMDQRLTYSGCIVYVGIDVHKDTYAVPCVCDKKIVKTATVQANPAGLASSLPRWFPDATLSAVYEAGFSAFVLYRALSQAGIATIVVNPASVAVAANDKVKTDRRDSKKLAIDLADGRLRGIYVPTEAEELARLLPRTRAQSVEHRATITRQIKAKLHQFGLIAPASRRLMSNRYLREIAAWPLPAELSVSLTFLAEQWRFATRQLIEMRRLLRAQAQVQAPIATVYRSVPGIGEVVARTLATELGDMTRFANERALFSYTGLTPSEHSSGASVRRGHISRQGSSRIRQLLVETAWRALPRDAVLQESFDRIAATRGKKRAIVAIARRLTGRIRACFRQGTTYAVGTYA

SEQ ID NO: 114909 - protein, 305 aa, unidentified
MDVAKIELVTYQADSDLLALIPNEKPAIKRWLKTLPRPAALAVEATNIYHVDLVELAYQAGFDVYIIDGFQLSNYRKGVGGRSKTDASDARLLARFLKNEGECLRPWTPPPAVYGKLQSLLRRRASLIQAKTSLTQSWANDASLKASFAAFLKSIERLDLLVKKKLKDALREAGLLEQVARCQAVEGIGFLTATALVMAYSRGDFNSSDSYIAFLGMDLRVTDSGQKNGRRSLTKRGCSEIRRLLHNAAMSASRTSAWKEFYNHHRSRGKATTEVLVMLARKLARVAFALMKNQSEYQPRGSVMA

SEQ ID NO: 114910 - protein, 364 aa, unidentified
MRRQTADAMMRWCYSLPMKTNITKTSPTPSVVPTSSAAVSSGFTLGLDLGDRQHHVCVLAAAGNIVREASLPNTRPALAQLLADFPRATVALEAGTHSPWISRYLTEQGATVLVANPRKLHAISRNERKCNRRDAQMLARLARVDAALLHPIQHGSAQAQHDLLGLKLRDALVRNRVSLINAIRFTLKSLGHPVRNPSSESFHKTVLADIPADCLPVVQPLLTVLAHVTEQIKAMERDLVRRSKKDYPATQRLQQIAGVGPLTALCFVLKVGDPQRFSRGRDVGAYLGLCPRRNQSGGTDKGWLRAVNKLSKLAKSTHGRQAAKKFEIRWPEILPLTEIAQAKNEKIISFRKNQMARGFGLESE

SEQ ID NO: 114911 - protein, 423 aa, unidentified
MEVMHERVAGLDVHKAMIVACVRIMSEGTIKRECRTFETTTASLETLLDWLTASGCTHVAMEATGVYWKPVWNILGDGRFELIVANAAHIKNVPGRKTDVNDATWIADLVACGLIKASFVPEEAIQQLRSLLRARKQLTREQTSHIQRIQKTLEEANIKLDSVISDILGVSGRRMIEAMIAGVRNPHKLAALADRRIKASPKVLYDALHGRLTEHHRFMLDLYLGQHDALGKAIARIDAAVDAAVTRMDEEEEPDQATFRSLISLLCSVPGINILGAMIILAEIGRDMSRFPTAGHLLAWAGMCPGQNESAGKRKSSRLRKGAPWLKTILVQCAWAAIRKKDSYYGAQFKRLRAKRGPKKAICAVAASMLTAIYHMLKDGTQHRDLGADHFDRRSNGVKARHHVAQLARLGFHVELQPVAQAA

SEQ ID NO: 114912 - protein, 345 aa, unidentified
MDKIIRIGMDTSKHVFQLHGVNAEEKSVLREKMRRKEMIDFFTTCPPTLVAIEACGGSHHWARLLASFGHEVKMIAPQLAKPYVKRNKNDAADAEGLCEAMSRPTMRFVPVKTADEQAALMLISVRTRLIANRTQLANAIRGYANEFGVSAAKGLAHIPMLLERIQADATVPELAQELFMSQAEEYAQLEKKIADVEAKVKAWQRNDERSRRLNTIPGIGPIGSALLIMKTPAPELFQSGRQFAAWIGLTPKDHSTGGKLRLGGITRAGDEALRAVLVAGATAVIHHARRSGKASQWLAELLRRKPPKLAAVALANKMARIAWKLMISGQTYSAQSGAALTGCAT

SEQ ID NO: 114913 - protein, 341 aa, unidentified
MKKFIRVGVDLAKNYFQIHALASEGAPAVTRKLKRSKMHEFFSQIEPCLVGMEACGSAHYWARELKGMGHEVLLMPPAYTKPYVKRGKNDAVDADAICEAMSRPGMRFVPIKSAEQQATLMLHKTRELLIKQRTMSVNALRGHLSEFGIVAAKGIGRVDELLDLAESDATLPAAAKTAMRVLAQALEGLDKAIDDLEKEISSAQAQNEMSRLLDKVPGIGKLIASVIAACVPDPSVFKSGRDFAAWLGLTPRQNSSGGKQTLGGITKQGNRYIRRLLVLGATSLLNVVGKRKGALRDWIVGLLAKKPARLVTVALANKLARILWAMMKTGECFRTEMFAKA

SEQ ID NO: 114914 - protein, 346 aa, unidentified
MEHYAGIDVSLERSSVCVVDALGKIVKEAKISSEPTALVAFFEALGFVVKRIGLEAGPLSQWLHAGLQRAGFEAVLLETRHVKAALSAMTVKTDRKDARGLAQLIRMGWFRPVHAKSIRSQEVRALLVARKQLLGRLIDVELSIRGILRGFGLKVGPVTRTGFDGRIRELVTGQATLARIAVAMLSARAALKAEYEKLHKAVLAIVRDDAVCRRLMTVPSVGPLVAITYKSAMDDPNRITKSKAAGALFGLTPRKYQSGEKDVTGGITRAGDEMVRTALYEAANVLLARITRFSKLKRWAMDVAKRRGSKRAKVALARKIAVILHRMWVDGSTYRWTETQPIAAQA

SEQ ID NO: 114915 - protein, 367 aa, unidentified
MFKVGEDSESVRADTGRQPKLILTPEEPMSKSTAPQQTTVFCGIDVSAATLAVAVIEPDQPLQQREFANRASGHKALIDWLGKRGARVRVSLEATGIYSLDLALALDKARGIEVAVLNPKMVNRFAQTLRRSKTDAADAIVLAEYSLRMPFLAWTPPSLNGLRLRAVGRHIAALVAQHTREQNRLQAAQSSRAVPGCVLQDLKRSLASLARRLVKMRRAARELIRTDAQIEQCFHLLTGIPGIAEASALAILGELVLLSPHLTVRQWVAHSGLDPAHQQSGTSVHKRSHISRAGNRHLRRALYMPALSAVRWDPHMKAFYEALQQRHKAKLQAIIAVARKLLHAIYGIFRSQTPYDGRKLFPQLEAA

SEQ ID NO: 114916 - protein, 334 aa, unidentified
MQNITLIGIDLGKHSFHIHCQDKSGKALLRKKFTRTKLMQFLATCPPSVVVMEACAGAHFMARRISDFGHETKLISPQFVRPFVKSNKNDFVDAEAICEAASRPSMRFVQPRTEPLQAMRALHRVRESLIRDKVKTTNQIHGFLLEFGISLPTGDAVIKRLSLVLAEHEIPEYLSRLLVRLHTHYLYLVEQIAELESELSQSINADDTAQRIMTIPGVGPITASLLSSQPGDGKQFPCSRDFAASTGLVPRQYSTGGKSTLLGISKRGDKNLRRLLVQCARSFMMRLERQHGKLAEWVREQLNKKHSNVVACALANKLARIAWVITTQQKEYQA

SEQ ID NO: 114917 - protein, 486 aa, unidentified
MEKVSMKPKPQEKNEKITKPRTQHWEEMNRKQRREMMRKMQSQDLSLEVVHPDAAGIDIGNESHYVAVPSTRDSQPVRRFGCTTGELQAMAQWLKQCQIRTVAMQSTGVYWVAVYDVLEQAGLEVYLVNARDTKNLPGRKSDVQESQWLMKLHTYGLLRNSFRPPQEIRMMRTYWRQRNDLVHSAGRHIQRMQKALTQMNIQLANVLSDVSGVTGQAIIKAILRGERDPQKLAALRDLRVKASEEQIAQSLEGHWQPDLLFVLKQEQDGYEFCQQQMAECDHQLAQYLQQREDRSQSAPLPEEKRKERLRKKKGNTPQFNLREGLFRMSGTDLTRIDSIDVMTATTILSEVGWDMSKWATEDHFVSWLRLCPDNRISGDRIIGKGRLRTNNRVTIALKMAASSLRLSNTYLGAQFRRFRAKLGGPVAIKAMAAKLARLVYRMLRYGVKYVDQGALLYQAQHHQLQIKQLHWKAAKLGFRVVQVPAT

SEQ ID NO: 114918 - protein, 424 aa, unidentified
MVRAIGMDVHRDFCEVAIAEAGAVRSAGRIATRPASLELFAASLAPTDVVALEVTGNAGEIARILEPHVARVVVVSPHDTGISRARAKTDRLDARALAKLLAAGELDAVWMPDEWTRAMRRRLVRRSQLVRARTRAKNEIHAVLIRRLQGRPPVTDVFGVRGRRWLSELELPADESETIAGCLRHVDFLDAEVAALDRAIASEALRHRDVLRLMTVPGVSVITASTFIAAIGDIRRFPSARNLIGYLGLDPRVRQSGPSPARHGRITKQGSASVRHVLVEAAWVTVRAPGPMRAFYERVRARRGAQVAAVATARKLASLFWCLLTREQDYAFGQPSLTRRKVRKLELAAGAPSRKGQVRAGDGLRNKQIRDAERALAAQAEDAYRRTIADWKATSPQKAGASVTPGRASQRPSKGKAARQTTSP

SEQ ID NO: 114919 - protein, 366 aa, unidentified
MASVASAGERIYLGMDVSRDKIAVAVLRPGQDVPAVEMISHDGEMVRRLIGKFADRSVLRCCYEAGPGGYELYRLLASAGVACDVVAPSLVPKGGSDKVKTDRRDCVRLALSHRAGLLTAIRVPSEQEEAVRDLVRTRADLVDDRKRMMQRIGALLQRHGRIWRAPRWTCEHRAWLDRQAFDEPALQAALRTYLAALDARDAELAVLESQLRGCWASVDPLASMVRRLACYRGIAELTGLTLAAEVADFRRFASAPAFMGFTGLTPSEYSSGARTRRGAVTKAGPQLVRRALVEAAWAYRHRPAIGATLRRRQAGCPEQTLARSWKAQQRLHATYAKLTRRGKIPAVAVTATARELAGFVWAEMTS

SEQ ID NO: 114920 - protein, 370 aa, unidentified
MKDGSKYVGLDVHKETIAVSIADADGGDVRYYGEIKNTPEALKKLCDKIKPKQGGLFFCYEAGPCGFGIHRQLIDLGWDCMVVATSLIPRKSGDRVKTDRRDSEMLARLLRAGELTGAWVPDDAQEAMRDLTRGREDMKRLQKQSKQVLLAFLLRRGPRYSGKSHWTKMHYAWLEDQTFANASQQIVFQEYINTIKSLNLRVEAFDRQIEKVAVESVFKEVIEGLMSLRGINLLTAVTIVAELGDLSRFESAPQLMAYLGLVPSEYSSGGSRNRGGITKTGNGHVRRVLVESAWTYRHPARKTRHLERRAKEASEAVQEISWKAQVRLCGKYKTLDARGKLKVQTCKAVARELAGFIWSVGQEYPSPKAA

SEQ ID NO: 114921 - protein, 360 aa, unidentified
MGKARSLVGLDVHAAKIVAAVLDAETGELTFFGMDADVGRAAGFCAGLPRPVRATYEAGPTGYGLARELTKRRVECVVAAPSKIPRASGDRVKTDRRDAELLVRLLLAGKLHAVRVPGAEEEALRDLVRAREAVRVDLMRCRHRLSKLLLRHGIRFEDGDAWTERHRAWLGTVTIDWPAAQTTLLDCRGAIDQLAHRRDQLEREIVAIVPGSPWREPVGRLRCLRGIDTLTAVGLCAEVGDFERFARAEQLMSYVGLVPTETTTGQQRRLGSITKTGSGHARRLLVEAAWHYRSRPNLGKTLVERQAGQPPAAVAIAWSAQRRLHRTWTRLEARGKRRTIIAVATARELAGFVWAITQTE

SEQ ID NO: 114922 - protein, 411 aa, unidentified
MTKDNDTTSDAVLVAIDIAKSRNDVVIEQPGKRRRQRMKVLNTRADHQRLIDHLRRLGCPVQIGFEATGNYHRALAWQLLSAGFDLRLISSVALARTREALHNGWDKNDPKDAQVILHMLRIGATQRYYDPLAQGINDWQELSKTHEIISKAKTEAMHRLQTHYLPLYFPEIERFRHNSRSEWFFIFLDRFPVPAAIVTLSREQFIAAAWPVIGRKVAKARILGDIYETARSSIGLPVAVDSPAVAMYRLVIAHIRQLIQQRDEIEQQAHALLAEHPDYRRLRQLPGVGPIIALTVLAEAGDLRRFRHHRQFLKFCGFDLATHQSGQFRGQSKLSKHGNARLRKAFWMAGQIAVRQPENSFRDKYRRYVAKDPDDRDLKRKALTAVAAKVARIAHAVVTGETDYRPFYGVR

SEQ ID NO: 114923 - protein, 411 aa, unidentified
METIFPRCAGLDVHKAQVTGCVRVSDAAGGREQQLAEFPTTVRGLVALRDWLEAHRVRQVAMEATGVYWKPVWAILEDAFELTLCNARHVKQVPGRKTDVSDAAWLCQLMEAGLLRASFVPPKPIRQLRTLTRYRKTQIAERQREANRLHKTLEDTGIKLDCVATDILGVSGRAMLEALCRGTTDPSVLADLARGRLRAKLPQLREALEGRFDAHHALVVGAILAHLDFLDEQIERLSDAIGEALGPFAPAVELLCSIPGVQRRTAEVIVAEVGTDMSRFPTAGHLASWAGQCPGNDQSAGKPRSGRTRKGSKWLGAALEEAALAATRTRTSSYLAAQYQRLRPRRGHGRAVGAVKHTIIVACWHMLTTGELYRDLGPDYFTRRDPDRQIRRLLAQLERLGQRVTLETATA

SEQ ID NO: 114924 - protein, 343 aa, unidentified
MEYYIGLDVSLKQTSICVVDQSGVIVREGVVESDPEPIASFVRSKAPGTVRIGIETGPTTTWLWTELKRLGLPVICIDARHAKAVLKMQINKSDRNDAAGIARIMQTGWFKEVRVKDLDSHAVKALLASRALLVKIKRDLENQVRGLLKNLGLVIGRAKFDVFAVRAEGLVENHPELAAVIRPLLKARKAIEQQVDNLDRKVLKLARHDVQVRRFMTVPGVGPITALCFKATIDDPARFRRSRSVGAYIGLTTRRHASGEIDWSGRISKCGDAMMRMYLFEAAGVLLTRVPKWSGLKAWGAKLAKRNGLRKAKVAVARKLAVILHRMWIDGTEFNWSTKKAAA

SEQ ID NO: 114925 - protein, 445 aa, unidentified
MNPVNLSLERHTTRFSVSVQSLPAFSNIFIEEMPMPKIVYPICCGIDVHKSFVVACIAVTDEKLVTTYSKTKRFSTFTNDLRRLADWLNQQNCRDVCMESTGKYWIPVWNVLEPTCNLVLAHPKYTKAIKGKKTDKRDAKWIADCFKHDLINGSFIPPEEIRQLRDLVRYHTKLTSYTTGEKNRAQNCLTVSNIKLDDVFSNVFGKAASAITARLLENNKPFDVTPYLTKNLKASPEEIQAAVDGVMCANQAEKLRIIRSHMDSLALCKANLESEILSVAEKFLPQINLVTTVPGIKTFAAVATIGEIGVDMSVFETSRHLCSWAGLTPQNDQSAGKKKTTRISRAGAYIKPLLVQCALAAIKSNMHPEVRNRYNAIKKRRGHKKAIIAIARMLLTAIYNILKKNEPYNAELYRLSDKPPVQREVSVEQAIFILQRQGYLVTAST

SEQ ID NO: 114926 - protein, 386 aa, unidentified
MCCLDGRSTPETVRKRTFGTFRHQIEELRDWLKELGCTTVAMESTGVYWLPVYRVLDGHFEVVLGNARHMANVPGRKTDQSDAHWIAQLLRFGLIRKNFIAPRPIFDLRQLTRTRRKLIETRTAAELRVEKLLQTTNIKLSSVASEVFGVSGRQMLDALAKGISDPMTLAELSRGKLRKKRPELIKAFSGTFTKNDQRLLAVQLQWVDDLNARLTTLSGLIDEKAAPYDAIIQRLDTVPGINSILATEIVAETGGDMSPWPTENHFSSWCGVCPGNRESGGKRRRARVREGRPAMKRILAQAATSAGLTMGTYLSSRYRTVRKRRGESHATLVIAHEIAISIYFMLKRGNDYQPPLFADPAKNREIRRRKLVRELERLGYTVACNG

SEQ ID NO: 114927 - protein, 416 aa, unidentified
MKLFVGDDWAEAHHDVEVMDASGRRLAKARLPEGVAGIARLHAMIGEQLGEDAEDEDAGQVTVGIETDRGPWVQALIAAGYTVFAINPLQASRYRERHGVSGARSDAADAHVLADMVRTDSHQLRPVAGDSAQAAAVKVVTRTHKTLIWERTRHAQRLRHALRDYFPAALEAFEDLDAPDTLELLARAPDPASAARLTTAQVSAALKHARRRHVPAKAEAIQAALRAAHLGQPAVVTAAYAASARALIAVLVTLNEQVKVLQGQVEAYFGQHPDAEIIMSQPGLGPVLGARVLAELGDAPGRYVSAKARKNYAGTSPITRASGKKKTVLARYVHNDRLIDALMTQAFSALQSSPGARACYDRQRARGSEHNAALRQLANRLTGILHGCLKTRTRYDEATAWPQHAAKPEKAEKAAA

SEQ ID NO: 114928 - protein, 311 aa, unidentified
MDNTIGIDISKDTLDVHRLADGQHSQFLNGKKGFAKLLRWVGLQPTPLIIFEATGAYHRQLEQALGAKAVPFVKVNPKQARRFAQASGKLAKTDRVDCEMLAKMGAALQLVPKPLSAENLYDLRELLSARRALIKDRTAAKARKATISNVLVKQQLEKRLRHIESDIAKIDTLMLELARQDHHMSERLDILFSIPGIGVITALMILVDMPEIGALNNKQVASLAGLAPMSQSSGKWQGKARIQGGRPNLRNSIFMPALVAIRFNPDMKAKYDQLVAAGKEKKVAITAVMRKLLVLANALLRDQRKWTEKVA

SEQ ID NO: 114929 - protein, 415 aa, unidentified
MALKIVYKICCGIDVHKTFVVACIASTDKHGVTSYERHRFSTYTKGLKNLLQWLLEHNCKDVCMESTGKYWIPVYNILEKDCSIVLAHPKYVKAIRGKKTDKKDAKWIADLFKHDLVAGSFMPPAGIRQLRDLMRYRFKLTCFKSSEKNRLQNCLTVSNIQLGNVVSDTFGKSAQAILDKILENPADTSFDLEPLVFKSLKKKLPELRDAIDGYITPEQAAKLKIIKEHFDNLEARKAELEELILALANPYQQEISIILTAPGFKNTFTAIGIISEIGTNMEAFPSAKHLCSWAGLTPTNNESAGKKKSVRVSKAGCYIKPLLVQCANAAIKSKKHPEIRDRYLRIKKRRGHKKAIIAIARMLLTALYHMLKNGENYNSDLYQKSDILPTTREITVEQAILMAQFQGFRIKSATE

SEQ ID NO: 114930 - protein, 355 aa, unidentified
MNIIGVDFHPKFQQIAWVDTDSGELQERPLTHREEAEKFYRALAAAGQQVRVGMEASGHARWFERLLGELNFELWIGDAAEIRAKRVRKHKTDRQDAQHILGLLLENRFPRIWVPSWENRDLRQLLWHRHRMVQARTRVMNQLQAIALNEGLRCKKRLWGERGRQQLESFPLGPWASRRRRDLVALLDRLNPTIAELSQAIEQEGEKCREAQRLMTHPGVGSLTALAFVLIIGRVERFPSGKQIASYLGLVPMEDSSGDRRRLGHITKQGSSMLRFLLVEAAQVTVRSIPEWRSQYIHLMMRRGRKIAKVAMARRLAIALYWMWRNGCIYEQSKSSVRTRASSDQAMACSTTPGD

SEQ ID NO: 114931 - protein, 554 aa, unidentified
MAAVMIGIDPHKASHTAVAIGAAGEPLGQLQVRASASQAERLLGWAAAWPERAWAIEGAGGLGHLLAQQLLAAGERVLDVPPKLGARVRLLATGDTNKNDPNDARSVAVAALRSAGVRAARRDDHAAVLRVWSKRHRDLGRTRTQVVCRLHAVLCDLVAGGVSKHITAAHAARLVELITPSGAVEAARCELAAAFTEDLRGIDDRIRRTRKKLAIAVQAAGTSLTGLFGVGPVIAAAVIGDVRAVARFPGRDHFAAYNGTAPIEVSSGDRKVYRLSRRGNRRLNHAIHMAAVTQIRHRHSEGRAYFDKKLAEGKTRKEALRALKRQISDAIFARLQAGARRAAAGVKGPGGQPGNDSDSSAAGSHPAHRLFGQATPGPRHHPTTAARIRGRAGRSPAAATLPPATPQVQVERPQRKRGRTTWGCSEAAATLGRGEGHEAKLRGEAPALEDHLTCREKDRPNPLTQTQRGFRSVTRRGWFDGALCRTRVKVRCVVVIVPRRLRLSRRMETTRSWLHSVSARLPCRFARETEHASDVLAAARGCGERDVQDAGEKP

SEQ ID NO: 114932 - protein, 438 aa, unidentified
MSNKVFFNLNDLFISVGIDVGADFSWMSIALPNQQFVGKPYKILHNSIDSLTTAVSKIKEAEELYSLESRIFLESTGIYHYPLFCYLRDKGFNCSVINPIITKNSTNINIRKVHNDRFDSKKAALVGLKPDLKVSLMPSDLALNCRNLCREYYDLMDNRSAYVNKLQGELRMAFPQYLGIFSKVTINTSLTLLETYTSPSAFLKADKQEIIDIIKSTARFGLTYAQNKYNAIIQAATDANQFGYIIDSNIKRIRLYISFIRKYDEEINSILESLHELVDANEDADFVKQIHLIETFKGAGFLSAVSIMGEIGDFSAFSKPKQLFAYFGLDPAVKQSGKFEGTKVQMSKRGSAIARRVIHTLTLQSISISRNGEAKNPVLREYYLKKCDSKPKLVAMGAVSHKVCNMIFAILRDNKPFKIIAPQEHIKQYNSAKCDIAA

SEQ ID NO: 114933 - protein, 355 aa, unidentified
MSGAVPGVERQPLKKLEPDATALLRLIERWRNEAVRAGRPISRIALAYEAGRDGFWLARWLIARGIEVHVIHSASVAVSRESKRAKTDRLDAAMLMRVFLGWLRGERGHCGMVAIPTMEEEDARRPSRERESLINERSRITNRMKSALARLGVRGFKPHLRKAPERLVGLRTAEGTGLPANIMEEFRRDMARLALVREQINSIEKTRAERLKRAPDTGPHAMVRLLARVIGIGIETADMLVREILSRKLRDRRAVARYAGLTGSPDESGLKRREKGLPKTGNARVRRGLIQLAWRFLTFQKHSVLARWYRTRTEGPSGGRKTTMIVALARKLLIALWRLVTTGEVPDGVELRPVG

SEQ ID NO: 114934 - protein, 345 aa, unidentified
MEEGCARSGQVVGVDLHRRRSVIVRIDAVTGEQLGCVRIDNSRARLVAEVAKAGPAPRVAIEATFGWYWAVDALQAAGAEVHLAHPRGMVGMNDRRVKNDERDARELADLLRVNRFAEAYIAPPQLRELRELVRWRQKLVDHRRSVKASLHAVLGKCGIVPELGDLFGPGGQKILDSLALPEPYASRVACQRRQLAQLDHEIGAVEIATVARLKDDPDFQALLKLRGIGPVFAAIFLAEIGDITRFDSPQALACWAGLTPWHRESDSKAHRGSISKQGSRLLRWALIEACQRSCEPYVAQAKTNIVARRGRKAANIAKVAAARRLATVVFYILRDGHARCLQQAA

SEQ ID NO: 114935 - protein, 335 aa, unidentified
MKHYAGLDLSMETTQVCIVDENGRKLVSEKEESSPEAIATLLERYGPIERAVIETGRMSPAICLGLRDLGVPVVCIDARQAHQSLKAMKANKTDPHDAAGLAQLARTGFYKEVHVKSPTAHGVRSVITARGHLVEARVRLDNMIRGLCATFGYRPGAGQGKAFLERIMQAAHIPGLGDAITSLLSVRAELVEQIKEMDRRLRIIASQSQACEILLTIPGVGVQTSAAFAAAVDEAGRFRQSRNAGAYFGLVPRRHQSGELDWTGRITKQGDGTVRKLLYEAANSILTRSRETFALKTWAMKIARRRGLKKARVALARRLAVIMHAMLRDGTLFQA

SEQ ID NO: 114936 - protein, 319 aa, unidentified
MNCINNQKEITVGVDTGKLQLDIHIRPLDIYFTVTNDEKGIKKAIKKIKPHKPTRIVIEATGRLEHPFIIACSQADLPFTVANPAHIKKFAGAIGRKAKTDKLDAQLIAHYGEAIKPPLSKLKPENIQLMSNLLSRRRQLMTMQTMEKNRLQIMPKEITNIIKPILIAIKNQIEKVDNKLNKLIEKCSEYKAKNTIIQSMPGIGPVVAFNLLSDMPELGYLTNKEAASLIGVAPFNKESGSYEGQRNIRGGRHKIRTVMYMAMMSAMQCNPVFKTTYQRLVAAGKPKKTAIIACVRKMIIILNSMVRDGVMWDPERNQN

SEQ ID NO: 114937 - protein, 352 aa, unidentified
MESITVGVDLAKQVFAVCDVDKNGRVLARRELKRDGFRAWLMAQPAGTVVAMEACSSAHYWGRQCEVHGLVPRLMAAQFVKPFRKNALVKNDRQDAEAIATAARQGNMRFVAVKSEAQQERLCWHRVREGYKKDALALRNRVRGLLAEFGVVPAPSVAALKRTLADLSSYELPSSLLRLIRLQQDHLAAIEAGMAECDAQIEAQGKADERCARLRALTGIGPLTADAVVASVGNAAEFKNGRQFAAWMGLTPTQFGSGGKVSLGRISCRGDRYLRTLLIQGARSSLQRAKTVPVEIATAEQLWIVQLASRMSYGKVLVTIANKHARQAWAMLSRGEAYDPEAWVRHPMVQRA

SEQ ID NO: 114938 - protein, 329 aa, unidentified
MAKNVFQLHGVDDRGRVVLSRRVRRSQLLEVVASLPPCVIGMEACASAHHWGRAFEKLGHTVKLMTPKYVKPYVKTNKNDCRDAEAICEAVSRPTMRFVAIKTVDQADLQAVHRSRSLLIKTRTALINPIRGLLGEYGLVMARSPERVRPALVELLEDERTGLTPFARETFTELYEQLVELEQRIAKVTQRLDRVFRAHPVCRKLAAVPGIGPLTATALLAAVSQPHVFQNGRHLAAWLGLVPRQCSSGGKARLGGLSKRGNRYVRTLLIHGARAVVQRAAHRTDVQGRWMWDLKRRKGTNVAAVAVANKNARVIWALLAHDDVYRRSA

SEQ ID NO: 114939 - protein, 317 aa, unidentified
MDKTYIGIDICKDSLDVAVHASGKQWSFANDTAGIARLCKLLAKLEPALVVFEATGGYEMPLYLALSEAGLPVAPVNPRQIRDFARSMGKLAKTDMIDARVIAHFASAAPELNPKPVPDTQMLKAVLARHNQLVEMVTMETNRLRGADKALREGIEAHIAWLKRELEDVDGKLRNLIEQNPVYREKDSILQSTPGVGPTVSAALVAQLPELGSLNRRQIAALVGVAPLNRDSGRHRGKRIVWGGRGRVRAALYMATLTAARFNPVIRSFYTRLIAAGKAKKVALTACMRKLLTILNAMLKHHTVWSNSYSLPLALRY

SEQ ID NO: 114940 - protein, 411 aa, unidentified
MDVVHERCAGIDISKADAKVCVRVQGRGRRRTEQSVRTWGATTGQILALRDELLELRVGLVVMEATGDYWKPFYYLLEDAGFEVVLANPRRVRAIPGRKSDVSDAAWLADLGAHGLVAGSLVPPPPIRELRDLTRTRTAIIRERSREYQRLEKVLEDAGLKLSTQTSSLTLVSVRRMLEALVAGERDPRVLAEMAQGQLRNKIPALAEALVGRFTEHHAFLVRLHLDLIDRHTEAIEELTGRIDAQMEPFRGFHTLICTIPGVSTLVADVVVAETGGDMSRFPTAQHLASWAGTSPGSNESAGKVKSSATRPGSPHLKGALGVAARAAARSKGTFLSARYKRIAARRGPMRALVATERSILVTIWTMAHTGELYADLGADYYRRRNPERSKQRALAQLRALGYQVTLSAAS

SEQ ID NO: 114941 - protein, 486 aa, unidentified
MAKRKESTFERLQRGQPLNRRERREVANGLNSPDPGWEIVHPHAAGIDIGNESHYVAVALGEDEHPTREFGSWTADLERMADWLQACGIQSVVMQSTGVYWMAVYDVLQRRGFDVHLVDARGTRNLPGRKSDVQECQWLLKLHTYGLLRRCFLPGEEIRRVRTVWRLRDQHVKEAGRAVQHMQKALTEMNVQVHNTISDLSGVTGQAIVRAILEGERDAARLAALRDSRIQASEPELVQSLRGNWQEDALFELRQAVEAYDFYRQQMKQCDAQLEQYLAALPSREPVAAPPTAETPEASRKRPVRRGFRKPRKAPGNQPALDLRTELQRILGVDATSIDGIEVMTVQTVVAEVGADLSAWKTERHWASWLNLAPKREVSGGRVIRHTREHRTNRVGNAFRMAAQSLIRSESYLGARFRYLRAKLGGIKAVKAMARTLACLYYRLVTRGQAWVDRGAAEFERRRQEREFAMLQRKAGDFAMKLVPAV

SEQ ID NO: 114942 - protein, 355 aa, unidentified
MSGLKHQMEKRSMEHFVGLDISVKETSVCIMDDAGKIVRETRVASEPEALLQVLSKQAYRFKRIGLEAGPLSQWIYSILAEADLPVICVETRHMRALLKAQINKTDRNDARGIAQMMRVGLYRPVHVKTVRSQQLRMLLTHRKLLQSKAIAIENDLRATLRNFGLKVGMVGTAKFEARIKQLIENLPDLAVLIEPLLIVRRTLREQTAILHRRVLSIVRDDDVCRRLMTAPGVGPVVALTYRATVDVPARFRNSKAVGAVLGLTPSKYQSGEIDRTGRISKCGDEMMRVMLYEAAQIILFRSEKWSWLKAWAMKIARHRGMKKAVVALARRLAVIMHRMWVDGTEFRWTREVQPA

SEQ ID NO: 114943 - protein, 424 aa, unidentified
MKVTYKTCCGVDVHKSFLVATIITTTGGIEPSYQKKRYSTFNNSILEFKQWLLDNDCHELCMESTGKYWIPVFNLLEDEINVTIANPKWVKAVKGNKDDTKDSKWIGDLFRLGLVKGSYIPCKKIRILREFTRYRYKIVSCRSSEKNRYQNALTVCNVALDSVVSDIFGKSSTSIIDYLLEQSGNSINHEEIASKLLKSLKSKEDAVIESIEGYQMTDSQKYRMHLVRAHMDYITAEINDVDREIEKLISSDPDFENAIQFLMTIPGVKRDSAITVISEIGINMTQFSSSKRLCCWAGLTPGSNESGGKKKSVRVTRAGVYLKPALVQCAHAAVKSKKSPYYKKKYESLMKRRGKKRAIVAIARMILTAIYQMLSTGESWNPSDLYKIDIPEALLEKQKAKAIKQAMKLLQREGLYPPPEPIAS

SEQ ID NO: 114944 - protein, 390 aa, unidentified
MQFAADRLEAPTAIRTDLGAIFISLELSRSSWVVTSLSPGGGEKMSKHTVRGGDVAGLLKRFAQLREKAKGRTGKVFPLIVIQEAGLDGFWIDRVLQNEGIESHVVDPASIATSRRRRRAKTDGIDGEALVRALLAYKRGEPRVCSMVRLPTPEDEDRRRLCRERKVLTMERVQHVNRIKGLLFSQGVSGYEPLRRDRRERLDALQTGDGRPLPPHLKAQVRRELDRLELLLAQIKAAEAERDALLAAEQTKAPVPPAMLLGVKGIGPEFAAVLWSEGLSRPFENRRQVAAYAGLAPTPWQSGSVDREQGISQSGNPRLRTTMVQLAWLWLRHQPDSALALWFHDRVKRNGGRLRKTTIVAVARKLLVALWKYVTAGIVIEGAVMKTKTA

SEQ ID NO: 114945 - protein, 451 aa, unidentified
MGRKKKIKLEIVNPNAAGIDVGSRSHFVSIGQSLEEVKEFGVYDKDLKKLSTWLLENNIDTVAIESTGDYWQNLHAQLIKDEIEVVLVNGKFTKNIKGKKTDVLDCMWIQKMHALGLLSGSFLPDDITMQLRTFCRQRLNMLRWSAQASSKMQKYLKFLNFRLDVVVNDICGLTGLKIIAAICGGNLDPKELAKLRHYNCRKSEEEIEKALHGNNRKEYLFGLRQEFDAYQFFKQKIKECEEEIKDFLENYFLSQEFPIDDMPSKKPYKRLNKNAPKNIDLNVASYQYFGGVDLMAIEGVSHSTLLTLMSEIGPDGIKKFESAKQFASWLRLAPNNKISGGKTLSRRTPRGSGRLKIALRNAANAIGNLREGQLAKFFKRIAYKKGRQIAITATARKLAIIIWKMITNKEEYKPTESHMFLDEKRKLGIVKRMKKKIANLGITYEDLGLTT

SEQ ID NO: 114946 - protein, 386 aa, unidentified
MPQLNDLSRSLVILEQDATLIAVIEMGQSSWLVAGIVPGVERSPLKKLAVDESALLKLLNRWREEAEKAGHRIERIAIAFEAGRDGFWLARWLRARGIEAHVIHASSVAVSREHRRAKTDRLDTELLKRAFLGWLRGERDHCKMVAIPTLAQEDAKRPNRERESLVGEQSRIVNRMKAALARLGIRGFNPKLKKAAERLDGLRTPEGEPIPPNTLAELKHDMERRRLVRSQIRDIEGTRLERLKQAPGDGPHVMVRLLARVIGVGVETADMLVQEVLSRNLRDRRAVARYGGLTGSPDESGKKRREKGLARSGNARVRRGMIQLAWRFLMFQKDSALAHWFYARTKNAPQTRKTMIVALARKLLIALWRLAREGAIPEGIVLRPAL

SEQ ID NO: 114947 - protein, 355 aa, unidentified
MERYIGLDVHAASCTVAIVSAAGKRLRDYPVETNGAALVEAIGSVAGRRHLIFEEGTQSAWLYETLVRHVDEIVVTGVARSRGPKDDRRDAYALAEKLRIGAVDQPVFKAPSQFTKLRELARAHGMLVRDVVRVQVRIKFVYRSRAVATPGTAVYSAAHRDELLARLPEASLSAIAKLYTHYDFLLELKKEAEKELIVESHKHRIARVLETAPGLGPIRVARMLPVVVTPHRFRTKRQFWSYCGLGIVMRSSSDWVQNEAKQWQRVQVAQTRGLSKQHNHTLKEVFKGAATTVIQQGSRSPIYTDYERLLESGTKPNLAKVTLARKLAAIVLRMWKNEEVYRPDSQSSTGAARAK

SEQ ID NO: 114948 - protein, 342 aa, unidentified
MSELYAGRQVVGMDLHRRRSVIVRMTESGERLETVRILNDRDQLAEVMARAGECPEVVLEATYGWYWAADALAEVGASVHLAHPLGVKAFSYRRVKNDERDAADLADLLRMGRLPEAWIAPPATRELRELVRHRAKLVALRSKVKCQVHAVLAACGVQVPMSDLFGLGGQQLLQRVELPPAFRARIGSTTRVLECLDFEVEVFTKLVTSRLRGHRGYTAIQVIPGVGAILGAVFVAEIGDVHRFPGPSQLSSWAGLTPQHHESDTKVRRGRITKQGSKLVRWAAVEAVQTISKHTRLGQIRDQVGSRRGRNIGVVAAARELLTLVYYGLRDEHIRCLDRTSA

SEQ ID NO: 114949 - protein, 374 aa, unidentified
MENIITYVAMDTHKKQHKIALHYPGQEEIVEFTINNTIRDIKKMVNKITRKAPGKVEFCYEAGVCGFTLKRRIEDMGCKCIVIAPSLVPTKPGERVKTDRRDAKKLLMLFKAGLLTEVQAPDEQAEAARELTRLRETARDNLKRIRHQILKFLTRHGYVYTEGRHWTQKHINWIRTVKFTEPMLTKVFENYFNELIYCIGRLENLDREVEQLACSDEYKEVVGLLCCFHGISTLTATTVMTEIFEFGRFESPRHLMSYLGLTPSENSSGEKQKKGAITKAGNKRVRRLLNETAWHYRHRYVPSAVLKKRRKDQPQWAVEIADAAGRRLSKRHRYLINNGKMPCKANIAVARELAGFIWFTVTQYQARKNAKGVA

SEQ ID NO: 114950 - protein, 355 aa, unidentified
MNQQNNTTISFKGQHFFTGLDVHRKNWKVNIRINKTTIKRYTMDPSPEQLAKFLKTHYPDGIYHSVYEAGFCGYWIHRRLLELGIDNIVVNAADIPTSHKEKDRRDDKIDSAKLARELENGSLKGIYIPTPRQQSLRSISRLRYQNRNHTTRIKNRIKMFLHLHGIKIPEDFNNSYWSSVFIKWLKSLEFEYPFDSQYLSQYIQALEYQRCMMKDVLLEMRDHCKQNNILKCIRSVTGLGIISAFTIYAELIDMKRFKDLDHLASYVGLVPSKDGSGDREGVKGLTPRYSRYVRYLLIECAWRAVGADPALTQVYATLTMKMSKQKAIIKIAKKMLNRIRYVWLNERKYITAIVK

SEQ ID NO: 114951 - protein, 372 aa, unidentified
MDHHTEAFVGIDTPKSRNAIAIADGGRGGEVRYLGEFLATEAAIRKLVAKLAAKYRHLTFCYEAGPTGYGLYRLLKSLGHECLVVAPSLVPKRAGDRVKTNRRDAVSLAKLLRAGELTAVWVPDERHEAMRDLSRARQAAKKDLQGKRQQISSLMLRLGRIYPGKTTWGPAHMRWLMEQKLEHREQRIAFEELLEGIRQESERVERLENAIREAVPEWSLAEAVVAMQAVRGIDLIAAVGVLAEIGDLSRFQNPRDLMGYLGLVPSENSTGDKVKRGGITKAGNGRARRILVEAAWSYRYPPRVSRDKQPKVEAAPRHVREIAWKAQTRLCGRFRSLERKGKRRTVIATAIARELSAFIWAINRELMAHRQA

SEQ ID NO: 114952 - protein, 326 aa, unidentified
MTLSHLTDNTFVGIDVGGAGLDVAWHRGDSAHYANRPDAIATLVERLRTGPEVTRIVLEPTGGYEKPLVKALRQAQLPVEVIHTTRFNAYRALVGVKAKSDTSDARLLASYAAAPDEIRGRKAGHVELPEDAIREALSELAGRRDQLKHMIHAETCRLGTVRLTELRQAITAHLEALRAEDKQVHRMMLELVRQRIDLRRDQRLLKTIKGIGVKSALGLLASVPELGRIDNKAAAALIGVAPFVRKSGTMSAPARIHGGRAAVRSILYMAAVTASRHNPVLRPFYERLIANGKPPKLALIAVLRRLVVFANAVLRSGQPWRGASAT

SEQ ID NO: 114953 - protein, 411 aa, unidentified
MDKVYDKCCGIDLHKKLIVACFKQGNRQEIRDFGATTRELLEMADWLKEGGCEMVAMESTASYWKPLYNILETCGLKAMVVNAQHMKAVPGRKTDVKDAEWIADLLQHGLLTASYIPDKDQRELRELVRYRKSLVGERARELNRLQKMLEGANIKISGTIRDINGKSARNILEHLLSGRQIDSAEYDILYEKKVIAHNLKATKEQIIDDLNGVMSALQKKMIRIILNHLDELNAHIRELDDDIDNFMKPEEKEAAKVIQDIPGIGNTSAQAIISVIGADMSRFPTDAHIASWAGLCPGNNKSANKRKSGKTRKGNGLLRDTLIVCAHSAVKNKSSYFHAQFARISAHRGSKRAYVAVAHSMLVAIYHILKEGVVFKDLGADYYNQFNRERKINAYLKKLKALGWEVPVVAA

SEQ ID NO: 114954 - protein, 356 aa, unidentified
MQQVTTVVAARSGMSTGLTLGLDLGDRTSHFALLDVEGQVVERGTVATTREALRQRFAQLPSSRVVLEVSTHSPWVSALLQELHHAVIVANARAVKAVSQNPRKSDRIDAELLARLARVDPALLHPLAHRGETAQRDLAVLRARDSLVRARSRLINSARGLVKAAGARLPMCGADAFHRRVVEAVPAELRPALEPLLEVCAALTQQLRAYDRQVEAMLLRYPETQQLRQLRGVGPLTSLAFVLTIDDPQRFTRSRMVGPYLGLVPRRRQSGDRDPELHITKTGDGFVRKLLVECAQYMLGPFGEDCDLRRWGLRLAGEGSTARKRRAVVAVARKLATLLHRLWVTGEVYEPLRQAA

SEQ ID NO: 114955 - protein, 378 aa, unidentified
MATPQAVLHGEDTATVGELYMSLELGDRSWKLTISDGRRGPSRYSVEAGDTAAVLDCVAKARARCGVSAEARVHSCYEAGRDGWWLHRWLLEHGIDYIVVDSASIEVNRRARRAKTDRLDGEKLLAMLLRHHGGERVWSVLHEPTPEDEDARRAHRELERLMHERTAHTNRIGSLLVLHNLRPRIIIGGRDWAGWWDAHGLQVPPELRAELERESARLALVKQQIKALEAARRQSLEDGKQPMVAQLARLRAIGPKGAWVLVKELFGWRRFANRRELAGCLGLAPTPYDSGASQVEQGISKAGNKRARSLLVELAWGWLRLQPASELTQWFYRRFAAGGTRMRRIGIVALARRLAIALWRYLQHGEIPAGAVLKPTAA

SEQ ID NO: 114956 - protein, 404 aa, unidentified
MYNAVGIDVSKGKSTVAVLQPGGTVIRKPFDVSHTSQSLHELTDYLGSLDGSTKIVMECTGRYHEPVVKALSQAGLFISVVNPHLIKNFGNNSLRKVKSDPADAKKIARYTLDNWAELRQYSSMDHTRTQLKTLNSQFSFFMKQKVAAKANLIALLDNTYPGVNKLFDSPVREDGSEKWVDYAYSFWHVDCVRRIGLKAFTERYRAFCKKHHYVFQTDKPEKLFHASKELVAVFPKEKTYKLLIQQSIQQINLASEHVERLRKEMDELASTLPEYSTVMSIYGVGKTYGPQLIAEIGDVSRFTHREALTAFAGVDPGVDESGQHKSKSNRASKVGSARLRKTLFQIMTTLLQNAPQDDPVYRFLDKKRSQGKPYYVYMTAGANKFLRIYYGKVKECLRNLEQAE

SEQ ID NO: 114957 - protein, 458 aa, unidentified
MYRELQPLRQALRAELEGTLPPAGPGIEPQHLLQSYLDRLTMSVGCDVADQTFALFAVNAAGEELGHRLDVANNPRGFKRAWEWLEQLRCQHHLRITLVAMETSGIYYWAWWDFLAGRPNLARVLYNPRTTEHMTAVLSKRVRNELVDAYALAEQVRLGSTPEVLLTDDADLLAARICSRAARDLAQHINDRKNQLRSLLRAYNPALCQVFPKAQLHHRAVYALLQHYLLPDEFVAAGPQPIAAILHDHCRSAFGLSEAQQLVALCRQTLTRPIGREVLHQRVCQLTQDIQNAQQHKQQYLKTGYRLIESRPETPLLRTVYGAGISNTLALVSEVGDIHRFPDGEHLASFLGLTTSKHISGTTLFQSKRITKQGSPNARYAAVNLATHLSQRVPKYQHMYQRIKHRKPPRQGHFIALVAIARDFVSNVLFDMWRFQRPFFMEVDDYRAYRRAHPRSQH

SEQ ID NO: 114958 - protein, 404 aa, unidentified
MKTITIGIDWGSENHALCVLRDDGKVLDRFEAPHTRAGLAQALKRMSKHGPAETLPIAVERPNGLLVDVLVDAGHPVVPIHPNVVKASRPRYAAVNRKSDPGDAYLLADLLRTDGHRFQPLGELSDEVRALRALVRGRDDLVAERVALANQLRANLETFWPGAVAIFADIDSPIGLAFIRRYPTPDSAAHLGPKRLARFLARHRYSGRRSPEVLLERLRAAPDGKAGTVEVEARRHVVLALVAALESIVASIRTLTSEIGYAVAQLPQGQVVMSFPRAGKVNAAQIVAELGDDPTRFPTEAALAAQAGVAPVTYASGKRRGVGFRWAANKRLRNAITTWANNSRRASPWAQDIYLRARRRGCDHPHATRILARAWIRVLWRCWRDGTLYDQARHGAAHAFSQAA

SEQ ID NO: 114959 - protein, 484 aa, unidentified
MAKRKRSTFERINLERMNRRQRRELRQRLEKSDPGLEVVHPNAAGIDVGNQSHFVAVPGDRDAQSVREFGCWTSDLVKMAKWLKGCGIETVLVQATGVYWIALKDIVEQQGIEVVVANAQHTKNLPGRKSDVQECQWLMKLHTYGLVRGSFQLAEDMQGVRAMWRLRGRHVEEASRAVQHMQKALTQMNVQLANVLSDISGKSGQAIVGAILAGERDPGKLAELCDRRVQASAMEVAESLRGNWRDEMLFELGQARESYQFALQQIQSCDRELESYLKVLPTRQLEIALPRPEPSPTTAVRARKAPRQQGHTPDISGLRDELVRICGVDLTTIDGISVITTQTILAEIGTDMSRFPSEQAFVSWLGLTPSRDVSGGKLVRAVRRKVSSRAAQALRMAATTLRCSNSYLGARYRHLQKQLPSKASAVKAMARYLGVLVYRLLTKGQAWVDRGAARFEQKRKALNLASLQARALASGYQLVPVTAV

SEQ ID NO: 114960 - protein, 315 aa, unidentified
MDEQRPVFAGIDVSKDRLDIHLRPSNEAFHVSRDGKGLDDLVSRLKKLLVALVVLEATGGFEATVAAALAGIGLPLCVVNPRQIRDFARAMGRLAKTDTLDAEVIALFAERIRPEVRPLPEPERNHLAEIVGRRRQIIEMIGMETNRGRQTVDKHLARRLACHIAFLQKELDAIDHDIGEAIKHSPAWREAEALLKSVPGIGDVTARTLLAELPELGTVSRHQVAALVGVAPINRDSGLMRGRRAIAGGRTSVRAVLYMAALTAIRRRSPFRAFYDQLTARGRPKKVALVAVMRKLLTILNAILRDRTPWRHLNA

SEQ ID NO: 114961 - protein, 322 aa, unidentified
MAQDDLVVVGIDVAKDKVDACIRAFALRQVFPSAAQGHRKLIAWLRKHKVTKAVMEASGGYERDWAKVLRQAGIEVRIVDPKRVRSFALSAGRLAKNDAIDAEMIAWFAETFSEAPSQRHDAAHEELLALVKARKALLDLKTRLQSQNEHAAPGPVQKAHARVVKSLATEIAKLEAAISAKIKATPDFAERTEIIESVPGFAETTSANLIAGMPELGQVSNKIAAALLGAAPYDDDSGHRRGERHIKGGRRWVRNAIYMPCLGAATQNNPVLKAFYHRLIAKGKPPKVALVACMRKLIIILNSLIARRQKWDPSRYPHSERA

SEQ ID NO: 114962 - protein, 366 aa, unidentified
MPGVTSAAGPIHLGMDTSKNTIVVGVLMPGEEVPVIDRVWNEEGSVRHLIGRFGDPAALRCCYEAGPCGFELHRLLASMGVACDVVAPSLIPRRAGERVKTDKRDASRLARLHRAGELTAIRVPSPAEEAVRDLVRARAALLADRKRAQQRITAMLLRHGRVWRSGSYWTQAHEQWIAAQRFGEPALGAALAHYRAALDTRRAELDAVEAELAAWASREPLAAAVARLGCYRGIAGLTGLVLAAEVVDWRRFGSARAFMGFTGLVPAEYSSGDKTRRGSITKAGSGPARTALIEAAWTYQHKPAIGVALRRRQRDASPDTLARSWKAQRRLHGKYKAMTARGKPAGMAVTAVARELAGFVWAEMTS

SEQ ID NO: 114963 - protein, 402 aa, unidentified
MNAVGIDVSKGKSMVAIMRPFGEIVSAPFEIKHTASDINSLVELINSVEGESRIVMEHTGRYYEVLAHQLSKANLFVSAINPKLIKDFDNDSLRKVKSDKADAVKIARYALDKWQNLKQYNVMDELRNQLKTMNRQFGFYMKHKTAMKNNLIGILDQTYPGVNTYFDSPARSDGSQKWVDFASTYWHVDCVRKMSLNAFIDHYQNWCKRKKYNFSQSKAEEIYGKAKELVPVLPKDAITKLIIKQAVDQLNSASTTVESLRTLMNETASKLPEYPVVMAMKGVGTSLGPQLMAEIGNVSRFTHKSAITAFAGVDPGVNESGTYEQKSVPTSKRGSADLRKTLFQVMDVLIKTHPQDDPVYQFLDKKRAQGKPYYVYMTAGANKFLRIYYGRVKEYLSSLPES

SEQ ID NO: 114964 - protein, 351 aa, unidentified
MPRTATVHAVTAIGIDMGKNTLHMVGLDTRGTIVLREKVSRGRITSRLANLPPCLIGIEAGMATHYVARELAVLGHDVKQVPPAYSKPFRQGQKNDFRDAFAVAEAVQRPTTRFVPAKTNEQLDLQALHRVRSRLVSERTAVINQIRGFLLERGIIVRQGLRFLRQALPDILAKRTDVLSPRMVRIIADLASDWRQLDERIEPVTDEIETLAKSDSSCRRVMTVPGIGPIISSAMVAAIGSGAAFARGRDFSAWIGLVPKQMSTGDRTILGRISKRGNGYLRTLFMQAARVILLRPASWPKHGFGVWLARAAQRLHPNVLAAALANKLARIAWTVLAQERSYEARVTKAAA

SEQ ID NO: 114965 - protein, 385 aa, unidentified
MKRATRRGPGPSHLLMTPDHAGNVVGVDPHKRTLTATVADARGGVLASAHFRVSGEGHRELEAWALQFGQIARWGIEGSASWGRHTAVFLIDRGHDVRDVCANRTPRSDRARQRGKSDTLDSERIAREVLAHPLLPKAFKRAGQEQGPDEQRQLLALWHNRRRSILTSRQHLVNEAEYLLCELPLELSEQLPDTKAVKPRLAALARRNRRRRYDAPTKLRLQMLDGYRAQIKALDLEEKQVVAQLDALVGRSGSTLGDLSGLSTRSVAELLVEVGDPRRFTEGGFARFNGSAPLPASTAEGPGEPVRHRYNPGGNRRVNAILHRMAVTQLSREPRAQRIYANARAGGHTKKEARRVLKRHLSNVIYRRMIRDLHAQLPDQSLLAA

SEQ ID NO: 114966 - protein, 363 aa, unidentified
MRTVHYIAMDTHSHTTDICMKTRANAPGRKWHVETTIPALRSVIESIKHPRHLTFEEGPLASWLYRNLKAEADKVVVCDPRKNAWISKGGDKDDPIDCDKLADLLAGDFLKPVHQTEDLGREVFKQLVSRYHERVGRRVSESNKIVGWLRRWGVVVTATSFKEKADRGELLGRLPSEAELSPVRAGLEQMFLGYDQVRRQEDRLRSELVKLGKNEEFVVRLEELPGISWVRASTFFVYVDTPWRFATKQALWKYMGIGLTHQTSGAGPQSLRVERFVNRRLKSMILGAAKTIIEANKENDPFALQHRNWIKSGISPRNARRNVARSLSGVAWGMWKSGGVYDPARVGVKASEQVVSCGKQSDR

SEQ ID NO: 114967 - protein, 482 aa, unidentified
MKKSSIYPNRSQELLTLFEKAGNPSKLMCVPIDYAKKDHLVMFCNGNGEVIRKPFSVKNSVDGVKYLVDQVNRSCRHRHIQYDHVFFGGEDVNSYAENFANSIRANGWLVANVNAHDAKKQRENLQASTDRLDLMGIATMLLNRRANCCPAQTGVYRNLRTLVRHRKKLVKMKTEVRNRIHTIVDRLFPGFLNEKKSGIIPFSNSSLYLMQKRFSAPQIRRRHRSALIRNLEKRGTKKADQVAAKLQGYASQVLTTPDEYTATLQISLASHVNHYRCLFDGAQQLVNEMAQMLAQTQGAFLTSIKGIGIVLAAGVTAEIGDPLAQRSTDQLASYAGIVPKVKQTGGSQGASITSHVSKRSNHVLKDFVVQSAFHIGRYGPKDLQDDFSRREAAGQHADFGIARRFVRMAMCMMRTSQVYLPPEMRSTHIKPERRADYYLAMWPYLRDKWSKANALKMSFDKNNPLGQWRNIVQELYGVTLKM

SEQ ID NO: 114968 - protein, 396 aa, unidentified
MRTIGIDIASEVHVAAGVDDEDQIVLKSTRFDESGEGHEKLVALLGSPEQTLVVLEATGHYWQNVFATLVAGGFAVAVVNPLAVRRFAESTLARAKTDAIDALLLARFGRAHRPKAATLPDPELEELRERVRLRDRWVQDLGDRVRQLHRFVDLGFPEFTRHVKDLSSGLATVLLARCPTAAAFCNVKPSTLGKLKYDGRHSVPEDLAAALIAAAKKSCGKHHGEAYQLGVRTACEDIDVLRRRIKDIDRDIGKRVDDLELGQLLQTIDGIGPTTAARMLAEFGDPALYRSAHALAAHIGLVPRVNHSGKSTPARGGLSDLGDRKLRAKLWMPTLTAVVRNPWLKAFYDRLIAAGKLPKVALVAAMRKLVTAIYSVAKNRKPFVPRLPATPQQNPC

SEQ ID NO: 114969 - protein, 346 aa, unidentified
MEISRVGVDLAKNVFQLHGADSKGKTVWKRQLSRDKWLKVIFASVKPGTVIGMEACTGAHHWSRILISKGYEVTIIPPQFVKPFVKSNKNDANDAQAICEAMARPNMHSVKVKTIEQQDMQAIHRVRNEIKNHRIAKANQIRGLVAEYGLVAPKELSSLRRAIPEWLEDASNGLTLFFRQLLQGLYEDLYSMDKRMAELDKQITVIAQQDPIAKRLQQLRGIGPLIATALVATMGDGKQYRKGRDMAAAIGLTPKQHSSGGKDRLLGISKRGDAYLRCLLVHGARSAMRTAKDKDDRLSRWITNLQDRRHANVAACAMANKMVRMAWAMMTKGVDYDPDFHSITAN

SEQ ID NO: 114970 - protein, 325 aa, unidentified
MDNKKMYCGIDVSSETLDVCFQNEAGEKQHLQVSNNSKGFNEILKICGKDLHFVMESTGVYHMGLMFFLHEKNCVYSVVNALQIRRYIQMHLERNKSDKKDARRILEYGIDRNPSPSEMPDSKYFECRTMNNAIHDLTKDITKLSNQIHALKRSGIMAVEVIKCYEKMIKTMRLEMAKLEEKLSAKLKEWQPELLEQVQSVKGIGKRAAAELIIYTKSFKGMENYKQLISYSGLSPIEYSSGSSIRGRSKICKQGGKQIRHILYMCALNAKTTNRACKELFDRLVAKGKNKKSAVIAVCNKLLKQVFGCVKNATLYQDDYAKNIA

SEQ ID NO: 114971 - protein, 362 aa, unidentified
MKKRSKAMWEMEAGNDKPAMTMGLDLGDRYSRYCLLNEESEVVEEGRIQSTEAALRRHFEGEARQRIALECGWQSPWVSRLLKTLGHQVLVANPRKIPALTASVSKNDRNDAEALARFAAADPKLLSPVHHRSLKRQQDLNLIQARATLVHARTMIVNAVRGLVKSAGGRLPACSTESLPVRGQASIPPSLVTVATPLFKQIALLNEQIGSMDQQIEKLAVKYPEIAVLRTAPGVGPLVAATYVLTLDRPDAANRSAGAFLGLRPGQSQSGDSDPQRRISKAGDTYLRSLLVQSAQYILGRFGPDSALRRWGLKLASTGGKRGKKRAIVAVARKLAVLLHSMWRSRQRFQPFPQPATEAAVA

SEQ ID NO: 114972 - protein, 342 aa, unidentified
MTMIGIDPHKATHTAVAVDDDEHVIDEFTLEASNSQAERLCDWASGFTKREWAVESANGLGYLIARQLVAAGETVFDVPPVLASRVRLMGSGRSQKNDPNDARSIAIAALRSDRLGVVEPDDHVVVLRLLVKRHRDMARLRNKHCSRLHALLIELEAGGIGTKINARNASELLDWITVTDETTRCRILIAREVVDDITRIDQTLKASKKRIAEAVQASGTSVTDIVGVGPIGAATIIGYTKDITRFPTKGHYATYNATAPIEASSGGHTRHRLNLRGNRILNHAIHIAAVTQLRHDTIGRVYYQKKIAEGKTPKEAIRALKRRISDAIYKSLVADTATTTTI

SEQ ID NO: 114973 - protein, 456 aa, unidentified
MAKHQRKKSPAEQQLPAQLHAVNLHAAGIDVGAEAHWVAVPVEADPQPVRAFPAHTASLHALAAWLTLCGITTVALESTGVYWIPLFELLETQGFEVILVDPGTMPKNGRPKTDVHDCQWLQRLHTLGLLSAAFRPDDPVVVLRSYLRLRLTLLADAARHIQHMQKALTQMNIKLQHVVSDITGVTGLRIIKAILNGERDPRRLATLRDQRCKEDETTIAQALHGTWREEPLFALHQAVAAYEFCHQQIQEGDAKIAAQLQTFEDRSKGESLPPKPRKRHRNRLSFETRPLLYRMTGVDLTKIEGIDETTALIVLGEIGLDMSRWPSEKQFTSWLGLCPRVRVSGGRVLSSRTRPTANRAAAALRLAAASLHHAKSALGAFFRRMKARLGTPKAITATAHKLARLIYAMLKHGTAYVAGSMAEYEQKYRQRVVHNLSRKARELGYERHPVLGGPPA

SEQ ID NO: 114974 - protein, 345 aa, unidentified
MDIIGLDLHKRESQLCLCDEDGTITERRIVTSRERFTAVLGSRPRATILLEASTESEWVARHLESLGHEVLVADPNYAPMYATRSRRTKTDRRDARTLMDACRTGAYRLAHRLSDPRRHVRAELAVRDALVRTRTRYVALAKTLVRRDGLRVASSESHLVAQRISALSLSPALAAELQLLFTVLAPLNEQIAAADGRITSLAATDPLVARLATAPAIGPVTASAVVATVDDITRFHSAHQFEAYLGPVPGERSSGEKRHVGPITKAGNCRVRWLLVEAAWRVLRPSRPRRPRSGLGRTPWRGGAGRRLRSWPSRGGSRGSSSPCGGTGCPMTPVGSAARGSRSRQ

SEQ ID NO: 114975 - protein, 354 aa, unidentified
MGMLEGQVEFVIGVDTHRDTHTAAVCDPAGALLVHATVPTTTVGHRQLLGLAQRHASGRRVWAVEGTGSFGAGLTSLLVDHGELVVEVDRPKRPARRNGAKSDALDATRAAREVLAREHLAQPRARGDREAMRVLLATRRCVVDARTKAINQLKALIVGAPPPLRERLRHRCTAAQVRCCSRLRIHANHSIEHRVTVQAMRATARRIQFLEAEAADHQAELDRLVAKIAPFLLSELGVGALTAAQLLVSWSHPGRVRSEAAFAMLAGVAPLEASSGRVTRHRLNRAGDRQLNRALHVIALTRLRQDPTTSRYVARRRAEGKGDKEIRRCLKRILARRLFRLLQRELTQLPAPPA

SEQ ID NO: 114976 - protein, 315 aa, unidentified
MTTRTETYVGIDVSKDRLDLAVLEGRRIEQYSNTAGGIKELVEEMMELEPAIIVVEVTGGYERAVVNALFEAGLRVARVSGYRARQYARAKGLLAKTDPLDAMNLADYGKHVQPRLFEAKSEQGQCLSGKLARRRQLGEMLKAEKNRLRLAYGEIGPSIERVIEFLQGELKQLDEEIRAYVDNDAEWLKQEQLLRSVKAVGPITAVTLLAELPELGKLDNKQIASLVGLAPINQDSGKRSRYRKTGKGRPSVRSVLYMAVLTGIRYNPVIKKQYDGLVARGKVKKVALTACMRKLLTILNAMVRDQVPFRQTVMA

SEQ ID NO: 114977 - protein, 512 aa, unidentified
MPLVFRLKSHVNDCHAHAAKQADGRVRQGSMGPCTILLVEVTHVLGCLAGSAGGTQCSQHLERSRAPARSAVVHVQWGVAPRAPVQGRTRHHGESRVRKGGSVSESPYAFYVGVDWASETHQFTVLTPERHLEAERRIEHTGRALSEMADWLTALADGEPARIAVAIEVPRGPVVETLLERGFHVFAINPKQLDRFRDRHSPAGAKDDRRDGFVLADSLRTDRPAFRQVHVDDPLLIQLRELSRAEEELQTELRRLSNRLWEQLQRFYPQVLRLSPAVDEPWIWALLQLAPTPVAARALRRATLARLLARHRIRRVTAETVLAELHSPALRVAPGTTEAAREHIALLLPRLQLLHEQRGRCARRIEQLLDALEGSDAEHRDVTVLRSLPGVGRVIAATMLAEAARPLAERDYHAVRTQGGVAPITRQSGKSVLVSMRYACNHRLRNALYHWGRVSAQHDPSTRRHYRALRQRGHGHARAIRGVIDRLLVVLMAMLRTGTTYDPARRRVPAAA

SEQ ID NO: 114978 - protein, 339 aa, unidentified
MGLYAAFDLHANNSQLGIVNDAGKRVHRKKLLNEPEAILRDLEQYRTEIVGIAVESTYNWYWLVDLLQAAGYRMHLANPSAIQQYSGLKHVDDRHDAFWLAEMLRLGILPEGHICPKEDRAVRDLLRKRGYLVRLRTSLIISLQNTITRTCGIQVDVNDVKILKEDRISPLLKDNEDLELSGSVSKESIDFLTKQIRKVEKTVEKRVALRAAYKNLLTMPGIGKILGLTIMLETGEIGRFAGVGNYASYCRKVNTKWLSNGKSKGKGNKKNGNKYLAWAFSEASELSRRFDAQARAYYERKLRQTNRMVAHAALAHKLARAAYFIMRDGVEFQPRRIFG

SEQ ID NO: 114979 - protein, 375 aa, unidentified
MKEKVRFLGLDVHAETIAVAVAEQDGEVRSLGTIANREESIRKLVKKLGPVEQLRACYEAGPTGYVLYWQLTQLGVECAVVAPTLVPVKVGDRVKTDRRDAAKLARSHRSDDLTAVWVPDEGSEALRDLVRAREAAKQDQLRARHRLSKFLLRTGRRPAMGLKAWTERYLAWVQQIQFSQPAQEFTLLDYLHEVQHMDERVQRLEQAIAEAVKLASSQVQEVIRGLQALRGVAHLSAVTIAAELGNISRFESARKLMGYSGAVPSEDSSGKRQRRGNITKTGNAHLRRIAVESAWSYRFRPAIGPRLRQRQEGVPEEIKEIAWKAQIRLHKRYLKLMAAGKDKQKIITAVGRELLGFVWAIGIKAETAGKLQMAA

SEQ ID NO: 114980 - protein, 374 aa, unidentified
MENNMTYAAMDTHKKQHRVALVYPNDEVIVEFSVKNTPAEIRKMVRKIKKNAPGEVKFCYEAGVCGFTLQRRIEALGCKCIVIAPSLTPRKPGEKKKTDRRDAKKLLGLFMANLLTEVFPPNEEQEAARELTRCRGAAQENLKRIRHQLQKMLVRHGYVFNEGQHWTQKHYRWLGAVEFSQPLLQDVFDCYLTEMRHCLQRVQTLDKELEKLAQSKDYKEAVGILRCFYGIETLTAISIIAEVFDFARFASARDLMSYLGLTPSEYSSGEKEHKGRITKTGNKRARRLLTEAAWHHRHAYVVSKALNKRREGQPQWAIDIADRAGVRLRRRYRRLVNKGKMPCKATTAVARELAGFIWAALVEYEARKQKIKAA

SEQ ID NO: 114981 - protein, 364 aa, unidentified
MKYVGIDLHKQIIVLCVVNQERKVLERKTFRCEDAERIRDYFAKVGDFEAVVEATASYEWFADLIVPLAKRFVLAHPGKLRVIAESTRKSDKLDAQVLAEFLALNMIPPAYRPTARQREHRVLVRHRTQVAQQCSRVKCQIRRLLSNYNADRRDVFTAAATEYLASLKLSSADRFVLAQYQADLLHKKKGLESAKKELRAFAAKGSAKDREIREVLRSMPGVGEVVSDVVMAEIADVSRFSSAKQVAAYAGLVPGRRESAGKGKDLGITKEGSRILRWALVESAWQSIRYSLRWEKIYQRLKKSRGAKKAIIAVARRLLCVLVSLWKSGKPYAFAQHERPKSEPTAAEMAEMAESELEKELEFV

SEQ ID NO: 114982 - protein, 341 aa, unidentified
MAMRKREDLVFPNAAAIDVGASSHWAAAPPHSTDAPVREVGAMTDDLNGLADWLLACGVDVVALESTGVYWIPVYEVLEQRGLKVWLVDARQVKYVPGRKSDVQDCQWLQKLMSYGLLRAAFRPAGEVCVIRAVARQREVLLTSQASWVQRMQKALVQMNIQLTEVISDVMGQTGQAIIRDIVAGQREPKLLAKHRHRRIKASEQDIVRALTGNWREEHLFVLKQALAMYDDIAKHLAECDAKLHALLGERSAASVELGKAPRAGSKARAQFDVRQQLANWAGADLTRINGLGLDSVMTILSELGPDLSRFANVKHFCSWLGLCPATKISGGKVLSARTKR

SEQ ID NO: 114983 - protein, 371 aa, unidentified
MKEFSKYVGLDVHKETIAVSVAEAQGGEVRYVGEIANTEEALEKLVKQLRKGGANISFCYEAGPCGYGIHRQLTDLGWDCQVVAPSLIPKKAGDRVKTDRRDSLMLARLHRAGELTAVWVPDGAQEALRDLTRAREDMKHLQRQAKQRLLAFLLRHGRCYGGKSNWTLAHYCWMEEVKFEHPVQQIVFQEYIDTVKAMTKRIDTLDKQVGSAAGESVFWPVIEGLMALRGVNLLTATTIVAEIGDLRRFASAPQLMAYLGVVPSEHSSGGAKSRGGITKTGNGHVRRVLVEAAWTYRHPARKTTVLQKRAEQTSEAVQEIAWKAQMRLCGRYRRFEARGKLKVQACTAIARELAGFIWAIGQALPQPTANA

SEQ ID NO: 114984 - protein, 467 aa, unidentified
MPRVHPHPQRRGPAVTLPRELQQVNLNAAGVDIGAESHYVAVPEGRDADGQDVRAFGAFTADLAAVADWLTRGGVETVAMESTGVYWIPLFELLTARGFEVLLVDPRRLKYVPGRKTDVLDCQWIQQLHTFGLLAGAFRPTDQICVLRSYLRQRAMLVTYAAHHIQHVQKALEQMNLKLAHVVSDIAGLTGLAIIRAILAGERDPRVLAQLRDRRCKADAATLARALEGTWRPEHLFALRQAVELLDFYRGQIAACDAEIEAQLGRFEDKNGGQPLSAAARGRKSGRTALSFDARPPLQRLTGVDLTRIEGIDAATALKVVAEIGLDMTRWPTEKHFASWLGLAPGNKVSGGKRLSGRTKPSASRAAAALRLAASTLHHSRSALGAFYRRLKGRLGAPKAITATAHKLARLIYSMLRFGTEYVDRGQDYYERRYQSRVVSQLMRRAQELGYTLTKTADFSSPAGSPA

SEQ ID NO: 114985 - protein, 344 aa, unidentified
MEYISFDVHRKYTWATVEDQAAQVVRERRIDHRHGALRRFLSGCEPGLSVAVETVGNWYWVVDEIEEGGFEPKLVNARLAKLMIGQVNKTDKLDNRGLNRLQRAGTLPTVWIPPAAVRDARELPRTRMMLVGQRTQLKNRVHSTLAKYGLNLPEVSDLFGRAGRQALSRLMKQLPPNTVQATQAVLGHLEGLEQAITAVQQRISEVFQDSAENKLLRSLPGVGPILAVVIATEIGACARFGSAERFASYAGTVPRIHASGGKSYAGRVRMDVNAYLKWAFVEAANAALLQGDRYGHVRRLYDRIRARRGHGKAVVAVARHLAEAAYWVLTKQEPYQEPRRSTRG

SEQ ID NO: 114986 - protein, 343 aa, unidentified
MQPKQYVGLDVHKKTIYGHVMDKDGRTIFARNFKTEPHDMDMFLLNVRKDDSMIAIESCSCWQYAYDYLKDKGYHNLVLAHPPRIQGLKKLRKHTDRDDAQLLADLLRTNMLPQSYAAPMDIRIKRQITRHRTSLTELRTEVENKVHAILRRHGMEVPWTDAFCKSALAYLRSVDMPSCDRLELDHYCDVIEMLTEKREEAQERIKELAGDDPAIQIAMSMPGMAHFNATSFVAEVGDIRRFDKADKLASYFGLAPSIYQSGETCRTGHITKRGTSHGRWVMIQAANIAVQHDKLLGNMYKRLAPQKGHQKAITAVARRMVTFLYVMLTNHIKYHALQVHKAS

SEQ ID NO: 114987 - protein, 521 aa, unidentified
MPRSATPRSAKARKPFLLQKPNGQLVPRVQAVGPEHFGIVALDCAKARSRYLLADFYGRPLLEPTPLPHTRGDFQAAIDRLHRAMREHDLRDLVVAIERTGEYHRPVQRAFRQAGFDTRLVHPFTSKQYRQPADPDNKTDDTDLAAIFRATTHGFGLLEPTLPDDYLTLQLLRRHRRDLVNKQTRLYCQIREVLHAAMPGYAECFSHLWESPAPLVLARHTTSAEAVRQAGLAGLRQLATQANLRCRQDTFHKILAWAEQAPPGHHRPLDLRRILGALDDDRLAKTQQILELERDLAQLVVRLPYVLLLVIPGINVVTVADLAGELGPIAFYRVAGAITGRAGLMPARYQSDQVDHANGPLRRRGNRRLRAVLMQTADNLAQCNAYFRARADAWTRSGKDPRWARVKIAKIFSRLGFAMVAGQQLFPHACCQPRHYILSKLLEFHTEHRTPPELMRQDLEAVITQLPATARGAEAKPLQERLEELAHHRRGPQPLARIIPLVLARLGVTVVQSNTEESAGP

SEQ ID NO: 114988 - protein, 423 aa, unidentified
MKLTYPICCGIDVHKKFLVATIVTSRGLEPHYQKRRFSTFNGQILALKAWLLENNCRDVCMESTGKYWVPVFNLLEDSINVTIANPKWVRAVKGNKDDTKDSRWIADLFRMGTVRGSFIPCKAIRILREFTRYRYKLTCCKSSEKNRYQNVFTVCNIALDSVVSDMFGKSSTSILDYILASDTFDPAHCVSLLHRSMLGKADDIVASVEGYQMTDAQKIRARMVKEHYDYLVSHIEKMDAAIDELAKPYESAISLLCTIPGVDRKSAITIISEIGTDMDQFDSSKRLCCWAGLTPSNNESAGKKKSVRITRAGVYLKPMLVQMAHAAVKDKNNPYYRIKYEAIAKRRGKKRAIIAIARMILTATYNMFITGEVWNPCDLQQVDMPPEQREKELQKSLRKAAKLLVVHGIVSQDAVVFREPIAA

SEQ ID NO: 114989 - protein, 335 aa, unidentified
MSKVLAAAMSADYFLGCDVSKAKLDVALINANGQELWGTTIPNEAVAIATFLLTLSGAYPDATIVLVVESTGTYHLPFVETSHAIGMPCLVYNPLITKSGIKGSVRGQKTDRTDAVIIARMGLRGEGRLYSPEPYVATKHYARSCQKLSILSSSFSQYKSHITELLDGELTDDAQELLDGIQQAIKEARKQLYKDLAASAQGPLFTRLQTIPGIGPYVAASLIGEVQTMERFKTAHALTAYAGFDPRIRQSGRTLNSTGRLTKRGSTYLRRSAFIAANVARQHDPRFKALYDKKRGEGKPYTVATCVVARKLLSVVRAVWLSERDYDISRWPHDD

SEQ ID NO: 114990 - protein, 349 aa, unidentified
MTKTSHAGAIATIGIDIGKNTFHLIGLDAAGAIVLRQKLSRGQVGVRLANVTPCLIGMEACVGAHHLSRQLLALGHDARLMPARYVKPFLKGQKNDFRDAEAIAEAVQRPTMRFVRTKSIEQLDLQALHRVRARLVRHRTAVINQIRALLLERGIAVRQGYQHLRAALPDILGRESERLSPRMVHMIAELSSDWRQLDERLEAVTDEIETLARADEACQRLMSVPGIGPIIASAMVSAIGDGAAFAKGRDFAAWLGLVPRQISTGDRTILGRISKRGNSYLRTLFVRGARVILLRPANWPKHSFGPWLQAASRRLHRNVLAVALANKLARIAWSVLAEERPYQSRPLAA

SEQ ID NO: 114991 - protein, 320 aa, unidentified
MMAQNAAVVVGIDVSKAKVDACIRALKLRQAFPSTPEGRGKLVAWLRKHKVTKAVMEASGGYERDWAKALRQADIGVRIVDPKRVRNFALSAGRLAKNDPIDAEMIAWFAETFSEGPTQVYDAAREELQALVKARSALVNLRARLQCQSEHAAPGLVQKAQARVLKCLDNEIAKLEDAISAEVKSTPDLAERAEIIESVPGLGETSATNLVAGLPELGEVSDKIASALIGAAPYDDDSGKRRGQRNVKGGRRWVRNAIYMPCVGAARLNNPVLMAFYDRLIAKGKKPKVALVACMRKLIVILNTMLARRQKWDPSRYALR

SEQ ID NO: 114992 - protein, 290 aa, unidentified
MISWVGIDISKSNLVVWVQPQGEGFDLPNTSEGFVELIERLSQYEVDRVLLEATGGYECKVMAALQGADFKVLRINPRRARAFAVAMGKNAKTDPIDAAVLADFAEVLHASRDKIISPEREALRELIQLREQFVQQRDDNKRRLQQVQLPAVTEAIKGLVQYLQVQIKQLDKTIHQSMHELDAEKAERLISVKGIGTVATASLLVYLPELGALDRREVAALAGIAPYNDDSCNHSGKRQIYGGRARVRRALYMSCWVVIRHQPDFKARYDALRERGKSAKVALIACMGSY

SEQ ID NO: 114993 - protein, 373 aa, unidentified
MNYSTVYVGMDVHKESFSLCCYTNEKEEAEYPQKVDGHYSKVINYLEAMRFHYGDDATFICGYEAGCLGFTLYHQLSNHGIKCVILAPTTMPKPKGKKKIKTDKRDAALIARCLAHHDYSAVHIPTDKDEQIKEYIRMRADHKSDLKKTKQRILSFCLRHNYRYEDGTNYWTQKHLTWLRSLKPDGLYKEILEEYLLTFDNLTDKIERLDKRIDELASDEEYQEKVHSLTCFLGIKTQTALSVVAETGDFKRFASAQHYASYLGLVPGEDSSGEGQTRLGITKAGNSHLRTLLIEASQSFSRGQIGYKSKALKARQQGCSPAVIAYADKANERLRRRYYKLTLSKGKKMNVAKTAIARELACYIWGMMTENIA

SEQ ID NO: 114994 - protein, 348 aa, unidentified
MLHAGLDLSRRKLDVCLLSDAGEIVDEFAVPPDRDGLAGLVCRVGAAPAQAVIESMTGARYVHDRLEELGWDVRIADAAKVKGIGPLACKTDKIDARVLAVLSQRDLVPEIWLPSLEIRQERELARFRLHLVKHRSMLKHRVHATLISFGKPCPVTDLFGVAGRNMLTDLGVPEPWRSTVQASVACIDQLEVQIDACNRQLRAMRPDHRYVPTLMSAPGIGWVLAYTIAAEIGDIERFATADKLVSYTGLCPRVIQSGDKDRRGPLTKSGPKFLRWAMLEATMHALRHEAYSERYQQTKRRLGKQRGAKVAQIDIARRLTKSLWHMLTYEKPFSPQTAAGGAALRLAA

SEQ ID NO: 114995 - protein, 384 aa, unidentified
MTKKTTCKQQFTEKDGSLYLAFELSSSTWKLGFCIGLGERVHERKVAAGQTEKLLAEISSAKRRFGLSAASKVKSCYEAGRDGFWLHRYLTSQGIENVIVDSSSIEVNRRARRAKTDRLDVKKLVSMLIRHLGGERKVWSVVRVPSVEEEDHRQLHRELKELRKDRTRAINRVRGLLANQGVRFQMRRGASAEWVEGIRLWNSAGLGIGLKRRLRREWEHLQWIGKQILELEGERRKALREKDEKAGEHIEKIKRLAQLRAIGIGGAWVLVEEFFGWREFNNRRQVAGLAGLTGTPHDSGEAKREQGISKAGNRYVRGVMVELAWGWLRYQPRSELTRWYKRRFGNGSSRVRKIGIVAVARRLLIDLWRYVEFGVLPEGARMKV

SEQ ID NO: 114996 - protein, 343 aa, unidentified
MEYGAIDLHTKESEIRIVTADGAVVLHRRVATRREALMAVFNGRPRMRILLESGGESEWVAQHLEAMGHDVVVADPNYAPMYVQRTRRIKTDRRDVTALAEANRLGIYRAAHRVSAGQRAVRRQLQVRAQLVQMRTQAICLLRGQVRSEGLRLRGGRAERIVARYEALDVPAALRRVLQPAVDLLTALQPLIAAADTAAGEAAKADPVTMRLMTAPGVGPITALNFRATLDTVARFPGPGAVAAYLGLVPQEDSSGERQRKGSITKAGPAHVRAVLVQACWNIWRTPSGSATLHAWVRRLADRRGKKVAIVGLARRLARILFAMWRDDKDVHPGRVGALAVAA

SEQ ID NO: 114997 - protein, 389 aa, unidentified
MYVGIDVSKEKFDACGIGDEGKKLFSLSCSMNRDGFDKFVMQLTKMHAASLLVGMESTASYHIALFSYLTAKGYRVAIINPLLIANFAKLSLRKTKTDKKDAFTIAQFVLLRKETLVTGSPHLTELKDLSRRRERLVDEMTALKNDMKRILSVTFPELETITGIFTKSTLRLLGEFPSAHAIAKAGYDAVAAIVTSRSRGRKSSASVKVLMDTATASVGVASPAKDMILKQEASLLLALEGQAEEIMKLILDLSGEQIKRDAEILTSMQGIGDKTAFNFLIEMGGDIKVFEHDGKLIAAAGLDPTTYESGKYKGQSKISKRGNRHLRRVIWLMTTKVIIANPVFRTYYFKRRKEGLIYKKAVLATAHKLIRVMFSMLVNQKCFEPERRK

SEQ ID NO: 114998 - protein, 409 aa, unidentified
MLFVGIDWSDQALDFQMRDEQDEVRTEGQVKPSVEGLAELFAGLEVHGGPDQIAVILEATHAVWVQPLLDRGYRVYPVNPKLVDSYRESLSANGDKSDRIDRRVLAMYLRNHHKHLRALKPDDPKLIGLRIACQDRLRLMEEHTAKVNELGAVLKGHYPAVLGLFGGLDSDIALAFLEAFPTQDRMRALSEKKLRAWLKAQGYPQPYRIPEMVEHLTQPVFAVAEHLQAAKAPLIGFLARSLRLLNAEIRQRDQDIQDQFEDLEEAKWVRSLPGAGKVLGPAVLACVGRDKTRFADAGKARALFGTAPVTKQSGKFKAVGFRWGCWKFARRTFQLLAEKSLLTCTWAQAFYQQQRAKGHKHHQALRELAHKWVKIILALQRTGQPYDEDTFVNSQRKHRLTTLSVTTVS

SEQ ID NO: 114999 - protein, 340 aa, unidentified
MKYIGMDAHSKNSYFVVLSRSGKVIGREKVTTQEDAILEFVGSVTGPKKLAYEEGVMSQWLYILLKDEVDELIVCQPPKSQGAKNDWLDAAEIADLLRINRLKPVFHSDDVLMDLRVLISGYDDLLQEIIRSKNRYKALYRESGIPTKGEDLYEDHEMLLQLDTEQRQLVGSSLYEQIQLLELHKQKYVKQLDQNVQSYKPVKLLRGIPGIGTIRANHVVAVMVTPYRFARKGNLVAYSRLTKHGRMSDGKLYGRKRSLGQPILKDAFRGAALCSLSGDNAFRREYDKQRAAGKNDKEARNKIAKMVAATVLGVWKSGKPYDDNYWEVTQKSNQSCCRNM

SEQ ID NO: 115000 - protein, 428 aa, unidentified
MASSTDVTPVKTWVAIDVAKFTNVALMEFPDGKRKQFRFRHCAEDYDQLVSSLRSGSAPTRIAFEPTGDYHRSLGYRLVSEGFDVVLVSSVAGARMREAIFNSWDKNDPKDAQVILQLMKQGMTLRYCDPLILKTHDLQELSKTYHSIAIARKRLQHVLLTHYLPLYFPEMETFWTSTRNEWFIRFLIEFPTPASITSMTFAEFREAVWVSMGRRVHKEDKIAEIYRLATHSIGLPVALNSPAIETYRLQLTRYLELCQHRRALESKADELLSQGADYQHLRSVPGVGPIVALVILAEAGDLRRFTHHRQFLKYCGLDLAKNQSGVSRSREQLSKRGNARLRGALWQAALSAVRMRENAFRDKFQRYTATAPLDPDLRRKARVAVTAKMARIIYALIKHGQPYRHYLDAFTPSGSIPNKWAVEAFRTS

SEQ ID NO: 115001 - protein, 409 aa, unidentified
MTRTYVGVDSHKDSHTIAFLNCFHEKLGEITIGSAPSEFGKFIKRAKKYLQPNTTFAFAFEDVSAYGRAFVKYLVEKGYLVKHADASKVATERGQVLHKTDSYDAECCARVLINQFDKLPDANPQDKFWVITNLVTRRNAIVKMNVMVKNSLHGAIADSYPHYKKFFSAVIRDSALAFYEAFPSPYHLENVTTEQLSTFLHTASKGRLSSSKAEIILMHVDHDKVQKSEFQDVQDFNVRSLVRQVKSNLDELAFIDVEIEKLLTHFDYPLTSIKGINSLTAAKIIAEIGDIKRFKNAKALAKYAGVAPVTYSSGMTSLQMANARGNRKLNEIFFKIALQSVTPIGINNALLNPIFYTYYHKKISEGKTKNQAIKAVQRRLVNIIFNVMKHNRLYENPTMTYLPKDSAVA

SEQ ID NO: 115002 - protein, 376 aa, unidentified
MSQDSTLYVGLDVHKDSITVAYAMGLDEVELFGKIGTTHMEVDRLCKRLQSKARHVHVVYEAGPCGYGLNRRLVEKGFDCMVCAPSLIPRKPGDRVKTDRRDAFKLVRSLRAGDLSAVHVPTVEDEAFRDLARAWSSGRDDLKQARQRLKSFLLSHGVRYCGLANWGPAHRRWLSTLSFDSAWQQLAFNEHRRTIEDRLAQCDRLEAALHEAVVSWRFYPVVLALQAMRGIQFTSAVGLVSELGDLSRFEHPRQLMAWLGVTPSEHSSGSKRRQGSITKAGNSYARKLLVESAWSYQHPARVSKDIQSRQEGIPKPIIDRAWDAQLRLCGRYRRLVARGKSRQVAIIAVARELAAFIWDIGRMGMTLAVPQSEQPA

SEQ ID NO: 115003 - protein, 408 aa, unidentified
MTVMIGVDPHKGSHTAVAVDNGERSLAELRVQSGPKQLERLLKWAAAFPERTWAIENATGLGYLLAQQLVAAGERVLDVQPKLAARVRLLATESTNKNDPHDALSVAIAALRSKTPKEVGVEDHAAVMRLWSRRHRNLSSTRTQVACRLHAVLCELAPGGVPDEIYAEKAALLLADVEPDSAVAAARVELAEELLDDLRRVDRQLAESKKRLKQVVAASGTTTIGIFGVGPFVAATVVGVTGDIGRFPTRDRFAAFNGTAPIEVSSGGRKVWRLSRRGNRTLNHAIHMAAVTQLRFRHSPGRGYYDRKIAEGKTPKEALRALKRRISDALWAAMVADARRVAATAASTAKAGSGGQPGNDSGASAAGSHPETPALRPSHSRTRNKATTAQRSQRPATPRQPATARRTA

SEQ ID NO: 115004 - protein, 417 aa, unidentified
MNAPSDTEFAALIGIDWADRKHDVCLQAASSDKQELSVLPHRPESIAQWAEALGRRFSGRPIAVCLEIAKGPLVYALQRYPFFVLFPVNPTTLAKYREAFHVSGAKDDPVDAQLALDLLLTHPERLTRLQPQSAAMRILTELVEQRRTLIGDVTRLTNRISAALKQYFPQVLEWFEDKDTLVFCDFVTRWPTLKHAQRARKARLTAFFREHNVRYPHIVEQRIQAIASATALTCDRAVIEPNRLLVDALVQQLRVLLPAVERFDREIDALARTLPDYALFTSFPGAGAVFVPRLVAAFGERRERYGSAQEVQKYSGIAPVTERSGNKCWVHWRLQCPKFQRQTFVEFAGLSIPHCYWAKTYYQQQRARGSSRQAALRALAFKWIRIMYRCWQNRTPYDEAKYLTALKRRGSPLITGQ

SEQ ID NO: 115005 - protein, 346 aa, unidentified
MDHIAIDLGSRESQVCIRTPEGQIIEERRVSTRSLGKYLTKRPKSRVVLESCAEAFSVADAAMGAGHETVVVPATLAPSLGVGERGVKTDCRDARNLSEASCRMSKLPSIHVPAQASRNRKSICNFRETLVQTRTKLINSVRGWMRSEGLGVVRSGAPTSFPVRVRTHAAERSRTLPAYVEPVLVVIDKLTVEISAMDDQLEEAAESDATCRLLMTAPGIGPTVSMRYTAAIDQVTRFPNAHRLQSYLGLTPGERSSSQRKRRTGLTKAGPSKLRRVLIQAAWAARRYYKDDPVVMWSFEVEKRRGKQVAAAALARRLAGILYAMWRDEKPYDKAHQVTRATQATA

SEQ ID NO: 115006 - protein, 395 aa, unidentified
MDVLVDSCAGIDIHQKVMVACVLTSPSKGTRPKKFIESFASTTSGLLQMHDWLKSHLCTVIAMESTGVYWKPVWHILQDDFELILANPRMIKNVPGRKTDMKDAEWIAKLTRVGLVPPSFVPPEPIQDLRDLTRHRKHLTEDLTKEKNRAHKVLQHAGIKLTTYIRDIYGASGRNLLDAIVNGEVLTPEKVEKLVYTSLKKKVPDLIEALQGFVRKHHRLLLRIHLDKIDFITEQILTIEKAIHDALIPHEEAVVTLDEIPGINVTTASVILAEIGLDMSAFPSSKHLASWAGLAPGNHESAGKNYNARIRKGNAYLKKVLTQAALALSRSKDNRIKAFFWRIAKYKGPKKAIIATAHLLLRIIYRLLKDNSRYMEFGEYDLEQKGALLKPLQPN

SEQ ID NO: 115007 - protein, 415 aa, unidentified
MTATQDKIEFDQVIERGCGIDIHKSVLVCTVQGKGVKTETRSYDAFTESIEQLGGWLSSLGVTHIAMESTGVYWKPVYNILEKDFAIVLVNARHLKNIPGNKTDKKDSRRIAKLLLAGLLKGSFIPPKPVREMRDLTRYKRRIIEQIASEKNRIHKFLEDANIKLSSVVSNLSGVVATKIIDAIIEGEGDPEELAKLRHGKMKASEQELIVALTGNLTDHHRFMLKVVKQSIKDKQGLINELDKQVDNKLIENEMVLDAELLSTIPGVDKEAAAYILSEIGNDMERFPDEQHLASWAGLCPGNNESAGKKKSSRTTHGDKWLKAMIVQCAWAATRTKGTYLRSKYDSLAGRRGKKRALVAVGHKVLIAAYFILKNKEPYKELGGEFLETRNREKQIKRHLQKLRDLGVDVSDYAA

SEQ ID NO: 115008 - protein, 418 aa, unidentified
MKIVFPTCCGVDVHKSFLVATIIKTPQNSLQQSYQKKRFSTFNSDLNRFADWLRENDCLDVCMESTGKYWVPVFNILEKQGIRVVIANPKWVKAVKGNKDDTKDSKWIGDLFRIGLVKSSFIPNKEIRILRELTRYRYKLISMKSSEKNRFQNAFTVCNVALDSVVSDMFGKSATAITDYLTSDVEFDAQHCISLLQRSLKKKAPAVLEAVEGHEIAPEQKTRIGIVRDHLHYIDKLVERVDDCVEGMVQKYEGAITLLRTIPGVDRSSAITILSEIGIDMAQFGSSKRLCCWAGLTPGNNESAGKKKSVRISRAGVYLKPALVQAAHAAVKDKSSTYYAVKYERISKRRGKKRAIIAIARMILTAVFCMLSTGEVWNPVDLYKVDMPKHLKEKQLAKAVKQAVHFLETQGLTVLDSA

SEQ ID NO: 115009 - protein, 342 aa, unidentified
MTQFTFFVGVDIASVAFMACVGTAPWKLTLKPVKFDNEEDGFASFLNWLKNNSLPPEKTVVCMEATGVYSEGLAYFLFASGYTVAVEPPLNIQRKFPANASKTDELDCQYIAEYACRYVDKLAFWKPRADLLEKVKVLLTTRQHFSVQLTGHKNALIAVNRKKVTSELAQQVHQAMIQQINQHIKAIDQEIRRLIDDEPTFKQTFLLLMSVPGIGLQLAAHLLIHMQETLDPKVLAAFIGICPIKHESGTSVYSAPTSRHYGPPVMRKLLYLGACSVRTHKKQFQLYFFRKVAEGKHKKVVLNNIENKILKIACAVVRSQKPYIPNYVSVNPLVFQKTLTLS

SEQ ID NO: 115010 - protein, 449 aa, unidentified
MHGAHIGGQRAAAFFKLVADLDPRRVLLVGIDVAKATWFVVVSDLTGAVVADGVRLVADRAGLAELERVIAELRWRLAAELVVVGIEAAGHQHQGLTAHLADRDGLHVRLLNPGAVAAIRKQRGNRRRKTDWLDAAAVCELLARGEGKLVHLDASMAASLRPLWSGRKDLVDTRSRLRQQAGALVDCLWPGFSAADKQAGVSPVLCDLFKTKAGRVIAGLLAEGWTPARFTAAPTTQLQAIFAARGCRLTRPLASRLRARAAGALPAHPAATAGKAAALAGMLGVLDGIDAEVERLEAQMAPLLAATQGAKLTQIRGVGVVTASGFVAFVGRTDRWAEWSKVWRAAGLDPARSQSGAKDARLGISREGSAWGRRALLDLAAAVCRQPGRWGDGFRARTTQGRKPAKVALVATGNSIGRTCFALMRSGADFDPAWETKRTRSSKVGDEAA

SEQ ID NO: 115011 - protein, 371 aa, unidentified
MEHCTQAYIGIDVAKLRNAIAIAEGERGGEVRFMGEVDAADESMRRTVRRIAEKYDRVHFCYEAGPTGYGLHRLITSLGFSCMVVAPSLIPRKPGDHVKNNRRDAVGLAKLFRAGELTAVWVPDEGHEAMRDLVRARATAVETLRVHRQQVSAFMLRHGRQFPRKTAWTRSHLRWLQEQKFDHPAHQIVLQEAVESVRLSKERVERLEQCIEEFLPTWSLAPVVRAQQALRGVSMIVAVTFTTEVGDLRRFESPRQLMGYLGLVPSERSTGETIRRGAITKAGNCRVRHMLVESAWTYRHPPRIGRVKLYKLEQAPPKVREIAWKAQTRLTTRYRALCARGKKTTVVCTAIARELAGFMWAVGREVQPVQS

SEQ ID NO: 115012 - protein, 353 aa, unidentified
MGRQDFISIILYDHANTNFIGIDVFKLNVHIYQLEIKEYLSIKNDYKVLLKFFKKFNKSSFFVYEPTGVYSKNLEKVFNDLWLQHFQVHPNDMHHLGKSLLGLNKTDKIDSKHIAQIWKLLYTQYQDLWWKNKFITPVPNYINQINHHMSQIRFMKKEISRAKNWIECLLNNPYESKTALGTYNKVISDLEKSIEKLEKEIDNLLNKNELHGKIENIKTIPWIADTTALELFVFFISLASKWMKKEDHKKVIAYSGLNPIENSSWTSLHKEKISKKWNKNVRKALYLPWIQRSQLCEKEKYKNTTIGKFCVRMKNKFTTAKNKRWKSVACAVAKKLLHTAWAMFCDNTQYSFV

SEQ ID NO: 115013 - protein, 322 aa, unidentified
MQANAVLGVDISKKKFDVCLLVGNKERYKVFQNNHDGFEKLVAWCNHHGAELIHLCLEATGCYSEDIVNFMYDLEHNVSVVNPAQIKAFGRSELLRNKTDKSDAAMIARFCIANKPNLWKPAPPEVRRLRDLYRCLQAFKDDKLQQMNRLENKNTDSHCKQAILEVIATIDTQTAALEKEINEHVNNHLHLKNITEKIKTIKGVGHLTAVAVVAEMPSVDNFDNARQFTAFAGLNPEHYQSGSSVSKKSRICKIGSERIRKALYMPAIVVKNHNSYFQKFCQRLASKGKCPKVIIVALMRKLMHVFFGILKNDQPFNGNLVR

SEQ ID NO: 115014 - protein, 362 aa, unidentified
MNYVGVDIHKKYSVLCALDEGGRKLREGRVEGNASSGFAHFFAGLEGPSKAVVEACWNWGLIHDELEELEQVEEVVLAHPYKTRLIAEAQIKTDRLDAHALGTLLRGNLVARAHVPRRETRARKNLLRQRLYWARMRTMLRNRIHALLDRQRGLELPQCSDIFGVRGLGFLRRLELPEPDATLLREQLALHDLIAQQMKAQEKRIATEFKSEAMHEHLLSVPGIGPTLAAVIGCEVDEIERFASAEKLCAYAGVVPTTHASGGKTRHGRLLPFCNKWLRWALVEASWVAIGCSPYFGALYKQHRARGKKANTAVLIVARRMCRIIWQLLHEKRDFEKRALSPIFNFPGCSALALTVKSASAP

SEQ ID NO: 115015 - protein, 526 aa, unidentified
MIGDSKILLQFPFVKSRLSLLLSAVFLAAWISSLICSPSITLGPTGGRALAIGLSRNTLVLLSAANKPPHQPFVTFGLEPPDNLDNVPVFLGFTYSHFWDVLLLGIPFPPHPDTAPFTLPPRMFPSSMSHDPMSIALPRASKRSEKHAATRPATDRSHLGASNAVDKHDRRRLRGTSPNSRPSVTTTSSPPPRASSHLRGRVHSMPTLTAPAVHIGIDVSKAKLDACSLPSGQCLTVDNTDEGIAQLIVWLDPQQPIQRILLEATGRYERRVAAQLLEAGLPVAVVNPRQARDFARSLGKLAKTDSIDAAVLAEFAQQRHARLCEKQPQNQAVLADLVTRRRQLTGMLTMEKNRAQVPQDKQTKSMIQKVIRLLEQQREDLDRRIAKLIESDDDWKNKRDLLTGVPGVGQITASHLVAELPELGKLNRQQIAALVGVAPVNRDSGQMRGRRTIFGGRASIRSTLYMAAFSAMTWNPIIQRFAQRLLAAGKPFKLVVIACIRKLLTILNVMLRENQPWNPKLAIQKP

SEQ ID NO: 115016 - protein, 366 aa, unidentified
MKKISTVAIERIQIFKENQLTIGLDLGDRTSHYCILNEAGEVILESELPTTPKGIEGVFSGIPRSRVALETGTHSPWASRQLTQLGHDVIVAHARNVRLIGESSRKDDQLDARTLARLARIDPGLLGPVRHRSAKAQIHLTVIRARAALVSSRTALVNAARGLTKSYGQRLRKCGSEQMNRERAKGLSQELRDVLDPLLREIESLNERIAEYDERIEKIAKEVYPQVAVLKQVKGVGPLIALTFVLTLDDPHRFRRSRDVGCFVGLRPGRRNSGNSEPQLHISKEGDRYLRTLLVQGAHYILGPFGQDSDLRRWGLKLAERGGKNAKKRAVVAVARKLAVLLHRLWVSGEVYEPLRSNHKVVSAVA

SEQ ID NO: 115017 - protein, 389 aa, unidentified
MKIFVGIDIAKLNHFAAAISSDGEILIEPFKFTNDADGFQLLVSKLESFDKNSIIIGLESTAHYGDNLVRYLVAEFYQVCVLNPIKTCQMRKNNVRKTKTDKVDTFVIAKTLMMQDDLRFITFFDLDMMDLKALGRFRQKTIKQRTRLKIQLTTYVDQVFPEIQYFFKSGLHQHAVYALLKEAPSPKEIASMHMTHLANLLKVNSHGHFTKEQAKELRVLAQKSVGANDSAISIQITQTIQQIELLDSQLEKIEAEMTDIMRFNDSVIMTIPGIGYINGGMILGEIGDIHRFSNPNKLLAFAGLDPSVYQSGNFQAKTTRMSKRGSRVLRYALVNAAWNVVRNNATFEAYYNAKRSEGRSHYNALGHCAGKLVRVIWKMLTDEVEFNLE

SEQ ID NO: 115018 - protein, 448 aa, unidentified
MATVNNAITTGQPFAAMIGLDWADQKHVWSMRTADGHRQRGELVNSPEAVEIWAAELALRFAGQPVAIGIEQSRGAVISMLSKYSHFVLFPVLSTSVSNYRKSFTPSGAKSDAKDSDLILDLLIKHPEQLPPLRPDTVETRSLQFLTEERRKLVNLHTSQVQTLTNWLKQVFPQVLHWFEDVSTPLVHDLLLRWPTLPDLQKVSSKTLLNFFHRHNCRSQERNQQRLAEIPHAVPATHDPALLKAGVLCIQNTVRLLTQMRTGISALENQIAEVFRSHPDRAIVESFPGAGAVLEPRLIAAVGTQRDRFPSAQSLAAFVGIAPVTEASGNSLWIHWRWACPKFIRQTFHEWANCSIKSCAWAREFYDQLRARGKSHHAAIRALAFKWIRIFFRCWRDRVPYDEQRYLRSRQARNAETPAPVPPAHGKAQPRFLFKTCGDFQKIAEISY

SEQ ID NO: 115019 - protein, 372 aa, unidentified
MVVYFVGIDISKYKHDCCIISAADQKVVSKVTIKNNKAGFNELLTIIHSLANPADIRIGFESTAHYALNLELFLENSLLTFMEVNPVLISEYKKSKTLRRTKTDSVDCESIARWLMTVEYKPHSKGFYHAYSLKSLTRLRDKLIRQRSFYLIKITNVLDHTFPEFKPFFNERLSKTALYLLENYGSAEKMARMNSASYEKLRSLSRGKFSPQQFLRLKELAANTVGVNNSIFDVELNSLLSLYKSLVKEINTIEKEINKLIEEVHPHYMSVPGIGPLSAAVIYSEYGDISNFTNPGQMLAFAGIEPGINESGTESHGGKMVKRGSSQLRYTLINCCLPLIRFDMTFATYYAKKRGESKPHRVAITHMVKRLI

SEQ ID NO: 115020 - protein, 427 aa, unidentified
MPYRIAGIDVHKKMLAVVVADAEVDGDFHFEREKVGTTPADLRKLADWLVEREVEEVVMESTAQYWRPVWEALEQHWRPQRRACADAVRMSGTLHLAKAQSNRGPGGRKKDFPDAERLVKRLIAQELTLSFVPDAEQRLWRTVMRRKYQITRNRVQLHNRLEALLEEAHIKVSSIVSDLLGISARRMLQALADGETDPTALATLATARLRATPEQLCDAFQACPTLHPVYRRLLRLTLEELRVIEDHLGQLDQQMADLLAGHHDAVQRLAQVPGLGVDSAQQIIAEVGATAATFPSPKHLASWMGACPGNEESAGVNYSHRCPKGNRQMRRVLNQAANAAVKAKGTIFSVVYRRIVPRLGHAQAIGAITHRLCRLIWKILHERVRYEERGPSVSAEAKKVRTRKMIRELRSLGYHVERLSAPSGSPA

SEQ ID NO: 115021 - protein, 389 aa, unidentified
MKIYVGIDIAKLNHFAAAISSDGEIILEPFKFTNDADGFQLLVSKLESFDKNSIIIGLESTAHYGDNLVRYLVAEFYQVCVLNPIKTCQMRKNNVRKTKTDKVDTFVIAKTLMMQDDLRFITFFDLDMMDLKALGRFRQKTIKQRTRLKIQLTTYVDQVFPEIQYFFKSGLHQNAVYALLKEAPSPKEIASMHMTHLANLLKVNSHGHFTKEQAKELRVLAQKSVGANDSAISIQITQTIQQIELLDSQLEKIEAEMTDIMKFNDSVIMTIPGIGYINGGMILGEIGDIHRFSNPNKLLAFAGLDPSVYQSGNFQAKTTRMSKRGSRVLRYALVNAAWNVVRNNATFKAYYDAKRSEGRSHYNALEHCAVKLVRVIWKMLTDEVEFNLE

SEQ ID NO: 115022 - protein, 354 aa, unidentified
MQYTHHLGIDLHKEFGYWTLLNNEKEVLFKEKIPTKEESVKKAVARLGVSPEEVQCAIEPVSQWGWYSDILVDEGLKVKLVDVTKSKLIAGTKLKNDKVDSKILAELLRSNFLPEAYLAPKETRELRELLRWRIFLTRIRARVKNRITAIIFHHGLICPKSDMFGKSGRVWLQEQKLSPFHSEERTSLLHTLDALTPEIERATVFIKEKAEADEVTKILMTIPGIGHFTAMVMKAEIGTFERFPSPEKLACFAGLVASSYSSGGKLRFGRITKHGSPHLRWAMIEATNTVRPSWGHLYDFYHRIKEKKGGKVARVALARKMLTLAWILVKKKEPFVAQSFVCGSLGQREAVISQ

SEQ ID NO: 115023 - protein, 343 aa, unidentified
MKDAMTIGADIAKNTFFVVGLDVQGKRVLRKKLTRRKFLEFFANRPPCRVAMEACGGAHHWARRLQAMGHEVVLLPAQHVKAYARGQKNDYNDAEAIAEAALHGRIRPVAIKTLEEQDMQVVLRIRRRLDKDITALVNHLRGLLQEYGVVVPRGKRAFLRAVPELLEDAENGLTPLMREELAHGWQRLQAMEAEMTRIQARLDRMSRQHAVCRRLRQVPGLGPRTAPLLLAHLGDGSRFRRGREAAAALGVIPSQHSTGGKTTLGSITKAGDAYLRSRLVQGVRSVVQNVGDKTDPLSRWIRRLLARVGRHKTVIALVNKIVRIAWAMVRHGTDYDPRLAAAH

SEQ ID NO: 115024 - protein, 326 aa, unidentified
MQGKEASEQETKVQCNVGIDISKCWLDAHVLPGDDRLRVANNCAGIRQLKRWLSHYRIALVAIEATGKWHRHLHRSLVASAVPVAIVDPYRVRMFAKAQGILAKTDQLDARVLALFAAMMAPPVRPVAPQTMAELAELVVARASAVEAQAALKNQFAAAESTFLKRQLDRRISRAGKDIAALDREILKRIKADASLARRYAVLTSIPSFGFAVAATLIACLAEIGSATAKQIGMLAGLTPIADQSGDRDGVRVIWGGRPAVRRVLYLAALSASRFNADMKAFYKRLIDNGKPSKVALIAVARKLVVLANTLVSEDRTWQPRAPILA

SEQ ID NO: 115025 - protein, 365 aa, unidentified
MRKAELSGEADSENNLGGSSETMYYIGLDVHKRTISYCVKDAAGHVHQEGKIRSTRCELDAWIKTLPQPRMIAMEATIFTGWIYDHLRSHAEKIKVAHPLMLRAIALAKKKNDKIDTAKIADCLRCDFLPECHMASTEIRDRRRMLRYRNLLVKQMVQMKNRVSGLLLETGVSYNKRRLHKVGYFADLMSTNEEVNESIRPLLKLSREHIVRAQRLDYGLVSSLERDPLLAERLKRLRTVPGVGPITALTWALEIGDFTRFRSIKQAISYCGLCGDERSSADKVMRMPLSKQRNKHIQRVLVEAAKLAPRECHELAMVRDRELQKGNPNRATLAVARKMVGYLLAVERRKQDFVVAEKFKYTAAA

SEQ ID NO: 115026 - protein, 420 aa, unidentified
MKEPNIGDFACLIGIDWADRKHDFCETDDQGKTYAYGVISSKPEAIHDWVMTLKERYPNQRIGISCELKKGPLVHALLKYDHLTIFSINPSTVAKYRKAFVHSGAKDDPSDAKFQVDILRLHMDKLRVIEPDSADIRALGQLVEYRRKLVQDRVDLSNRIAGILKSYYPQPLEWFKEKDTIIFCEFISRWPDLASAKRARKSTLINFFNQHNSRYSAVNENRIASIKSAFALTHDEGIIDPNRLMISLLVPQLKLLIEAIDVMDKDIKTRYKAQKDKAIFDSLPGAGPQLAPRLLVAFGSNRARYETAADMQKYAGVAPVIERSGKKSWTHWRYSCPKFLRQTFVEWAGQSVRFSFWAKAYYQQQIEKGKPHNTVIRALAFKWVRIAFSCWKTRTVYDESKYLEALKKRGSPLLQYAANS

SEQ ID NO: 115027 - protein, 399 aa, unidentified
MTPDDIDVWVGLDVGKSAHHAHALDHDGNTLYDKPLKQDEKAIRTMLGKLSKHGRVLLVVDQPNTIGSLPLTVARNMGIAVAYLPGTAMRRTAQLLPGDAKTDRRDAHVIAWAALKLPETLRDAGPDDETLAALKLLAGHDEDLAHESTRHVNRLRSLLLHDPPRVRRALKGERITRDATLALLERYGGPMGVKRAGIEDVKDWAKSNGLRAGRIIDDMFKAIGEQTVTVPGTLMAETIIPSIAHDIKTIRDRRREVGRQVEKLLEDHPLLTVLTSMPGIGVRTASNILLGIGGDIANFKSSAHLAAYAGISPVTGQSGTSIKGERPSRRGNKRLKNALWQTAFVASTKHPPSVAYYKRKREQGKHHNAAIICLARRRCDVIYSMLKNGTLYQEPALVA

SEQ ID NO: 115028 - protein, 434 aa, unidentified
MEVLHPRCCGLDVHKETVVACVRLVINGKPVKEVRTFSTTTVSLIELSEWLTETKCTHVAMEATGVYWKPVWHILADDGFQLVLANAAHIKNVPGRKSDVKDSDWISDLLSHGLIRPSFVPDGSTQEMRTFLRTRKQFVHEKGSHILRIQKTLEDANIKLDSVITDIIGVSGRKMIEALIAGERDPAKLAALADRRLKASQQTLRQVLRGRVTAQHRFLLRLHLDQIDALDAAIARIDREVEASIAPFRTAVEQVRTVPGIKSLAAQTILSEIGIDMTRFPSSGHLISWACICPRSDESAGKRRSTRIRKGSPWLKTTLVQCAWAATRKKGSYLQAQYYRIRARRGPKKAIVAVAASILTAIYHMLKDGTMYQDLGPNHFDANAKERQKNRLLKRLADLGYDVELTPFPTGVAPAEALAAEALAAEALAAEALA

SEQ ID NO: 115029 - protein, 388 aa, unidentified
MNTISAGASTSSILAIDLGKYKSVACVLDPASGEIRFTTFDTTRAELRRLLAKEQPGVVIIEACLLAGWVHDLCGECGVRCLVANMASEAWKFKHLKRKTDKDDALRLGQLYLLDQLPTVTLPPSQIRQWRSLIATRQNLVGRRVAVQNRIRAVFVAQGLPAPRGARAWSATGLAGIALQAKALADCGPDELWRGLLELALTEYRQVSELVAQAEARLDALGKQSAAVKLLETAPGLGPRTAEAVAAYLHDAPRFRTGKQVSAYSGLVPRQHQSGEMDRRGRITKRGPALLRKMLVECAWCMIRYNAWARHFYLRLTGGGQRRKKQAIVALARKILVRCWAMLRDQKPWHDPQAGPKPRLSPSKQRRHEEAQKHRQEKQQAVLAATAM

SEQ ID NO: 115030 - protein, 447 aa, unidentified
MAQRNRSVSRAGLSITHPNAAAVDIGSSAHMVAVPPDRDAEPVREFGSFTVDLIRLADWLQECEVDIVAMESTGVYWIPLFELLESRGFKVLLVNARNVKNVSGRKSDVLDCQWLQQLMSYGLLRGAFRPPDEVCPLRALTRQRAMLLRTQARHVQHMQKALEQMNIKLAHVISDLVGETGQKIVRAIVAGERDPQVLAGMKNTRIHASTDEIVKSLQGNWRDEHLFALTQALEAFDFCGTQLASCDTKIQAQLLILQTHQGEPAKGKKRARTRNAPKFELRTMLYQMCGVDLTRIDGVDVSTALIVLSETGADLSRFPSDKHYTSWLGVCPGTRITGGKVMSGKTKRCANRAAQALRMAAAALRTSQSALGAYFRRMCSRMDKAKAITAAAHKLARLIYAMLTKGQQYTDEGQDRYEERHRDRVINNLKRRAQQMGMTLVPAEQTA

SEQ ID NO: 115031 - protein, 365 aa, unidentified
MVEVSEAAVIVGVDVAKHSHWARVIDPRGRELVKPLRFENTKEGFLRLERTIAEALHGLGLDKVIVGVEPSGHYWKPLAHHFHAQGVRVVLVNPYHVKQSKELDDNSQMKSDRKDALVVASLVQQGRFLRSYFPEGVYADLRVLVSQRSHLKRRLNSAVNRLRGVLDEYFPEYDQVFKDLLGKASMWVLRHCPFPQDVLQCDPEGLATCLKLATGDRVGMKRAKALIEAASVSVGVKVGIEGARKKLSSCLGEVDFYRRQLEAVEARMVELLEKLPEARLLMSIPGVGPVVAATVLGEVGDFRRFKNWKQLRKLSGYNLVAQSSGQKKGQSMISKRGRPGCGTSCILQLWSRLPGTGSSGRCTSC

SEQ ID NO: 115032 - protein, 355 aa, unidentified
MYGLKHQKEKRSMDHFAGLDVSVKETSICIVDDTGRIVREVKVASEPEALLSVLANPAYHFTRIGLEAGPLSQWLYSVLAEAGLPVICVETRHMRAVLKAQINKTDRNDARGIAQMMRAGLYRPVHVKTLRSQKLRMLLTHRKLLQSKAIAIDNDLRGTLRNFGLKVGVVGTVRFEARIKELVENHSDLAVLIEPLLVVRRVLREQLGILHRRLLTIVRDDEVCRRLMTVPGVGPVVALTYRATVDVPGRFRNSKAVGAAFGLTPSKYQSGEINRTGGISRCGDDMMRMMLYEAAQVMLLRSAKWSWLKAWAMKIARHRGVKKAIVALARRLAVIMHRIWVDGTEFQWTREVAAA

SEQ ID NO: 115033 - protein, 348 aa, unidentified
MTVYIGVDFHARKQMLSYLTTEDGEIQQKELLHEQDDVRGFYAQLRSSGPVIVGFESSGYAAWFEEMLEELGCEIWVGHAAQIRKCARRRQKNDRRDADLILELMLRGDFPRIHRYSRENREVLQQLRYRQRLVKMRTMTINSLRFMAASRGITLRGKLQSQQGQGRVLALALPTPMDQQRDELCRLLMELQQKIETVEELLTQTAAADVKVKRLRTHPGIGLLTGLGLVHTLASIERFANGRKVTAYAGLDPVEDSTGERRRMGSISKQGSRLLRLLLVEAGQVAARHDDELGQVYRRLLVRRGHATAKVAVARRLLVRAYIMLRDEIDFAEFQRRGVAARSSRRSA

SEQ ID NO: 115034 - protein, 313 aa, unidentified
MLYVGIDVAKNKHDVTALNVPGKTVLKPLTFSNNKAGFELLDLSLRQLNQDCLIALENTGHYAFNLLNFLHEQGYKVYTYNPLLIKEFAKSLSLRKTKTDKKDAHGIALKLLSDPNREQFQHDNRQVELKILARHIHRLKRKQSDWKVQYTRCLDIIFPELDKIVGKHAECTYQLLTRYPNPQKRLEAGFDKLIEIKRLTASKIQDILSVAPRSIGTTSPAREFEIIKHYKRLIDKAETCVNDLMAEFNSVITTVTGIGDRLGAVILAEIRNIHAFDNPAQLQAFAGLDSSIYQSDQIDLAGRMVKRSSPHLR

SEQ ID NO: 115035 - protein, 392 aa, unidentified
MIFVGIDVAKNKHDCFITNTDGESLFNSFTITNNLDGFNDLYRKISSVTENITKVKVGLEATGHYSYNLLGYLLDKGFPTYVINPLHTNLYRKSLSLRQTKTDKVDARTIASMLMSDVNLKSYSDTSYHNEELKSLTRYRFDKVKERSALKVSISRLVCILFPELENLVPTLHMTSVYTLLYEFPGASYVASAHLTRLANLLSKASKGHYNKDTAVLFRQTARDSIGSVMPAKSLELKHTIKLIQELTSEIDEIEAAIKQIMDEEIKSPILTIPGISYRMGAMIIAEIGDFNRFDSADKILAYAGMSPSTHQSGQLDNCHSRMEKRGSRYLRYALDNATKYVCHWDKSFGAYLEKKRSEGKHYNVALSHAAKKLVRTIFAMERSGQSYIASV

SEQ ID NO: 115036 - protein, 420 aa, unidentified
MQTECRSYAGAAGGKWLLLGVVSTHHQLETLMEVRTVNNLPPAAAHDDAVRCLLAIELSKKSWIVAVNTPLSDKISRYTLKPGDGRELLDLCERIRTRVARETKKRVEIVSCYEAGYDGFWLHRLLEAHGIRNYVIDPASLQVDRRTRRTKTDRVDVERMLRSLMAYLRGEPKVWSVVRVPSVAEEDDRRLHRERDRLINERIQHVNRIKGLLAIHGIYDYQPLRRDRVQRLERLHTTDDRPLPPRLKAEILRELQRLELAIEMIKAIEGERNAIASAKAETEHTSAKKIQDLAKIKSVGPQFATTLVGEVFYRSFDNRKQLASYVGLTPAHFQSGSMSRDQGISKAGNAKARTAMIELAWMWLRHQPDSLLSVWFRDRVGKLKGRIRRITIVAVARKLLIALWRYLETGLVPEGAALKV

SEQ ID NO: 115037 - protein, 308 aa, unidentified
MPALPHPVIGCDIGKTTIVVFDSGSRRLSTIANQSEALADFANSLPPDGLVICEATGGHEALLLDALARAGRSAHRADARKVKAFIRSHGTLGKSDAIDARALARYGIERHASLPRWQPAEPTRERLHALIMTRRDIVAERTAWSHRQAAPGAAAAADFVNPILACFDDQLRAINAAIETLIASSQPLMHTVQRLHAIPGIGLTTAAALAALMPELGTLPRRQAAALAGLAPHPNQSGKADRYRRTRGGRPEIKRVLFMAALAAARHHPTLSRFHQRLIARGKKPIVALVAVMRKLIILCNAQLRKPA

SEQ ID NO: 115038 - protein, 347 aa, unidentified
MRFYNRQHRHYCGIDLHVKTMYVCILDMTGQVLVHRNVKSTPEAFLEVVAPYRDDLVVAAECMFTWYWLADVCAAEGIAFVLGHALAMKAIHGGKAKNDKIDSRKIAGLLRGGLLPQAYVYPAGMRATRDLLRRRLHLVRKRGQLLTHIQNTQAQYNRPAFGRRLAYPANRTGVAEHFPDPSVRKSIEVDLALLERYDTLITDLELTIVREAKRHDADAFHRLRSVPGIGKVLALTILYEVHDITRFDRVQEFASYARLVKCQKQSGGKTLGTSGAKMGNVHLKWAFSEAAVLFLRHTKDGKKLLSTIEKKHGKGKALAILAHKIGRAVYYMLSRGTIFSTDKFLAA

SEQ ID NO: 115039 - protein, 341 aa, unidentified
MMGNVTTIGLDIAKSVFQVHGVDAASEVVVRRKLTRGRVLAFSESLPRCLVGIEACSSSHYWARELNARGHDVRLLPSQYVKPYLKRQKNDAADAEAICEAVTRPTMRFVPVKTPEQQSAMMLHRVRLMLNRQRTQISNALRAHLSEFGVVAPIGRNGIEQLLVVINDENDARITADARLCLRMLEAQLRVVKEQILENDRRVRASARETELGRRLMEIPGVGPLLASAFVATVADEHAFKSGRCLSAWIGLVPNQNSSGGKEKLGSISKAGNPYLRQLLVVGAMAVIRYAERNGTRRPWLVQLMARRTAKVAAVALANKTARMVWALMTSGERYREPVIA

SEQ ID NO: 115040 - protein, 400 aa, unidentified
MLSIGIDVSKGKSTVCGMKPGGEIVYTPFEVQHTREGMSDLVSLLRSSGEEVRAVLESTGSYHCPVVAALLENGIFVSVVNSLRMKRFCSQSIRKVKTDRIDAMQIALYGLAYWQELQPTRLPEDTYRELQLLARQYYQMTSMLIKAKVDFNAICDQVLPGMQELMNDHAGRHKLSDFVLRYRHTTHILEMGETRFRKDYCKWAEKKGYRNCERMAAHIFATAQNGIPVLPNAPSTQIVITEAIRVLHTVEASRDAILTQMQALAKTLPEYSLVREMPCIGDTLAPRLIAEIGDVRRFHSKRALIAYAGIDAPPYQSGKFCANNRHISKRGNRYLRKTGYEVMQSYVMHKPANDPIFTFIEKKRGEGKSGKLAMVAGLNKFLRVYYGKVTELYRSLPAIE

SEQ ID NO: 115041 - protein, 355 aa, unidentified
MRILSLDLSKYKTVACEYEAETGRHQFATVLTTQKALHDLIVDREPDRVVIEICSIAGWVCDLVRSLGIEMQVASTNDERWQWRKVKRKNDRRDGLKLAQLSARNELDLVHVPQSEMRQWRALIAYRHHLVQRRTKIKNHIRELLLREGQLLPRHRSAWTQDGLAALEAMGKPLGEVPMDELWRGELKVELAQFKAVQKQLTEVVAKLDALGAANHNVRLLQTASGVGPRLAEAVVTMFDDPKRFRRGAAVSAYIGMVPKQWDSGETERLGKITRHGNRLVRSLLVEVAWCALRHNPWARETYQRISGGKKSRKKIAIVAVGRKLLVRCWAMLRDQSAWHWEGQSAVVTPQAPTA

SEQ ID NO: 115042 - protein, 405 aa, unidentified
MEIIIEKGCGLDVHKGTVVACIMGTGIKKEVRTYTTVTNDLLRLREWIQEAGITHVAMESTGVYWKPVFNILEDSFEVILVNARHVKNVPGRKTDVQDSEWLCRLLRSGLVSGSFIPPRDIRELRDLTRHKRKLIQAITAEKQRVEKVLEDANIKLASIASDTFGASGKKIIEELIKGELEPEGMAELSKGRLRQKRGDLKEALVGQVREHHKFMIKVSLRHIRAMEKILSDIERKIQEKIDRHYKEEYALLQTIPGVKGEASTLIAEMGVDMERFPSEEHLSSWAGMSPGNNESGGKKKPGSTTYGNKCLKTMLTEFAWVASKTKDTYLRSKYHSLVGRRGKKKALVALGHKILVMCYHILKYRRPYKELGVDYLDKRRKDKIARSYIKRLNHLGYEVTLKEAA

SEQ ID NO: 115043 - protein, 412 aa, unidentified
MRRCIGLDVRMRRCIGLDVHREFAQVAIWEDSVVRQAGRIQTTPEALRLFADSLCVSDEVALEATGNTYAIARLLEQHVGRVVVSNPQKTRAIAEAKVKTDKVDAAVLAGLLAANYLPSVWLPDDQTHALRRQVTRRAHIVRQRTRLKNQVQSILHRNLVPRCPAADLFGNKGRAWLATQDLPQDEHQTVGALLRQLDFHAAELRIVDADLGRVGLERAEVRRLMTIPGVDATVALAIVAAVGDFQRFSSPQRLVSYLGLNPRVRQSGGQPAQHGRITKQGRAHARGMLVEAAWAAAKTPGPLRAFYERVRARRGMQVAVVATARKLATLCWHLVVGEQDYAFARPSLTDKKLRALELRAGMPPRRGQKGTAAAYSLKEVRRRERALTEQAEVAYRQLVASWQPKRPAAKPQ

SEQ ID NO: 115044 - protein, 341 aa, unidentified
MEKFIRTAIDLGKNYFQVHGLESEGGRSISRKVKRSKMHEFYSQIEPCRVGMEACGSAHYWARQLTAMGHEVVLIPPAYIKPYVKRGKNDAVDAAAICEAMSRPDMRFVPIKSADQQAVLMLHKTRELLVKQRTMAVNALRGHLAEFGIVAAKGIGRVDELLALAKADAALPHIAGAAVACMAQHLEGLDLSIETVDEEIAKAHRQNPTSRLLDEIPGVGTLIASVIAASVPDPGVFRSGRDFAAWLGLTPRQYSSGGKEKLGAITKQGNRYIRKMLVTGATSVLRVAGKRKGALADWINALRARKPERLVAVALANKLARICWAIMTTGEGFRTDTYVKA

SEQ ID NO: 115045 - protein, 337 aa, unidentified
MSREYVGIDLHRCRSVIVRKNADGELLSKTRIVNDPEEMIRAVAAAGPEPEVVLEATFGWYWAADLLAELGAHVHLAHPLGNNWGNRRVKNDERDANDLVDLLRLGRLSEAWIAPPEIRELRELVRYRAKLVRLRSGLKAQVHAVMGKHGVLPTRVDMFGLGGTAQLNALDLPGGYAWRLKSLRDLIGVYDKEVARLDKTIAAQMRNDRGYRAIQAIDGVGPVLGAVMVAEIGDITRFPSPDRLCSWAGLTPKHRESDTKVRRGSISKQGSRLLRWAAVEAAAKNHAGGDFKVFYRRIAERRGRNVAKIAAARKLLTLVFYGLRDGEIRCLANPARG

SEQ ID NO: 115046 - protein, 380 aa, unidentified
MLSEWLIEQQIEEVVMESTAQYWKPVWGALERYWKPMCQSREGAGRMSGTLHLAQALSNRGRRGRKKDFRDAERLVKRLVSQELVLSFVPDTEQRMWRTLTRTRYQRTRDKVRLQNQLEALLEEAHIKLSSLVSDLLGASARRMLKALADGETDPAALAALADQRLRATPAQLHDALGACTELNPVYRRLVKMTLEGLQFVEQQIGQLDQEMASLLRQHQDAVERLAVVPGLGVDSAQQIIAEVGAKAATFPSAEKLSSWVGACPGEEESAGVNRSRHSPKGNRQMRRVLNQAANAAVKHKGSIFEIVYRRLVPRLGHNKTIGVIAHRLCHLIWIILHKGVRYEERGPAVSEKSRQRRTARMVRTLRILGYRVEPLANPT

SEQ ID NO: 115047 - protein, 344 aa, unidentified
MESELFVGLDVHKKSVVATVLDREGNRVDQSSFGSRDSELITYLNSLSGRKHVVLEACNVWEHFYDAATSTDAEVTLAHPYRVRLISEASLKSDKVDSASLAELLRLHGIPMAYAPDPEIRALRQLVRDRAFYKREESSIKSHIYSALLRKGIQYEDGLLGQKRKREELRSYALPEVDRGLDVLHRFEELTKTLDEAIHAVFLKSKEAQLLETIPGIGEFTAVALVAELCPIDRFPNVEKLCSYAGLVPTIHQSGESSYQGHLKPDSNHLVKWLLVEASWSHRQWADKSSDVTKVARRVSRRGGKQKGNVAGAHKLLKIVYAVLKRGTPYTPDRPSSGVGAAES

SEQ ID NO: 115048 - protein, 437 aa, unidentified
MSQRLQVGLDIHQKHNHVCLMTNDGQMVNPHQRFDNNWTGFQEFVEMLVGVLDEGQFEGVDIAGEATGLLWFHPFYHLAKAGGLSPFDSHLYLFNPRTIKHFKKVLAQRDKIDPKDAHAVVERLRFGGRLPHEVTFDERYLPLQRLTRYRYHLAHDLAREKVYARMVPIYLKASDYTRKPMSFSDVFGATSRHILSEYATIDELASMPLDDLAEELDRVGRHRFKDATDNARRLQRTAAQSYPLAPCLVEPVNAILDSLLAHIRFLEGLLENLNLLIEAALTDVPGAPYLLSVKGLGLVYSAGLLAEIQHPSRFMQGFKRNKQGHLRPKTRHDGQAALARFAGLWWPRSDSGDFHAEDRRLPKTGNHYLRYYFVEGGNSLRRHNAEYTPYYQRKFDESLKHKHWRATVLTARKLVRLVFALLHDEEMYQPPEVRYHS

SEQ ID NO: 115049 - protein, 353 aa, unidentified
MKRDKYMGMDVHQATTVVAVIDAEGKSVLETIVPTAAGAIRRLIESISGPLHVTLEETTQAEWLHDLLQGFVLEVVVCDPRRNKLLVEGSKGDKADARKLAELLRTGMLRSVWHGRQTTRGLKEMVRAYETFAVDTRRTMMRIKALYRSRGIATKGTAVYQKKERDRWLNQLTEVGMQQRAAWLYEQLDHIRELRKRAKAAVLTEGARHRAVELLRTIPQVGPIRAAQIVATAGTPHRFRTKRQFWSYSGLAVVTHTSSEYEMREGRVVRRNKPVATRGLNINCNRRLKSLFISAATAGGVAHPWQTYLDNLKEKGMKSDMARLTLARKIASLTLAIWKKGESFDPKKLNWTN

SEQ ID NO: 115050 - protein, 412 aa, unidentified
MDVFCGIDWAEDHHDIALVGQDGQLLGRCRISDDAAGLAQLLTLLAGHGDSAGDLIPVAIETPRGLLVACLRATGRKIYPVNPMAVARYRDRHSVAGGKSDHGDAVVLANVLRTDMGMHRPLPADTELAQAIAVLARAQQDAVWDRTTAHNRLRSHLREYFPGFLAAFADARGGIVRPEARAVLAAAPTPADAARLTVTRLRAVLKKAGRSRGIDTEAARLREAFRNPQMRQLPLVEHAMGRQALALLGQLNAACAAASGLEQAATESFNLHPDAGIITSFPGLGPLTGARVLAEIGDDRSRFQDAKGLKAYAGAAPITRASGKTRSVSHRRIKNNRLASVGYTWAFSALTASPGARGHYDRRRDHGDRHTAAQRHLFGRLLGCLHHCLTTGQHYDETTAFPNTAGKHPRAA

SEQ ID NO: 115051 - protein, 476 aa, unidentified
MARQTSPRASRQAVPLLAQETLYVGVDVGKKAHVAGFISSTLLTRHQRFEHCPALAFENSREGFRSLIDRIKTYVPLTQVQALLEVTGHYHRALLQYLQELAIPVFVIHVQKRQEGLLKTDKRDALGLANQLYNQLEKGIQVGDPLQAVRRLVPPTEAAASLRGLVRHHYELVAESTQRKNKLTAICDELFPEFTRLLRNPNLPTALALRERFPTPADLAVASFWELRAARGRTCSVSDVKLLELQRLAAQSIGTKDPARIRSLVIEQKQLIRELHVIAEHLAQLETEIAQMVEGSREGRILTSIPGIGSQAAATLMSMIGTIANFERAAQLKSYMGWVPKVAQSGSSLDWTRLSPRGVRQMKQTMYLIVWRAIQWDAEWKAMYERLLARKCRLDERTRRLIGREKVIGRLAGQMVCVIYALLKKDQELLAHLAPGEQPPEPTLYDPEVHRQHRLGQYQPRGARGKPPQLFELPSS

SEQ ID NO: 115052 - protein, 375 aa, unidentified
MKEKVRFLGLDVHAETIAVAVAEPDGEVRSLGSIPNRGESIRKMIRKLGTAEKLRACYEAGPTGYVVYWQLAELGVQCEVVAPTLVPVKAGDRVKTDRRDAEKLARCYRSGDLTAVWVPDEGSEALRDLVRAREAAKQDQMRARHRLSKFLLRSGQRPPTGVRPWTRPYLIWVAQLRFTQLAQESTRQDYLHEVEHMRARVTRLEQAIMEAVKLASPALQQVINDLQALRGIADISAVTIAAELGQVSRFGSARELMGYCGAVPSEDSSGRRIRRGSITKTGNAHLRRIVGEAAWSYRRPPCIWYGLRRRQESISEEAKEIAWKAQHRLHKRYMRLGAAGKPQGKIITAVARELLGFIWAIGTKAETTVSQRVAA

SEQ ID NO: 115053 - protein, 315 aa, unidentified
MTNLNKSKSVVNVGVDVGKFELDVCIHENQKHWQDENTEAGIKRILKRLAHYQVERLVMEATGRYEFNLAQAAHHKNIPVCIVKPVRVRKFAGATEQLAKTDKLDAKLIADFAFTLKPKVTPAKSKNLLAIKDLIARRRQLMKMRTQEMNRTQMVDRSLKVSCERIVRTLDQEIKRIEKRLAKHVEDQAEWTEKQEILKSAPGVGDTLVYTLLADLPEIGSINRKEISKLVGVAPMNHDSGKMKGKRRVQGGRHSVRTVLYMATLSATQCNPVIKGFYQQLVAQGKHKKVAITACMRKFITMLNAMVRDRCVWAY

SEQ ID NO: 115054 - protein, 387 aa, unidentified
MYYIGIDVSKYKHDCFIATEAKSIKAFQFDNNRLGFDLFLTTLKSLDQSQEIRIGLESTGHYGMNLKQFICVSGYTFLEFNPYLTHQFSKAMSLRKTKTDKVDAKTISSMLGPVDYKTLHTSFYHINELKQCVRYRDLKMKLRAKILVELTNILDRTFPEFKAFFNHRLVGSAMFILKRFKSRSRIARFKQSEYDPINSYSRGKITNVKFQKLKLLAMNSIGYETNTDILLISESIQSYKNLTSTIETIENKIIELMKNIPQTLTSIPGLTLISAANIIGEIGDFRNFSNPAQVISFAGLDSSVNQSGTMETRGHLVKRGSGLLRMTFWQVTFSALQFIPTLYEYYLKKKAEGKHHKVALTHCARKLIRTIYNLGYNQLVFDQTQFR

SEQ ID NO: 115055 - protein, 365 aa, unidentified
MHSINNTELSSLEGTRSEFNPGKEVIKLGIDVHQEFYVVVGQVGGTNPKPAQRFKKEAFLFWVAKLQQKSGGAQIHAVYEACGFGFGLHRALTALGIACHVVCPQKLDERNRRVKTDSLDAKTLCLKLDRFVEGNREALAIVRVPTEQEEQLRAIHRQREQLVKARKQLEAQGRSLMVNHGIEPVQRWWKPRTFAVLAVPDWMKELLANSQPILLALEEKIRALTAQLQAAAAPGQPRGLGMMTSVVIDREIGNWDRFRNRRQVGSYTGLCPGEHSSGKTRLQSCVTKHGNPRLRAALVELAWRLVRFQPNYKPVVKWRQTLCKGALATGAARKKAIVAVARQLAVDLWRVRTGRVSVETLGLKN

SEQ ID NO: 115056 - protein, 363 aa, unidentified
MEVAGRFVGIDLGKRTYEMCIVDRKGKISRTGGKTDFAGIDRLCEKLNGDDAVAIEACNLAFRIERAIRKSVGCKVCIMNAGKLAVIYMSTRKTDKEDSLKLAKLLKTHDEDELPIVAPPSDEEWERRKLLSEYRSLKCQRTKEINKLHAIFEHNGYTQFVRKDMCSEKNRANILPLLKGYEKEEAERLVERLNLLEKQIERLLQKINAEVENDGKIQKVMTVPGIGPITALAYVAYVGDVNRFDNAHQVSNFIGFVPKVDNSCTICRSGHTTKKGNPLLRSLLVQAAWATVKSKNGGALRDKYKYMAESRCIGKGKSIVTIARKLGELLYLILKTDQEYKPQKFITPELKISKLAEDALEYS

SEQ ID NO: 115057 - protein, 393 aa, unidentified
MICVGIDVAKDKYDCFILSSEGEVLADVFTIPNNAEGFDTLLQTIRRCARPEDKIKVGLEATGHYSYNILGFLLNEGLDTYVINPLHTNLYRKSLSLRKTKTDRVDARTIAAMLMSDVDLKSYTDTAYHNEELKSLTRYRFDKVRERAKLKQSVSRLVTILFPELEKLVSTLHMASVYALLSEFPGAKQVSEAHLTHLKAVLYDASKGRYGSDMATTLRDAARCSVGSVMSAKSLELRHTIRLIHELDAEIEDIEAAIQSMMGEIQSPITTIPGMGVRMGAMILAEIGDFSRFDSPDKILAYAGMSPSTYQSGQLSLSGAYSHMEKRGSRYLRYALYNATKYVCLWNPTFAAYLAKKRAEGKHYNVALSHATKKLVRLIYALEKSKRPYSTAA

SEQ ID NO: 115058 - protein, 349 aa, unidentified
MSMVCGLDLHRGQITFDALEVETGVVWRGRLWQPDRARFRRWLTEELAPRAKGGSVALAVEGCTGWRYVVEEITAAGFEAHLAEPADTQAARGRKKHAKTDRSDSRLMRELLQAGELPESWIPPEAVLEWRERVRLYKTLLDQRRMWIQRIHAELFQHGVSLPEAQIPSAETRDRLASDTVQLSEAARQRIEAGYRIIDATDAVRLPLRRDLDRFGRRQPACKALAAAHYGIGPLTAVVVWAELGDCRRFSRSLQVVRHTGLDVTVDQSDRHRGSGHLSRQGPETLRWALFEAGMAASHATSPDRAYYQAVKQAHDGKIAAISMARKLARRCYHTLREMDPEVVYSMPA

SEQ ID NO: 115059 - protein, 347 aa, unidentified
MDHIGIAGHKKESQICILADGGELIERRIRTEPARFAEVLGERARARIVIEASTDSEWVARCLDGLGHEVIVADPNFAPMYGMRHRKVKTDRRDARALAEACGLRAYHPAHRLSDAQRHVRGRLAVRDTLVRTRTRYISLVRALLRQRGWRVPTGTAEGFSRRVAALPLPGRLLSEVAPLLAVMRSVNQQLAYSDERIAVLAQTDERVRRLQSVPNVGPVTAAAFVATLDDARRFRRAHEVAAYVGLVSRELSSGETQRRGRITKAGSSRVRWLLIQAAVSMLRLHDPRTAALRDWAGRIAGRRGKGIAVVALARRLAGILFALLRDGTVYEPGPRQARELTQAMPP

SEQ ID NO: 115060 - protein, 342 aa, unidentified
MTAFAGLDVSQARTTICIVDERGCVTWRGSCATAPRAIAQTLSTRACSLERVGLESGPLAPWLVPELRALELPVVCLDARHAHAALSVQINKSDTNDADGLAQIVRTGWYREVEVKSVKSHLVRATLGVRKQLVGMRTEMINQIRGLMKIFGLILPKGGGARFEANTRARIAEHAELGLVIEPLLAAWRALDDQIAALEGQLVRRARRHEVCHRLMTVPGVGPLTALAFVTTVDDPARFRRSSSVGAYLGLTPRRHQSGERDVSGRISKCGDRLTRSYLFEAANVLLTRVERWSSLKAWAIRLAKRSGAKKAKVALARKLATLLHRLWQDGTTFRWTAEATA

SEQ ID NO: 115061 - protein, 346 aa, unidentified
MPIVGGLDIHRKQITFDYLDTETGQVQRGQISPADRLHLRAWLARFAGREDVAFAVEGCAGWRYVAEELAAAGIAAHLAEPADTAFARGRKRHAKTDRTDARHLRVLLAEGRLPECWIPPARILECRALLETYNDLRRERTAWAQRIHAVLFHQGAPALGEGALRTEKGVTALREVAAAHLSPAGQLQVATALEVIDALEARLHVVRHQLTDAARHLAGARALAARLYGVGPVTALALTCWLGGAGRFSSSRQAVRFAGLDITVHSSDRKGPPGRLSRQGPPVLRWAVYEAGKTHARTSAPDHRYYAQVKDRKNSKRACLSEARKILRQAHHILAELGDDALAPAA

SEQ ID NO: 115062 - protein, 394 aa, unidentified
MKLIGIDIGKNKHFFCVMDQQTGEIISQPVSFSNDKEGFDFLVQKIKSYPKDSILIGMEDTGHYHFALLKYLLDLQYTVALINPKTTDFNRKMQGGITKNDKIDTINICDVLDTPERKKQYRITKVNSFDLYEQKQLTRHHHNLKEEENVYKNRLQKCIDIVFPEFNKLFNSKYGIVYMNILKMFGSAENIANTDIRTIRKCFEIEGRGNRISLTPERLKECARSSIGISSSAEVIQIKHLTAQIELIEEQLTEIDKKIEEFSIQNNSPILSIPGISHFSGTSILAELGDISNYSKPSQIIKFAGVAPLHYESSQFNAQHTAITKKGSKYLRKTLYQIILPVIRHNPVFNKYYQLKISQGKGHRCAQGHCVRKPLRIIYHLLKTNQQFDPQLLR

SEQ ID NO: 115063 - protein, 348 aa, unidentified
MIAIGADVHKQQCTLAVQRPDGKLSMLPSMDNTRENWLDLLTQLPPEAQIALEVSTSGHFVMSVLEEAGWRDRAHWVHTAGIDSLRKQKTDRLDAKRLARKLSVMEQDPLPEAWFPPRPIRELRLRARQRCWVAVLRTRVKNRVRSLLQMSGVGAGTNPFTASGRTWLKNQKLSEATRESVEQLLRFHDFLTTEREKSETSLRGMEKDFPEIARLQTLPGLGHILSAVIWSEIGELKRFDSPRALVNYTGLAPSLYESGERSVRGGITRQGPVWLRWALITAVNAATRGDNAFARRYRRLRRHKLPNVAKTAVARSIARCAYGVLKHGVDYQEQRWGRQAGIEMEQEA

SEQ ID NO: 115064 - protein, 410 aa, unidentified
MSRRCIGLDVHRDFCEVAIWDQGEVRSAGRIDSRPKTLAEFAATLGPGDEVALEATSGARQVAEILRPCVARVVIANTHRLAAISEAKCKTDRNDARTLAQLLAAGMLEGSWLPDEQTRALRRRVSRRHNLVVARTRAKNEAMSVLHRNLSQRPPMSDPFGVKGRKWLGALELPDDEVETLSAALRLIDFHGAEIETIERELARFAASSAEARRLITVPGVAMVTAVTFLAHVGEIGRFAAPKQLVGYLGLDPRVRQSGNGTAFTGRISKEGSVLVRHVMVEASHSAIRTPGPLLAFYQRVRSRRGHAVAIVATARKMVVLFWHLLTHGEDYRHSIELVTNKKLRKVELLAGAPRRRGGGRCEGPNRDQRREIDRDRAQRAADDYRRVAERQNGPGTDKVKDASQTPART

SEQ ID NO: 115065 - protein, 385 aa, unidentified
MRSEATRAGETNVGAQVLYMVLELSERSWKVLFASAAGRRRKRAVAGRDVAGLLEEIAAAKRRLGLSAQARVVSCYEAGRDGFWLDRALRGHGIENLVVDSSSIEVPRRARRAKTDRVDLVKLMGLLLRWVGGEKKVWSVVRVPDVDAEDVRQLSRSIERLKAEHGRHVTRIKALLATQGIRLGHIGRRDWAKRVGELRRWDGSALGVWLQRDLVLEGERLAVAAAQLAALKAERDKLVAQGGEVAAVKARELARLGAIAKESSFVFAAELFGWRTFANRRELAGSVGLTGTPYSSGDSAREQGISKAGNRRIRTMLVEIAWCWLRYQPTSALARWWQGRFADSGGRTRKIAIVALARKLLVALWRYLERGVVPEGAVLKTRVSA

SEQ ID NO: 115066 - protein, 388 aa, unidentified
MEVMIERCCGIDVHQKTIVCCILSGPLETNKPQKHQKTFGTTSAELRAAIEWIQSFDVTDIFMESTGQYWIPVFNIFSDSEIQLTLANPAHIKNVPGRKTDVKDAEWIAQLGRCGLIQSSYLPCAEAMELRQLTRRRLSYVQKRTQTKNEMHNILQRANIKLTSYLSDIFGQTGQALLSLFINAEKITLGRVTECMHGKVKATPKQLLDAMDGKMSKTDRRLLDDSLEEYRFYTDKIKQIDGVIKEFVFTHFKEEYDLLMEIPGVKANSAAVILAEIGPDVEAFKTAGHLASWAGLSPGSYESAGVKKSSRTTRGNKYLKTVLISSGGIAGRSMDPAFSHLYQRISARGSKMKAVVACGHKLLRIIYKVLSCHIHYDKEKALGLRQQY

SEQ ID NO: 115067 - protein, 321 aa, unidentified
MDDVGREVDSVHAVNDGRGFRKIERFAQRVEATRIGIECSGSFGLALAQHLLAAGFDVREMPGQLVKRDRRSMAKGKSDTLDALLIARVVAREDKLPPPPFRGLTHDLKALVDHRETLLNEATRHRNRAHAILTQIRPGYSRAVPALTSARQLDAALELVEGDSGVRATILRDALKRVAELDSTAHVLEQQIDALVKASGTSLTQIVGIAAITAGRILGELRDVSRLSGQAAFGALTGTAPVPASSGKTDRWRLNRGGNRQLNRAMHTIALTQSHHGARAYLERKRTAGKIDKEAMRCLKRHLARVVYRRLADDRTLVLLT

SEQ ID NO: 115068 - protein, 359 aa, unidentified
MKYIGLDCHKQYDFATLIDSETGEVKSKKLAHTMEEFKAFIGGKSNSRMVIESCWNWYKTYELAKDLVDEIILAHPLKIKAIASAKIKTDAIDSQTLAQLLKADLIPQAHLREADNRVKQKVIRHRAFMVAMRTRFKNKVNDLVNNRLLSPTVEEAKPKNLFSKRGKGENGVAWLKSLEWSVEEDKKIFESAMRLIEQLSQEISVSNRMIDDIYRRDKDAQLLATIPGIGKTLAVLISTEIDGIGRFKSPSRLCSYAGLVPSTHSSGGKTYHGKMILEGNRWLRWALIEAVVPASYADAGIKQRLEALRRIKNANVAKTIMARWLLKVVYHVLKDGRPYVPSELRDVSRSRLSIALASS

SEQ ID NO: 115069 - protein, 395 aa, unidentified
MFIVGIDVAKRSHEVCMITSDGQTVQRPFSIRNNCTGYNLMLEKIRKHTNIKSQIVFAMESTAHYWLALFTRLRKDGYHVILLNPIQTSAMRDMFIRKIKTDAKDSFIIAELIRFGRYAESNVAQDRLLALKELCRNRFYLVDMAGDLKRKLIALIDRVFPEYEAQFDTIFCKSSVALLKKYPTPQKLSNAHLDKLTELLWNSSNGHFGEWKARELRELARNSFGVEDCDGAYSTLILLMLDQIQSLSGKADALEKEISRLFQSFDTTVTTIPGVGPIIGAVILSEVGDISRFSSADKLAAYIGVDPSVNQSGEFQAAHAHMSKRGSPYLRRCIWMASQVAVQRDPMFRAYYEKKTAEGLKYMTIIGHVTRKMTAVIFAILRDHKVYEPVLPTAA

SEQ ID NO: 115070 - protein, 402 aa, unidentified
MRTRRTMGKEKRGHRKRTRPMSTITVVGSIKPVLGVDLGDSNSVATLLSPMNGSIVQEMFPFSMDDAGYSLFSSKVPKDARIAYEATSQAYPFTRRLKEMGYSDITVAHPKELAWIVKSRKKNDKADSLKIARLHMGGLIPESHLLEREEQIKRDLLIQRVQLGVEIGNVKRRIISYLKREDVYNCLPKTEDNFSVTRRRAIDSLNFGDDRDLVIRTMMRKLRFLEAECPPLEERIRQVAAESDDVKLLISVQGIDFYTASLYSSFVGDARRFPDDDHLNSFFGIIPVSRDSGDKKRRGRMSKEGPSIARWMLGVMVDNVMRRNAEIRRYYDSVKERSGPGHAHVMAMKKLNRMLYHMLITRQRWKWEDEGLTERKLSNISSSAAPSSSTTTTTNEGGVTQA

SEQ ID NO: 115071 - protein, 316 aa, unidentified
MEVTPIFVGIDVSKAGLDVAVRPVGNREFVANDAAGIEILLQRLRELQPALIVLEATGGVERAVTRALASAEFPVVVINPRQVRDFAKATGQLAKTDTIDAAVLARFGEAVRPALRPLPDEVTWELRAVVTRRRQITEMIVAETNRLSGASKGVRKRINAHLRWLEAELKRADKDLDQSIRQSPIWRENEDLLRSVPGMGPVISRTLLAELPELGRLNRKLIAALVGVAPLNRDSGTLRGRRSIWGGRATVRAALYMGALVASRRNAMIQTFYRRLRNAGKAPKVALVACMRKLLTILNAMIKHKTHWSEIISQTT

SEQ ID NO: 115072 - protein, 346 aa, unidentified
MMIIGCDFHPSWQQIAWLESETGETGERKLVHASGDARAFYEQLGAPAWIGMEATGNSQWFIELVQDLGHEIWIGDAAQIRASYVRKQKTDKRDAAHILKLVVEGRFPRLWTPNREQRDLRQLVLHRHKLVEIRSRVKNELQHLSLNKGMQRKAKLWSQAGQQLLRELPLKPWAACRREDLLGLLTLLNQQIGTLDQAVQQVADQHPQAKLLMTQPGVGPNTALAFVLTIGDVSRFPRSQQVASYVGLIPREESSGGRQKLGAISKQGNRLLRSLLVEAAQIAVRYDPGLRKQYLHRCHQKPKGVAKVAAARKLAVRLYWMLRTGKPYPEIVRIESSPRVALVGAS

SEQ ID NO: 115073 - protein, 368 aa, unidentified
MSLQEKSLFMAMELSNKKWKLAFGEGSRERYRGIEARNELELVREVARAKEKLGLAAEAPVVCCYEAGRDGFWIDRMLKKHGYRNHVMDPASIEVPRRSRTRKTDRLDAEKLLQLLLRAELWGQRKAFSAVRVPTEEQESELRVHRERERLVKERTGHRARLKSLFVLHGFEVSDPARVPVDRVHDWEGKALPSALVEELKREQERLRLVETQLKGLEKQQTAALTQATTPALQKAQKLCRLKAVGPQSGWVLSHECFAWRTFANRKHLGSFVGLTGTPFDSGETLREQGISKAGNRRVRAIMMELAWSWVRWQPDSALTHWFIDRYVRGGTSRSKRKGIVALARKLLIALWKFLEQDIVPEGALLRA

SEQ ID NO: 115074 - protein, 346 aa, unidentified
MEQEQFVGFDVSQAETSVCVVGGAGKVLWQGKCASTPEAMAVTVQRRAPHAARIALETGPMSAWHYRSLIALGLPVVCVDARHAKAALAMQLNKTDANDAVGLAQIVRTGWYREVAVKSEQSHRTRGLLAARAKLVGMRKKVANQLRGLLKVFGHVIGAVGGEKFDARARELAAGDTTLTVTAEALLAARAALAAQVAKLDKLLLAQARQDPTCQRLMTVPGVGAITATAFISTIDDPARFKHSASVGAYLGLTPRRYQSGTMDVSGHILKAGDALLRCYLFEAATTLLSRVQKTSALKDWGNRLAKRIGHKKARVAIARKLAVILHRMWADKAEFRAMSDVAAVA

SEQ ID NO: 115075 - protein, 337 aa, unidentified
MKFNNIIGIDISKNTFDVALLMDNKLEDSCIFSNDDNGFKSLLLLIKSKKLNLNKILFCMEKTGIYSIKLSNFLSKNKYKVWLEDPIKISKSKGFIRGKNDKMDSIRIAKYALRFQDKMNLFEPNDEIYDKMNNLFSLRERLITVLGILEVTLKESKGIFDDSFQNMLESICLIPINYLKISIKKVDKKLDNLLEKNSEINQKYKIVTSVRGIGKQTAIYLLVISKGFSKIKTARKCSCFGGMAPFEYSSGTSIKGRTKVSSLGNKKLKRLVHMGAISILNSKKGEEYDYYCRKVGEGKHKMKVINALRNKLLARVFACIRDNRMYDEDYDKYKKVG

SEQ ID NO: 115076 - protein, 340 aa, unidentified
MKTITIGLDLAKNVFQVHGVDASGQVTIRKKLRRSELLGFFEALAPCMVGVEACATAHYWARELSALGHEVRLMPASYVKAYVRRQKNDEADAEAICEAVRRPTMRFVPVKSAERQSVLVLHRTRELLVRQRTMLINAIRGHCAEFGVVVAQGARRVVELLDDVRRNEGAAFPDLARSALLMLADQLGALAGQINRLDRRLLAWHRQSQTSQRLATIPGVGIITATALTASIPDPSLFRSGREFSAFLGMVPRQNSSGGKDRLGRISKMGDRYLRKLLVVGATSVIRRARTSTSVSASWINALLERRPARVVTVAMANKTARIAWAILARGGVYRPAAMA

SEQ ID NO: 115077 - protein, 329 aa, unidentified
MQTIFHNCCGMDVHKDSVVACIIKTRHLQAPHNKLEDMEKEIRVFETFPDNLAELRSWLEAEQCMHVAMESTGVYWLPVYEALEDAFDGKMEILVTNPRHMKNVPGKKTDIKDSEWIAKLLRAGLLAGSFIPPQDIRELRQLTRYRKNVVQDINTQKNRIEKTLQQAGFKLSTFLSDIFGVSGRNLIRTLIKKGRISPSDVESQTKRISKDKKAEIKRAINGQLTSHQRKFLQMQITLLDELLAHLATIEESIEILSEKFCDSIERISSIPGIAETSATAIIAEIGTDMSKFRTSEHFCSWAGLSPGNNESAGKKKVQESHLETPMSKE

SEQ ID NO: 115078 - protein, 357 aa, unidentified
MTPMLTDKVDFVIGVDTHRDSHTAAIVTAAGGLVERLTVATDAFGFRKLDTFAAKHATGRRVWAIEGTGSFGAGLTTHLLGRGEWVVEIDRPARPARRDGAKSDDLDAVRAAREALTREHLAAPRARGDREAMRVLLAAREGAILARTKAIGQLKAMIVNAPNRCVINYDAERPTNNSTAAHVLRTLPSHSVEHRATVRAIRATARRALMLEAEAAEHETELELLVTAACPQLLDRPGIGVITAAQFLISWSHRDRIRSEAAFASLAGAAPIPASSGATVRHRLNRAGDRQLNRALHTVALTRLRFEPTTKAYAARRTAEGKTPREIKRCLKRAIAREVYRIMQTDAASITTIETAA

SEQ ID NO: 115079 - protein, 316 aa, unidentified
MNDKNQLQIHVGVDVGKSKLDIAFHPLDLHFSVPNDEEHIQKIIPILKQHHVQSIMVEATGRYEHALVFACDKAELPIIVVNPIQVRRFAQVIGVLAKPDKIDAAVIARFAATIRPEFKPIPDEQSRLIKDLLIRRTQLLEMSIMEKNRLQILPKALHASITALLKTLEKQIEAITKQLDILVVQAKHWRTKSEILTSVPGVGKVLAYTLLSELPELGNLNRKEIAALVGVAPMNKESGSYQGKRRIRGGRHRVRTVMFMAMMSAIQCNPVFSRYYAHLKAVGKLPKVALIACMRKLIVILNTMVKNGEKWCKKAA

SEQ ID NO: 115080 - protein, 367 aa, unidentified
MKKVSTAAAGQSRNFSQQKLTIGLDLGDRTSWFCVLDEAGIVVLEQRLSTSPKAMREEFGGMPRSRIALETGMHSPWVSRLLSESGHEVIVAHARNVRLIGESRKKDDRLDAQTLARLARIDPELLCPVKHRSAKAQADLTVIRARAGLVRARTALVNTARGLAKSYGQRLRSCNVRNMNPEKAEGLSPELQAALQPLLTALESLSEQISEYNERIEKLAQQSYPQVALLKQIKGVGTLIALTFLLTLEDPQRFQKSRDVGCYLGLQPGRRNSGQNEPQMHISKEGDPYLRTLLVQGAQHILGPFGPDCDLRRWGLKLAERGGRNAKKRAIIATARKLAVLLHHLWVNGEVYEPLHNSNQTIVGAAA

SEQ ID NO: 115081 - protein, 354 aa, unidentified
MMIIGCDYHPGFQQIAFVDTETGELQERRLEHREEAEKFYRDLAAQGIKVRVGMEASGHARWFERLLSELQCELWIGDATEIARKRERKQKTDRQDAQHILRLMLKDDFPQIWVPSGENRDLRQLLWHRHRMVQARTRIMNQLQAVALNEGVRCKKRLWREKGREQLESFRLAPWASRRRHELLELLDRLNPTIAALSQAIEQEVEKCPEAQRLRTHPGVGPLTALAFVLIIGRADRFQCGKQIACYLGLVPLEDSSGQRRRLGHITKQGNSLLRFLLVEAAQVTVRSLPEWRSKYVHLTMRRGRKIAKVAMARKLAVRLYWMLRKGWDYGQLTKFGSHAGKPGSGDGVMSNTE

SEQ ID NO: 115082 - protein, 421 aa, unidentified
MKESSRIVGFDCAEEEHVAVLLGTDGEIEKRLGVVNERGQIRESLAKLMLAIEAGSKLVVVVESKRSYGRIVADVAQEMGCEVWQVNTIALNHFRSLEGQPRKDDEWDAYLGARMVYLRMGGCRMTVQTTDEERALSRLTRAYGRVTNDRKRQVARFRAVLLELAPEMLHKAWEGPQPDSKALLYLLERWPGFEGLDRAQLRSIEKILHTCRYGSRAARVAKLIRSMARGIEVAPEDRSAFTLEISLLVRQIQACNESADQLFAEIAERVERHPVGRKLLEMHGIGPVIAGVLVSELLPVARTSTEPQSATYSGVTPLSRKCGKSLDTDRLAQGVNKRILHALYTSSVVAIKRSAVDRAYYNKKVRDYAGHPKPHVAAFIALSRQRHKLIYKLMTSDARYDKETLIARHLERIEQAQSEAA

SEQ ID NO: 115083 - protein, 358 aa, unidentified
MKYVGIDVHKKMCQVAVIDDESELLDESRFRNTPEGIEEFAQRLSAYGDEVKAVVESTGNLWIQVHDRLEEHGYDVALSSPANSHLVSQSKVKTDKTDARALARLHRAGVLSTCFVPGEEDRSRRELLRHRLRLVKNRTAVRNRVHALLDKHGLRIPYKTKFSKKAVAWMRERSLGFMDDAILRSDLALLAALDEQIGYVEEKLASLAVDDARVRLLMTMTGVGSFAAMLVLAEIVTIDRFSSEKRFSSWMGLAPRVRQSGEKTWIGGVGGPGNRRMRWLMVQCAHTARQHDPRLRRLYERHARRKGGKSAVAVVAHEMARIMYFMLKRNEPYRGLNRGLWERKLKGMEKRALNGLLN

SEQ ID NO: 115084 - protein, 340 aa, unidentified
MSLYGGIDLHANNSVIVLLNEQDEVIYRKRLPNALSTVLEQLAPYHTEMKGLVVESTYNWYWLVDGLMDADYRVHLANPAAIQQYSGLKYSDDHSDARWLAHLLRLGVLPEGYIYPKAERAVRDLLRKRAHLVRQHTANVLSVQNILTRNTGARFSVKRIHELTKQELQSLLAEEPQVLAVTSSLAVLDCLRHQIKTLEKTVHKRLHHTPAYEQLLTVDGIGTILAQTITLETGAISRFPTVGNYASYCRCVDSNKISNGKRKGTGNVKNGHPYLAWAYMEAAQFALRFQPAAQRFYQRKLAKSRNNTVLARKAVAHKLSRACYDMMRGLVPYQATKAFG

SEQ ID NO: 115085 - protein, 353 aa, unidentified
MATKACPITTPLASVGIDIGKDIFHVVGLGTDGKTAFRWKIKRLALKEAFEKVPPCIVGMEACLSAHFVSRMLRALGHEPRIIPAIYVKPFLKGQKNDYNDAEAIAEAALRPNLRMVREKTQDQLDLQACHRVRSRLVSRRTAAINQIRAFLIEQGIAVRAGTSALRKSLFEILNNRKDEISPRMTSLIVGLYEDWLRLDERIEAISGEIEELSRSEANCRRLMSIPGIGPIISTATVAAIGTGEAFERGRDFGAWLGLVPRQYSTGGRPILGRISKRGSKYLRTLLIQAAKVLLMRPQNWSRYSFGAWLKTASERLHKNKLAIALANKLARIAWSVLRNERAFDTHLEAAAI

SEQ ID NO: 115086 - protein, 423 aa, unidentified
MSVSVVDRQGLPRRRGSGVRGTLGVSKPTRKRKETLVEQDQQYVGIDLHRRRSVIVRMTASGEVLSTVQIDNDPVALSVAVAEAGDNPEVALESTYGWYWAADLLQAEGARVHLVHPLGLHWDTRRVKNDVRDATALANRLRQNDLPESWIAPPEVREMRELVRYRAKLAALRTSAKGQIHAVMAKHGILPELGRMFGPGGQALIDEMPFEGVYALRVESLRDLLELYERELNMVERQMRAMFKDHAGYQAIQSICGVGPVMAGIFVAEIGDVSRFPSARHLCSWAGLTPTVRDSDQTIHRGHITKMACGAVDPPGAASPWGGDCDSSWWARSSSGPAHIRLRRFGYWGSAHRSDRSGQSCGVAEVVGAIRPTGGRRVRTGGLHGLALRGRGNGRRRGHSSCGRTGRDGRAAGKEEQSQDGQG

SEQ ID NO: 115087 - protein, 356 aa, unidentified
MSSDVKYIGLDVHKEAISIAVLNASGKLVMESIIETKASSILQFIQGLRGELHVTLEEGTWAAWLYDLVKPRVSELVVCNPRRNALLKEGSKSDKVDARKLAELLRAGMLRSVYHGENGLRTLKELGRSYQTISKDVQRVMNRIKALFRGWGILCTGTEVYAPCHREEWLNKISQAGVRKRAELFYQHLDGLQILRRNARREFLAESRKHQAVKLLRQIPCIGPIRSAQLIALIQNPHRFRSKRQLWTYSGLAVETHDSGQYRYVNGQLQRSKKPQQLRGLNRNHNHEMKEVFKSTALSASRSAGPFGEFYARLLAKGMKPELARLTLARKIAAVTLTLWKKGGRFDAEQLKTQAA

SEQ ID NO: 115088 - protein, 344 aa, unidentified
MGEVITIGLDIAKSVFQVHGVDGLGVVVIRKRVSRAKMLEFFAGLPRCLIGIEACPAAHHWARELQAIGHTVRLMPPSYVKAYLKRSKNDANDAAAICEAVTRPSMRFVAVKTKEQQAALMLHRARQLLVRQRTMLSNAIRGHLSELGIVSAKGRNGTDELLEIIGKDADSRIPLAARSVLKVLASQYVAIGVEIASISKSILAWHRACEPSRRLEEIPGIGPIVATALVAEISDWMAFSSGRGLAAWIGLVPKQHTTGGNDKLGSITKQGNRYLRWLLVNGAMAVIRYAQKHGTKKHPWLGQLMARRPTKVAAVALANKIARITWAIMVRGDRYREPALMPAA

SEQ ID NO: 115089 - protein, 313 aa, unidentified
MYYIAFDVSKKELSVYDGKKDMTFSNSEGLGSLKKYLKNYYRDFSQLIFLLEATGSYSDYLIKMCAQYQIKAVIINPKASHHFAKSLGIRNKTDRIDARMIYQYHRLIHDQMITVPRVNKEAKTLSTYLGSYQLAMKQRVALSNHLRHVRDKDLFGLLKKELKRALGLEEQILKRITAYILKDPQLKADYQRLLTIPGIGEKSAPALLYLFITYQGANRNQITALCGLDPIQRQSGTSVSGKPKISKHGSKLIRKVLYMPMLSAIQTNLKIRAFYQRLLRNHKVKKTAVIAAMRKLILIAHAIYRDKTEYVPA

SEQ ID NO: 115090 - protein, 341 aa, unidentified
MKITTIGIDLAKNVFQVHGVDAHGKTVLNKQLKRDQVANFFIQLEPCLIGMEACASAHHWGRKLQAMGHTVRLMAPQFVKPYVKTNKNDVADAEAICEAVARPNMRFVAIKTVDQQSVLALHRARQGFVRARTAQANQIRGLLAEFGLVLPQGIHHLTKRVPQLMQEASDELTGAFCLLIDRLLDQLKVLDQHVHELELQITSWHRANPLSRKLEKIPGIGPITASALVASIGDAGHFHNGRQVAAWLGLVPKQHSSGGKAVLLGISKRGDSYLRSLLTHGARAVVAQVRRKSPDAGWLNRLLQRRNTNVVVVALANKNARIAWALLAHDREFRPDYAPSA

SEQ ID NO: 115091 - protein, 353 aa, unidentified
MAIVVALDVHRKQITYKTLDRETGEVERGRIAPAARAEVRAWLARFAGCEAEFALEGTTGWRFVVEEIERAGHRPHLADPAETAAKRGRKRRAKTDRADCDLQLRLLCAGELPESWIPPAHILELRTRVRMRKTLIDQRTAWQQRLQAQLFHQGVPAGLRPRTRAGREALARAELSPAGRELVSLALRMIEAIDRELAPLDRDLHAFARRQPGCRALIARLYGVGPVSATAILAELGDARRFARSDDAVRHSGLDVTVYQSDKKRAPGHLSHEGPELLRWALFEAALSATRAGSPDHAYYLQVAERIDHNRACLSVARKLCRRAHHILRELGDEALAPVEGDPHAEEAIAAAA

SEQ ID NO: 115092 - protein, 334 aa, unidentified
METPLKYSIGFDCSKDDLEAALLLTDIQHNTVVKATRKFTNTQKGFSDCGYWITHHCKLDIPVCVCIEATGNYHENVVFYLYQRAYKVSVVLPNKARKYMQSLGLKSKNDKIDAKGLAQMGAEQNLTLWQPFSETIYDLRALTRYCEQLACHRTQFMNQLSSMQSGMYQTEDVAKGLQELIDLTGKQIDETKTKIQEMIQSDEKMNERFNKILPIKGLGFLTLATVVAETNGFELFQNERQLASYAGYDVIENQSGKRVGKTRISKKGNSHIRRILHMSSLNVVRCKEQKFVDIYNRIMSKTTVKMKAYVAIQRKLLCLIYTLWKKNEAFDAQY

SEQ ID NO: 115093 - protein, 410 aa, unidentified
MKQIRDRVAGLDVHRDTVVACVRYPANGQIVTEKATFGTTGTQVRVLAGWLADLGVTTVAMEATGVYWKPVFYPLEGLFKELWVVNAQHVKNVPGRKTDMADAEWLADVVAHGMVRPSLIPSPQARELRELTRYRKTQIDMRGGEIQRLEKVLQDAGIKLSSVASKVLGVSTRRMIEALIAGERDPEVLADMAMTRMRAKTDQLREVLPGWFGAHHAVLARRILDHIDFLDATIAALDQEVLERLGPFADAVELLKTIPGIDQRVAEVFMAETGGDMTKFATANHLAAWAGVAPASHESAGKRRHGGTRHGGRWLRRTLIEAARAAARSKGTYLSAQYARIARRRGPNKAAVAVAHSMIVSAFHMLSTGQPYRELGGDYFNQRRDPDTETKRLIARLKDLGVNVTIDQAA

SEQ ID NO: 115094 - protein, 353 aa, unidentified
MTLYIGVDLHPHQQTVAWCDTRTGETSTVDLKHDLEAVRKFYFSLPEPAIIGIEASAKAIWFENMLFETGHKLFVGNPVLIRKRATSRHKNDRRDAELILELLMRDEFPAIWRRPSESNQVIEIMGLRKSLVRQRIQCYNRLQALAHSIGMPKGRMKTAKVQTVLKAAEMCEADSIRREHLFSLIEQLDSQIVRLEDWLKKKAEENSSVQLLKTQMGVGYLTALVTVHTLGDVERFKRANKAVVSFAGLDPREMSSAGRIRFGAITKAGSSMLRHHLGQAVMTATRYDPSLKTFYKRLAKKKPKAVAKTAASRKLLVKLAIMLRDGITAKEFDQRGRTVGNARRIARSEMTAA

SEQ ID NO: 115095 - protein, 482 aa, unidentified
MKPKQQEETRKATCRPTQGHWHQMNRKRRREMMRRIQSENLSLEVVHPDAAGIDIGNESHYVAVPPTRDSEPVRRFGCTTAELKSMADWLKQCRIRTVAMQSTGVYWIAVFDILEEAGFEVYLVNARETKNLPGRKSDVQESQWLMKLHTYGLLRNSFRPSQEIRTMRTYWRQRNDLVRGAARHVHRIQKALTQMNVQLANVLTDVSGVTGQAIIKAILAGERDPHKLAAFRDPRVKATEEEIARSLEGNWQEDLVFVLKQEQDAYEFCQKQMAECDRRLQDYLQQRKDRSAGADLPEEKRKTRLKNKKGNKPQFDLRRELFRMTAADLTRIDGIDVMTAMTIISEAGWDMSKWKTEGNFASWLRLCPDNKISGDKLIGKGRLPSNNRVTIALKMAASSLRTSHSYLGAQFRRLKTRLGAPVAIKAMAAKLARLVYRMLSHGMQFIDRGADFYEAQHRHRQINALKWKAARLGFQIIEAPAA

SEQ ID NO: 115096 - protein, 450 aa, unidentified
MRKKKMDLEIVNPNAAGIDVGSRSHYVAKGQQADDVREFGVCASDHRELISWLKKYGIKTVAMESTGSYWQNLFSALQDAGFEVLLANGKFTKNIKGKKTDVLDCQWIQKLHSLGLLSGSFLPDETTEQLRTLCRHRGNLMDMAASTSKKMQKYLRLMNLRLDIVVKDICGLTGLQIIEAICQGESDSKILASFRHGNCRKTESEISKALQSNGRKDYLFALQQEYQIYNELQEKITLCELEIKKYLDIIIKAQPQNKKLKTTDKLHKRANKNAPKSIDLNQVAYKYFGGIDLMDIEGLSHSTILTLMSEVGPGGLMKFPSGKHFASWLRLAPNNKISGGKILSSRIPKGSNRLKTALRLAANCIGNMKNANLHNFFIRICIRKGRTAAITATARKLAIIIWNMVVKKIPYNPPNQYEFLDQKRKRKVLEMRKLIQKLDIKPIEIGFVTS

SEQ ID NO: 115097 - protein, 399 aa, unidentified
MSGEALAGVDWASEIHAVCVIDGDGEATDQFDVTHDAGSIRALVARLRRVGVSRVAIERGDGPLVEELLDADLEVFVVPSRQIKGLRTRYGSAGNKDDRLDAYVLADTLRTDGHRWKPLRADHDDTRALRALCRSRKDLVETRVQIVNQLRANLELAFPGAIGLFCKPDSSITLTFLRRFPSAEKAQWLSPKRLASWLSSVGYTGGIPSGVLYGRIDNAAPGLLGAEGAARGRITLGLVAMLETLNAEVQALEHDMEELFRSHPDQRIFASLPRSGMVRAANLLAEIGDCRERFPSDDALAALAGASPSTRQSGKREQTVFRWACNKKLRAAVMDFANGSRSADPWAADIYKRAIDRGCRHPHAIRVLARAWLRVIWRCWQDSVPFDPALHGARQQLAA

SEQ ID NO: 115098 - protein, 401 aa, unidentified
MEGPIVSIDVSNGNSHYMCFIKNNKRFGKVKKIDHDIEGFKRLLEDIQKLEAETNEKVCAVFEATGVYTKPLERFLSKNSIKTYMINPLESARKRKEEIHNKKTDKLDPISISKVYYDKEKMMELKKKDETYNWLRKKNRLYEDQLNHLRKYKVTFQNQLSICFPGYLDLFKDGYSDIPMTILKKYPHPDLLKNKKAETVARYLEKNTCHNHKVSLEYALKIIEFAKKTYPGCEKDDVEVEIFKILLDKVIETQRECEKTLNEMITVASTLEEYRYILSIDGIGTNLAARIIAEIGDIEEFKSREALVAYAGLDPHIYQSGDQDGKHLKISKKGNKYLRCLLFLAVGCSIRGTKDNPVNRFYQKKKQQSNPLNSKAAKTACTAKLLKIIYGICKNKTTYER

SEQ ID NO: 115099 - protein, 370 aa, unidentified
MKYVGIDLHTNRFTCCYLFDNSKEKQTETFDLNTEGLSSFYSTITKDTYVLVEATINTFAFVSLFKDLVQGVIVANTYQLKSVGVPGKKTDKLDAAKLAEKLKAQVISGVQQIVPVTVPPKEIRDLRALFASYRTLRKEIGRTKNRIHSLLKENLYPFTKEYIFGKKVRKEIRNISDDYLLSFQISLLMDTLEHLEEAFERLVVEIKKAGSLFMPQIDILTSMSGISVVTAIAIIADVIDAGRFRNAKHFASYLRSVPRVESSNDKTIIKSTTKAGRKLAITLLSQSLNHFRDGNRKLNRWVERVSKYKKKGIVRMALCRRVITEIYQMLKKEEYHYYYNPVLHGKKMAEYQKFLEKDKKNFSKEFCISA

SEQ ID NO: 115100 - protein, 415 aa, unidentified
MEILYSHCAGLDVHKKTVVACRLSVDEQGHKVKEIETFGTTTVEILRLSDWLLAGACTHVTMESTGEYWKPIWNLLEGNFELLLVNAQHIKRVPGRKTDVQDAEWLAELLQHGLLKPSFIPPLEQRDRRDLTRQRTQLVRDRTRVLNRIQKVLEGANIKLSSVVSEISGVSSRAILRELVKDQLNPAQLESLVHGRLREKVHELEQALTGRVRDHHRFLLAQHLTHLDFLEEQIATYAQEIERVTAPFEELIRLLDTIPGVARTTAELILAEVGADLSRFPTADHLASWAGLVPGNNESAGRRLSGTMRKGSQWLRVGLTQSAQSAARQKNGYLSALYHRLAGRRGKKRATMAVAHAILVIAYHIIQRREPYRDLGANYFDERQKVSTANRLTRRLEKLGYRVLITPPTSTPLAV

SEQ ID NO: 115101 - protein, 329 aa, unidentified
MTIVEDARVITGGVDTHADMHVAAALDPIGGLLGVREFPATAAGYGSLLSWLRSFGTLTVAGVEGTGSYGAGLARHLAAAGVRVVEVDRPDRQDRARQGKSDPLDAVSAARAALSGRASGAPRGRDGAVEAVRALMVAKRSARQERTQAINQARALIMTGPEELRARFVRRSPAQLVEVIAALRPRPGDVPGYATRVALRELGRRARFLDAQLDRLDELIGPLVTARAPGLLALHGVGPDTAAMLLVAAGDHPERLRSESSWAHLCGVAPIPASSGKTAGRYRLNRGGDRRANSALWRIVIVRMSSHPATRAYADRRSKDCPRKRSSAA

SEQ ID NO: 115102 - protein, 362 aa, unidentified
MAGMDLHGNNVMVGIVDAQGARLQHRRLACELPEIIEFLAPYKTELESIAVESTFNWYWLVDGLKAAGFPVVLANPAKIDQYSGIKHADDKNDAYFLAELQRLKILPTGYIYDPELRPVRDLLRRRMSLMRQRTTLFLSAKSLHQRTTGRALELRRLKAMEPEEAVALYTHPANQLIARIQKEHIDSLDQSIRQIEKAVMKVALQQPYYQRLQTMPGVGIILGLTISMEVGNIDRFAGPGQFASYCRTVDAKRVSNGKTKGENNQKCGNKYLAWAFVEAAHGARRFDTACRRWYDRKAGKRCPTVATKALACKLAKAAWYVMAKGEEYQAGRVFPGLTEPKAEEISGEQASARKGVGPNPED

SEQ ID NO: 115103 - protein, 292 aa, unidentified
MSQEKYIGMDVHQATISAAVMNAQGKLLVECVLETKASTIVEFIQGLQGTLSLTFEEGTWAAWLHDLLQPHVSRLVVCDPRKAALLKEGNKSDRIDARKLAEMLRTNQLHSVYHGEHGIRTLRELGRSYLTVSKDVTRTMNRIKSLYRSWAIPCRGSSVYAPRHRAEWLAKIAEPGVRMRAEHLYQQLDSLQPLRLEARRELLRESHKHAAVQRLRQIPAIGPIRAALLVALLQTPHRFRTKRQLWAYSGFAVETHDSGEYLWRSCRQKAVGMAAFTDHVFVYRSKALTAEL

SEQ ID NO: 115104 - protein, 420 aa, unidentified
MEGKRLSAIFCGIDWAEGHHDIALVDQDGSQVAKLRIGDDSAGFHSLMELLAQHGDRAEDPIPVAIETPRGLLVACLRATGRKVYAINPLAAARYRDRASVSRAKSDAADARVLADILRTDRHAHRPLPADSEAGQAVAVLARAHQDAVWDRQQMLNRLRSHLREYYPAALAAFHGPGKPGLHSPRARLILGAAPTPAGAAALTRGQLRALLKRAERPRCGIEAEVERLREIFRAHYLHHLPQVEQAMGHQTTALLRQLDAACAGVCQLAAATEEAFLAHPDAEIITSFPGLSVLSGARILAEIGDDRNRFADARAIKAYAGAAPVTRASGRSHVVVARTVKNRRLAAAGYMWAFAALRVKAPRAHYDRRRAAGERHTAALRNLFNRLLGCLFRCLQTRAHYDPDRAFTMPQTPTTQGST

SEQ ID NO: 115105 - protein, 423 aa, unidentified
MTKRFSTPTGVVLVAIDMSKLRQEVLIERPEGGRRRRMTVMATKLDYDRLAADLAAIGRPILVGFEATGNYHRTLAYRLLTAGFELRLISSVALARTREALHNGWDKNDPKDAQVILHMLRIGATQAYVDPLAAGINDLQELSKTHETISKAKTQTWHRILTHYLPLYFPEIGRFAGNSRSDWFLALIERFPTPGSILALEREAFVAVAWPLVGRKVSKARLINDIYETARSSIALPVPEESVAITMFRMIIAQARGLIRERNRIEEIAHLTLAEHHDYQLLRRIPGIGPINALTILAEAGDLRRFGHHRQFLKFCGLDLATCQSGTFRGRTKLSKYGNARLRRTFWMAAQVAARQCDNSFRDKLGRYVAGHADDADRRRKAMTALTAKMARVAHAVVKTGTEYRPFLERSDARWKDPSLQEP

SEQ ID NO: 115106 - protein, 354 aa, unidentified
MIIIGMDYHPSFQQLAFVDTETGEYQESRLQHREEAEKFYRDLAARGVKVRVGMEASGQARWFERLLAELNMELWIGDAAEIRAKRVRKKKTNREDARHILRLLLEDRFPRIWVPSWENRDLRQLLWHRHRMVQMRTRIMNQLQAVALNEGLCCKKRLWRESGRKQLEGFPLAPWGSRRRRDLLELLDRLNPTIAELTQTIEQEVEKYPAAQRLMTHPGVGALTALAFVLIIGEAERFRCGKQIASYIGLVPTEESTGERQRLGHISKQGSALLRFFLVEAAQVTVRSDMEWRSKYFHLAMRRGRKIAKVAMARRLAVRLYWMWREKRDYEHLKKFGSYVGEPGTGVGARQNIA

SEQ ID NO: 115107 - protein, 379 aa, unidentified
MKIITQNEKNLYVGIDVHKDTYSLCCFDFQRNELSDEITIRATTKGVIKYLEAIRKKHREEVLFACGYEAGPTGYGLCRGLQKAGYGCVVMAPTTMSNPDGKRRIKTDRIDARAISRILAYKSYSQVHLPSEEIEALKEYTRARYAKKRMLKKAKQELLSFLLRNGKTYPESGNYWTKKFFNWIKTVQFSKKWMQEAFNEYLVEVYSLKAKIERMDMKIREIAGLEIIKDKVDKLVCFSGIDVSTAVETVVEINDFTRFATAAQFVSYLGLCPGQDSSGKRKTMLPLTKSGNCRVRTLLCESAKAIKRTNPYGQKSGRILERQKNASTEIVAYADKTTKRIRTKMKNLEECGKNYNVSPAAGARELACFVWGMMNGKIA

SEQ ID NO: 115108 - protein, 347 aa, unidentified
MSFVGVDLHTNSFTACRREADGRESFETFTLSPADLARFCLRLDAEDEVAFEATGNSAWFRDQVLPCVGRVVVVNPAQFKVIRQSVKKTDRNDARALALFLAKDMLPETRAKTQAESELGSLTQTRDLLVKQRTRLLNKVHALHNRHGIKLKRETLASRKRLLALAPDPFTPLEWAELEIVRDQALSLTAAIAKIDARIEEAAGAMNGYEGLTSIKGIGARAAAVFLSTIGNVHDFESADKLAAYFGIVPRVSQSNETDNRGRITKRGSPLARTVLVQCTLIATRYSPYLKAYYDRIKARRGAGKAIIATARKLLAIIYDTLKNQWIFRDFTAFELKSPQVPAGQSS

SEQ ID NO: 115109 - protein, 435 aa, unidentified
MTPHKDSFLDPRPLAPTPTLPQSPMLAEALQVCHPHAAGIDIGEAEHWVAVPPGCDPQPVRRFGTFTADLEALADWLIDCGVTTVAMASTGVDWIPLFALLEARGRQVLLIDPRQAKRAPGRPKTDRLDCQWLQRLHAYGLLAGAFRPDDQVCVLRGYLRHRQMLLTYAAHPMQPMHKALEQMHLKLTQVVSEITGVTGMAILKAIIAGERDPQHLAQLRNPHCHHPEDDIAKALQGTWRAEHLFALRQAVELYAFSHQQITQCDQQINAHLETFGDKSAGQPLPPKARRHKKTNDPRFDARTPLYRMAGVDLTTIEGIEEGTALVILSEIGTDMTRWPSVKHVCSWLGLCPQHKISGGKVLSRRVRPGAHRVTVALRLAARSLHHSQSALGAFFRRMQARLGTPKAITAAAHTLARLVSHLQRILRVCRVTGSL

SEQ ID NO: 115110 - protein, 408 aa, unidentified
MKTLHKRCAGLDVHKVEVVACLRVISKRKVEREVRRFPTTTQGLLALAEWLESAGCTHVAMEATGVYWKPVWQILEGRFALILANAAHVKNVPGRKSDVNDATWLADLLAHGLIQSSFVPPPAIQELRDLTRTRKQLTREIVQHVQRIQAVLEEANIKLCSVITDIMGASGRRMLKALIAGETDAEKLAALGHERLGCTRAELVQVLTGCVREHHGFLLEQHLRTIEQLEDSIAAFDARIEAALSPFDDIVERLKEVPGLGATAIETVIAEIGVDMSQFPSAGHLLSWAGFVPRLDESAGKRRSTRIKKGAPWLKPVLLQSAWGAARKKNSYLQAQFLRLKARRGAKKAAIAVAASILTIVYHMLRDGTYYQDLGPEYFACRNPAKTAARLANRIRNLGYQVEIRAAA

SEQ ID NO: 115111 - protein, 332 aa, unidentified
MYIGIDVHKRYSQIAVLDHNGEIVDEVRVENANLEDFAQQYAGSQAAIEATSNYYHIYDTLSEYLDVTVANPGKLKLISDTDKKTDRVDAKQLARMLRLGSIPESYIPTDDVREARALVRGRHSLVENRTEYANKIHGLLDDHGISQDVKPLSVEGREFLAELSLPTPWDTLLASYLDIIETLTEQIESLEEVIEERAGSLKETQLLMTIPGVSYFTALTIYAEIGDVSRFDSDKDVVSYVGLNPVIRESGDSRFEGSISKRGSGRVRWLLVQSSYTAVHTCQDEYLSRFYDRLAQRKSSKKAIVATARKLLVSMYHMLDREEVYDPPGVSA

SEQ ID NO: 115112 - protein, 408 aa, unidentified
MNAVGIDVSKGKSMVAALRPMGEVALLPQEFLHTEVGLEQMAYAIIALGEDTRVVMEATGRYHEPVAAALHEYGIYVSALNPLFIKQSGGGSIRKVKTDKADAMKIAKYGLDNWVDLREYTPMDTVRQQLKLCSRQYNLYMKTVVSLQNNLISLTDKTFPGVNELFSSPERADGHQKWVDFVMTFWHCDCICRVSEKAFTERYQKWCKRKGYHFSTEKALDLYAGSCGHFTTLPKNDNIKLLITTAAQQLLAGKMTLAALRAEMTRLAMQLPEYDTVRAMYGVGQTTAAQLMAEIGDVRRFPRRSSIVGFAGVDPGVDDSGKHSAKSVPTTKRGSPHLRKTLYQIVCTYLRKAPADEPVYQFLDKKRAEGKPYFVYMTAAQNKFLRIYYARVKECLEAFDAQQDIAQS

SEQ ID NO: 115113 - protein, 364 aa, unidentified
MKRKVYVGMDVHKETNRIANLTSNTKEIVKEQQIKHNEVQIKKFVNKLKSEWNEIHSCYEAGVTGYPLYRYLKSLGVNCILVAPGKIPRQSSDKIKTDKRDAIKLAKLLRSGELESIHVPSEEDEAVRDYLRSRDSLRLDLGRNRQRLMKFLLRKGITYSKTKYWTVSHNKWLNTLQFNNEILQETFNDYYSRVRVQEENLKAMDKRIQEIAESEPYREKVGILRCFRGVDYLTAMFLLCEVCDFKRFKTAGSFMSFLGLVPGEYSSGSKRKQTGITKTGSPRLRRILTEAAWQHRFPGTGSKIVTARRSGQPALVVALAEKASLRLHKKFRNLQQRGKTPQVIITAVSRELSGFLWAAMNLVA

SEQ ID NO: 115114 - protein, 402 aa, unidentified
MNAVGIDVSKGKSMVAIMRPFGEIVSTPFEIKHTTSDINSLVELISSVEGESRIVMEHTGRYYEVLAHQLSEANLFVSTINPKLIKDFDNDSLRKVKSDKTDAVKIARYALDKWQNLKQYSVMNELRNQLKTINRQFCFYMKHKTAMKNNLISILDQTYPGVNTYFDSPARSDGSQKWVDFASTYWHVDCVRKMSLNAFIDHYQNWCKRKKYNFSQSKAEEIYGKAKELVPVLPKDAITKLIIKQAVDQLNSAATTVESLRTLMNETASKLPEYPVVMAMKGVGTSLGPQLMAEIGDVSRFTHKSAITAFAGVDPGVNESGTYEQKSVPTSKRGSAGLRKTLFQVMDVLIKTHPQDDPVYQFLDKKRTQGKPYYVYMTAGANKFLRIYYGRVKEYLSSLPES

SEQ ID NO: 115115 - protein, 394 aa, unidentified
MRFAGIDIASETHVVAIVNADAAVELKATPFTEDAAGYQKVLALLGAPGEVLIVMEATGHYWKNLFAVLAAAGHRIALLNPLRTHRFAGEELQRTKTDAIDAVGIARFAAQKRPAVAPLPDALTEELRELVRLRERLLQDFGDRLRQLHRLVDLGFPEFTRYVRTLESELASAILRQYPTAAAFRGVSVRRLAALRYDGRHHVGLDLARALIEAARRSVGQHHSAAYRMQIRYACDDLDVLRRRLRELDRDIENALREHEVGRLLTTIDGIGSNTAAFVVAEVGDPASFRSARALSAYVGTIPGLKQSGKRSTRHAGLHPLGNARLRAALWMPTLTAVRFNPWLRAHYQRLRTRGKLPKVALVACMHKLLLAIYSVAKHRRPFVAALDADSAAI

SEQ ID NO: 115116 - protein, 402 aa, unidentified
MLYLGIDLHLRHMTVSLRNPGGDVLLRRQVSTRWPKLKEFREQLRQVAAGDEKYVAILEVCGFHDWLVKWLHQDARCQLVLVVQPLGRSATKTDRRDAHALSELLWINRERLLRGDRVHGMRTVHVPGEEQMADRRLTSMRERLVRRRTQTINQIHKILRRQNREWDRPTKTFQTQKVAAWLTRLELEPMDRLLLNQLLVQWKLWEEQIVKVDAQMAQRWLANRDAQLLATIPGVNMYIALAIASRVAPIERFPHGRSLANFLGLTPGCRSSGETERMGSITKMGSRLVRFLLGQVVLHLLRRDGTVRAWYQRIKRRRGTNIARVALMRRTVTIMWRMLTTREAWRPGSAHAGAEAAEVPRKVRPRRGRRTVWSALSQAAPHAESTGSSSLLTSEEVTPCQA

SEQ ID NO: 115117 - protein, 345 aa, unidentified
MVILGVDAHKRTHTVVVVDDHGRQVASKTIGTATADHLGLLRWAEQFGADRQWALEDCRHLSRRLERDLLAAGERIARVPPKLMAHVRDSARTFGKSDPIDALAVARAVLREPSLPTARLDGADREIRLLVDHREVLVAERTRAINRLRWHLHELDPGWDPRPRSLDRASAYDRIEQRLQHAEGLVAALARRLLAHARRLTAEIDELTADITTRVEAIAPSLLAIVGCGVLTAAKLIGETAGIDRFTSKEAYARHNGTAPLPGWSSNRARHRLSRTGNRQLNAALHRIALTQAHWHPDAKALLARRTAAGDGGLEALRVLKRRLSDVVYRSLRADASLSITNPAA

SEQ ID NO: 115118 - protein, 371 aa, unidentified
MESIIYVGMDVHKDTYSLCSFNADRNLLFSQTQMKSTTGNVVRYLKKVSEMNNDALTLCGYEAGPTGFGLCRELQKLGFACVIIAPSSIAKTAKDKAVKTDRSDAQLLAKTLAFHSFKEVVLPSENIEAIKDIIRLRSSANKTCKRAKQNLLSFLLSHGFSYSDGKHWTVKFTSWLKTIHFASEYLTFCFEEYLSEVTRQIQRLSLLDKKLKELEDDKEISDGVKKLKCICGIDTVTAVSLVAETGDFNRFSAARHFANYTGLCPGRHSSGLSNKGTGITKQGNNYLRRLLIEAAKSVKRSASHGHKSKRILARQEGASSEVINYADKAAARIRMKMYHLERRGLHCNKAATAGARELACFAWGMMTGHIA

SEQ ID NO: 115119 - protein, 357 aa, unidentified
MRSITPQDAAIIEVAGGVDTHSDTHTAAVIDQVGRVLGTEQFPADTAGYAALLDWMRSFGQLVGVGVEGTGAYGAGLARLLHRQEVLVIEVDRPDRKTRRFQGKSDPIDAVQAAKTALAGERTGVPEQRDGRIEALRNLRVARRSAVDQRADAQRRIKTLIVTAPDDLRERLRSLGVKDLITTCANLRPDRTGAASPATAVKIALRSLARRHQQLTAEIADLDELLEPLVTAINPRLVTANGVGTDVAGQLLVTAGENHDRLRSEAAFAMLCGVAPIPASSGRTTRHRLNRGGDRQANAALYRIVLCRLRWDPRTRAYMERRTKQGKSKKEIIRCLKRYIARELYQIITTNDLELAA

SEQ ID NO: 115120 - protein, 345 aa, unidentified
MEPMYYIGLDVHKRKISYCVKDSCGKVFAEGLLPATRLDLDLWMKTLPQPWSAAMEATMFTGWIYDHLRPHAAALKVAHPLMLRAIAAAKKKNDRIDAGKICDCLRCDFLPECYMASTAIRERRRTLRYRNLLVRQMVQMKIKISALLMETGVSYNKQRLHKAGYFRELLATNPDIDEGLCSLLRLCRETVVRLGKTESALVRSLERDSLLVERVERLMTIPAVGPITALTWALEVGDVQRFSSIKKAISYCGLCGAEKSSGNTVQRTPLSKQRNKHLQTTLIEAAKMAPRNSPELAMLYDKEKQKGNANRATLAVARKLVAYLMAVDRGQRNFQIAETSSNIAA

SEQ ID NO: 115121 - protein, 347 aa, unidentified
MDYYAGIDVSLEASSVCVVDGAGKIIREAKIGSEPAALIGWFAALGFDLARIGLEAGPLSQWLYAAMKQAGLAVELLETRHVRTALQTMPVKTDRNDARGIAQLMRLGWFRPVHCKSMAAQETRALLTARKLVQSKLYDIEMSLRGILRGFGLKVGPTTPKRFARRIEELVAGHSTLEIIATALLSAHAALLREFDMFEKRVRAMARENKRARLMMSAPGVGAIVALTYVSAIDDPSRFSSSKRVGPHFGLTPRKYQSGETDVTGRITKIGDAGVRTALYEAANVILTRPVKGAGLKSWAMKLARRAGMKKAKVALARKLAVILHRMWVDGTAFDARRAAFAVATAA

SEQ ID NO: 115122 - protein, 337 aa, unidentified
MKTWHVTTVTESGYKYSFAQHSDARELFDRLNRKFPDAHFVSAYEAGFCGFSAHYALADLGFESIVVHAADIPTTGKEKAMKTDAVDSEKIAWALKRGELTGIYVKDKQYMDDTNLVRLRQRFVADLSRQKNRTKHLLYTQGVTFPERFSKNRTHWSRNFMSWLREEVELLSGEKRSLVLLCDQVENTRRAILAVTREIRRLSTSDKYKENYGLLSSVPGFGLIMSMSMLTELDNDVTRFPNERTFVSMLGLIPTCHDSGEKKAIGEKTNRGSKQLGPLIVEASWVAIQRDKGMGAYYSNCCQSMKPHKAIIKVARKLACRAYAVLKTKTKYKYEQS

SEQ ID NO: 115123 - protein, 336 aa, unidentified
MIAVGVDTDKHEHLARAIDGLGQVLGAVTITTSLRGYGELVGWLRTLGEGVVVGIEGAGSYGAGLCEYLLAEGFDVVKVERPRREDRRRGKSDEIDALLAAKKVLAADGLSTPRAGGTRQALAALLIAQRSCISERTRLVNQLQSLHTTAPVALRERIGPGNGRKLAARLVKMRARTDAPQSERLIFTVLRDLARRAQQLAAQADAYKHELTELISSLDATLLDEYGVGPISAAKLLVCDPKRLKGEAAFARCNGTAPKPASSGQTIRHRLSRGGDRQANNALHTIARIRGRHNEQTRAYLDRRISEEKTPREAMRALKRHISHSLYRRLITIPLT

SEQ ID NO: 115124 - protein, 351 aa, unidentified
MNFVGVDLHKKTIVLCVVNQARKVLHRRTFACCQVEAIVAFFRELGPFRVVVEATASYEWFVELIEPLAQKVVLANPKKLRVIAESTKKTDKIDAQVLAEFLALDMIPEAHRPTPRVREHRALVRHRQYLKQSATALKNKMRRIFGNYNVDRKDLFTAAGWEEIVKAVKLSASDRFVLDQLHANWKFLEGQLHDLAKRLKEFAAAAPPREAEARAKLATIRGVGPVTVDVVVSELGDVSRFKSSPAVTAYAGLAPRVRQSAGKRKDLGITKEGSPLLRWALVEAAWRVIRQSAAWARIYDRIKTRAGAKRAIVAVARRLLCVMYAMLRDGTNYDLLKVGEPPPRSARCAVV

SEQ ID NO: 115125 - protein, 339 aa, unidentified
MSAAYDGRQFVGIDLHRRRSVVSRTDQHGEVLEAVRISNDPHMLAEVMGRAGEHPEVVLEATYGWYWAADLLTTIGANVHLAHPLGVKAFAYRRVKNDFRDAADLADLLRMGRLPEAWIAPPEVRDLRQLVRHRAKLVAVRTGWKCQVHAVLAACGIPVRMSDLFGEAGTQLLDHLQLPTTFAARVNSLRRLIHTLDAEINLFGGMARARLARHPGYRAIQAVDGLGPVLAAVLVAEIGEVTRFPGPAQLASWVGLTPRHRESDTHVHRGRITKQGSRLARWAAVEAVQRVGAQTRLGQVRERVAERRGRNIGVVAAARELVCLVYYGLRDGHIRRLAA

SEQ ID NO: 115126 - protein, 297 aa, unidentified
MVAVVVGIDVAKAHVDVWVLGTKLDVQRFDNEAEAHSALAAALKPLDVALVVMEATGGYEAALACALQAAGLPVAVVNPRQTRDFAKSMGRLAKTDRIDARMLAAFAAVLVRRDDLASFIRPLADQEQQALAAMVTRRRQLVTMMLSERQRLQLAIAVVRPSIEAMIEAIRKQLDDVEAQMVGHVQAHHAELDKLLRSASGIGPVASATLIAELPELGKLNRREIAALVGVAPMANDSATRRGDGACRAGASRYAACSTWPRSRLHATTRPSSASMTGCWQQASCPRSLWWPACASS

SEQ ID NO: 115127 - protein, 375 aa, unidentified
MTGVDSRHRPRRDRKPAVASESKPRMSLELRSLVPYPNSCLGTSPHQQERDTKMATVSFCGIDVAKDRLDVVVLPEQRCWSVCNDAAGWAELAKQLGSFSIAAIGLEASGGYERGVMRVLLAADMPVHQINPFKLRQFAKASGVLAKSDRLDARVIASFIAIMPPRRAQRPSPAIERLTEILSVRRQLTDQKIAAQNASAMLQDAMLLRLSRRRIGRLAADIEMLDRSLVEIVRTDAALAHRYRLLTSMPGVGPALACTLIALLPELGSMSRKQVAALVGVAPYTFESGKLKGKRCIWGGRAPVRHVLYLAAMSASNWNPVLKAFHSRLKIAGKLHKVAIVAVMRKMITMLNAMVRDDVAWAGHLGGRQILPTAR

SEQ ID NO: 115128 - protein, 413 aa, unidentified
MKPWKEITHYAGFDWAHDHHAIVIVDRAGLIVADFEIEHSAPGWQRWREQVAALGPGVAACVETSQGVVIEQLLESGVSLYPISPVSSKAYRERKAPSGNKTDHVDAWSLADALRVDGHGWKALAKEDPLVAELRLLCRDEVALIQERTDLVNQLQSALHEYYPAALEAFEDWTLPGAWAFVEAFPTPQALTAAGKRKWEKFLHSHKLVRPQTYAKRMEIFARASEFVSGEVLTRTKSRLALTRTRMLRVLQNQIEAYRAEIEKLFAQHPDHDLFGSLPGAGPKIAPRLLSEIGSDRERFDTNGLQRLAGTAPVSYQSGQIHKVYLRRHCNKSLRATVHLWANLTRQCSPWAALYYQALRARGKSHACALRSLGQRWLKILWKMWQTRRCYDPELHARNQLKHGSWVLKLQST

SEQ ID NO: 115129 - protein, 346 aa, unidentified
MKYFAGLDVSLEETAICVVDEAGAMVREARIPSEPEALVAFFQGSGLVMERIGLEACSLSAWLHESLGAAGLPAVCIETRRAKAAMGAMPNKTDRNDARGLAQIIRTGWYRAVHVKSPACRSWRALLTARRLLLNKMRDLENGLRAVLREAGLKLGTPTRKEFAARVRELTAADPVLSVLAEPLLTIIAAMTRELAQLTKRVLDIVRDEPVCRRLMGVPGVGPLTALTFRATIDQPERFRHSRDVGAHLGLTPKRYQSGETDVQGAISRCGDELARTALYEAAHSLLVRSRRWSALRAWGMQVAKRRGMARARIAVARKLATILHRMWADGTEFRWGKEGTMPAAA

SEQ ID NO: 115130 - protein, 366 aa, unidentified
MKQVTTYVGIDAHKKDLFVAMLIGAATTPVTWQLANEPGAVRRMARKLERDAPGLVHVYYEAGPCGYALQRQLATSRIACDVIAPALMPRKPGERVKTNRRDARKLAELGRAGLLTVVQPPTPADEAVRDLARARDDAREDLQRCRHRLGKLLLRRGLHYAGRNWTQAHRRWVDSLTWAHAAERAVVDDYRLAIDHTEARLVELDARLAEIAEQEPYRTPVGWLRCFRGIDTLTAILILAELHDFRRFGSARALMAFLGLVPAEDSSGEKHRRGRITKMGNGLVRRILVETSWHYQHRPGVGRALAARRTGQPSRVIAIADKAQQRLCRRFRRLLAAHKPAPKVAVAVARELAGFLWAALQPPVAA

SEQ ID NO: 115131 - protein, 349 aa, unidentified
MNYVGLDIHARNFTISVLSKDNMTIFETELPTSADNLRSVIGAIAEPKCVVLEESTVAAWAYRTILPCAAQVIVADPVTNAWISKDENINDAEAARKLAQLLRAGYINPVHHNTQHNQFFKELVQLYHNTSTELTRFKNKLKAKFRQHGVNCTGTQVYSDKGRQRWLQQLEDADAHYQIQFLLETIDHLQAQKSRLRREIAKRAKAFEPISRFRDVPGIGLVRAATFFAIIDTPHRFANKRKLWSYCGLGIAKQTSDQMSGPQHLTRRGNPMLKDITKGAAVTAIRMVDNRFAVQYKALIGNDVGPESARLTVARAIVSTLWAIWRKGEEYMPEKRSVAGFDSQTKHGG

SEQ ID NO: 115132 - protein, 368 aa, unidentified
MMVWIPHPATASRCAKMVMLKSTSMEEVSVEEVTVIGIDLAKPVFQLHGADASGRPVFRKKLSRAQLIRFMADQPPCLAAMEACASSHYWGREFIKLGHEVRLIPPIYVKPFVKRQKNDANDAEAIAEAVVRPTMRFVPVKSEEQQARSMVFKTRDLFVRQRNALINALRGHLMEYGIIAPPGRTFVKKLKAQTDAPESDLPPGVIELCRLHLEQIGILNVRIRGIQKRLEDAAKSDPETIRLQTAPGVGPVSVMAIQAFAPPMEGFRRGRDFAAWLVPVQKSTGGRQILGRTSKMGQRDIRRLLIIGAMTRVSWAVKNGPPKGSWLEQMLARKPRMLVAIALANKTARAIWAMLTKQEDYRDPAPAV

SEQ ID NO: 115133 - protein, 343 aa, unidentified
MFLSLKRTVCKITHNMRYVGIDVSKLTLDAAVFSEGKDIREFAHTKVENSKNGYRQLLRWLKGQGISTKHVTFGMEHTGYYCHGIQGFLERKNIPYVMLETTLLKNLPFVPKDKNDKLDSQKIADFIARYSDRLHYYHQPSETLARLKEMVRVRKELVNGRTRLENEIKVTDEKDLHRMLSKQIDSFTEDILSIEKSMEDLVESDESLMTNYVLLKTVPSIGIVNAMNTIAITNNFTLFINGRQYARRVGVAPKECDSGKTVHHRARPSLHADLSAKADLSRAAENAIVNSEEFKAYYERKMNGKTRKDDPDTHRKTINAVMFKLILRMFAVIRRQKPYEEMA

SEQ ID NO: 115134 - protein, 429 aa, unidentified
MKPCEQTAQDWLAYRAFGGLDWASEKHNVIVVDARGKLVEDFEIAHSSVGWKKFRERLAPYGAIPFGIETSQGSAVEQLLEAGMKVYPINAKSAKSYRERKAPSGVKDDRLDAWSIADACRVDGHGWKALRPEDPLVKELRLLCRDEVGLIEQRTSFICQLRHALGEYYPIALEAFEDWGSLSAWMFVQRFPTPQILQGAGKRQWEKFLHSRHLWRTQSAPRRMELFAQATELSGTVPMANAKSQLALSLISMLFALEEQLGIYRKRIEELFARHPDHDLFGSLPGAGPKLAPRLLSEIGDDRERFEEGPQALQCLAGSAPVTRRTGKRKVRANPDQWPCHQRWACDKHLRHAMHLFSEHSLTRCVWAKIYYQHHRQKGSSHADALRRLTQRWLKIIYRMWMDRKPYDAILHHNNQLKHGSWVLELKTT

SEQ ID NO: 115135 - protein, 432 aa, unidentified
MGNHNQPFLSVGIDVGADFSLMAVALPTQEIVGRPYKILHSSLSSIQGAVDRIRAMEAQHGLSAKVFMESTGIYHYPLYYRLKDEGLSVFILNPIITHANSNIDVRGVHNDKFDAQKIALLGLKPKLKTSVVPDDDIAAAKALVREYHTMKKECSQYICRLTSQLRQTFPQYLPVFSKVNGKASLEILRRYTTPEAILAADRAELISLIQQTAGKGRAMAEKKYEMLVQAASEAVSFGHSNAGNIYLTLHFVEMIRLIDAQTDKLLSQIHRSVESQPDSRLARHVNLLQSIPGIGFLSAVTLVCEIGDFSAFRRPKQLYAYFGLDPRVRQSGNFKGTELKISKRGSSFARRCIYILALQSVSLRKNGKPKNPVLREYYLEKCKSKAKMTALGAIMHKVCNIVFAVLRDEKPFTLITSDEHRRNHQNPMHSAA

SEQ ID NO: 115136 - protein, 351 aa, unidentified
MKKNGKEIKNEEIFVGIDLHKRNWHVTVKTADVELFCGTISGNWDALRQILKHYKGNKIQVVYEAGFFGFWLYDRLIRYGADCIVTPPSLIPMEYGNRVKTDRRDSRKLAHFLSKGMLKRVWVPSKEERYHRQVTRRRRQIIRDRVRIQNRIKSELQCYGLDMGETNQNWSTVYIANLHRIRFRNRWMQQSFNRLLEQYDFLCDQVRKQTKLLKELSKTELYRERVEILQTVPGIGLIVAMEILLELQDVSRFRRAEQLAAYVGLTPSQYSSADKIRMGRITGIGKNSLRSALIEASWKLIKKDGAMQEKYERIKARSGAKRAIVAIARTLLVRTRRILLDGIPYAVGTIS

SEQ ID NO: 115137 - protein, 336 aa, unidentified
MFQLGIDVCKKTLDLCLLREGVKGSVKTRKLQNDINAVNAVIAWLSKQHCKPEDVHIIMEATGVYHESLAYGLHKAGGRISLANPHRAREFARGMGMLTKNDRVDAYMLACYGALKAPEPWLPPPEEVRHLSALLRRRDALVADSTREKNRLEKYLATDTPSVIAESVEAMIGQLNAEIKRLDRLIRSHLNQHPELKKDFDLLTSIKSVGYQLGLNMLVILRSHDFATAEQAAAFLGVVPVEKYSGTSVRGCPKLSKIGPPEIRAKLYLASLCGLRFNPLMKAMYERLCLRGKGKMCAIGALMRKLVHWCYGVLKTQKPFDVGYLSSYARSACKAA

SEQ ID NO: 115138 - protein, 305 aa, unidentified
MENGKEIHIGVDVSKATLDISDGSRFERIDNDKKAVTAFLREYKHCQIRVSAESTGPYHKVLAEVCHKLEIPFFLCDGKQVAYAKKAKGRYVKTDKSDADFLRTFATDYGIKPYVLSKELTEIRELANLQHLESKHLRSLKNNKDSISTTNSAKELERQIRQSQKTIDRLQEKINELIKLNPALLEKKKLLCNVNGIGEKIATTLIIFLPELGLRNRRQIASLCGLAPFNNESGTYQGHRYIKGGRSRVRSALFMAALVSIRCNDRYSFMYRKMVHEEHRPVKVALIAIARKLVCYLNSLMKRAG

SEQ ID NO: 115139 - protein, 337 aa, unidentified
MAVATIGLDIAKNVFQVYGADEAGEQLFNRKIARTAILDYFRKLPPCVVAMESCATAHHWGRSIAALGHEVRLIHPTYVKPFVNRDKTDANDAEAIHAASSRKSMRFVPVKSAGHQASTMLFKTRALLVRQRVQAVNALRAHLAEFGIVSRPGAANVPTLVAAVRNRTNTILPPQARAALRIIAKQIDRLSQDIAVLEKALKAHAKADDEMRRLMTIPGVGPMTATAVKAFVPDAKIFKSARHFASWTGLTPRTLSSGERTWTGGITKRGNCELRSLIVAGAMSVVRNTKEDARSWVASLKRRRPFKVAAVALANKIARTIWALLVNGGIYNPELLA

SEQ ID NO: 115140 - protein, 412 aa, unidentified
MQHATTDPAVTGATFAGIDWATDTNALCIIDHTGQVLARLTAPATAAGLARLTHQLDRYHVRCVAIERPDGPVVDALLASGRTVVVITPRQVHHLRARYAAAANKTDRFDAYLLADVLRTDRARLRPLHPDTPQTLALRAAVRARADLVQARVAMCNQLRAHLRGVFPAAVGLFADLDSPISLAFLARFPSAQAAGWLTLRRLQAWLAANHYCGRTPARVLLARVQAGPAGLTGDPGRSAAQVTLAYAASLRALRDQITALEAHIAEQLALHPDAMIFRSLPRSGMIRAAKLLVEIGDARGRFPTDASLAALAGAAPCTRQSGRSQQVTFRWACDKRLREAVMDFAADSRHASAWAAAIYDRHRAAGKSHQHATRILARAWLRVIWRCWQQHSPYNPALHGIRRHQLLPMAA

SEQ ID NO: 115141 - protein, 388 aa, unidentified
MHTLGIDVGKRQHVAVMLDANGQQVGKALPFANDQAGFKQLRERLSTVEEIALIGLEATGHYWLALYTMLMDAGYDLVVLNPLQIHAYRKSGIRKRKNDRYDAYWIADYIRISQQPQQHQSQPELLQLRELTRFRASLTAQVGDCKRKIISILDRVFPEYESLFSNVFIQTSRRLLAEAMTPDEFADFDLTELAQLLAQASRGRHGQAKAEEIQALARDSVGIGFLGNTLRVQMNCLLQQLSLLDTQRQQLDAEITALMDQFPQHITSIPGVGPITGAIILAEIGDVQRFATPEKLVAYAGIDPTVYQSGQFTASQTRMSKRGSPYLRHALWQAAFMATQHDPQLRAFYQRKRAEGKAHGTTVGAVCRKLLHRIYVVLKEQRPYVIRD

SEQ ID NO: 115142 - protein, 372 aa, unidentified
MQKAITYVGLDVHKDSIVVSLAEAGLRGRLREVREYGKVLNTPAALKAMATKLAAGGNELRFCYEAGPCGYGVQRQLSAMGHHCAVVAPSLVPRKPGERIKTDRRDAINLAKLHRAGELTAVWVPDQAHEAIRDVVRARQAAVRTLRQARQQLSGFLLRHGHHYHRPAWTQLHRRWLASLKFEQAVHYIVLEDCIAAIEAATARRDRLEGHIEAALPAWSLAPVVHALQALRGVGLVAAATLVAELGDITRFTNPRQLMAYLGLVPSEHSSGRTRRQGGITKAGNGAARRMLIEAAWSYRFPARISREQLLRQERLTRPIRDIAWKAQERLCRRYRTLARAGKLPTVITAAIARELAGFIWAIARQAQPATS

SEQ ID NO: 115143 - protein, 423 aa, unidentified
MKPAAEQPFTALVGIDWSDKKHDFCLQGADSRQREFGVVAHRPEAIDSWAKALYQRFGGSIAVCLEIAKGPLVHALQRYPFIVLFPVNPAMIAKYREAFVPSHAKDDPTDAQIALELLLRHREKLQPLKPQSAPMRALTTLVEQRRNLIGDKTRITNRLCSTLKEYFPQALDWFEDRDTALFCDFLQRWPSLKHVKRARQATLRSFFCEHNMRRTELIEERIRGIRSARALTEDVAVIGPHQLLVLALIAQLRVTLQAIDQFDVEIADVAKRLPDYALFAALPGAGAILAPRLLVAFGEHRERYASAAQLQQYAGVAPVLERSGNKCWVHWRIACPTFLRQTFVEWAGSTIPRSFWASAYYQRQRDKGCSHQAALRALAYKWIRIVYRCWQTRTPYDESTYLHALKRRGSPLIAALSVALQSP

SEQ ID NO: 115144 - protein, 343 aa, unidentified
MTKLNVIGVDLVKNVIQISVLSPSNRELRNSALTRRKFAEFLGRQRPSLVAFEACATAHYWARVAQRHGHHVKIIPAKAVFPFRQGHKTDEIDALAVAEAARRPNVKLAPLKTVEQQGMQAIQRSRELLVHERVSLSNHLRGLLMEFGIVIPQGFASLYRLLPEILEDGENELPDLYRPTLNLLYGRLCDLREDLERLNREIEALVQANPVCRRLTALEGVGPIGSILLYATLGTGEAFINGRQFSAYLGLTPKQFSSGGKVNLVGISKRVANKRLRAVLIQGARAYVYHMKEPKTAKDRWLWAIVERSGKCKAAVALANKNVRTAWAMLTQNTEYQRNPLAA

SEQ ID NO: 115145 - protein, 373 aa, unidentified
MKYSTVYVGMDVHKETFSLCCYTNEKEQAEYPQKVDGHYSKVINYIEAMRFHYGDDATFICGYEAGCLGFTLYHQLKDHNVKCIVMAPTTLLKPSGRKTIKTDKRDAALLARCLAHHDYASVHIPTDQDEQIKEYIRMRCDHKLALKKIKQQILAFCLRHGYRFTETNHHWTQAHLRWLRALKPDGLYQEILEEYLISFDHLTAKIERLDKRIEELASGKEHQEDVKKLTCFLGIQTQTALSVIVEVGDFKRFADAQHFASYLGLTPGEASSGPDQNRLAITKAGNRHLRMLLVEAAQCYGRGQIGYKSKASKKRQEGNSPAVIAYADKVNERLRRRYYHLVLGKNKRSNVAKTAVARELACFIWGMMTENVA

SEQ ID NO: 115146 - protein, 347 aa, unidentified
MKKINTIGVDLAKNVIQVSVLSPSNKELQNKELSRAKFASFLANQKPSLVAFEACGSAHHWARTARKYGHHIKILPAKTVASFRQGHKTDKNDALAVAESANRPNIKEAPLKEIEQQGMQSVQRSRQLLIHDRVALSNHIRGLLMEFGVIIPQGFSALYKAIPLALEDGENELPDMYRPTLNLLYQRLCNLKSDIEFLDAQIESLVKQNLACKSLMDLEGVGPISAVLLFSTLGSGEAFKNGREFSAYIGLTPKQHSSGGKAKMIGISKVVANKRLRSVLIQGARAYVHKIKEPKSLKDKWILALIQRAGYGRAAVALANKNVRTAWALLTTGNSYQKEVLTEAMTA

SEQ ID NO: 115147 - protein, 598 aa, unidentified
MKTPSQAAVPRLIGVGIDTARYGHRATFLRDDRQPASPPLTITEDPQGYRQLRQKLEELHRQHPQAELRVHIDAAGQYATNLQRFLQSLALPLIVSLGEPKRNKDYHKALFPKRTTDATESHAMARFALAEHPPAATDVPAACYLLHEIAGRLQAAVKDSTRAINRLHNLLARVFPELAMQVRDLSALWVLALLKKYPTPKRLAAAPKSALAKLPWANLEVAEKLHAAAAGSVGSLAGPLAEALVRQQVEQLETCLASEKKLEQLLIEAYRALPSSGHVHVETIPGIGVKTAAVLVAKMIAIERFATAEHLVGYFGVFPEENTSGVDRQGHPLPPGTMHMSAKGADLVRRYLWNAAKSALQFNPAVRQLYARLKARGTRGDVALGHCMRKLLHQVFGVWVRNQPYCEAASLSRQRKTSADAPVAAAVAAAGSEDSSASAAVEIEAAAGHTRDNPQSKVVTAATASVAPPRAPVKPESSPGSIDYAFLREQITLEQVLSHLGYLERLRGRGAQRYGPCPFHAAKRENRSFSVNLKKHVFRCCHPTCHAQGAALDLWALAHGLPLYEAALHLAQTFHLQTQRTREEATRNPALLTPTAIS

SEQ ID NO: 115148 - protein, 342 aa, unidentified
MYYIGLDVHKKTISYCVKDASGRVHQEGKLGATRRELDIWMRTLPQPWTVAMEATIFTGWIYDHLHPHATQIKVAHPLMLRAIAAAKKKNDRVDASKIADCLRCDFLPECYMAPTEIRDRRRTLRYRYLLVRQMVQTKNRISGLLMETGVTHNKQRLHKVGYFRELLASNEEVSESIRPLLRLSRDTIARLQTTERALVSSLQRDPLLTERIKHLRTVPGVGPITALTWALEMGEISRFRSIRQVISYCGLCGDERSSAEKSLRTPISKQRNKNIQFVLIEAAKLAPRQDHDLALLYEREKQKGNANRATLAVARKMVAYLLAVDRGQRDFVPAEDCRGAAA

SEQ ID NO: 115149 - protein, 420 aa, unidentified
MPAAVPSGVKARKGPVVAVVMIGVDPHKGSHTAVAVGADEAPLGQVRVRASAAQAQRLLAWAAAWPERIWAVEGAGGLGHLLAQELVAAGEQVLDVQPKLAARVRLLAAGAVNKNDPNDARSAAIAALRSPSCLPVRPDDHAAVLKIWAKRHHDLSRARNQVACRLHAALCELIPGGLAKEIYADQADQLLREAGPCGAVQQARAELAAELVADLRRVDGLLRETKKKLAVAVRASGTTLTEVFGVGPVIAATVIGDVRDVSRFASRDRFAAYNGTAPIEVSSGNRIIHRLSRRGNRRLNHAVHMAAITQIRHKHSDGRAYYDKKIAEGKTPKEALRALKRQISDALYKRLKADAARAAASIQSPGGHAGNDSVASAAGSHPERQLFGQATPGPATSLRRPVHQQKRTTSRARRKIARTT

SEQ ID NO: 115150 - protein, 336 aa, unidentified
MIAVGVDTHKHEHLARAIDGLGQVLGALTITTSLRGYGELVGWLRTLGEGVVVGIEGAGSYGAGLCEYLLAEGFDVVEVERPRREDRRRGKSDEIDALLAAKKVLAADGLSTPRAGGTRQALAALLIAQRSCISERTRLVNQLQSLHTTAPVALRERIGPGNGRKLAARLVKMRARTDAPQSERLIFTVLRDLARRAQELAAQADAYKHELTELISSLDATLLDEYGVGPISAAKLLVCDPKRLKGEAAFARCNGTAPKPASSGQTIRHRLPRGGDRQANNALHTIARIRGRHNEQTRAYLDRRISEGKTPREAMRALKRHISRSLYRRLITIPLT

SEQ ID NO: 115151 - protein, 323 aa, unidentified
MSPIVGIDVAKHSVDLAIELANGKHRTKAKLANDPKGFAALHAWLRTHAQPDSWVVMEATGSYHEALAEFLHECGYRVCVLNPAQVALYARSQLRRVKTDRSDAKLIASYGLRHRDQLRAWQPDPPALKTLKALVRRRDDLLEMLLMERNRLEVAPADVQPSIQGLIAHLQARINEIQQAIDDHIDQDPDLRQQRHLLTSINGIGDISAALLLAELGPVSRFADAGAVTAFAGLNPRLHESGRYQGKVCISRTGSARLRAGLYMPALVAIRHNPVITALKQRLHARGKHGKQIVCAAMRKLLHLVYGVLKSGTAFDPQKALAR

SEQ ID NO: 115152 - protein, 310 aa, unidentified
MVDVPCFVGIDVAKAQLDVAVRPSGERWAVPNDADGVVTLVERLQPLHPTLIVLAATGGLERVATAALATAGLPVVVVNPRQARDFARATGQVAKTDALDARALAHFADVIRPTPRPLPDAQTQELRALLGRRQQLIGMRTAEQNRLAGTSGRLIQDIEAHMAWLNTRIATLDDDLETLLRASPLWRANDDLWQSVPGIGPVCARTLLLELPELGTLKRQQIAALVGVAPLNCDSGTLRGRRTMWGGRAHVRTVLDMGTLVATRFNPQIKAFYQRLLAAGKRKKVALTACRHKLVTILNAMLKHRTSWQA

SEQ ID NO: 115153 - protein, 360 aa, unidentified
MNQHTGGRKIAGVDLGDRDSVICILDDVSGEVLERATIPTSGEAFEEYFARREPMLVALETGTHSPWASRTVTDAGHEVIVANARQLPLIYGAKHKSDPRDGEKLARVARMDVRLLAPVQHRSREQQQALNTIRSRHALVRSRTLLINAARGMVKAFGGRLPKCAANAFGKAAWPFVPSELGLSLQPVFESIGTLTRQIRALEDEIDRLATEAYPQVQLLTQVPGVGNLTALAYLLTLGDPQRFSDSRMVGPYLGLAPGRRQSGDRDQPTRITKAGDENLRWLLVQSANHLLRRDAPDTDLKRHGRKLAKSGSKISKRIAKVAVARKLAVLLHALLVTGEVYEPLRNTHARRRRQPLISA

SEQ ID NO: 115154 - protein, 388 aa, unidentified
MSCVINHLGQNGAAAQANAARILVSLELSRHTWLVTVLAPGSEKMSKHSLTGGNGVALLELLARLRAKAEERLGAPVDGILVIQEAGHDGFWIHRLLEKNGIDSHIVEPASIAVSRRHRRAKTDRIDGETLIRTLAAWRRNEPRVCAMVRPPNPEEEDRRRLTRERSTLIKERVQHVNRIKGLLFGQGITDYEPLHRDRRARLETLATGDGRPLPPRLKAEIGRELARIELVCAQIDAVEQQRDVLIASMSPNPVEPVSVLLGLKGIGPELAARLWLEALFRRFANRRQVAAYAGLAPSPWQSGATNREQGIAKSGNPRLRHAMVELAWLWLRYQPDSALSAWFRQRVGQGRGWVRRIAIVALARKLLIALWRYTSQGVLPEGAVLKA

SEQ ID NO: 115155 - protein, 464 aa, unidentified
MTDGKLWRNRKERKEWGRRLQSEDPGLEVVHPHAAGIDVGNGLHYVAVRPDRDPQPVRRFECFTADLHRLAEWLQHCGVKTVAMQSTGVYWIPIYEILEERGIQVYLVNARHTKNLPGRKSDVQESQWLLKLHTYGLLNNSFQPPSEIRVLRTYWRQRGEHVHGAATCVQRMQKALTQMNVQLANVISDVSGLTGQAIIRAMVAGERDPRKLAELSDPRIHASREEVAKSLEGNWRPELLFVLQQEVEMYDSYQQRIDECDQQLQKHLATFVSAVPPPRTSEEPKRKKAKPAKNAPRFELNHELQRIIGVDLTRIDGIDVMVAQTLISEVGLDMSRWKTEAHFSSWLGLCPDNRTSGDKVLARGTRRVVNRAATALRMAAVTLLRSRTYLGAQYRRLRTKLGAPKAITAMAHRLARLVYRMLKYGQEYIDRGADYYEHRYRRQQIEFLRKKAANLGFQITLAHT

SEQ ID NO: 115156 - protein, 423 aa, unidentified
MEQPIRFVGMDVHKDTIVVAVTASGEVGKATAYGTFPNTGAGLETLVKRLRQAGSGPIKFCYEAGPCGYGVHRSLTRMGEDCMVVAPSMIPRKPGERQKTDQRDAASLAVLHRGGLLTAVWVPDAAHEAMRDLIRARLAAVRAVRAARQQLSAFLLRHERVYPGNRTPWTKAHRGWLADQTFAQPVQQIVLEESIEAVRLSEQRRDRVESYLRAQIPSWSLFPLVRNLCALRGLDIIASAGLAAAIGDPSRFATAPHFMAYLGMVPSEDTSGPRRRIGAITKAGDIHARTMLIEAAHSYRYPARIARHKLAAVDAVPEAVRAIAWKAQTRLCQRYRQMTARGKLNQVVVTAIARELAGFVWSIACITSDPVVSDDIVTELYGVETTLGYEVTMSPERLLNKSHRSRPPRAAPGKTAPYLQKEA

SEQ ID NO: 115157 - protein, 339 aa, unidentified
MAHLSQSQSMPLRFQGIDVSKATFDVAWWGDQPFQGMAVHAFPRTPADVQAWLARFKPDELQSTAVVMESTGGYCKELAGWILKTHPGLHVAIANPFRVKSYGRSLGLRNKTDRVDARLLAKFGQERQPGAWVPLSPAQEALRELTRTRSKLKATMVVYRNRLKGHTVVSPLVRTAQEELLECLDQQVKALEKGILELCRKDPGLKVDLELLMSIGGVGLITAAIVLGAAGDLRRFRKRGELCAFLGASPRQFQSGSSVHGKTHLCLMGGKHVRSALYMGAMSICRSKGPLGDFYRRLVAAGKPRKAALGALMRKLIVVMRAVLIQGKPYQAPNPPTAA

SEQ ID NO: 115158 - protein, 345 aa, unidentified
MNYIGIDLHKRFSQFTVLNEKGETIDRKKVDNREEEILSHLNNFDLPSKAVIEATFAYGWLADLLSSNRIEVMLAHPQKVKAIASSKIKTDKVDSEILAKLLRADLIPQAYYFSKEEREIKELLRCRGSLVGLKTQIKNKIHSLLHKVNVRDDEKYTDLFGKEGRRFLDNLSLGEKSTFALKEYLSILDFLEEKIKETSKEIKEVFEKDNQAKFLEQLPGLGYYTSLILSKEIGNIKRFRREKNLVSYAGLAPSTFQSGEHQRHGRIKQGNKYIRWVLIEAVPKAIKKDKILRAFYLKILNKKGHNKAKIATARKMLAQIWYLLTYKKIFTDPETGSPVFFSGHS

SEQ ID NO: 115159 - protein, 480 aa, unidentified
MDDRRLVGIDLGIISAHTVRVLGGDGSLVCRARAIPTVESLEQVERVALAQTPAGTLLEVVVEPTGPAWLPIAVFFSARGHTVYRVSSAKAHDLRRVLSRHAKSNGIDADTLARLPLVDPAGLHPLELPSAERAALDRRVRACDRLTRQAASHKRRIKDLVHQLLPASPLVGELGQADLAVLERWADPHALVAVGRARLQRLLGTASAGQQGAQRAEQWLAARAALELYGDHPAIAWQDLAAEVTSEVRLLRATQAELAAHARQREACYRRVDPAGLARSLPGLATIGGPALVATMGTASRFATAGKFRCFTGLAPKASETGQTDRKGQPITKAGNKLLRTTLVRAADHARRQDPQLARIYWTQMVQRGKDHLGAVCVVAAHLAERAWVVMDRGTPYVVCDTDGTPVTAQQAKAIIAERWTVPEQVRLRRRSRKGKAPQQVLTGHVHGARGATRQPSPSPATLGHQPNRVKPTQPTQPQP

SEQ ID NO: 115160 - protein, 438 aa, unidentified
MSNKVIFNLDELFISVGIDVGADFSWMSIALPNQQFVGKPYKILHNSIDSLTTAVSKIKEAEELYSLESRIFLESTGIYHYPLFCYLRDKGFNCSVINPIITKNSTNINIRKVHNDRFDSKKAALVGLKPDLKVSLMPSDLALNCRNLCREYYDLMDNRSAYVNKLQGELRMAFPQYLGIFSKVTINTSLTLLETYTSPSAFLKADKQEIIDIIKSTARFGLTYAQNKYNAIIQAATDANQFGYIIDSNIKRISLYISFIRKYDEEINSILESLHELVDANEDSDFVKQIHLIETFKGAGFLSAVSIMGEIGDFSAFSKPKQLFAYFGLDPAVKQSGKFEGTKVQMSKRGSAIARRVIHTLTLQSISISRNREAKNPVLREYYLKKCDSKPKLVAMGAVSHKVCNMIFAILRDNKPFKIIAPQEHIKQYNSAKCDIAA

SEQ ID NO: 115161 - protein, 351 aa, unidentified
MPGLERHPLKKLYQLDAAALFLLLQRWREEATKAGRTIKRIAVAFEAGRDGFWLARWLRKVGIEAYVIHPSSVSVSREHRRAKSDRLDTAQLKRAFHGWLRGESDHCRMAEIPTLEQEDAKRPNREHESLVSERTRVINRMKACMVRLGIRGFNAKLRKAPELLAGLRTPEGQPVPPNMQAELKHQMERLQLIRKQIIDVEKARFARLHVAPRTEPHAQVRLLCRVVGIGIETADMLVHEVLWRKLRDRRAVARYAGLTGAPDQSGEKSYEKGLAKAGNARVRRGMIQLAWRFIRFQPDSALAKWFYARTADGRKKTRKTMIVALARKLLIALWRLVTTGEVPTGVMLRAA

SEQ ID NO: 115162 - protein, 475 aa, unidentified
MEKTSKSKLEDVTRLLALQKIRDVKDLESYKLSVCHPHSAGIDLGSREIYVAIDPRIAAEMGIPIVHVFNTFTSGLQDCRKLLMNCGIQTVAMESTSIYWTTIYSILVSAGFEVCLVNPKKFRMVPGRKTDVLDCQWLQTLHLYGLLRGSFHPEEKIACLRSYMRERNLIIKDRSRHVNRMQKAMTKMNLLLTNSLSDITNKTGISIIKAIIAGERDPEKLASLRSVRCKFTQEEIAESLNGYYKEDQLFLLKTNYEAFCFFDSQLYEIDKKITDLLETFPLKKGKDEISPPSQKSKYQRKNKNDIRTDKNLKDMLYRILGTDVTSVTGLQSNTILQIISEVGIDMSKFPTCNHFASYLGFVPHNKITGGEIKSSKTDRIKSTAAQAFRKVVPAISRTDSELAGFYKRIVPRIGTGKAVVAVCRKLAIIFYNTLVYGNEYVEYGLEKYKEQIKERERKLVMKLARKNNWDISCSL

SEQ ID NO: 115163 - protein, 412 aa, unidentified
MEVVHVRCAGLDVHKKRILACVRIVGKGGSVEKQVKTFGTTTGDLMVLSDWLRSNSVTHVAMESTGIFWKPVYAILEGSFTLLVVNAAHMKAVPGRKTDVRDCEWIADLLAHGLLRGGFVPSVEVRDLRDLTRYRTSLVNERTREVNRVHKLLETANIKLTSVATDVMGVSAQAMLKALLDGTTDPDILADLAKGKLRQKLPELKKALEGRFTAHHRLLLGTILAHIDFLDETIAGIGKEVTLSMAPFQKEAEMLDAVTGISVRVAETIISEIGVNMDSFPTEKHLASWAAVCPGNNESAGKHKSGKTRKGNAYLKRALTEAAHACCNAKDSYLGARYQRLIKRKGRKKTIVAVAHTILVIAYHILKYKTPYRDIGSDHFDKLNKQHLMRYHQKRLQSLGFKVTIEALEEAA

SEQ ID NO: 115164 - protein, 310 aa, unidentified
MEQVFVGIDVAKDRLDVHVRPSGEAFAVARDGEGLAELAERLRVRGPALVVSEATGGFEQVVAATLAAAGLPVVAVNPRQIRDFARALGRLAKTDRIDAEVIALFAERVRPPLRPLPDDQARELGELVARRRQVIEMMTAEGNRARQVETRRLKKRIERHRATLQGELTEIEAELDETIRGTPIWREKDNLLKSVPGVGDTLARTLIADLPELGTLDRKQIAALVGVAPFNRDSGTLRGRRTVWGGRARVRATLYMAALVASRFNPVIAAFYRRLLAAGKAKKLALTACMRKLLTILNAILRDQKPWQNA

SEQ ID NO: 115165 - protein, 345 aa, unidentified
MEHVGVDLAKNRSQVCILTEDGELIERRIATTREQFSKLLGERSRARILLESSAESEWVARHLESLGHEVIVADPNFAPMYAKRTRRIKTDRRDAADLAQACRIGAYRPAHRLSDEQRGSRGRIAVREVLVRTRVRYVNLVQALLRGDGLRVGSGSSGGFLQRLKAVGMSAQLQAQVKPLVTLLKQLNAAIDEADELLAAQAKSDPVLRRLSTVPGVGPVTAASFVAAVDEVGRFEQAKQVASYLGLVPSERSSGDKQSRGPITKAGNGRARWLLVEAAWAILRYKKPDTERLRQWATRIAERRGRRIAVVALARKLARILFAMWRDGRDYSPSLPLNATTAVTN

SEQ ID NO: 115166 - protein, 339 aa, unidentified
MQHVAIDLGGRESQVCIRSRGGEVLEERRVFTKALPGLLQGLPASRVILETSAEAFRVADAAIDSGHEVRVVPATLVRQLGVGARKLKTDLRDARALSEASCRIDLPSVHIPSAQSRLLKSQCGSRELLIAMRTMTVNSVRGWMRTQLFKIRSGCTASVPTRVREMAQTQGISLPMHVEMSLGTIEHLTGQIKLADKALCEFAKNDPVCRRLMTIPGVGPVTAVRFVAALDKVERFKTAHAVASYLGLTPGENSSSERKQMTGITKAGSSEVRRTLVQGAWTILRRFQNSPMGQWARRIAERRGRFIAVVALARKLSGIMFALWRDGAVYQEVRSAHPL

SEQ ID NO: 115167 - protein, 353 aa, unidentified
MSMLADSVGAVIGAGTDTDTHTACLLDRLGGQVATITVPADPRGCRRLLAWAGTHALGPRLVWAVEGTRSHGLGLLRTLREHDQTVVEAGRPARASKRPGGKSDPADALRAARDALSAGKLAQPRSDGPREALRILLTARAQATAARTAAVNTLKALLLGAPDHLRQPLRGLSTPRQARPCRGLRVHASQPVAEQILRAELRRLATHIVTWDRELRANKAQLRQLVTQVMPVLLGQPGVGPMSAAQLLVSWSHPGRFRSEAAFAALAEVSPLPASSGKITRHRLNRFGDRQLNRALHVIINWRMLHHDATRAYLTRRAGQKTEREIRRCLKRYAARSLYRLMETAAVSDLVIW

SEQ ID NO: 115168 - protein, 469 aa, unidentified
MDLLKLPIYTFYCEFLDMEERFMNKVFIGIDVGKFKNSISIIDSEGNPIIKKGISIENDYYGFAKLEEKIDLIMNNYGFTYEDCIAGVESTGHYWFNLRDYLKDIGIETVMIKTDSVKHRRALEEGQKGKNDTLDARVIASCLRNGNYVYIRDNERELRALQKLTRMRNDISDEVVALKNKIHRCIDICNPVFFKIFENLNSKTGVALIKLYPSPQDIINVELDNIKKELGEIVDKPNMRMVSLYKEECEIWSGLIKEPSYAEKVEMIAYIDKFLLQNESKEHLDKQIKEIAKNIIPLYSEFEEIKGIPLIQLISVLSEIGDIRNFKNTRSILAFLGLSLKGNASGKYIGERKINKAGSRIVRKHLFNIMDTLVKHNEYFRIAYCYYKSYNHKNPTKKRSMQIAVMCKFVRVMYGMLKYNTPFDYKEMLKGYYFGDCNIKVFKEEFEGEKRSKKIENYKLVYSIFINYS

SEQ ID NO: 115169 - protein, 364 aa, unidentified
MKERKTETRYVGIDLGKRTYQMAIVDAKGKVKMKGGKTYVAARQSMYKKLKPSDKVALEAGAMAFMMAKEIEAAVGCKVYVLNPGQIAIIYKSMKKTDKEDALKIAHLLQDFQEERLPIVPVPSDKEINRRKLLAGSKRAHQSRTRKINQLHGLFLLQGITTIVKSDLATSASRREAIEVLDGLELDEAKYLLKCLDLYEERIRDLDNKIEDDSIGDEQIELLKSIPGVGPKTSFAFVSHVAAERFESASQVSNYIGLVPRVYMSGDTTRYGNITKRGNSYLRALLVQSSWALVRSKNGGKLKERFKYMTEVKSIGKKKAIVAVARRLAELMYTLLKHEARYICMPLYIEKKEVNPKKPLAKCA

SEQ ID NO: 115170 - protein, 339 aa, unidentified
MELYSGMDLHSTNTYSAIMDENRKRVIDRRLPNQPKLILDFLEPYRADLKGIVIESTYNWYWLVDMLQENGYRVHLANPSAIQQYSGLKYVDDRHDAYWLADLLRLGLLREGYIYPKEIRPIRDLLRKRAHLGRLRTSLLLSAQNIVLRNQAIKVNSEDIKKLTTDLLTPHLQESEGLFLTGKISKDLIDAFTRQIKTIEAWVMKRLQPDKLFSNLLTIPGVGEILAMTILLETGYIARFPKVGNYVSYCRLVASQRTSNDKIKGKGNAHNGNKYLAWAFSEAAEHARRHYPMCRSFYNRKLSQKNATVAHCALARKLSRSAYYIQKDQVAFDETRLFC

SEQ ID NO: 115171 - protein, 427 aa, unidentified
MSEVECIGHEPQFAAFVGIDWADQKHVWCLQAVDSEKRESGELEHTPEAVEAWVGQLCHRFSNRPIAVGLEQSRGALVFMLTKYEPLHLFPVPSTMAARMRKALYPSGSKDDPRDADLLLDLLLQHRDKLHRLSPDTEATRRVQNLVEERRQLVDEKTAQINRLTNHLKIYFPQILDWFEHLDSELVCALLERWPTLEQLQKVLPAKLRTFFRKHRCRDQELIERRILAIRQAIPAIRDGAVIEAKSTVVKVIVQLIRSLVQGIADLDEKIEEAAAAHPDFFIFDSLPGAGAVMAPRLLAAFGSQRERYGSAGEVQTYTGIAPVMESSGKKQWVHFRWACPKFLRQSFHEWAGHSIAHSVWARSYYQQQRSKGQDHHAAVRALAFKWIRVVFRCWKDGVAYDESKYLASLARRGSHLAAAAATANTL

SEQ ID NO: 115172 - protein, 352 aa, unidentified
MIWVGLDLHKRYVTACALDDAGAVVAEHRRLPTDPEVLLAWLRELDSPVTVAMEATLYWAWLHDRLSAAGIAAVAAHPYQVKLIWQARCKTDPIDARKLADLLRTNLLPAIWVATPTVRAQRTLLRGRAYLVRMRTGVKNRIHGLLTAENHRLDVSDLYGRAGRTWLHTVPLSPMARVQVDLLLDMVDVLDQRVVRLDKRVQRVVKDDPAAQLLQTWPGIGTFGAALLLAEIGTIDRFNTSHQLAAYAGLIPSTQSSGGKTTHGGVGRAGSPWLKWILIEIVQSLKLAPGPIGHHYQKLLRAKGKAKATVAAARKLCCHLYWCLKEGWSYQQWLQQHEGREVRPLQTLGSAA

SEQ ID NO: 115173 - protein, 377 aa, unidentified
MGRIKFIGLDVHAETIAVAVAEDGGEVRSLGVLANREESVRKLVRKLGAVEDLRFCYEAGPTGYVLYWQLTRLGAQCAVVAPTLVPVKAGERVKTDRRDALKLARNHRAGELTAVWVPDAAHEALRDVVRAREAAKKDQLRARHRLSKFLLRQGRRPASGVQAWTLKYLEWVKREVHFEQPAQEATLLDYVHEVEHAAGRIVRLDRAIEEAVKQAPPQMRAVIEGLQALRGIAQISAVTIVAELGEITRFRRARQLMGYGGIVAREHSSGTSTWRGGITKTGNAHLRRVVIEAGWSYRHRPGVGAALRKRQAAVSEEVREMAWKAQHRLHARYRQLLARGKSKGQAVTAVGRELLGFIWAIGIRVEAEHQESQRQAA

SEQ ID NO: 115174 - protein, 346 aa, unidentified
MDDMYYIGLDVHKKTISYCVKDAAGHVHREGKIGSTRRELDAWIKTLPQPRTIAMEATIFTGWIYDHLLPYAERVKVAHPLMLRAIAAAKKKNDRIDASKIADCLRCDFLPECHMATTEIRDRRRTLRYRNLVLRQMVQMKNRVSGLLMESGVSYDKQRLHKMGYFSELFSTNEEISESIRPLLRLGREHIQRAQRLDRALISSLERDPLLSERLRRLRTIPGVGPITALTWALEIGDYTRFQSVKQAVSYCGLCSAEKSSADKVIRMPISKQRNKHIQHVLVEAAKMAPRYSHELALLREKEIQCGNKNRATLAVARKMVAYMLAVERRQQDFVPAEEFAGKAAA

SEQ ID NO: 115175 - protein, 358 aa, unidentified
MTIVAHHHPFVIGVDTHARTHALAILACPTAEVVDQAQFPTTTAGLRRALAWVGRRTAGDLDVLWVIEGTGTYGARLAHAATEAGYTVVEAPRMDSRNNRGLGKSDPLDAQRIAAAALPLDHLKLRMPRADDGVRAAIKVLLASRDHMSTERTATINALTALLRIVDLGIDARGPLNHSQITTASTWRPRSEDLATATARGEATRLARRIIDLDHDLATATRRILELLRMSPASVLLEEPGIGPITAAVAFTAWSHPGRVRSEAAFASLAGTSPIPASSGNTQRHRINPGGDRRLNQALHMATVTRMRMDPRTRAYVERRSAEGRTPREIRRCLKRYLARNIYRKLNTAAANCTPSSA

SEQ ID NO: 115176 - protein, 344 aa, unidentified
MNYVGIDWAYGRAAFCAVSEGGVIESEGLIPADEGGLAGLALRLGPDVKACVEMMSGAIWVKDQLELAGWSVEVAHARKVRDIAPLACKTDKVDARVLAELCRRDLVPALWVPTIEDRAIRERLRRRAHLVKLRTSARNRIFGLLTQFGLRISFARLRRPDAIELLERRGVPAVWRDSIAEHLSEIAELDRRIDPIDRELRPIAHTDPRAQLLQTIPGVGPLISLTFAAEIGDVSRFCSASKLVGYAGLAPRISQSGERSATGRLSKAGSRTLRWAAVEAANQAWRPTNPFHEHYRRLAARHGKNPAKSAVARKILIASWHMLSRNQVFQPTTAAASSSRFLAA

SEQ ID NO: 115177 - protein, 355 aa, unidentified
MSGAYEGRQIVGMDLHRRRSVLVRMTDTGERLETVRISNDPQYLAQVMARAGEAPEVVLEAAYGWYWAADTLAELGAHVHLAHPLGVKMFSYRRVKNDQRDATDLADLLRMGRLPEAWIAPPATRELRGWVRHRAKLVGLRSSLKCQVHGVLAHAGIWVPMSDLFGVAGQQLLAELSAGTRLSVESRSRLDSALRVIAALEFEIELFTKLVNGRLRTDPAYRAIQAIPGVGPVPAAVFVAEIGDIGRFHRPQQLASWAGLTPKHHESDTTVHRGRITKQGSRLVRWAAVEAVQRVSGHTRLGQHRDRVAARRGRNIGVVAAARELLTLVFYGLRDHHIRALDTPAPPPAADRSAA

SEQ ID NO: 115178 - protein, 383 aa, unidentified
MGYWGWPVRMGWKVRWLSFRLTMERGPHKRPQASEEKRSHETLCRFGRVDKRDQRLHRGWFGQSLREVKVATEPEAIVAILAEESLLIERIGLEAGPLSQWLYSAIAEADLPVICVETRHMKAAHSAQLNKSDRNDARGIAQMMRVGLYRPVHVKTLASQKRRMLLTSRRLLQTKAIDIESDLRGTLRNFGLKVGMVSTTKFEARIRELVTDYPDLAGIAEALLIARRVLREQLGILHRQLLATVRHDEVCRRLMTMPGVGPVVALTFRATVDVPARFTSSKAVGAVFGLTPRRYQSGEIDRMGSISKSGDAMMRTILYEAAQSMLTRTIKWSWLKAWGMKIARHRGMRRAIVAVARRMAVVMHRMWVDGTEFRWTNSAAVAA

SEQ ID NO: 115179 - protein, 338 aa, unidentified
MKLYGGIDLHSNNSVVALLDEQDQVVYRKRLPNDAAAILEALAPYHTAIEGLVVESTHNWYWLVDALMEADYRVHLANTAAIVQYDGLKYSDDDSDAQWLATLLRLGMLPEGYVYPKGERAVRDLLRRRSCLVHQHTANLLAVQNLFARNRGQSLSANAVKRLTPERVAELLPDPNQALAVQTTLLAMRALEGSIELLEGHVRKQVKLRPAYRHLLSVSGIGTVLGLTIMLETGEIGRFAHVGNYASYCRCVGSERLSNGKRKGRGNTKNGNKYLAWAYVEAANFAVRYNDTIKRYYQRKRAKTSGVVAIKTVAHKLARACYYILRDGTDFEVSRAFA

SEQ ID NO: 115180 - protein, 410 aa, unidentified
MRYYLGVDWADQTHAVWVVDESGTKITERAVPHTAEGLGEWGRELDEWRAQGIDLWAAIERPDGRVVDVLLDHGVVVYPVNPKALDRARDRFRQSGAKSDPFDARVLADFLRTDHVHLRALQPSSEAAQELKLLTEDCQRHIRQQTRLVNQLTATLKAYYPRALEVAELTSALAREFLPAYPTPAALTALTERQWQRWARAHRLPEARTADLWAVLQQPQLPVPAHVVRAKARLMRTLVEQLMPVVAAVAQYRKAIDDFFASLPAAQWARTLPIGKHGITAPTLWARLGDAPGRWESFRHLQAHAGTVPVTKRSGKQQRVVHFRFACDKALRHVVDQVAFLSLLSSTWARAYYDQQRARGHAHRQALRALGAKWLKIIFVMWERHVPYDEQYHLATMTRQQLRQRQEQIA

SEQ ID NO: 115181 - protein, 318 aa, unidentified
MVWQAGKVGTTPDELRVFADSLRSADEVALEATGNTYAIATLLAERVARVVVSNPAKTRAIAEAKVKTDKVDAAILAQLLAADFLPPVWLPDAATHALRRQVIRRAHLVRQRTRLKNQVQAILHRNLVPRCPAADLFGHKGRAWLADQPLPADERAAVAALLRQLDFHAQELREVDTDLGRVGLEHQDVRRLMTIPGIDATVALSLVAAVGDFTRFRSPDRLVAYLGLNPRVRQSGGQPATHGRITKAGRAHARGMLVEAAWAAAKTPGPLRAFYERVKARRGMQIAVVATARKLTVLCWHLAVKGDGLRLHPPLPDR

SEQ ID NO: 115182 - protein, 343 aa, unidentified
MSACYFIGLDIHKKMIAYCVKTIDGRLVDQGMVASDRASLSTWMQGLPGPWVGAMEATIFTGWVYDFLAPHALALKVAHPEMLKAITAAKKKNDRADAEKIADLLRVNLLPECTMLPQEIRELRRILRYRNHLVRTAVNMHNKMSGLLMEVGAGYSKSRLRGKKYFHELLERLDEIPPSVKEMLLLSRAGFEMFQTFQKRLIHTLRSNPLIQARVARLMTITGVGEVTALSWVLEIGPVARFGSIRKAISYCGLCSAQRESGGKQQRGPISKKRNKHLQTILVEAAKLAPRWNPQLAAIHQRELSKGNRNRATLAVARRLVAYMMAVDKGEGNFVLREEQKAA

SEQ ID NO: 115183 - protein, 382 aa, unidentified
MISVGIDISKEKFTVCALEEGSKIIWKPFDVSLNKTKVEEFLEKLKKLKEKVKITMEATGKYHLPILYELKERGYFLTVINPLKMKQFCRALNFRKAKNDKIDAKQIAEYGLMYWKELEEYKVDEENYRVLKELNRSYQHYMDLRINQMNYIEQTVHQTFPGIKKLIPHNSGDFSKDKLLDFLEKWWHKDLVLEKTEEEFIEEYKTWAKEKRYHPNANKAKAIYKLAEDSISTQPSHNSKIETNIREGINLIKQINQILNRILSQMIEISEPLEEYKEAKKFSGISEKLAVQIVAEFGDLSKFKNKKSLISFIGIDAPPYESGNFKADQRKISKRGNAILRKVGYQAMKCMMSAKNPENEIYKYMIKKEKEGKAKTFANLQA

SEQ ID NO: 115184 - protein, 347 aa, unidentified
MSISVIGLDTAKSVFQVHAVDETGRMVIRRKLQRNELIAFFKKMAGCTVVMEACGAAHHWARILTGLGHDAKLVAPEAVKPFVKKGRKNDAADAAAICAAASRPDVKFVPIKNLAQQGVLALHSVRSLLVKQQTMLANSIRGLLTEFGLTAPKGIGKIGELMTLVATDEAIPERAQRAVKELYDQCERLDESIKVIEAQIVDHARHDESARRLATIPGIGPITASLIIATVVDFSVFKSARHFAAWLGLVPRQHSTGGKTRLGRITKTGNREIRRLLVLGATSMVYRSPQWNSAVGAWTRGLLLRRPVRLVTVALANKIARIAWALMTRSEVYHAKGCVVTTAKAVA

SEQ ID NO: 115185 - protein, 342 aa, unidentified
MSDIITVGLDLAKNVFQVHGADGTGRAVLRKKLRRTKVLEFFNQLPRCVVAMEACGGAHFWAREIGKLGHEVRLIPPAYVKPFVKRQKNDMADAEAICEAAVRPSMRFVPVKSEDVQGAAMVFRVRELLIRQRTQTINALRGHLTEFGEVVPQGAANTARLIAIVEGAASGLPDEARATLLVLIETKTRLDDQIRKLDAEISRRAKENEVARRLMTIPGIGPLIATALVALAPPAETFHKGRDFAAWLGLVPRQHSTGGKQRLGATTKMGERSLRRLLIIGANSVIIKQHVHPLARPGTWLGGMLLRKPPMLVRVALANKMARIVWALMVKNEDYRAPAAAA

SEQ ID NO: 115186 - protein, 349 aa, unidentified
MGEVTTIGVDIAKSVFQIHGVDAGGTVVIRRRVGRARVLEFFADLPPCLVGMEACATAHQWARELKKLGHDTRLMPPTYVKAYVKRGKNDAADAAAICEAVTRPSMRFVPIKNVEQQSVLMLHRTRDLLIRQRTQLINALRAHLAELGLVAAKGREGVHQLVTVVTECGGERLPSNARFACQAIVTQLHAVQIEISGLDKRITQTHRVNADSKRLDTIPGFGVILSTAVVATMTDPKAFKTGREFAAWIGLVPRQNSTGGKDRLGSISKQGDRYLRRLLVVAATSVINSARARPYKYPWVIELLGRRPTKVVAVALANKMARIAWAVLAKGEPYRTPTRSSNAVVPAAA

SEQ ID NO: 115187 - protein, 421 aa, unidentified
MSKGRYHSVECKGVDWDALAAQVAGRGLVFAVDVAKHDFVACLRVAGEDPLVRVKWQHPEETPAVLAGLGRLIAAGPVAAVMESSGTYGDALRWQLGQLGATLYRVSAKRVHDAAEVFDGVPSLHDPKAADIIAQLHDLGHSQEWLEADTHRRALTAQLKMLHQCKARHQQELNRLEALLSRHWPEALTLLELDSVTLHHLIAAYGGPAQVHALEGQARTLMQQIGRPGLAAAKIEALLDSAGHTVGMPCILEERELLRWQAKAVVETHTELRRIEKLIEQAVAGDPALASLRSVVGPVTSAVLLAAQGSPLSYPDADSYCKGLGLNLTERSSGKHKGRLKITKRGPAVARFYLYFAALRLIANEPVVAKWFKAKTARPGAIKGKQVVELMRKLAKALWHHAHGRLFQAEKLFDQRAVAGA

SEQ ID NO: 115188 - protein, 398 aa, unidentified
MVLGVRVDWAESFPDVALGRPGGGVIEQFRIEHGPAGVTRLVTRCLELEPDPAEVRVVLETRHGLLVEALVDAGFTVLPVNPDLVARRRGPAKKKDDAEDARICCLLALDAYLDLRKLIPHGQAGAELRAIARDDERAARDERRIGNRLRGPAGRLPRRDRHRRRRPRRPGVPPAAAKLAVRRCARPGQRGRAGSPSPARPGTAGPGKFADRVTSAMAAPRLAVRPELARAKAGAIRLAAAQLLAIRAQRREWERRMGELLLGAPTGRDHTPQDPGPGKAFPGGEIYLSMPGLGDRLAARVAGEIGEHHEQHATPNALQCYAGRAPVARRSGRSEFTVARRLACNRHFGQAVHQWAFCSTSRSAWAREFYDAKTTAGDTHHAALRKLGNRWLEIPGTA

SEQ ID NO: 115189 - protein, 443 aa, unidentified
MTVRKRELTVMFPNAAGIDVGSASHYVAVPSDRCEEPVREFASFTEELIALADWLASCGIDTVVLESTGVYWIALYELLESRGFVVYLVHAKHVKNVPGKKSDVLDCQWLQQLMSFGLLTRAFRPDDKVCALRAVVGQRDTLIDAQAIETQRMQKALTQMNVQLANVITDIMGTSGQAIIRAIVAGERDAQKLARLRNYRVHASEEQIAKSLHGNWREEHLFCLAQSLKLFDTCQELIAESDAKIETMLARMQKHTTHLAPNKNKGRNKNAPNFDARTALYAWAGVDLTRIGGIDVSTALKILAELGTDFSKFKSAKHFASWLGLCPGTRITGGKRISGVTKRIANRVTQALKLAAQGLQRSRCALGAYYRTKAARLGAGKAITATAHKLARLVYAIITKGEEFVQRSQDHYEEQVRARTVRYLQKKAASLGFTLQPNAAVCA

SEQ ID NO: 115190 - protein, 387 aa, unidentified
MTVRTVNNLPAATHGETVRCLFAIELSKMSWVIAFNTPLSEKISRRTLTGCKWKRLLELIEEVRTRVSRETGRAVEVISCYEAGYDGFWLHRQLEAHGIRNYVIDPASLQVDRRARRVKTDRIDTERLLRSLMAYLRGEPKVWSVVRVPSVAEEDARRLHRERDRLVSERVQHVNRIKGLCALQGIYDYHPLRPQAMAGLEQLRTTQGGALPPRLKSEINRELQRLELVVEMIATLEAERNAIVEDEASTHVNAKKIQNLHKLKAIGPEFAAVLVGEIFHRDFNNRRQLASYVGFAPSPFQSGNVAHDQGISKAGNRKGRTTGIELAWLWLRYQPDSDLSVWFRTRVGTTKGRIRRIAIVALARKLLVALWRYLETGVVPRGAVLKG

SEQ ID NO: 115191 - protein, 426 aa, unidentified
MAKDRCNTTTVWVAIDVAKRWNEVLVEISGTGVRRFKVANRLEDFEKLAEYLSRWGAKWCRIGIEPTGNYHRPLAHYLKRQGFEVCFVSSLGACRAREIWFNSWDKNDPKDAEVILKLLKQGAVQFYHDPLLHGIHDLQELSKTYYQISLNRTRLLHSLQTHYLPLYFPEAERYLHSTRAAGLIRTLLRFPVPRSITQYDFEKFAQRAWDVVGRKVNKRQWLHDFYCAAQESVALPVEEDSLGVETFRIILREYLRINELRSELESMAKTQLADHADFQRLRTLPGIGPILALTILAEAGDLRRFRHHRQFLKFCGLDLATYQSGSSKGQSHLSKRGNARLRQAFWMAATVAIRQRENSFRTKYENYIRPDPKNADLRRKAYTAVAAKMARVAYALIKHNADYRCYYEAAIPSGKIPFVAAVGAAT

SEQ ID NO: 115192 - protein, 351 aa, unidentified
MFMIGVDYHPSVQQIAFTDTETGECGERRLNHSDGEAEKFYRELKQRGVSVRVGIEATGYSRWFERFLVELGFEVWIGNAAEIKTQRVRKQKTDRADALLLLKLLLENRFPQIWVPSPENRDLRQLLWHRHRLVQMRTRIMNQLQAIAMNEGKRWKKRLWSEQGRAELEKFQLAPWASRRRQDLTELLDRLNPTIEELTTAVEQEAKKRPEVLRLMTHPGVGFLTALAFVLIIGTPERFQCGKQIGSYVGLIPAEDSSADRQRLGHISKQGSALLRFLLVEAAQAAARSDPDWKRRYIHLAMRRQKSIAKVAMGRKLAVRLYWMWRREWDYQQFREFGSYAGKLGTGHGVN

SEQ ID NO: 115193 - protein, 348 aa, unidentified
MDILALDLGKYKTVFCEYHTANGEHTFGTVKTTPQEIHDLLVRTEPDRVVMEVCSIAGWIVDITQALGTPTEVANTLHEAWRWKNVKKKTDKDDALKLARLSAMGQLPTIHMPGKDVREKRAILKHRQRLVKYRTSLKNGIRAIFARQGITITKGAATWSQEGVKWLENEARDFAGISDATELWRGQLHVELGLLKAVTDALTRVESKLNKMGASDKQIKRLQTINGVGPRLAEAVVAFLDDPKRFKSGKEVGSYTGLVPRQYQSGQMERQGRTGGRGNLMLRNLLIEVCWASLASNAWARDTYKRLLRGSSSRKKIAITALARKLVVRCWAMLRDEQDWREPIQTST

SEQ ID NO: 115194 - protein, 350 aa, unidentified
MIIIGVDYHPEFQQIASVDTETGEFKERRLQNREEAEKFYRELAAGGVAARVGMEASGHARWLEHLLKELQLELWIGDAAEIQTKRVRKQKTDRQDAQLILRLLLEDRFPRIWVPSAENRDLRQLLWHRHRMVQARTRIMNQLQAVALNEGLRCKKRLWRERGRQQLESILLLPWASRRRSDLLQLLDQLNPTIAQLTQAVEREAEHCVEARRLMTHPGVGALTALAFVLIIGEPERFHCGKQVASYLGLVPLEKSSGKRRRLGHITKQGNSMARFLLVEAAQATVRSDPRWRSKYFHLLMRRGRKTAKVAMARRLAVNLYWMQRKGWNYEQFISFGSHAGQPGNPHGVR

SEQ ID NO: 115195 - protein, 403 aa, unidentified
MTKYHVGVDVGKYRHHVTIRDISGDTYCKSFSLTNDREGFDEFISSLEKLSVDKNDFLIGIEACPYGVNLSYFLLGVGFNLVEVNPFRAGQFRKAQGKKAKTDKIDSRTIAAILSLGDHKILSIPDPILDNLKDLTRFRTDLVNERATMIIHLQEALSILFPEFNSVFRQLDSAGSLAVLATFPGPEHIIAAGEETVGKTLSLASPHRMGRGMARRIIEAAQNTVGVIQKQPGLGIKISILAKRITSLQSTIRELDKQITEMFDSLPCKLQGFPLGRAPTLAAIVSEIGDIHRFPTLKKFLSHLGWCPQTFQTGNFRLEHPRMSHAGNKYIRRLVWMLSVLAVRMVPLYREYFQRRVMEGKAKMHVLIAVGRKILSTLYAMLKKGVPYDPNWEENGNIAVAGR

SEQ ID NO: 115196 - protein, 423 aa, unidentified
MEIIQERVAGLDVHKETIVACVRLGIGRKVTRECRTFDTTTDGLRALLAWLVECRCSHVAMEATGVYWMPVWKILSEGDFVLIVANAAHIKNVPGRKTDLNDAMWIADLLACGLIKASFVPEEDIQELRSLLRTRKQLGREQTRHVQRIQKTLVEANIKLDSVLSDIMGASGRRMIEAMIAGVRNPRQLAVLASARIKTTPKQLYDALHGRLTDHHRFLLKLHLRLWDGLDATIRDIDQEVEARIARMDKEVKAGEAPFCDLIDLLCTIPGVSTLSARTILSEIGRDMSRFPTAGHLVAWAGLCPGQNESAGKRKPARLRKGAPWLKTMLVQCAWAAKRKKDSYYKAQFFRLQSRRGPQKAICAVAASILTAIYHILKNGTEHHDLGPDYFKRRSTEGQTKRLVAQLTKLGYEVKLERTTQAA

SEQ ID NO: 115197 - protein, 343 aa, unidentified
MQTVTTIGLDIAKSVFQVHGVDAAGQVIIRRQLKRRYMLAFFQKLSPCLVGIEACASSHHWSRELQALGHIVRLMPPAYVKPYVKRQKNDATDAEAICEAVSRANMRFVPTKTPEQQSGLVLHRTRHLFIRQQTAVINSIRAHLAEFGIVAPVGRRGVEELLNVVANPDDKRVPEIARGCLSALGAQLRRIKEQVLEFDRMITAWHRSNETSMRLDDIPGVGPALATALVATVADPKAFRSGRNFSAWIGLVPKQHSSGGKDRLGSISKQGDRYLRSLFVAGALAVIRYAKIHGTKHRPWLTALLARRPTKVAAIALANKIARMAWAMMAKGERYKEPVALAA

SEQ ID NO: 115198 - protein, 418 aa, unidentified
MKKHNNSRKKSEQPSKRAKSRGPVQRDTKEVLAELVGKLKEKLDPKKVAARSAGEEHPRGELRPNLDRLTVGVDLGDQWSHYCILGLEGETLTEGQVRTTPQDVAEFFQALNAARVVVEVGTHSAWIRDVICSFGHEVLVANPRLMEGSKRRKRKNDRIDANKLARLGRVDPQSLHPMQHRSAEVRQDLVLLRARDALVAARTELINATRGLVKSMGRRLPKCSSPSFAQKVEAAVPAEIREALLPLVRMTAALSEGIEGYDKKIEKLASEKYGHTALLRQVKGVGPITSLAYVLTLENPERFVKSRDVGPYLGLVPKQEDSGDSQPQLGISKTGDTMLRRLLVGSAQYILGPFGPDTDLRRYGLRLCERGGKNAKKRAAVAVARKLAVLLHRLWVTGDVYEPLRHGMSATTAHAAAA

SEQ ID NO: 115199 - protein, 403 aa, unidentified
MSANGITFVGMDAHKKAINLAMLLPGERLPVEWQVANEPAAIRRLAKKLVREAPGEVRCCYEAGPCGYALQRELHQAGGVVCEVVAPSLTPVKPGEHIKTDRRDARKLAELFRGGLLTEVHAPTADQEAVRDLSRCREDAQEDLTRSRQRMSKFLLRRALIFRVSKRAWGVLHRQWLRGLTFEHAADQAVFGDYLLAIEQLEERVRTLDAQLAAAAEQEPYREPVAWLRCFRGIDTVTAITLVAELHDFRRFRTARELMAYLGLVPSEYSSGNSRHRGAITKAGNCHARRVLVEAAWHYRHRSKSSATLRRRRQGQPARVIALADRAQERLCRRYRHLVERGKPTPKVVVAIARELVGFLWAVWAGLEVGARSGASRGQLKTTAPESRKATIVALEAPTEAVS

SEQ ID NO: 115200 - protein, 365 aa, unidentified
MAMTNIKEKNKKRETISFKGQQINIGLDVHKKNWSVSIYLGQQFIRTYHQESNGSILLKYLQTNYPEGIYRTCYEAGFCGFSLHRELTSLGIECHVINPSDVPQTSKGMLSKTDASDSRRLGEAFSKNMLRSIYVPVSSDEADRNLIRYRKRVQEDVRAKKQMIKSILNVLGIKIPVEHDKSYWTNNFMTWLKELTVNDVSNKNTITFLVEDVVLLRKRLFATNKQIRIMSQTERYSKVYSLLITTPGVGLITAMTLLTEIGDIKRFDNFSKFNSFIGFCPSEFSSGEHIHKGKITIRCHKTLRSLILEAAWIAMRCDPALTLKYHELLKTKTAKRAIIIIARKLLSRLYTIWKTNTPYEKGIVK

SEQ ID NO: 115201 - protein, 377 aa, unidentified
MTIVAEQARATGRATVAEAYRYVVGVDTHAATHQYAVLEAGTGGVVDQAEFGTSAKALARAADWIARRTLSATDGDPDGDRGGDLGSVLISMEGTGSYGAQLAVLLLNAGYRVVDAPSPKRERGAGKNDRIDAIVAARGVLHRRVEKLADARAGQVHASLQTLLSARNAMTKERTRAINALHALLRTHPLGIDARRKVSRASIAVIAGWRTRPQEPLGLATARAEAVRLARRIRALDGEVKDNERTLKAIVTATRPSLLQQTGVGPVNAAIVLVAWSHPGRVRNEAAFAKLAGVSPLEVASGTRNEHRLNPTGDRQLNRALHSIANTRLEHDDRTRAYRARRTAEGLSKPRIRRCLKRYIARELFRHLAAPPALDKT

SEQ ID NO: 115202 - protein, 324 aa, unidentified
MNVVGVDVSKQTLDIGVTVSGRGQLKKCENRKRTFPALLKWAQKASREEHPTFCLENTGRYGERLADWLFGQGCKVHMVNPVRIKAYARSVNLREKTDESDALLIGRFAEQNDLEPYTPTPDNQRELHGLNQFRQNLVIQKTRLSNQLGSLLDEPYNRSVVRQLKNEVKRITELIRQVEKEIVAVIAANEGFCKVIQHLLSIPGIGPVTAPILLEYLLKGFRSGKAMAQHAGLVPVAFRSGTSVRRRDRISKISDADLRTALYMPAVSVICGNSPFATFYNNLISKGKPRMVALVAVMRKLLCVAYGIFKHNMSYDPTKVLAHA

SEQ ID NO: 115203 - protein, 367 aa, unidentified
MSSVASQAGLIHLGMDTSKNTIVVATLLPGEDSPVTDRIANEEAAIRRLVGRFADRSVLRAWYEAGPGGYELWRLLASMGVACQVVAPSLIPKGGSDKVKTDKRDSRRLARLGRAGELTPVRVPSPAEEAVRDLARARDAMLADRKRAQQRLTAVLMRHGRIWRGATYWTAAHRAWIAAQRYGEPALAAAIGYYRATLAVREAELAALEAELMPWAAREPLAGPVARLGCYRGIAELGALTLAAEVAGWRRFPAARAFMSYTGLVPAEYSSGERTRRGHITKAGSEPVRTALTEAAWSYRHAPAIGAGLRRRQAGAAPDTLARSWTAQRRLHDRYVHLVHHGGKAAPEAAVAVARELAGFVWAEMTA

SEQ ID NO: 115204 - protein, 413 aa, unidentified
MEILYPRCCGLDVHKRTVVACLVVPGPDDQAAKEIRTFGTMTADLLALSDWLAAAGCTQVAMEATGAYWKPIYNLLEDHFAVLVVNAAHIKAVPGRKTDVRDAEWIAELLRHGLLRASFIPDRPQRELRELTRYRTTLIQERANEVNRLQKVLEGANIKLASVATDILGKSGRDMLVALVSGTSEAATLAQLARGRLREKLPQLEQALTGQFGPPQRFLVAQQLAHIDFLEASLERVSAEIAERLRPFEPALERLQTVPGVGRRTAQVLLAEVGADLRRFPSAGHLASWAGLCPGNDESAGKRRSGRTRKGSPWLRTALVEAAQAAARTKDTYLAAQYRRLAARRGAKRAAMAVAHTLLVMVYALLTKQQTYHELGCQYFAARDRQTVQRRLVHRLEALGYQVSLEPISPSAA

SEQ ID NO: 115205 - protein, 435 aa, unidentified
MNLKPIAGIDVGKFFSELVILSPTNEIFARMRIHHDSNNDMKRAIELLKKAEKDFASRPFVVMESTGHYHKILFHFLCKFGFEVSTINPIQTNSIKNIGIRKVKNDKIDARKIALIYRFQELKATNIPNEDIECLRSLCRQYYKLSDELTAYKNRLTAIVDQLMLNFKDAFPNIYSKAAIAVLEKYPTPTAIIKADKDELISTIQKNSRKSFEWATKKYELLVLKAKEFEPLSIDNAANLAMLAVYISMVKTLQENLDKVLMAIHQLIADDLSKDMPVMALTIQLLQSIPGVGFLSAAAIVAEIGDFKAFSNSKKLVAYFGIDPSVRQSGEFTGTRNKMSKRGSRLLRRLLYTIALANIRTKRNNEPCNSVLMDFYKKKSQYKPKKVAIGAVMHKLVFIIFAVLRDRKPFELRTPEEHAKMLAKKHAVALDSTCI

SEQ ID NO: 115206 - protein, 417 aa, unidentified
MENFAALIAIDWADKKHAVSLYDETTGGREQTIIKHTPEALQEWALALRTRFQGQPIAVGLEQSRGPLIYALLKYDFFVLYPINPVTLAKYRQAFSPALGKDDPSDADYLLDLLQHHRERLTPWRPDDEKTRTLRLLVEQRRRLVNDGTRTTNRLTALLKAYFPQVLNWFSELRTLIVCDFLDRWSTLEAVQRARPDTVNKFLRSHHSVRRDTNLRRLKEIKTAIPLTNDRAVLNSSTLIVKVFTAQLRTTIKALAELDRHIEALCQTHADYQLFSSLPGAGAIYASRLTAAMGSDRSRWTRVEDLLCFSGVAPVIERSGKQNWIRWRYFCPKFFRQSFVEYAEQSIQHSFWARAYYSMQRAKGKAHNAAVRALAFKWIRIIWRCWQTRIPYNEVIYLESLRKSGSPLLKFAAENQA

SEQ ID NO: 115207 - protein, 389 aa, unidentified
MYFVGIDISKYKHDCCIISAADQQIVSKFTVKNDKDGFEHLLTTLNSLSNPEDIKIGFESTAHYALNLELFLENAHHSFMEVNPVLIKEYKKSTTLRRTKTDSVDCESIARWLMTVEYKPHSKGFYHAYSLKSLTRLRDKLIRQRSFYLVKITNVLDHTFPEFKPFFNERLSKTALYLLENYGSAEKMARMNSASYEKLRSVSRGKFSPQQFLRLKELAVNTVGVNNSIFDVELNSLLSLYKSLVKEIDTIKKEINQLIEEVHPHYMSVPGIGPLSAAVIYSEYGDISNFTNPGQMLAFAGIEPGINESGTESHGGKMVKRGSSQLRYTLINCCLPLIRFDMTFATYYAKKRGEGKPHRVAITHVAKKLIRVIYALESQDIDFNAQELR

SEQ ID NO: 115208 - protein, 342 aa, unidentified
MQIAVLGIDLGKNSCSLVGFDKAGAVVKRRRMRPESISALTEKMAACIIAMEACCGAHHLGRILAAQGHTVRLMSAEYVRPYVNAQKNDDRDAEAIAEAATRPTMRFVELKSEEQLDMQTLHRARDRLVGERTALINQLRAILLERGMTVPQGRRKLEQYLAAMSDAGDDTSLSLRMRRLIDDMRAEWLELDRRIAALDNEFAACARSDAHARRLATIPGIGVLNATALVAAVGTACTFARGRDLAAWLGLVPRQITTGGKPRLVGITKRGNKYLLIHGARSAMPALAASATPLGGWLQGLLKRMHKNAAVVALANKLARIVWVVLRQGKAFDATAAASVAA

SEQ ID NO: 115209 - protein, 391 aa, unidentified
MIYIGIDVAKDKHDCIIKNSVGEVVFKTFTIKNNLDGFNDLYQKIESAMEDASKVKVGLEATGHYSYNLLGYLIDKGLPTFVINPLHTNLYRKSLSLRQTKTDKVDANTIASMLMSDVNLKSYSDTSYHNEELKSLTRYRFDKVKERAKLKTSISRLVCILFPELEKLVPTIHMNSVYSLLYEFPGAKQVANAHLTRLSNLLNEASKGHYDKDVAIAFRDAARASIGSNMPTKSLELKHTIKLIRELDSEIDEIEGEIKAIMDAINSPILSIPGISYRMGAMIIAEIGDFDRFDSADKILAYAGLSPSTYQSGQLDNCHPRMEKRGSRYLRYALFNATIYACHWDPTFNAYLAKKRAEGKHYFVAVSHATKKLVRLIYQLEKNNQQYNKAF

SEQ ID NO: 115210 - protein, 341 aa, unidentified
MKRWIGVDLHKNQFTVCYLGKKGEHQLQVFKVMAKDIEAFKQTVTKIDVVAVESTGNTGYFVRQIQNSVKEVKIINPTQFKIISTSVKKTDEHDALVIAKYLSKGLIPEVRMRSKEQSQIASLIGTRDKFVKLRSCLKNKIHNILNANGIVTKREVFGSDKGLERILSIDIEDSYRFELKIIVEQIRSLNKSIDEINEEITGRGKNLEGHKNLTSITGIGDISATILLNTIGNVSDFADDSKLAAYFGIVPRVAVSNETSHYGKITKMGNKIARTTLVQSTLIAIKYNPYLRKFYFRLKAKKGSGNAIIATARKLLTIIYRTLKNNWVFEDFNQFKLAVTV

SEQ ID NO: 115211 - protein, 341 aa, unidentified
MRMFAGLDIGGKRTAISVIDGSGKLVWRGIVDTHPEMIDAALQRFKGSLDKVGLESGPYTPHLFRSLEAIDYPMICMDARRAADAIKSRRIKSDKGDAWALAEMLRTGWFSSVYVKSVDTHRLKALLGARDQLVKLKRSLGNQVRGLLRPFGIKLPSRAGGKKFDEAAYVATRNDPMLHAAIRALLEALAAIEGQQARLDDELDELAKRNEIAWRLMSVPGVGRITALAYMAAIENIDRFRRTRDIGAYLGLTERRYQSAETDVGMGISKQGDAMARHYLYEAANVLLTTVRKRFALRNWGLRLVKTIGPKRARVAVARKLAVLLGRMWKDGAHFEATVAA

SEQ ID NO: 115212 - protein, 414 aa, unidentified
MEIVHTHCAGLDVHKKTIVAAIIVPDGQGGLWKGVRTFDSMTSDLLALSDWLMACGVTHVAMESTGEYWKPVFNILENNFEVLLVNAQHIKAVPGHKTDVKDSEWIAELLRHGLLKASFVPPLGQRELRDLTRSRSTFVRTRATLVNRVHKVLEGANIKLGSVASDVMGVSGRAMLEAIVEGQSSPAEMAELAHGRMREKRDLLTKALEGRVQAHHRFVLTELLAQIDSLDETIERFNEQIEVYCRPFEDAVVLLDTIPGVGRETAEIIVSEIGTDMSRFPTADHLSSWAGVAPGNNESAGKRRSGKTMQGNKVLGAALNQAAHAAARTKNTYLSAQYRRLAARRGKKKAIVALEHTILVIAYHLIQRKEPYRELGGNYFDNRRPEATAKRLVSRLVQLGYTVSLQQAPAFAPA

SEQ ID NO: 115213 - protein, 345 aa, unidentified
MKKNIIGIDFSKETFDATLLDCRNSELSEAVQSAVHEKFTNNKEGFQAFVKWIKSFVKKITPDELLLCGEKTGKYSLPLSNFLYAKGYSIWLDSGLRIKRSLGISRGKSDKADSLKIALYAYRYQDMAVCYVPLSKNVSRLKELFLYRQHLVSQVKAMDVRKNVTDDFKKELGDVKFIVDSAAKIIQQIKATIKKCEEKMQELIEEDDELKTTHDSITSIKGISLINATAFIAYTNNFKDFGGNAKKIATYWGVAAFAQESGTSVHKVARVSKIASKMLKSLLTQAARITVRWEPKFRQYFEQLISRGKHQGVALNNVKNKLIHVITALAVSKEKYNREYEYIKR

SEQ ID NO: 115214 - protein, 344 aa, unidentified
MSEVITIGLDIAKYVFHVHGADERGRAILSKRISRGKLLDFFAARPSCTVALEACGGAHHWARQLTQLGHEVRLIPPAYVKPFVKRQKNDAIDAEAICEAAQRPSMRFVAVKSEQQQAAGLVFRTRDLLVRQRTQLINAIRGHLTEYGWIAPKGPSHVAMLADLLEEEEMASSLPEAARAMFRLMLDLLAGLNGKIMDLDKEIARRAREDEVSRRLMTVPGIGPISATAIAALAPPAETFAKGRDFAAWLGLTPLQRSTGGKQKLGATSKMGERTLRRLLIIGSSAVVLQASKRGAPRGSWLEQMLARKPRMLVTVALANKMARIIWALLVKQENYRAPVAAKA

SEQ ID NO: 115215 - protein, 342 aa, unidentified
MDHFAGLDVSVKQTSICIVDDTGRIVREVKVASEPEALLAVLKNSAYHFERIGLEAGPLSQWLFSALAEVELPVVCVETRHMQAVLKAQINKTDRNDARGIAQMMRAGLYRPVHVKTLRSQKLRMLLTHRKLLQSKAIAIENDLRGTLRNFGLKVGMVGKVRFEARIEELVENFPDLAVLVEPLLIVRRALREQIVILHRRLLAIVRDDEVCRRLMTTPGVGPVVALTYRATVDVPARFRKSKSVGAVFGLTCSKYQSGEIDWSGRISRCGDEMMRVMLYEAAQSMLRSKKWSWFKAWAMQIARRRGMKKAIVALARRLAVIMHRIWVDGTEFRWTRETAAA

SEQ ID NO: 115216 - protein, 311 aa, unidentified
MDSITVVGIDVSKDRLDVAVRPSGEAFAVERNAAGLEQLTVRLRELAPQVIALEATGGFETIAAAALAAARLPVVVVNPAQIRAFAKAIGQRAKTDPIDAAAIAHFAEATKPVPRPLPDDATRLLSDLVARRRQIIEMIGAERQREQRVTVPRLRRSITRLLKALEKELASLNTDIGDAVRGSPAWREKEDLLSSVPGVGPIISSTLIAELPELGQLGRREIAALAGLAPFTRQSGKWRGKSFIGGGRTAVRTALFMGALVARRYNPVLKGFFDRLVAAGKPKMVALIAVARKLLTILNAIIRDNRPWQTP

SEQ ID NO: 115217 - protein, 359 aa, unidentified
MSSIALERTDVIVGVDTHKDEHVAVVIDGLGGRLGEYYLSVTSSGYAELLAWAKTFGRVHVFGVEGTGSYGMGLARFLRRHAQTVIEVSRPPRAGQRRLDGKSDPIDAEHAARQVLAGQATATPKVSNGAVEAIRLTRIARNTAVKAHTQAIVTIKATLVTASDELRAKLEPLTDYKLMTACVGLDSDGDPSDPEVAMRHVLCSLARRWLDLHEEIKTHTKRLKKLTTATAPRLLDAFGIGPDIAGELLVAAGDNTDRIRSEAAFAKLCGVCPIPAGSGKTGGRHRLNRGGNRQANAALFRVVIVRMRWHAPTIAYVERRTTEGLSKKEIIRCLKRYVAREVYNLLPPPRGNEECLPPA

SEQ ID NO: 115218 - protein, 402 aa, unidentified
MWYVGLDWADTHHDVEVLDEAGKRVGARRFAHSHDGLNELKQFLLRIAPSPENLACIVETNHGLLISFLLSAGIPVYPVNPKMANKLRKVAGAKTDQIDAHLLAKMGRFDLDELRRLEPDSPTVQELKTLTRDQDSLIQMQTRLVNQLTACLKEYYPAALNLFTKLQQHSTLAFLQAYPTPQAALAASLEEIIATLRAGKHSNPKGTAPKILKELHLPQLVANEVIVRAKSRLMLSLAKQLLVVMEDIANYDKEIEALFLTHPDHELWSSLPRAASRLAPRLLAEWGDDRGRYADANSVQTLAGTAPVPFQSGNYAKAHKRFACLKPLRNDLHQFAWQSTLSEPWAASYYQHKRAEGKTHSMAIRALANVWVRIIYRMWQNKTCYQAETFEAAQRAHAKRVA

SEQ ID NO: 115219 - protein, 321 aa, unidentified
MVKKNPHIEFEQVIERGCGIDIHKMVLVATIRGTGIKEETRTFDGFTESIEELRDWLKENCVSHVAMESTGVYWKPVYNILESDFEILLVNARHIKNVPGQKTDKKDSKWITKLLLSGLLKGSFIPPKPIRELRDLTRYKRKVIEQISSEKNRIHKLLEDANIKLSSVVSNLSGATATKIIDAMIGGEENIEELLKYRHGKMQSSIEDLASSLKGNLTEHHRFMLQTVKESIKSKEQIILKLDEQIDKQLVENELILDAELLDTIPGVGKDGAAYIIAEIGNNMDQFPNEQHLASWAGMSPGSNESAGKKKAHESPMVINT

SEQ ID NO: 115220 - protein, 337 aa, unidentified
MDYFAGLDISMDETHVCVLDREGEVVFESKAASTAHAIADTLARAPSCHRIVFETGRMAPILFHGLSQLHLPVVCVESRQAYQALKSLATHKSDRNDARGLAHLARTGFFKPVHVKSLSAHAIRSLIIARKKLVGQRVTLENQIRGLAVVFGVRLPRALTAAFIDQALKASEGIAGLSAAMRGLIAARTAVMTAVAAIDADMRRMTKASNACRRLMTIPGVGQLTALAFAAAIDDPSRIRHSRDVGAYLGLVPRRYQSGQVDYVGGISKCGDRRVRTLLYEAANVMLTRYKGQLKLKDWAFAIARRSTMRKARVALARRLAIIMHAMLRDGTEFLAT

SEQ ID NO: 115221 - protein, 332 aa, unidentified
MKYKVFIGIDVSKLTIDAHLHGIGASKTFSNEEKGFASLLSWVKKYSKQSEPAEMIICFEHTGMYSIKLATYLNDLGIPFAMLPALQIKQSIGIRRGKNDQIDAQRIAEYAWLHRETIQATILPAKSILKLQSLLTLRNRLVCDRGGYEATWKEQKKALEGKEHKGIFQVYKSLIVNLTVQVKKIEEQIKAVIESDEAVKLNYQLLTSIKCVGPVLAANMIAYTHNFTRFSTWRKFACYVGTAPFEHQSGTSIKGRTRVSSLSNKQLKKLIHMVAICACAYNPEMKSYYKRRVSEGKNKMSTLNVIRNKIISRMFAVVNRGSGYVDLMKYAA

SEQ ID NO: 115222 - protein, 352 aa, unidentified
MALPTLPHPQVLVTLGVDTHADSHVAAALDQAGRPLGTRTISTTPGGYAALLGWARRLGTVDRIGVEGTGSYGAGLARWLRAHGQLVIEVDRPDRAARRRQGKADDLDAHAAARAVQAGTATGQPKAGDGMVEMIRSLRLARRSAVKARTQAANQLKALLVTAPDVLRAQLRCLPPAELVTTAARLRAATKPATPTEAAKLALRSIARRWLQLTQEITALDTQLERLVAMAAPALVAVKGVGTQTAAVLLVAAGDNPERLRSEAAFAHLCGVAPIPASSGKTTRNRLNRGGNREANWALYLIAVGRMAWHGPTHAYVQRRTKQGKSKAEIIRCLKRHIARELYGILVSRPAT

SEQ ID NO: 115223 - protein, 322 aa, unidentified
MDGSTQNPNVSFVGIDVSKNKFDAVILPEGTRLTCTYDSEGIEKFLTQLPQHDCVVVLEATGGYERRLAADLVEAGHATAIANPRQVRDFARGIGVLAKNDRLDARVLAVYAQHGKLRLAQERSEKQQELTALVVRRRQLLALQIAESNRLEQTTIKAAAKSIRHVLDLLRKELKKLDAEIARLIAADDDWRNKSELLQTVPGVGPATSASLVAELPELGKLNRQRIASLVGLAPFSRDSGQFRGQRSIWGGRASVRTALYMAAFNAKRCNPVIRAFAQRLEASGKRRKVVLTACMRKLLVILNTMVRNQTPWKTTTILQTA

SEQ ID NO: 115224 - protein, 409 aa, unidentified
MLFVGDDWAEDHHDVEFVDEAGRRLAKARLGEGVQGITRLHELVAAHVPEDAEPGQVVVGIETDRGPWVQALLASGYQVYAINPMQAARYRERHSTSGAKSDAGDAHALAELVRLDRAAHRPIAGDSDLAEAIKLVARAHQTLIWDRHRHLLRLRGALREFFPAALDAFDDLTAPDALELLGAAPDPATAASLSHARIRGALHRARRRNPAGRAVQVQAALRAEQLGQPPVVTGAYAAIVRSLTAVITALNTQIKALEVQVVTHFGRHPDAERYRSQPGLGDVLAARVLAEFGDDPTRYAAARSRKNYAGTSPITKASGKKKVVLARYARNDRLADALHQQAFCALTASPGARAYYDTLRARGIGHHAALRQLANRLVGILHGCLKTGTRYNEDTAWAHHSHQAQRAAA

SEQ ID NO: 115225 - protein, 361 aa, unidentified
MDVLHERCAGLDIGKRDLKACVRALHPTRKRSRRQKIRTFATTTNALLELREWLLAERVELVVLEATGDYWRPVFYLLENDLNVVLVNAAHAKGLPGRKTDVADSAWLCQLGECGLLRASFVPSEPIRHLRDLTRYRATLAAERTREAQRLEKELEDAGIKLSSIVSNLLGVSGRQMLAALIEGERDPDVLAGLAKARLRPKIPELVEGLTGNFGEHHAFLCRLHLERIDQISAAMEELSVRITTELEPFWDQLNRLQMIPGIGQGVAEVIIAETGGDMSRFRTAGHLASWAGVCSGQHESAGRSRSGRTRHGNHWLAAALVAVMGAARTKDTPPSSAPATAGWSHDWAGKRLLSPYSTPC

SEQ ID NO: 115226 - protein, 376 aa, unidentified
MREKLRFLGLHVHAETIAVAVAEPDGEVRSLGTIANREDSIRKFVRKLGPTEHLRACYEAGPTGFVLYWQLTQLGVECAVVAPSLVPKKPGDRVKTDRRDALKLARSHRSGDLTAVWVPDEDSEALRDLVRQREAAKQDQLRARHRLTKLLLRTGQRPPQGLKPWTERYMRWLAQVRYSQPAQEVTLMDCLNEVEHMCARVKRLEEAILEVVKLAPRPMQEVIRGLQALRGVAHISAVTIAAELGNISSRFESARKLMGYCGVFPSEDSSGKRIRKGGITKAGNAHLWRIVVESAWSYRHLPRVGEKLRKRHEGIPAEITEIAWKAQNRLHKRYMKLMNAGKDQRKVMTAVARELLGFIWAIGIKAEAACEQQLAA

SEQ ID NO: 115227 - protein, 438 aa, unidentified
MPTFAYVGLDVSQDAASVCFLLTDGAEPVPRWTIPNTQPGADTLAATLAELAPRYRVDQLRIGMEATGLLWWHLACTLKDAPALAPFAPRIYALNPHLIKTFRANYGALPKTDRADAFLIAERIRFGRQLPSPFQLDARYAPLQRLTRFRCHLAQNLAREKSYFLSFLFLTFSTYGQIAPFGDPFGATSSAVLDEFTTEELAQQSLEELATYLQQKGHGRFSDPDALAATLQRAARDSYRLDKVLQEPLRLVLGTTLATIRSLQNQLKTLDKTIAQELAAIPQTLASVPGLGPVWTAGLVAELGDITRFDDEAAIAQYAGLTWETRESGQFQAEDTELTKRGNSYLRYYLVEAANSVRQHCPEYGRYYTAKYAETPRHPHQRALVLTARKLVRLIDVLLREGKRYLVPAERPVRGKATPPHHARPARQRRNKQALAVD

SEQ ID NO: 115228 - protein, 342 aa, unidentified
MSIVIVGIDLGKNSCSIVGLDSLGTVVVRRRLRRDSVIAFASKLPACIMAMEACCGAHHMGRSLAALGHEVRLMSPEYVRPYVKAQKNDDRDAEAIAEAATRPTMRFVELKSEEQLDVQTLHRVRDRLVGERTSLTNQIRSLLLERGHVAAQGHARLRHLLADLLDPATCSLSARMAFLLGDMRTRWDELGRRIAAFDAEFSAMARTDERARRLTSIPGIGALNATALVAAVGNAATFTKGGDLAAWLGLVPRQATTGGKPKLLGITKRGSRYLRKMLIQGARSAMPTLAKANTAIGAWLRALLVRTHPNIAVVALAAKMARTVWALLRHGRNYEAVPQAAG

SEQ ID NO: 115229 - protein, 430 aa, unidentified
MNFLPNYISVGIDVAADFSWFCILTPDGKEFKKPFKVEHDNADSLKNAVLTIKKAEEQFSMKSKIFLESTGIYHFPLFCHLKELGFEVFVINPLITNSNKNIGIRKVKNDRFDAKRIAAIGYSPDTKLSVMPTELILNLRCLCREYYSLADNRTSYVNKLKAQLHIVFPGFCKVFSDITGITAISVLKRFPTPEDVINAQPDEIIELISLLSRKGLNYAKAKYDKLFKSAKNALNFRYNLSSVYDVLKMYIYFIEEFDKKINLILSAIKAFVDKNKSEKFVQQIYYLDSIPGVGFLSAVTLMCEIGDFSAFSKPKQLFAYFGVDPSVNESGHFKGTDNKMSKRGSKIARRVLYAIALASVRVKRNGIAINPVLYDYYQKKKESKPKKVALGAIMHKISDIVFAVLRDNKPFVLKTPDEHKLQYQNIHKAA

SEQ ID NO: 115230 - protein, 324 aa, unidentified
MFYLGIDVSKAKIDCCLILENSANKKKTKTFSNTPKGFEQLQIWLNQHAATSTQTIILMEATSIYHELLAKYLFDEGYQVSVTNPARARYFAQSMSKLNKTDKVDSEVLARFAMTANLHFWQPLPKHIQLLNALLDRRAVLCEDLQREKNRLEKAESTFTMEPVLQSLHKSIEQLNQHIQGIDQQIDDHIDQNPDLKNDKELLSSIPAIAGRTSLLMLSFLRSHTFERASQAAAFVGLVPTQKQSGSSIHGRSHLSKAGSSKIRAGLYMAAIVATRHNPHIRAMNERLLANGKTKMIAIGAAMRKLIHLCYGVLKHQQPYQADY

SEQ ID NO: 115231 - protein, 430 aa, unidentified
MTQRNPTPADAVLVAIDMSKHRQEVLIERPEGGRRRRMTVMATQADYDRLASDLADIGRSIIVGFEATGNYHRTLAHRLLSAGFELRLISSVALARTREALHNGWDKNDSKDAQVILHMLQIGATQRYVDPLAAGINDLQEMSKTHEAISKAKTQTWHRILTHYLPLYFPEIERFAGNSRSDWFLALIERFPTPGSMTALGQEAFTHEAWSLVGRKVSKARLLNDIYKTACASIALPVDEDSVAITMFRMVIGQARSLIRQRDEIERTAHALLSENRDYQLLRMIPGIGPINALTILAEAGDLRRFAHHRQFLKFCGLDLATCQSGTFRGRTKLSKYGNARLRRTFWMAAQVAARQRDNSFRDKLGRYMEGHANDPDRRRKAMTALTAKMARVAHAVIKTGTEYRPFLERADTRWKDPSLLCREGATATL

SEQ ID NO: 115232 - protein, 341 aa, unidentified
MNIVGAFDVHRRQLTFEYLDTRSGELKRGRVIPADREHLRAWLARFASQADVHFALEGCTGWRYVAEELAAAGITPHLAEPADTAALRGRKRHAKTDKTDTRHLRVHLMAGDLPECWIPPEHMLEARAVVRLYKDLVDERGAWHQRIAATLFHQGAPAIGSMSTAEGRAAVEQVQLSPAGRQAVAAGLRQIDRLTAELDLLRRQLAVLSRRQPGCAALRAAWFGIGPVTAVAIWAELGDARRFGNSDDVVRHTGLDITVYSSDTKRAAGHLSRQGPPLLRWALYEAAKCAARAAAPDHGYYTAIRDQRTAGLATLSVARKLARRCYHTLRELGEEALAPAA

SEQ ID NO: 115233 - protein, 343 aa, unidentified
MEQYVGLDVSLKMTAICIVDRTGKIEREGMVASDPEAIAAFVRLHAPHVARIGLETGATSTWLWTELNKMRLPVICIDARHAKAALKMQINKSDRNDAVGIARIMQCGWYKEVRVKDLDRHAIKALLVSRALLVKIKRDIENQVSGLLKNLGLVIGRAKMNVFAVCAAELTEDRPELAAAVEPLLKAREAIERQIADLDRKVPRLARNDAQVRRFMTAPGVGAITALCFLATIDDPTRFKRSRSVGAYVGLTTRRYASGEVDWTGRISKCGDKLLRSYLYEAANVLLTRVAKWSALKAWGIRLAKRSGLRKAKVAVARKLAVILHRMWIDGTEFNWSTKKAAA

SEQ ID NO: 115234 - protein, 359 aa, unidentified
MIAMKYYTSTTQFNCGIDLHAHQMYVCLMDQQGKKLVHTNIKNNDFDYFLKLVAPYRHDLTVCCECMFGWYWLADACQAAGLTFVLAHALYLKAIHGGKNKNDRIDSEKIAHLLRTNLIPPAYVYPADKRPLRALLRQRLFFVWRRSELLARIHSHQLAHNRIPPKQTRRNRDPWEQQLLAAEDHPLRQLALKNDLTLIRHFDHQIFQLEEELQRQAKQIAAREYALLQTVPGIGENLGMTILCEIGDITRFPSVKNFLSYCRLVKGTVASAGKIKGLRGAKLGNPYLRWAFGEAAVIAKRDHYVLGPLAQQLEARMGGNKFKANTVIAIKLARAVYFMLKNKTVFDPERLVASLQAAA

SEQ ID NO: 115235 - protein, 320 aa, unidentified
MKQATYVGVDVSKKQLDVAIRPLGKVCGVNNDRKGISQLVKRLKKLQPVCIAIDATGGLEKELAYALAAENLPVAVVNPRQVSNFAKSTGQRAKTDAIDAAVLAHFAEVMKPEVRPLPDAASRELTALVTRHRQLVEMMTAESNRRELASTSVRKLINSLLRSLKDQLLVVDREINKAISASEIWRRKAELLRSVPGVGKVTTATLLAGLPELGALDRRQIAALVGVAPFNRESGTWKGKRMIAGGRAWIRSLLYMSTVVAVRRNPILKEFYERLRAKGRPAKQTLTACMRKLLVILNAMLRSQTHWSAPTPVVSLRVTG

SEQ ID NO: 115236 - protein, 455 aa, unidentified
MSKRKPSRQPYGSPSARVLEPNAAGVDIGATEIYVAVPTDRDPQPVRHFGTFTRELEQLADWLKQCGIETVAMESTGVFWIPLFQILEDRGFRVCLVNARHVKHVPGRKTDVADCQWLQYLHAVGLLRASHRPPQTICALRSLWRHRESLVQMTAIHIQHVQKALDQMNIQLHHVISDITGTTGIAIIEAVLAGERNPKQLARLRDPRIVASEETVAEALIGDYRPEHLFVLRQSLQSYRQYQAWIADCDREIERLLGKLESRLAPGQKLLSPPKDRHKSRRNEPRFDLRAYLYRIFGVDLTEVPGVNSLTAHTLLSEVGPDLHKFPNAAAFASWLGLCPDNRISGGQILSVRTRKVVNRLAVALRMAAQSLHRSQSYLGHYFRRLRTRLGTPAAITAAAHKLARVLYHIVTTRQPYDESVFAVMEGRAHHRQFIRLKRQAAAFGFQLMPLARVP

SEQ ID NO: 115237 - protein, 341 aa, unidentified
MKVSTLGIDLAKNVFQLHGVDHEGHTILRKKLTRAKFVQFVIQLEPCLIGMEACSSSHHFARLFTRYGHEVKLIPPQYVKPYVKTNKTDAADAEAICEAVTRPNMRFVQIKTEEQQAVLALHTERGILIRERIACSNSLRATLAEFGITIAAGQSHLTHELPAILEDDENGLSPFVRTSIYRQSKHIRELEEQVKQVEQALASWYRTQEACQRMAKIPGVGMLTATYVIAAVGNARQFSTAKQFASWLGLTPKEHSSGGKQQLGGISKRGDGYFRYLLVHGARALTAWVNRNGAVEKNAWLQGLLERKHCNVAVVAMAAKTARIMWSMLTHNTEYQPRQLA

SEQ ID NO: 115238 - protein, 350 aa, unidentified
MPCSTIRAVATIGIDMGKNTLHMIGLDSRGAIVLREKVSRGRISSRLANLPPCLIGIEAGMATHYVARELAALGHDVKQVPPTYAKPFRQGHKNDFRDAHAVAEAVQRPTTRFVPAKTDEQLDLQALHRVRSRLVSERTAVINQIRGFLLERGIIVRQGLRFLRQALPDILAKRTDVLSPRMMRIVADLASDWRQLDERIEVVTDEIETLAKSDSSCRRVMTVPGIGPIISSAMIAAIGSGAAFARGRDFSAWIGLVPKQMSTGDRTILGRISKRGNGYLRMLFMQAARVILLRPASWPKHGFGIWLARAAQRLHPNVLASALANKLARIAWTVLAQERSYETRLTKAAA

SEQ ID NO: 115239 - protein, 341 aa, unidentified
MKNLFIGIDFSKEKVDVAIISAEGLVETSVRVFNEFKNSVSGHKQLVKWVEKNANGMDSSKWLFCGENTGDYSKPLCNHLYGKGYDMWLENAKCIKDASGIRRLKSDRADAAMIAEYAMRNHDRAVDYEPLSESLAQLREYYLYRQMLVRHRCSFEVRRGEKRLMMEKSAAKTAIAQSGRHIVSELNKEIAKIDRKIASLIETSDELSEVYKIVTSVPGIGTQNAVCLMVYTDNFRRFNYDARSIACYYGIAPFGKDSGNSVHVDPHVHYMANRHIKAMLTQAALAAVRFNPVIAQYHQRLIGRGKKMPVAMNNVKNKLLHIVTSMVKYKQVYNPKYRFSA

SEQ ID NO: 115240 - protein, 351 aa, unidentified
MFAQSLGIDVAGKAFRVCLKIRRTDGQVKIKGSRKFSNTPKGFAALLKWVTSKQTSDDPMRAVMEATGVYYESLAYFLHEQGWRVFVLLPNRIKGYFKFLNLKSKTDKIEAAGLAELGINHNLPTWEPASPQMYSLKRLCRERNTLIDEKTVISNRLHAEKSCKTPDRGTVRRLKQLIRLIDKQVKEVEQDLSQGLEQDPELKQRIDNICQVKGLGWITVLCIIAETNGFKLVTHKSQLVSYAGYDVVERQSGSTINGKTRISKKGNRHIRRALHFPALSVVKYHDEFTNLYNRVYDRTKIKMKGYVGVQRKLLVLIYTLYKKNEAYDPKYAQRNEDNSRSRQGTMPAYTG

SEQ ID NO: 115241 - protein, 377 aa, unidentified
MSKLVFVGLDVHAETIAVAVAEIAGEIRSLGVIPNRLESVRKLIQKLGPVQNLRACYEAGPTGYVLYWQLTQMGVACEVIAPSLIPTKAGDRVKTDRRDAEKLARCYRVGELTPVWVPDADHEALRDLVRAREAAKKDQLRHRHRLGKFLLRHGKRPTDAGKAWTQKYLNWIRIHVHFEQPALEAALQHYREQVDHIAERITELEQAIDEAVKQAPPKIRAVIEALQALRGVAQTTAATVVVELGNLSRFASPSQLMGYSGLVPTEHTSGNRVQRGSIIKSGNAHLRRVLVEAAWTYRHRPNVQGGVLRRQKSLALSEEAKQIAWKAQQRLHKRFTRLMARDKQNNVVAVAIARELLGFMWAIAVHTEAQHKQAKAA

SEQ ID NO: 115242 - protein, 348 aa, unidentified
MTLVGCDLHSRKQQVAALDTTTGEVLEQELAHDGDAVERFYRALRPPVTIGIETTGYTQWFHALMHRLGHTVLVGEAGRIRAMVVRKTKTDRRDARHLLDLLKHDRFPTVWMPDPDTRDLRALVAHRVRLVRMRTMVKNGLQAIALNQRLALRSALWTQRGVAQLRGLALPPHTTRRRDDSLELLAWINVRIDQLDAQLAAVVDADPRARRLLTHPGVGPLTALTTVLVLGPVTRFPDGKHVVSYVGLAPAINASADKHHLGKITKQGNALLRWVLGQAAPQAARADDELRRRYFAVLHRRGRPKAKVALARKLLVRLYVMLRDQIDYEEFRRRGRAGQASRAPVTVT

SEQ ID NO: 115243 - protein, 344 aa, unidentified
MEITTVGLDLAKNVFQVHAIGSTGGVVVRRSLRRAQVIPFFSKLPPCLIGMEACGTSHHWARELVGLGHEVRLMPPAYVKPYVKRGKTDAGDAEAICEAVTRPTMRFVPIKSVEQQAALALHRTRDLLVRQRTQLVNMLRGLLAEFGIAIPKGITNALAFVRRAVAGEANEVPDLATKVIAALAEQAIEVQCRIRQLERDLLASFHSNDLARRIATVPGVGLLGATAIAATVTDPTQFRSGRQFAAWLGLTPLNNSTGGKERLGRISKMGDQYLRRLLVTGMTSLVRRNKHHPDSADPRINALLARKPPRLVTVAMANRAARAIWAIMVRGEIYRVPALGSAVA

SEQ ID NO: 115244 - protein, 316 aa, unidentified
MAELFTPTNIGIDVSKDWLDISVLPTQQTWRIPNTTEDIQKAIPTLKALHPERIVLEATGGYENRLALQLYAAGLPVARVNPKRVRYFARSLGLQAKTDALDGKALALFAERLKPPLTRFPSEKEQSLSMLLTRREQLSTMLVAERNRLETAPAKIRPSLEEHIAWLKDKIAELDREMEELIQNDPEFKEKCALLTEVPGVGQKTAAKLIADVPELGACDRKQIAALVGVAPYNRDSGHKSGQRFISGGRADVRAVLYMATLAAIRFNPVIRKIYQRLLQAGKKKKVAIVACMRKLLTILNAILRHRTHWNPTSTS

SEQ ID NO: 115245 - protein, 358 aa, unidentified
MQRNKISFKGQRIFIGIDVHAKNWEVAIAPEVGIAKRHSQKPSAKELFDFLKKNYPDGEYLAVYESGFSGYSTYYTLKEAGIDCMVIHAADVPTTQYEEVMKTDRVDAVKLARSLKAGLLKGNYVPEKQYIDDRSVVRIRKTVQKQLSGYKSRVKHLLHCHGVELPERFSERQTHWSRAFIIWLKTDVRLMSDTRASLDLLIRQVEVLRSTLLEATRQLRKMSQTERYKHRHDLLRTIPGIGLIVTMCILTEVCDIKRFHNENEFAAYLGLIPTSHSSGEKTVHGEKTFRGNKQLGPMIIEAAWIAISRDAGLGAQYFQYKQRMEPQKAIVRIARKLSNIIFSVLKNEKEYVPYQTGN

SEQ ID NO: 115246 - protein, 410 aa, unidentified
MKIAGIDVHKKVLMVVVVDASVPEEKPARRRFVTLPSELQRFRIWLQEQGVEEAVMESTAQYWRSVWLELEPHMRLHLAQAFSNRAPRGRKHDFKDAERLVRRLIADELILSFVPNGEQRIWRSMTRMKVQLTRDRVRLQNQMECLLEEMRIKLSIVVSNLLGASGLRILQALAKGETDPKMLAQLGDERLQCTEEQLVDALTGRVQPMHRAMLALQLQRLQLIDQQIAHLNGLIAQAMKPHQEAVMRLAEVPGLGVDSAQQIIAEVGAQATTFSSAPELTSWVGTCPGKEESAEQNHSSRSAKGNKYLRRVLNQAAHAAVAKKGSHFQVVFRRLLPRLGYQSAIWAVAHRLCRVVWKILHEGVRFIEQGREVGPREKKKRAQMLARALRKLGYEVTVTPINQLAAKPAI

SEQ ID NO: 115247 - protein, 318 aa, unidentified
MLIHYIDIAKRNFVIAVSSLSKTKTETNNPKGIAHTIEYLKKHKVALVVTESTGGLEIPAAKAIRRAGIAVIIANPRQTHQFAQSQPLTKTDAKDAKMPAFFAQMTAQKEDSQTMPYQPPTEAEEVLEALVNRRNQPADMRTAEKNRLHQVHETQVGSVKQLIAHFDRLIDELDKQIDNHTHTHFDGKDQVAEQIKGIGSITTATLMAMLPELGRLSHKRIAGLAGIAPHPRESGETKFKSRCFGGRSAVRKALYMATVAATRFEPLIRDFHQRPLSEGKPYKVAVTACMRKLLTISNARMRDYFAENDTAENGIRTA

SEQ ID NO: 115248 - protein, 348 aa, unidentified
MKYYIGLDAHSTTSTFAVVDESGQCVLRETVKTSEQSLVHVINRINGERHMTFEESSISQWLYLQLKDKVDNLLICNPTYVAKKQGAKTDFRDALHLANELRTNHLQPVFHDTSHWMEIRTTVSGYLDIVEEIVRFKNRLKAVFRAEAIQTDENNFYKNSSRVKEIKNPAAKFVAEKLFDQIEFLEREKEKYKEVFEKNRKRYKPIRNLMTIPGISIIRANIIAAIVCQPARFDNKHKFWGYCMLVRHIQISNGRIYGNKRFYGRRELRNVFLGAAENVMRLDGELRDRYDALRAKGADHKDAKVNLARQIASIALCLLKNNDTYNENYAEYLKERKKLRKDFFEQNL

SEQ ID NO: 115249 - protein, 356 aa, unidentified
MNAGQIIGTMGGKQVVGLDIAKHVFQLHTVDMSTGEIANVQIKRAKVLEHFVNRPKSLIAVEACGGAHHWARELTALGHTVRLLHAKIVRPFVSGNKTDATDARAIWLAVQQPGVKFVGIKTAAQQATLTLHRQRELLMKMRTMQTNALRGLLYEFGATFAQGRKALFKDVEQTLEDLSAQLPQMVRDSLREQVARIKAMSDDILTIEKRLGLQLKADPNMQRIAQIPGVGLLTATAAIATMGEASAFKSGREFCAWLGLVPKQTGTGGKVRLGGISKRGDTYLRTLLIHGARSVLAHAKEPGPWLAQIQTRRPANVVIVAQAAKMARTIWAVTAKEQSYQRGFQSVRPNVSVQAA

SEQ ID NO: 115250 - protein, 402 aa, unidentified
MIGIDPHKGSHTASAIDQAETALGELRVRSGADQLGRLLGWAARWPERIWAVEGASGLGYLLAQQLVAAGEQVADVQPKLAARVRLLATGATNKNDPNDARSVAIAALRSPAVRKVGAENHAAVMRVWARRHRDLGSARTQVACRLHAVLCALVPGGFAGEISAARAARLLDELQPDGAVAAARCDLARQFAADLRRIDEQMRDTRKRLAAAVTASRTTTTQIFGVGPVVAAIVIGEAGHTTRFASRDHFAACNGTAPVEVSSGPRKIYRLSRRGNRRINHAIHMAAVTQIRHRHTDGRAYFERKLAEGKTRKEALRSLKRRISDALFARLQADARQAAGTVSAGPGGQPGNDSVASAAGSHPRHRLFGQATPGPDSTLRPRPDPQTGKTRSRATRKTDRTS

SEQ ID NO: 115251 - protein, 365 aa, unidentified
MKKISTVARKQVRNFSEQKLTIGLDLGDRSSWYCVLDEHGEVVLEEKLGTTPNAMKAGFGGMPRSRIALETGMHSPWVSRLLSELGHEVIVAHARNVRLIGESRKKDDRLDGQTLARLARIDPQLLCPVKHRSARAQADLTVIRARAGLVRARTALVNTARGLAKSYGERLRGCNVRNMNPEKAEVLSPELQKALEPLLAGIESLSEGIREYNEGIEQLAEQSYPQVARLKQVKGVGTLIALTFLLTLEDAHRFRKSRDVGCYLGLQPGRRNSGQSEPQMHISKEGDPYLRTLLVQGAHHILGPFGMDSDLRRWGLKLAERGGKSGKKRAIIAVARKLAVLLHRLWVSGEVYEPLRNQRAMPAAA

SEQ ID NO: 115252 - protein, 436 aa, unidentified
MNSNLSKIRENAAGIDVGSEEIFIGFDDGQVVSFGTFTCEFNAAISLLKEKNVATIAMESTGVYGVILFEMLKEVGFEVFLVNPAHLKYVPGRKTDVQDCQWIQQLHSFGLLSSSFIPDESIKALGSYTRLRETYIKDAGRAVQHMQKALTLMNIRLTEVISQIHGASGMRMIKAILGGQRDPKALLELCDKRIRDNKADRVLAALEGRYRKQHLYALAEAVETYEFYQAKLSRCDVQIGKELAWLADQQPVPESFGEAKPIRHNKPKIDRLHEHVVQATGGINVCELPGLTDYSALRLIGEIGVDLSGFPTENHFTSWLKLASGKKHSGKMKKSHKFKNAPDAAIIFKQAGQTLLESKNHALGAFGRRIKARRGPGIAVKAVARKLAILYYRAMTMGMKFVEQGAEAYEKQYKERQIKNLEKQAKRLGFQLSKAS

SEQ ID NO: 115253 - protein, 319 aa, unidentified
MENLAHGRVIGIDVSRDWLDVHCLPDGHRCRVHNAPAGHAAVADLARDRDAVVCFESTGGQEWQLWAHLEAEGIVARQVPPAQVKAFAQSRGTRAKTDRVDAELIARFFAFRPEAGRSLPAEKLRFLKALTSKRAQLVEMRKRLLAQIRAHQKLGTAAMFEDVDTELTQRIDSLIKELEDRIIRAIASDDHLSEMATVLRSIPGIGPVASTMLIAEMPEIGTITGEEAAALTGLAPVAHDSGTLRGKRAIAGGRRALRHVMFQAALVASHHNPHLRSFADRLRKAGKPHKVIITAVARKLVTIANAVCKSRQKWADHPT

SEQ ID NO: 115254 - protein, 359 aa, unidentified
MQEKVKELNFHEQNIYTGIDIHLKNWVVTVMLEHSLHKKMSINPSGKDLKNYLDKNFPGGNYLTAYEAGFTGFSTHWELENCGFKNIVVNPADIPTTDKERRQKEDKRDSLKIAKSLRSGDLNGIYIPRHHQVELRSLVRHRKTLVKEISRNKSRIKSLLYFNGIKIPDENRADSHYWSNRFTTWLKFLEFKTPEGKMVMNQILEIVEFLRGKLLEVNQEFRKMKKSGCYSKELELLCSIPGIGTVIAMTILSEICDFERFKNLDKLCSFVGLVPSTNSSGEKEIAGKITPRSNRPIRSVIIEAAWVASRVDPVLSLKYNELCKRMKPSEAIIRIAKKLLSRIRYVMINKTPYVYSVIN

SEQ ID NO: 115255 - protein, 398 aa, unidentified
MCGKRIWVGIDAGKGHHWAVAVDADGETLFSTKVINDEAQILLLIDTARERADEVRWAVDISGRASTLLVALLVMHGQQVVYVPGRTVNRMSGAYRGEGETDAKDARVIADQARMRRDFAPLDAPPELVSTLQVLTNYRADLIADRVRLINRMRDLLVGICPALERAFDYSAAKGPVVMLTEYQTPAALRRIGVKRLTTWLERRKVRGADTVAAKAVEAAQSQQIALPDEKRAAKLVCDLAHQLLALDERIKDNDREIRETFRSDDRAEIIESMPGMGPILGAEFVAIVGDLSGYRDAGRLASHAGLAPVARDSGRRTGNYHRPKRYHRRLRYIFYMAAQTAMMRPGPSRDYYLKKRAEGLLHTQALLSLARRRVDVLWAMLRDKRLFTSAPPITQAT

SEQ ID NO: 115256 - protein, 323 aa, unidentified
MEIEQWVGIDVCKRWLDVHLRPQGKSFRVENSERGMAVLLTHLVAPELVGRVILESTGGYERQAAIFLSQLAYPVVVINARQGRNFAKAANQLAKTDAVDAANLAWFGEAMKPPIRGFASQVQAELQDLVTRRRQLVDMLTAEQNRLSGLRGKAQGDVEAHLEWLRERIKQLDEQIEMQISQCQIWKAKQAQLQSVPGVGKVVAATFLALLPELGQLSSQKIGTLVGVAPLNRDSGQMQGKRTIFGGRSAVRQMLYMATLVAVRHNPVIRAFHEQLLKRGKPTKVALVACMHKLLTILNAMVKQGTDWQPKIKPPSEPQPQPA

SEQ ID NO: 115257 - protein, 317 aa, unidentified
MSDEIFVGVDVCKAWLDTAQVCSSSAAVPGELTARVNNDEAGRAELVNQLKRLSPTLVVLEATGGFEAALASELCAAGIAVAVVNPKRVRDFARSMGVLAKTDRLDARVLAKFALAARPQVYALPDETQQEITELVDRRAQLVTMRAQEKNRLATVKQVARTSVRHHIEWLDKRIKEIDKDLDGRLKDSTIYQPKYELLDSVPGIGRVTISTLLGRLPELGTLNRKRLAALAPKADDSGRRHGQRYIQGGRADVRAVLYMAALSARRCDGPIKDLYSRLRASGKPYKVAMTACMRKLLIILNAILKSGQPWRLIESA

SEQ ID NO: 115258 - protein, 378 aa, unidentified
MATTRSVLRHELTAKSGDLYMSLELGDKRWHISIGDGRNGVSHYGVGAGQTDELADCIAKAKVRLHSNRKAIVHSCYEAGRDGWWLHRWLTAVGVDNIVVDPASIEVNRRARRAKTDRLDADKLLAMLVRHHSGERVWSVLREPSPEDEDARRTHRELQRLTHERVAHTNRIGSLLVLHNLRPNVVIGGRYWSVWWERHRAQVPSSLAAELEREVMRLQLVKQQVRAIEATRSQELLEGKQPLVAQLTRLRAIGAKGAWVLVKEVFGWRTFANRRELAGSLGLVPTPYASGDSQLEQGISKAGNRRVRGLLVELAWGWLRLQPGSALTQWFNRRFASGGKRLRRIGIVALARRLAIALWRYLKNGEIPAGAQLKPAGA

SEQ ID NO: 115259 - protein, 471 aa, unidentified
MPRHHRRPPTSPKPSKPRASRAVLEHINPNAAGIDCGAAEHYVAVPPDRDATAVRAFPTFTGDLHRLADWLTACGVTHVAMEATGVYWIPIFEILEQRGFVVSLVNARHVKNVPGRKSDVSDCEWIRDLHTMGLLRGSFRPADDIVALRAYLRHRAGLVESAGEHVQRMQKALVQMNVQLPLVVSDITGATGQRILRDIVAGEHDPRRLARHRDYRCRASEAEIVAALTGHYRPEHLLALTQHLALFDLLQTQLAACDAAIAGHLTTLVAAAAPPAAPAPAARARAPGRDNAPAIELRQPLYHLTGVDVSQIEGIGPYTALRLIAEIGTDMTRWPTERHFTSWLTLAPRNKISGGRLLSSRTQPSANRAAALLRLAAMSIGRTQTALGAFYRRLAYRVGKAKAITATARKLAVLIYRMLKGELTYVDPGAAAYDAQQRSQTLRRLRNRATRLGFGLVDLATGEVISAEAVS

SEQ ID NO: 115260 - protein, 400 aa, unidentified
MKSVLSVDVAKGKSMIMLSTEYGEVLIEPKEIKHNFRDFNELKDKIESFNLEDLTIFMESTGIYHLPVERYFKENNFNTLVINSLTTKNNYDTLRKTKTDTKDCMRLARLFFVNEVEYHDLSKKDLYANLKAMTRQYFYLTQLNVSCKNRYKRLINICFPEFEEIFKGSRIYEETALNFIKTFPHAYIVKEKRIDALYNNLYKTNSRHDYYYKRLANKIKDIAVNSYPGVDKDHSDVKNLSDMAAILQENIKTINELKEKMIKTAKESPYFDIINSFYGIGEVLTTELLGELGDITRFDNHRQLIAFCGLDPTIIQSGKSINVHGTISKRGNKYARWILFNISQIVVKLGHQCPGHPVYDYYLTKKAEGKHYYENLTACSTKILRMLYTMCKNNTTFKIN

SEQ ID NO: 115261 - protein, 392 aa, unidentified
MNRIVYIGMDVHTSNYTLCSLDPGYGVEKDNYFAEVQFTNNFVTNVVNYVSNLKKKLKDCEFVCGYEAGCLGYSTYKDLTKVGIKCVLMAPSTMAVQKGGKKVKNDRRDARVIAQCLAYQTYKEVYVLSEHDEAVRGYLRIRDSHNKALKRIKQQIIAFCTGHGLFSPTKSNWTVAHLKWLKDLKFNDPVEQEILNEYLSSLTFLSDKIKAMDVRIEELASEKQYCENVKKLRCIKGIETNVALTLLAEIGDFNRFSKPTDFAAYLGLIPGEQSSGDKVRGTGITKAGNSTLRRKLTESAKGYWRGRIGIKSATFKKLEKELPKEVTEYALKGNTRLQRKFFNMTHVKGKNMNVAASACAMEMACFVWGLITNHYEKAPAVPKTDEELLDLN

SEQ ID NO: 115262 - protein, 343 aa, unidentified
MDQYIGLDVSLKDTAVSIREDRKRIWRGKCPSDPIILAQMIRKHAPHAKLVVFETGPLSTWFYHALTAEGIPAICIEARHAQKVLNETLNKTDANDADGLARLAETGFYKVVRVKSFDNMLTRTLVAARSQLVSISKQLSNQIRGMMKTFGLIVPKGEGRVFGANVRGLLDGNKGLELVISPLLEAWRDIRKHVANLDHQLLAASRQSQSTKLLMTIPGVGAVTAVSYIAAIEDPENFATSRSVGAWLGLTTRRYQSGEIDYDGHISRRGDGRLRGLLYEAATVLLTRTTARTECRLKTWGLKLRERLGFKRAAVAVARKLAVIMHSMLKTGKVFNPLAGDPA

SEQ ID NO: 115263 - protein, 417 aa, unidentified
MTEDVEWFAGVDWASQTHQVCLVDDGGKIVGERGFAHGGAGLAELCSWLLTMTRAAPTAIAVAIEVPHGPIVEALLERGFRVYAINPKQLDRFRDRFTVAGAKDDRRDAHVLGDSLRTDRHCFRQLSAEDATVIELREWSRMSEELQQERNRLANRVREQLWRYYPQALAISDDLAADWFLQLWAAAPTPATARRLQESTVEGILKRHRIRRITAAEVLVLLRQKPLTVAPGTAEAASAHISTVAQRLTLVNRQIKQAHQRLDALCDRIAENEGDSATGQKSEQRDVTILRSLPGVGRIVLATLLAEASEPLRRRDYHALRTLSGVAPVTRRSGKYCIVVRRQACHMRLRSAVYHWARVATQHDQRSRHRYAELRKRGHSHGHALRSVGDRLLAVACAMLTRRTPFDPDYPVKQMAA

SEQ ID NO: 115264 - protein, 334 aa, unidentified
MWHVGIDLHRQTLVIAAVNDAGACMAPRRIDCRDRDTIIDTMRRLGPFRAVIEATGTYRWLYDLLAPLGTVLLANPLRLRAMVQRRSKTDKLDSQLLANLLRINQIPLSYIPPQRYQLLRDITRHRARLARQAAMAKTQLRSLLAIHNRGPLPFSAVGIRACTWFAHQDFGAAGNWVRDELLLRLDHYRRQLALLDKRLESLHRETPEVEALSDIPGIGLYSALLIVGELGEVHRFRTARQVGGYAGLTPRVHQSGDHCYRGSITRQGSCWLRWILVEAAIKAARYDPQLKHFYVRARKRSGVKIARVAVARKLAEICWKRLIGWHGRPVTSIA

SEQ ID NO: 115265 - protein, 333 aa, unidentified
MLYVGVDAHKATAHITVLDESGTVPRRRQITSSNAAVHEALDDLEQPMKAVVEASYLWGPMYDWLAEIADEVVLAHPTKVRAIASARIKTDAIDSQILAHLLRTNLIPAAHAPSREVRAIKRVLRRRMFLVRLQTMIKNRIQALLTQHAVERPKLTDLYGVSGLRWLRQLTLPHPDGRLLHDDLALLDVIRQHIGVTEHLIATLATHDEVVTWLASLPGIGVFLSVLIRHEVDDMDRFPTAKQFASYTGLVPATYASGARVVHGPLTNHGNKWLRWAFIEAVTAAIRVSPELRRYYERIKARRGAQDAQAATARKLAELTWTVWTQRRCYEPR

SEQ ID NO: 115266 - protein, 373 aa, unidentified
MKRILYVGLDVHKETITAAVAPYGEEEVRFIGTISNNSVALESLLRRLTSSGGIARFAYEAGPGGYTLYRYLREKGYECMVAAPSLIPRRSGERVKTDKRDALMLARLYRAGELTGIYVPEKDDEAIRDLFRLRCVAKRAEKQARQNLLSFLLRNGIMYSGTRHWTKTHWRWLHKLSLPHPVQQLTLQEHIDAILQCQSRVMRIDGMLQQSVKNWRHEALVRRLQMLRGISFLTAAGLASELGDLRRFSSARQLMAYAGLVPSESSSGQKTRRAGITKTGNSNVRWLLIESAWSYRLKARKSAYLLRRQPEASEEAKELSWKAQVRLCGRYQRLYMRGKPKGKVITCVARELAGFIWALGRLDDEERQKGISQ

SEQ ID NO: 115267 - protein, 471 aa, unidentified
MTKRKKSTFERLESGKWSRKERRELQRLLCAAEPGLSVVHPHAAGIDVGNESHFVAVPPDRDPQPVREFGSWTAALREMAEWLKSCGIRTVAMQSTGVYWVALQEVLEAAGLEVYLVNARGTKNLPGRKSDVQECQWLLKLHTYGLLRNSFRPPEQIRAVRTVWRLRERWVQGAGRAVQQMQKALTKMNVQLANTISDLSGATGMAILRAILSGVRDPWQLAKLRDRRIQASEAEIAASLEGNWREDVLFELRQVMEGYDFYQRQIRGCDKELEKRMAAVPARQQGDPANKLVRKMKPRGNQPGFDLAGELRRTLGVDLTTMDGIDVMTAQVFLSEVGPELSAFPSEDHFAAWLELAPRRDISGGKVIRHVKPDGRNRLANALRMAAQSLSRSDSYLGARYRSLRGRLGGQRAVKAMARYLACLLYRLLTKGQAYIDRGADHFENKRLERERVVLERRAAAHGFKLVPQST

SEQ ID NO: 115268 - protein, 348 aa, unidentified
MTIAAEKYAYVIGVDTHARTHTYAIINGTTGAAIGCEAFPVTTAGTKRAIAWIRRTTNGPILAAVEGTSSYGASLTRALMVGDIPTVEAKPPRKAARTGAGKTDAIDAAAAAAGILGTDVERLIHPRTDGARAALSVLLASRRRTEEQCTANRNALNALVRQIDLGLDTRRAVTDKRVAEISAWRARATDSVEQQVAREEAIDLARGITAAAARVRLIKTHLAELGEQLAPGLQAQPGLGPVTVGIILAAYSHHGRIRNEAAFASLAGASPLQASSGNTTRHRLNRHGDRQLNMALDVVIKARMRFDEATQKYVKRRTAEGLSYREIKRVLKRYLARDLFRQLEQLYS

SEQ ID NO: 115269 - protein, 341 aa, unidentified
MEQKLSVRGIDLAKQVFHLVGMDAHGTMLVRKRLYRAQMMAFIAQLPPTLIGMEACGGAHYWARRFREHGHEVRLMAPQFVTPYRKANKNDMRDAEAIAEAMTRPTMRFVPVKSVAQQDLQALHRVRERLMKARTALINETRGLLHEYGIIVPQGAATFRQHVLEKLTTEDAKLTPHSLALFRQLLEELAALEARVATYDAQLAQVAQTHPVCQRLMTIPGLGELTATALVAAVSDATQFKNGRQFAAWLGLVPRQHSTGGKSRLLGISKHGESYLRKLLVHGARSCLRWVGRKRDRRSQWAQSLMERRGWNKAAVALANKNARVAWALMGTEQVYRVAEA

SEQ ID NO: 115270 - protein, 423 aa, unidentified
MPITTLFVGIDVSLKTNQVCSINFNQDVFFNQSFDNSPSGTEKIIRKLLGVLNGHPELTKIHICMEATNVYHIHVSSVLSTDARLLAHGVKVFAVNAKLIEKYKETFVDRSKTDPEDAFLCADYARIGKCKAVPPVMGYQKIALQRLTRQRKHIAEQLGIEKQYLSSNLYLKFSALKVNPDGRPFSNIYGKTSSVMLSDFLTNEEIVQADLADLVAKIAEVSKNGFDDPESTAKLLQKVSRDSFRLDKVASDSVSMALASSFRLIQCYQDELKHLDKEIIRLVGSMDNHYYTILTSCKGIGPVFAAGMIAEISDINCFSSDDNLASYCGLRWRRKQSGPRDSDHRKQPNGCNSFLRYYVVEATASVIRYNDTLADFYNRKRSEVKVNAHKRALVLTSRKFVRIVFGLLRNNKLFDDRCLAASS

SEQ ID NO: 115271 - protein, 369 aa, unidentified
MEKGTTYVGLDAHQESTNGSIILSSGEIVEDRFATTPEGIRRWVRRLKRRCKGRIVCCYEAGPLGYALQRTLVSLGVECIVIAPSLIPRKPGDRIKTDRRDARKLAELLSAGLLTVVRVPTPEQEAIRDLCRARSSVKGDQKRIQHRLSKFLLRRAIRWTSGRTMWTEAHRNWLRGLRLEHVADQDILNDHLLALEQNQGRLAALDEKLAHWSTQEPYAEVVAWLRCFRGIDTLTALSVAAEIHDWRRFPSPRALMAYLGLVPSESSSGGKSQRGSLTKTGNSRVRRLIIEAAWHYRHRPAIGQRLAQRRVGQPAEIIAIADRAQQRLHRRYTRMRARGKSHNLVIAAVGRELVGFLWAAMQRTEVRSH

SEQ ID NO: 115272 - protein, 413 aa, unidentified
MEAYDVAGIDVHKAMLAVVVSEVKPGEVEFRRRRFGTTRSQLGELNQWLTEVGVQEVVMESTARYWRPVWVAWEETGIKRHLAHARSNGARRGRKSDFRDAERLVHRLVAGELVLSYVPEDEQQGWRWLTRTRYQLVCERGRVQSQIEGLLEDAQIKLSSVITDVLGASGRRILEALAQEQGQHNPAKLAELGHAKLPASREELADAMDGRWLDRHRFLLGLHLDRIRQLDSQIEQIQQQTAIAMQSCQEAVARLIQVPGIGTEGALQMLAEIGPTAAAFPSPEQMASWVGVCPGQQESAGQSSSQRSAKGNWQMRRLLSQAAHAASHAKGSFFESLYRRLVVKIGPQKAVWAVAHRLCRLIWKILHQGVSYQEQGSPTAKPKSIRRRQQKLIAEFRKLGFQVQFTPINLIHP

SEQ ID NO: 115273 - protein, 340 aa, unidentified
MNITRLSIDLAKDVFQLYGVDGKQKCVLTKRITSRAKLIEFISRLKTCEIYMEACGSSNYWARTFQGYGHTVKLISPQYVKPYIQRNKNDYRDAQGIMEASFWAGTPYVTPKTVEQQDIQSLLRIRSNYIEIRTTVSNQLRGLMKEYGVFLAAGYQKLKQELPGIFDRSTENGLTPQMKELIEGQYDMLLIFDEKIDKLDIQIEQISKQHEVCQRLQKIEGIGPITALAIIASVGNGQGFKNGRHFSAYLGLVPRQHSSGQKEKLLGISKRGDVYLRELLIHGGRSVVMHCSKKSDARSVWVNKIKDTGGMNKAAVAVANKNARIVMAMLLSGENYQKAA

SEQ ID NO: 115274 - protein, 340 aa, unidentified
MPLYGGIDLHANNSVVVLLNDQDQVSYEKRLPNHLPAILEPLRLHPGEIEGVVVESTYNWYWLVDGLMEAGYRVHLANPAAIQQYSGLKYSDDHSDARWLAHLLRLGVLPEGYIYPKAERAVRDLLRKRAHLVRQHTANVLSMQNILARNTGARFSLKRMHELTKQELQSLLTEEAQVLAVTSSLAVLDCLQHQIKTLEQSVHKRLRHTPSYEQLLTVAGIGPILAQTIALETGAISRFPSVGHYASYCRCVDSNKLSNGKRKGTGNVKNGNPYLAWAYMEAAQFALRFQPAAQRFYQRKLAKSRNNTVLARKALAHKLARACYYMMRDLVPFEATKAFG

SEQ ID NO: 115275 - protein, 424 aa, unidentified
MKVTYQTCCGVDVHKSFLVATIVKTTGDIEPSYQKKRFSTFNNSILEFKQWLLDNDCHDVCMESTGKYWVPVFNLLEDDINVVIANPKWVKAVKGNKDDTKDSKWIGDLFRLGLVKGSYIPCKKVRILREYTRYRYKLVSCRSSEKNRYQNALTVCNAALDSVVSDIFGKSSTSIIDYLLEQSCSSINHEEIASKLLRSLKSKEDAVIESVEGYQMTDAQKYRMRLVRAHMDYITAEINDVDKMIENMISSNTDFENAVQFLCTIPGVKRDSAITIISEIGTDMSQFSSSRRLCCWAGLTPGSNESAGKKKSVRITRAGVYLKPALVQCAHAAVKSDKSPYYKKKYESLVKRRGKKRAIIAIARMILTAIYQMLSTGEQWNPSDLYKIDMPVALVEKQKAKAIKQAKKLLQREGLLPPDEPLAS

SEQ ID NO: 115276 - protein, 423 aa, unidentified
MRAKSGSITSTVAVSSIRAEARITPTRSRTQSTGAKEETTMRSVALDLGVKETSFCEISRGLVVARRTVGELEGLEDVLGPGSGRAMVAIEACREAWYVHDVLKQWGHEVVLVDTTRTKQIGIRYHGRKTDRIDAELLARAVEQGGIPVAHVLSPARRELRDVLGVRRALVETRAQYITTIRGLARSRGERLGSCAADDFLAKLAKTELCAETRRTIEPLASALQRVAVELARTNARLEQLGRKEPIIEKLTTAPSVGMIVAAAFVSVVDEAHRFQGAHQLESYLGLVPREASTGGKRKLGSITKQGNSYMRQLLVQSASSILRVGDTQDPLRQWGRAIVARRGRKIAVVALARRLAGILWAMWRKGSVYEPARLGSRLRSEQDPGVAAIAMKRAAKKEHNRSRDNARALRTAQAADRKEANA

SEQ ID NO: 115277 - protein, 310 aa, unidentified
MESITVGIDVSKDRLDVALRPSGEVFAVERNAAGLEKLTIRLQELAPQIVALEATGGFETIAAAALAAARLPVVVVNPAQIRAFAKAIGQRAKTDPIDAATIAHFAEATKPEPRPLPDEATRLLGDLVARRRQIIEMIGAERQREQRVTVPHLRRSITRLLKALEKELASLNTDIDDAVRGSPAWREKENLLSSVPGIGPVISSTLIAELPELGQLGRREIAALAGLAPFTRQSGQWRGKSCIGGGRTAVRTALFMGAFVAKRYNPVLRTFFDRLVAAGKPKMVALIAVARKLLTILNAIIRDNRPWQTA

SEQ ID NO: 115278 - protein, 368 aa, unidentified
MSKILFVGLDVHAETIAVAVAEQGGEVRSVGVIPNRLESVRKLVHKLGQVQQLRACYEAGPTGYVLYWQLTQLGVACEVIAPSLVPTKAGDRVKTDRRDAEKLARCHRAGELTAVGVPSAAQEALRDLVRAREAAKKDQLKARHRLGKFLLRHGRQRPDGVKAWTKKHREWIKSHVRFEETALEATLADYVEEVDHVATRIVKLEKAIDEAIRKAPPEIRAVIEALQALRGVAQTTAASIVSEVGSLSRFPTAPQLMGYSGLVASEHTSGNRVQRGGLTKTGNGHLRRVLVEAAWAYQHRPNVIGHLARRQKDLAISEEAKQIAWKAQQRLHKRYKAMAARGKNKNQIVAALGRELLGFIWAIGVKTE

SEQ ID NO: 115279 - protein, 401 aa, unidentified
MVKIRERIWVGIDVGKASHHACAVDETGKVVFSQQTANGQAAIQALIARAGKAGGEVCWALDMTSGTAGLLLALLWQTGQPVRYVPGRLVNRMAGAFAGEGKTDAKDAKTIAETARLRTDLVTVTAADPIVADLQVLTAQREDLMGDWVRGVNRLRALLASIFPSLERAFDYSTRSALVLLTGFQTPTSLRDAGRDGVQAYLTEHGAWPRGIPVMADKALDAAGEQTVVLPTEKVTAPLIARLAADLLDLDRRIKDLDKQLTDRFEEHGHAKAITSIPGFGPILGAQFLADTGGDLLRVFGTPGRLAAYAGLAPVPRDSGRVKNNLHRPKRCHRGLCRVFYLAAFSSIRADGPSKTFYQRKRSEGKVHTQALIALARRLVDVIWALIRDNREFQPTVAAAA

SEQ ID NO: 115280 - protein, 355 aa, unidentified
MSQEKYIGMDVHQATISVAVRDSSGKLIMECILETKAATILEFIAGLRGTLSVTFEEGTSAAWLHDLLKPHVSHLVVCDPRRNALLKDGSKSDRIDARKLAELLHGNKLHPVYHGEHGLRTLKELGRSYLTITKDLTRVMSRIKALYRSWAIPCSGATVYAPHHRAEWLAKILEPGVRLRAERLYQQLDLLQPVRQEARRNLLAESHKHHAVKLLRQIPSIGPIRAALLVALLQTPHRFRTKRQLWAYSGFAVETHDSGEYRFARGKLVRNRERITVRGLNPNHNHDLKNLFKGAALSASARPGPLCDFYGALVEKGMRPTMARLTLARKIATITLTIWKKGVQFDTKQLNRQAA

SEQ ID NO: 115281 - protein, 367 aa, unidentified
MRSLRSQTRGPSVEKLIRIGMDTSKQVFQLHGVNAAEEPVLRRKLRRKEMVAFFQGLEPTVVGIEACGGAHHWARVLQEFGHQVKLLPPKYAKAYVKRGKNDAADAEALCEAMSRPTMRFVAAKTAEQQAAQMLAGTRDRLIRRRTQLTNAIRGYAAEFGLIAARGVDKIAPLLARLHSEPTLPALARELFAGHAKEYAQLQAQLEAIDAKLMAWHRRNEPSRRLVKIPGIGPIGATLLVMKVAQPKAFRSGRHFAAWIGLTPKDHSTAGKTRLGGITRAGDEALRSVLVVGATAVIQQVRRGKACPWQGTGGHPSPWLVELLKRKPPKLAAVALANKMARIAWKLMVSGQHFNPAHGIATAMDEAA

SEQ ID NO: 115282 - protein, 409 aa, unidentified
MLLLVGDDWAEEHHDVEVQDATGRRLGTARLPEGVGGITRLHAMIGEQVGDDEEPVEVVVGIETERGPWVQALLAAGYRVYAVNPLQVARYRDRHAVSGAKSDPGDAHVLADLVRTDRHQLRPVAGDSDLAEAVKVVTRAHKTLVWERTRHTLRLRRALLDFFPAALAAFADLDAADTLELLAAAPDPVAAAALTDERITAALRRARRRGIAGKLATIRRALAAPQLGQPPLVTAAYAATVQAQVAILTTLNTQISMLAEQVEAHFGRHPDAAIYRSQPGLGEILGARVLAEFGDDPVRYADARARKNYAGTSPITRQSGKKKIVLARYVHNDRLVDALGRQAFAALQASPGARAYYDRQRARGAGHQAALRQLGNRLVGILHGCLKTGTRYHEHTAWPPHQQDQQVAA

SEQ ID NO: 115283 - protein, 409 aa, unidentified
MEVVHEVCCGLDVHKKSVTACVLWASGRRKQIREFGTFTRDLLELADWLRSCGVTHAAMESTGVYWKPVWNLLEGQFEVLLVNAQHIKAAPGRKTDQKDSEWIADLLQHGLLRASFVPPTPTRELRDLTRYRASLAQEINRIANRIQKVLEDANIKLASVATDTLGASGRAMLEAIIKGEQDRQRLAEMSQGKLRNKIPELQQALEGRVTAHHRFLLRELLDHLYFVESKMRRIEQEIAERLGPFQSEVARLCTIPGVDRVTAWGLVAEIGLNMAQFPDAQHLASWAGLCPGNHESAGKRKSGKIRKGSLWLRRCLCQGAWAVSMQKNNYLSALYRRLAARRGSKRATIAVAHNLLVIAYYILRDKVCYRDLGPDYFDRLNPEGLRRRLTKRLEGLGFKVTLEPLAQVA

SEQ ID NO: 115284 - protein, 350 aa, unidentified
MTIVENHLLTVTGGIDTHLDFHVAAAIDSNGGVLGVETFDTTTGGYRHLVGWLAGFGTISLIGVEGTGSYGAGLTRHLTGKGIRVVEVDRPNRQARHRAGKTDAIDAIAAARAALTGTATGVPKSRTGNIEAIRVLTIARRSAANEWIAVVNQIRHVTFTAPDEIRTRFMGLSPITLVRTTAALKPRRTDADIVRYTTLSTLRELGRRALFLREQKMRLNAEMRPLIREVAPSLLEVHGVGFDVAAKLLIAAGDNPHRIRSEAAFAHLCGVAPIPASSGKIQRQRLNRGGNRQANSALYRIVIVRMASDQRTKTYVAKRTAEGKTMGEITRILKRYVAREIFPHLASTIG

SEQ ID NO: 115285 - protein, 364 aa, unidentified
MLIIGCDYHPGFQQIAFVETETGELNERRLEHREQAEAFYRELKQQNQEAQVGMESSGHSRWFERLLQELGFELWIGDAAEIRTKRVRKQKTDRQDAQLMLQLMLENRFPRIWVPDAENRDLRQLLWHRHRLVQMRTRVMNQLHVVPLNEGLRRKKALWRPAGRKELESIPLAPWASRRRQDLLDLLDQLTPKIQELTCALEKEVEKRPVTRLLMTHPGVGPLTALAYELVIGTPERFHCGKQLASYVGLVPEEKSSGDRRRLGHISKQGNVLLRFLLVEAAQVTVRSQQEWRSKFFHLAMRRGRKIAKVAMARKLAVHLYWMWRQSRDYGQTQKLGSHAGAPGNRDGVQSITDVMIGHPAPSS

SEQ ID NO: 115286 - protein, 454 aa, unidentified
MTDAKGKRRTLKEFAEINHDAAGIDVGNEQHWVAVPSGRDSEPVRMFGCFTTDLHILANWLEQCEIKTVAMESTGVYWIALYEVLESRGFQVCVVNARQAKNLPGRKTDVKDCQWLQQLHTYGLLTPSFRPQGEIIILRRYLRHRETLVQEAATCIQRIQKALTEMNLQLANVISDISGTTGLRILHAIVEGERNPQRLATLRDWRIKATPEEVAKSLLGNWRNELIFVLEENLALYEIYQQKIERCDQRIEQHLKSIPAQIENNTELLPKPRKGKRPHGNAPAFDLRSELYRITGTDLTQIDGIDVVTAQAILADTGTDMSAWRTEKHFVSWLGLCPDHHISGGKVLQRGTRRVVSRAATALRLAASSLRRSQSALGAKYRRLQSRLGAPKAITAMAHHLARLFYRMVKYGSQYIDHGMAAYEARFKEQQLKWLSRKAAELQLRLAPVTDPAV

SEQ ID NO: 115287 - protein, 344 aa, unidentified
MEHYAGLDVSLELTSVCIVDAQGTIVRETKVASHPEDLVGYFRLLEHPISRIGLEAGPLSQWLHAGLIAAGFDAVLLETRHVKAALSAMTVKTDRRDARGIAQLLRLGWYRPVHAKSVSAQEVRALLTARKLIQAKLLDVECSIRGVLRGFGLKVGAISRGRFDMRIRELVDGQAMLETVISSMLNVRTALQEEFARLHRALLVLVRADPICRQLMSVPGVGAIVAITFKSGVDDPTRFRRSRDVGPHFGLTPRKYQSGELDVTGSITKVGDRMVRTALYEAASVMLTRTVRISPLKSWALGVAKRRGTKKARVALARKLGVILHRMWIDGTDFRWANEEAAIA

SEQ ID NO: 115288 - protein, 355 aa, unidentified
MNSVRYVGLDVHRDTISAAVLNEGGRMVPQSILATRAAALLDFIGGIRGTLHVTFEEGTHSAWLYDLLARRVARLVVCNPRKNALLKSGNKSDAIDARKLAELLRADLLSPVYHGEKSALEVQHLARSYTMLTEDTTRVMGRLKAVFRGQAIACAGKKLYGRKHREAYLAELGTGALRRRAECLYAELEALQLLRRQAKRDMIAECRRYPESKLLCSVPFLGPVRAAVLIGRVQTPHRFRTKRQFWAYCGLALEMRDSGEYRMVDGQVERRKRPAQIRGLNWNHNHELKNLFKAAATSASACEGVFREFYLGLLKKNMQPEMARLTLARKIAAIALKIWKKGEAFNADHLKLQAA

SEQ ID NO: 115289 - protein, 388 aa, unidentified
MQVAADRTDASTAIQTDLPAIFASLELSRSTWLITSLSPGAGEKMSKHSIRAGDVAGLLVRLAQLKEKARGRTGRDFPIIAIQEAGLDGFWIHRVLQSEGIESHVVDAASILTSRRRRRAKTDGIDGETLVRTLLAYKRGEPRVCAMVKAPTPEEEDRRRICRERKTLVGERVEHVNRIKGLLFAQGVSDYEPLKRNRRARLEGLKTGDGRPLPAHLKAQISRELDRLELVLPQLKAVEAERDALLKPVSEGCPAPAAMLAQLKGMGPEFTAILWSEGLFRSFSNRRQLAAYAGLAPTPWQSGSVAHEQGVSKAGNPRLRTTMIQLAWLWLRHQPTSALSVWFQERVQSNCGKMRKTTIVALARKLLVALWKYSTSGVVIEGAVMKTI

SEQ ID NO: 115290 - protein, 461 aa, unidentified
MNGKRKKKAKNEQQDWSLNLDVVHSNAAGIDIGNESHYVAVPPDRDAQPVRQFACFTEALQQMAAWLKSCGIDTVAMQSTGVYWLPVYEILTEEGLQVFLVNARHTKNLPGRKTDVQECQWLLQLHTFGLLNNSFRPPEEICVLRAYWRQRAEHVASASACIQRMQKVLTEMNVQLANVISDISGLTGLTIIQAILAGERDRYKLADLADVRIQASREDIARSLEGNWRKELLFILQQELNLYQVYQEQIAECDTALAAHLQTLEDKVEPGSQPPVAKAGKKAGSNAPTSFDLRGELYRISGTDLTQIDGINIMNAQTIIAEVGIDMSRFPSEAHFASFLGLCPDNQITGGKVFRRSTRHVENRAATALRMAATSLWRSKTYLGAKFRRLRARLGAPKAITAMAHMLARLVYRMLRYGEQYVDKGMKYYEEKYREHEIRSIQKKAKDLGLVVTLTATTAAG

SEQ ID NO: 115291 - protein, 383 aa, unidentified
MKPYGEIVSKPFNITHTQKDLSELSSMLFRLNDEVKIVMEATGIYHLPVLTYLQEKGFFVSVINPYLMKSYRNESLRKAKTDKIDSRIIANYGIDHWFKIKEFQTSGEIYEELKLLGQQYRHYMKLHLLSLAELTHLLDLTMPGIKNLLASWNETNRKDKRSDFVERFWHYDVITSMSEQKFTEEYILWAKEKKYVPSQEKAKVIYTLAQESIPTLPSETSSIKMLVTEAVRVLKEVDATLGLILSRMQEIAKALPEYSVVREMGGVGNTLAPKLIAEIGDVRRFRNGKALVAFAGIDPPPYESGQFVGCNRKISKRGSASLRKVGYETMRSLKMRSRPEDPVYRYVVKKESEGKSKKSAKIAGLNKFLRIYYARVTELYKNI

SEQ ID NO: 115292 - protein, 369 aa, unidentified
MNMEKYVGLDVHKDTTVIAVADGGRFGEVRLFGTISSDLRALEKTLKKIGGEGVTLHVVYEAGPTGYVVYRRLKQLHIDCMVVAPSRIPQATGARQKNDRRDATLLARLHRAGELTPIHVPEDVDEAIRDLTRARADAMQDLCRAKHRLKSFLLRQGMHYPGKASWSAEHQRYLRALQFPIPSLRSVLEEYLFAYDQIVQRVQRLEELLAVHVPQWRMYPAVQALMCMRGFRLTAAAMLVAEMGDIRHFSHPRHVMAFLGLVPKQNSTGQTTRMGAITKAGNPHARWILVEIVQHALMTPKVSRQLGIRQEGQPAIYRDLSWKAQVRLHKRGWHLLRRGVMKAKVNIAMARELVGFIWDLLCHVPEPTR

SEQ ID NO: 115293 - protein, 354 aa, unidentified
MSNKSTATVATMGIDIGKNSFHVIGLDERGAIVLRQKWSRGQVEARLANMPPCLIGMEACVGAHHLSRKLQSYGHDARLMPAKYVRPYAKGQKNDFRDGETIAEAVQRPTMKFVATKTADQLDLQALHRVRERLVSQRTGIINQIRAFMLERGVAVRQGLRFLQRELPGILATRSDVLSPRMMHIIEDLAGDWHRLDERIEGLSTEIAALADQDPACERLMTVPGIGPIISSAMVAAIGNGSVFSKGRDFGAWLGLVPKQISTGDRTILGKISKRGNRYLRVLFVQAAWVVLIRPQSWERYGLKSWIEAAKKRLHHNVLAIALANKLARIAWAVLNKERNFECVRTRAASSQPA

SEQ ID NO: 115294 - protein, 266 aa, unidentified
MDRYIGVDVHTQTCTFAVMGPTGRRLREQVVETNGKVLVEFIKGIAGTKHVCLEEGTHSEWLYELFKPQVQEIVVVQPRESAGQKNDSIDAWALAEQIRQGRISRPVFKAPGIYSELRAAVRAHQALVSDSVRAKNRLKAIYRSRGLSGLGTEVYKPDQRETWLKKLPSHRRKLAEILSNELDVVTEVRESAEQWLQEEAARCAIVKLLATAPGIGTTRAAQIVAIVVCPTRFRTRQQFWSYCGLGIVTRSSSDWVRDRNGTWVRR

SEQ ID NO: 115295 - protein, 424 aa, unidentified
MGKNINSTNRKKQDSAAKNGKAIGIEKTKNPHRERVKHQAGNDPGRQQRLAVLGLLQKLERAKHAPKENPLPEPSVEYYIGIDLGDKKSHYFILDKNGNVAADGSMNTASTDFEAHFKAIPRSRIALEVGTHSPWVSALLEAIGHEVYVANPRKMDGGKRKNRKKNDPADAERLARQVKSDPKLLYPIRHRSQEARRALVLLRARHALVGARTKLICSVRGLVKSDGARLPRCSADSFHKMPRTNVPQELRDSLEPVFEQIGLLTERIQKYEAIVKRVCRDAYPEAEIFRQVDGVGLLTSFAYRLTIEDPERFAKSRDVGPYVGLVPKQRDSGDSHPELRITKTGDRMLRDLLVECAQHMLSRRGKDSDLRRQGLKLAARGKKNAKKRAVVAVARKTAVLLHCLWVTGEVYEPLRNSLRAEKVA

SEQ ID NO: 115296 - protein, 357 aa, unidentified
METKNTKTDFSNQTILTGIDVHKKQWKVTLRGCRMELKTFSMNASAEELYRYLHRNYPGAKYKSVYEAGFSGFGIHRELRQLGVENIVVNPGDIPTRNKEREYKTDKIDSRKLARELENGTIICINIPNEQQEELRSLSRLRQQLVKDQTRIKNRIKGLLLYYGKKIPDNCEMLHWSGNFIKYLEGIEFHTETGKQCLGTYISDLRDKREKISQTLNKLRQAVRDTSHQKTIKNLCTIPGISFITAITLYAELMDIKRFNNMDRLCSYVGLTPSVSSSADHTVVRGLTDRHNKYLRNLLIESAWTAARTDPALTEKFGKLSVRMSKQEAIIRIAKKLLCRMKFVWQNEKPYQFNKKD

SEQ ID NO: 115297 - protein, 350 aa, unidentified
MLIIGCDYHPSFQQIAFVDTDTGEVQERRLEHREEAEKFYRDLVVQGMKVRVGMEASGHARWFERLLGELNFELWMGDASEIARKRERKQKTDRQDAQHILHLLLKDDFPQIWVPSWENRDLRQRLWHRHRMVQARTRIMNQLQAVALNEGLRSKKRLWREKGREQLESFRLAPWASRRRHDLLELLDRLNPTIAALSQAIEQAVEKCPEAQRLMTHPGVGALTALAFVLIIGKPDRFQCGKQIASYLGLVPLEDSSGNRRRLGHITKQGNSLLRFLLVEAAQVTARSLPEWRSKYVHLTMRRGRKIAKVALARKLAIRLYWMMRKGWDYEQLKKFGSHAGQPGNRDGVK

SEQ ID NO: 115298 - protein, 324 aa, unidentified
MIDGVLGIDVSKNTIDVSMSDSNKVRARSFANSADGWRHLLAWLISQKIQRVHACLESTGRYSIGIASALYEAGHIVSIVNPAQIRDFARTKLGRNKTDGVDASHIREYCELFKPQPWAPASEAHRRLGELQTIRAGIIAGLTEWKNRKNSGMIDAVAQSLADVTISHFTSQLGAVDEAITQTIDNDPVLRRKRDLLLSISGVGETLAGVVLAELPGPDVLRSGAEVVAYAGLNPRLHQSGTSIDRITRISKIGNAVLRAALYMPAMSAMQHNPAIVALVARLKARGRLKPKQIVVAAMRKLLVLCFGVLKTGKPFDSAIAMGC

SEQ ID NO: 115299 - protein, 366 aa, unidentified
MSDREQIQTNLPDLAVFVTLELSKSARFLAAQAIPSGKTSAHRLSGGDVEGLLALLRRLQAREQRSSGRELAVILGYEAGYDGFWLQRRLAAEAITCFVIDPGSLQVDRRARRAKTDRLDAAMLLRALMAWCRGDYAACRMVQVPSVEREDARRTHRERQRLIAERVQHVSRIKGLLATQGVYTFQPLRRDRSERLAEVRTGDGRELPQRLRGEVEREFRRLELVLEQIAAAEAERDAAAANPAIEDADAEKVVRLARLGGIGTELATVLVREALYGPFDNCKQVAAYAGLTPSPYASGDRQRDQGISEAGNPLLRKSMIELAWLWLRYQPGSGLARWFVERVGTGRGRIRKITAVALARKLLFAL

SEQ ID NO: 115300 - protein, 319 aa, unidentified
MAIKTERVMLGVDVSRGWLDIHQDGEETVERVVNERRAIDTFLMRFRDAAIAVDATNTYHDLVVERALKRRLVVYLVSGYQIRHYGNAVGQRMRTDPIDARLISRFLAREIDRLKPYEPKSPQHVLLWRLIKRRATLVQGRQKVQQSLSGVRELRTEAKRVGKTFARTLATVDRRIAELVKSLGWQVEVTRVEGISGVGPQTAKALVAAYHSGTFIHHDPFIAYLGLDVRAKDSGKFRGQRKLTKHGDGEYRRLLFCAAMAACRMPGYFSERYQALLARGLHSTAAYVVIARKLAAIAFNLLRKEVDFDPARLTANAVG

SEQ ID NO: 115301 - protein, 343 aa, unidentified
MKHYAGLDVSVEETSVCILDETGRICREVKVTSHPEDLRRILQDPIWHFERIGLEAGQLSQWLFDALADAGLPVVCIETRHAKAFLKAQVNKSDRNDARGIAQMMRVNLFRPVHVKPLTSQKRRVLLTARKLLQEKAIAIENDIRGLLLNFGLKVGVVGAAKFEERIHELIRDMPDLAEILERLLDARRRLREHFAALHRKLLDLARGDAVCRRLMTIPGVGPVVSLAFVATIDTPARFRKSKAVGPVLGLTPVRSQSGNTDRVGRISLCGDGMMRTLLFEAAQTMLRQTTRWSWLKAWAMRVAQRRGSRKAVVALARRLAVIMHRMWCDGTEFRWTREAPVA

SEQ ID NO: 115302 - protein, 369 aa, unidentified
MRKIVKYIGLDVHKNSIAIAIAEDGQKRDVNFYGVIKNDMDQLHKFLRKQISQGIEPKCVYEAGPCGYNIYRSLKDKGIDCVVIAPSLIPKKSGDRIKTDRRDAESLAKLHRAEELTAVYVPSMEDEALRDLVRARDDSVNMLKRAKQQLGAFLLRHHVCYSGKSKWSKAYFNWLADISMPHPAQQITLQEYIDMVQDGKKRVERISEQIRQLAEQTQLNELYKSLQSLRGVSQIVSAVVLSELGDLTRFESPGRLMAYLGLVPTQHNSGDKKRPGRITKTGNGHVRRALIEAAQAYRLPARKSRAIAKRNEGLPQEICKIAWQAQVRLCGRYKRMIFRGKNSNLVKTAVARELAGFMWAIAHAIPKTA

SEQ ID NO: 115303 - protein, 408 aa, unidentified
MEILYPRCAGLDVHKDMVMARVRCVSEPRVEQTRSFATTTGALVELQEWLSSHGVTHVAMEATGVYWKPVWHLLEEHLTLVLANAQHIRNVPGRKTDVNDAAWIADLLAHGLIRSSFVPPAPIQALRDFTRTRKQLVREISQHTLRIQKTLEDANLKLGSVLSSVVGSSGRAILSALIAGESDPERLADLAQGAARKKRAALIEALHGRISVHHRRLLQLHLDLIAALERALEEVDADVGKLLAPIRQCARLLTTIPGVSDLTAQVVLAEIGVDMARFPTPAHLLSWATMCPRNDESAGKRRSTRTRKGSPWLKTALVTAAWAAVRVKQSYLQAQFLRLRARRGAKKAILAVAASMLTAIWHMLKNGVEYRDLGADHFARRDRSKAILRLVRRLNDLGCDVQLTPQAA

SEQ ID NO: 115304 - protein, 393 aa, unidentified
MELLMSQAFDASKSLIALDQDSTIIVVIEMSQSKWLVAAVVPGIERQPLKKLDADKDALLELLHRWRNEASRAGRAIKRIAVAYEAGRDGFWLARWLRRHDVEAYVIHPTSIAVSREHRRAKTDRLDTELLMRAFLGWLRGERRHCSMAAIPTAEEEDARRPNRERENLVTEQTRIVNQMKAILARFGIRTFRPTLRTAAEKLDSLCTAEGTPLSENARAELRRHLVRLCVIRDQIRAIEQDRLRKLTTARAGERGPHAMVCLLARVTGVGIETADMLVNEVLSRPLRDRKAVARYAGLTGTPDESGRRRREKGLARAGNARVRRGMIEFAWRFLRFQSDSALAQWFNARTADGRRNTRKTMIVALARKLLIALWRLVTIGEVPEGVILRPAS

SEQ ID NO: 115305 - protein, 412 aa, unidentified
MEDLLTCAMGLDIHRDLIVACLIRGELDECPEIEIRNFTTLIPDMQKLRDWVIETGCRNIAMESTGIYWQPIYETLEECFDGEISILVVNARNMKNVPGHKTDMRDAQWIATLLRAGLLKGSFIPAKPFRELRHLTRYRKSIIKDSTSQKNRIDKFLQSAGFRLSAFLSDIFGASGRNIIRHLAQHGSITREELDKCLKTKTRHKINDIMIAVNGTLSKHQCECLSMMLLYLEEIEKHLNVVENAITEEIIRHTEALELLCSIPGVDVTAASAIIAEIGTDMSSFPSAEHISSWAGLSPGNNESAGKRKSVHINKGNSYLKSMLCEIAWIIAGKRNTYLANWYWRIKQQKGAKRATIALARKLLVMIYTMLKTRAPYNDESYEYRRQQCERKRANRMIHELSKMGYQITAQP

SEQ ID NO: 115306 - protein, 359 aa, unidentified
MNIKRMGIDLAKQVFQLHGVDRFDKASERKKLNRAQMHRYLKELPPTLIGMEACGSSHYWGRVLSAFGHTVKLIAPQFVKPYVKSGKNDANDAEAICEAVGRSNMRFVAIKSADQQVMQAEHRIRSRLIRARTALGNEIRGLLGEFGIVAPQGIGQLRRALPIIQEDKDNALTERFKVLLSELADEFRQIDARIDTHDKRIQVLAREDDRVRRLLAIEGIGPISASALVAAVGDAAQFSCGRDLAAWVGLVPRQHSSGGKQRLGHITKGGDTYLRTLLIHGARAALNASAKKTDSRSRWAQALATRRNRNIATVALANKNARIAWAVLSKGEEYRGAKADAVIPNAPPDTSEATSCGAP

SEQ ID NO: 115307 - protein, 365 aa, unidentified
MQKISTMRTSGKNIFQGQLTIGVDLGDRSSAYCVLSEAGAIVLEHKLATTPETMKQVFGSMPRCRIAMETGTHSPWVSRLLTALGHEVIVGHAQKVRLITKSRRKDDRLDARTLARLARIDPELLSPVKHRSAQAQLHLTEIRARAGLVSARTALVNAARGLVKSYGERLRKCGTQQFTREITSGLSAGLREALRPLLREVESLNEGIKEYDRRIAKMAKQTYPETALLKQVKGVGEVIATAYVLTVEDPHRFRKSRDAGCFVGLQPGRRNSGDSEPQMHISKEGNEYLRTLLVQGAHYILGPFGEDSDLRRWGQKLAARGGKNGKKRAVVAVARKLAVLLHRLWVSGEAYEPLRNSQKAMSAAA

SEQ ID NO: 115308 - protein, 324 aa, unidentified
MGIDVSKSTIDAHIFVKKVSSTFCNNNKGFRKLFTWLKTNKINLSELIICFEHTGIYSVRLSLFLESKNRPYCVIPGMEIKKSLGMVRGKNDSVDTIRIADYTYLRREKLTPFKMPSGSIQKLQKLNTLRTKLVTHRASYISNMKESKEIFVMSENEIFFKVQESMKQKLDKEIRKVNEEILKIITEDEELKKTYNLLNTISGIGPVLAVNFIIITNGFKTFTDSRKFACYCGIVPFNYQSGTSVRSASKVSHYADKKMKSLLNLAAFSAIQYSSEMKIFYERRVKEGKSKMSTINIVRNKIVHRAFAVVKRGTPYVELSKHAA

SEQ ID NO: 115309 - protein, 428 aa, unidentified
MSYQELIRRKQYCQIVKEITGSDQYMVVGIDIGKDKHHAFMGTATGKSLFRKLIFENNLEGFSKLLKTSNLIKNRNNLSKVVYGLEPTGNYHKPLARYLIRSDRNVVLVSGEAVKKNRSLLDGRWDKNDTKCAANIADLVSRGRCLYYDSPSPGIIELRSLLSLRKRLKREDHSFRMRIRNNLLAQYFPELDRFYSACESESLAIVKWCLEPNQIAGMAFEPFFQMVTRTRRGPAQLLRLRKIHQQARESVGCPIGAAAAFEAQLLVEKLEQVRQQLKDTEAAIKDVALEFDEYRYLLTIPGFGLYISSSVLSAIADPFRFKNRKQLLRMAGYDLCAKRSGKTSDKAIPVISKKGNSNLRYALFQAAKIASARTDIFRTYFAEMLRGRERERGIITKMRVKLAAKMLIIAWTLMKNKEPFNPAYLTIG

SEQ ID NO: 115310 - protein, 386 aa, unidentified
MAVAYIAEEHGAEVTSLGTIGTRPCDMDHLIRKRPSKAKHLVLVYEAGPCAYWLYRDLTQTGHVCWVVAPSRMPKNAGDRITTDRRDAVPLARLMRSWDLTPVYVPTVEDEAMRDLPRAREDALRDRTSAKFRLNAVLLRQDIRYTGQATWGPAHRRWLSDVVCATPAPQMVFQAYVRAVHAHTERLQRLEHARHDQVNTWRLPPVVEALQAVRGVQFTVAVTLVAALGDLTRVEHPRQLMTYLGLIPSAYSRGERRRQGSITTAGHTHARRTWVEGAWADRDPAKVSRHVQRRLANQPTIMQDISWKAQVRRCQRDRQLLARGKHATVVTVAMARELAGFLWARAKQVPVTPEGHDRSRLHDELRRVAHVHRMRRSPGVVFPSAA

SEQ ID NO: 115311 - protein, 361 aa, unidentified
MLYSTSIGLDVHARSISAAAFVFETGEVVQRTFGYDPDAVAVWAATLPQPAGCLYESGPTGFDLQRRLVALGLPCHVGAVSKMVRPSGDRVKTDRRDAHFLSRLLAVGEFVECAPPTLAMEAARDLSRAREDAREALMRARHQLSKFLLRKGHVWPKGRSAWTKAHREWLRSIELDDPCERLVLEEYVAQVRECEERRDRLDSAIAERSGADDLAGVTSRLRALRGVSTVTAFGIAVEIGDFSRFASPRALMSYVGLVPSESSSGETTSRGRITKTGNPHVRRLLVEAAWHHARPLSPASETDVASSAGLPAEAAGIAARANRRLHRRYLDLRARGKGANVTNVAIARELVGFCWALALCG

SEQ ID NO: 115312 - protein, 400 aa, unidentified
MVAERQAEWENGSDCHTEAVLLKGKEERERMSKAEETRICVGTDLHKLQMTVCAEQEETGEVLLSEQYRTDEEGYKAFCEELHRIEEETGNPIAIAVEATGNARYFKNRMEKEGFEVLVVNTNKFKVITASTKKTDKQDAATLAYYLMKGMLPESHLCDQTSEELRRMLKARSILVSSMVKIKNQIHGMMLGYGIETKAAQLQSKKKRQELIQDLADHGYTQFSALSLQVTLNIVDAIGEQIKAVEKQIQEMVREDDTVELLMTVPGIGLINAATIASYTKDIERFDHDFKRFASYLGVVPSVHNSGDSEHYGRITKRGPQTLRTAFVQVAMGMIRQPQKTGEWKLMKDYELMKTNKGTGRAVIALTRKVARIVFAILNTREPFNPELMKLDERNKKQTA

SEQ ID NO: 115313 - protein, 327 aa, unidentified
MTQSIVGMDVSKHSLDVVLLHPEQKHYQVVENNLAGFEYLSSWLQAKGCEQVHICLEATGQYGYAAAEYLYLCGYDVSIVNPARIKAYATSRLKRNKTDKADALLIAEFCQKEKIALWSPPKPVFKALKDMVHCLDDLKAMRQQERNRMEFMASDPLVESMRLEHLTWLDEKIKTLRAAIHKHIQQDPQLKHHSALLISIPGIGELTAARLLAEIRDFHEFRNARQLTAYAGLNPRQYQSGSSVYRKSRLSKTGNGNLRHALYLPAIVAKNHNPIIRAFCQRLTDRGLSKMAVVGAAMRKLLVLAYGVIKTDSTFNPEFVLKEVCMA

SEQ ID NO: 115314 - protein, 364 aa, unidentified
MEDRTTYVGLDVHKATIMVAALYSGHREPEIWQVPNERPALARLARQLQRKAVGPVVCCYEAGQCGFTVQRQLQAVGVACQVIAPSLIPVRPGDRIKTDRRDARKLAELLRAGLLREVIPPQPQDEAARDLTRAREAAQQEVLRFRHRLDKMLVRKGLIYSGARWKGLHRRWLRTLRFEHAVERLVFEDAVVAVEVAEERVKRLTAAVEEISQQEPYRVPVGRLRCFRGIDTITAMTLLTELHGFGRFHSARQLMGYVGLVQSEHSSGDTRRRGRITRTGNGHVRRLLVESAWNSRVPWQSRTVLCRRQGQPRDAILIAERAQRRLAARYHYLVRRGKPKGKAVVAIARELTGFIWATLQQPSA

SEQ ID NO: 115315 - protein, 352 aa, unidentified
MTVYIGVDFHPYEQSVAYVDDQDGEIGYRRFLHSDKQSLKAFYRKCGEDAIIGTEATGSLWWFEKLLFDNGMKLKIGDPRMIRRAALSRHKNDFRDAETILDLLMRGQFPAIVPRSERSREVLDLLNYRQSLVRKRTSVVNQLQAFARSKGLARFRLPAVKARTKLLDAAGTETEQLLVSSRLLLCDELTRQIKALEARLEEETDKEEQVKLLLTHPGIGLINALALFHTLGDVRRFRRKEEVVAFVGLDPLEKSSGEKRRIGSISKHGSRLVRHLLGQAAQACRDKRIRQFYSEVSRRRGRPKAKVAAARKLLINCYVMLRDGIGYEEFTRRGRSWFVRGVRRGEGKPFSL

SEQ ID NO: 115316 - protein, 414 aa, unidentified
MEGEINKSCGLDIHKRFVIATILSRSGEKQQQRFVRDDDGILNLKNWVASEKCDVVACESTSDFWVPIYESLIDHLPVIVGNARDMKAFTHKKTDKIDSEVIAQLSLNKMVQPSRVFPKRHREFRSYVRLRLTLVRKRTDIKNEAHAILSSEMLHLGDVLTDIFGKNGRAILAGISSGKNVDQIIESLSPNVRKKSAQIREILDREISQSAAIRLQICLNLIKHLDDEIEVLEREIFSYAYSNHNHEMEILMSVPGIGEIGAATLIAEIEDFRDFSSGDKLASWLGLVPNVYQSADKYHNGRITKRGSKVARWILTQIAQAAARKKNSRLKEFFNRKKKTIGFAKAIIALARKIVTIIWHLITKDEMYEDETGYQKGEIQKRKIVETEIFSVDERITIISGIIAIMGKKEGEST

SEQ ID NO: 115317 - protein, 394 aa, unidentified
MIYAGVDIAKTDHVIGAVDERGAEMCPPMPFKNTEAGLERAVAWLEGLAGSPSDVVVGMEATGHYWMACYSFLVARGYSVAVINPMQVKAVRKLKGLDKVKNDRVDAGLIAEALRIGQYDETRLATDEVASLRSLSRYLQSLRGMVAELKTQCICLMDAHFPEYAGIFSDMFGAGSRAVLSKSPLPFELARRRADSLARDIAEASRRGGKSSGYAAKIKAAAKSSIGVRLGQEAASFQVKSLIRQIEFADSECAGVEARLRSLLDEVEPLVLTIPGVSYVTGAQIVSEIGDVSRFRNAPALVSYAGLNSSVSQSGQFDSGGGPITKHGSPYLRRALWLAANRARQYDPGLRAFYDRKRAEGKPHRVAVTAVARKLCHIVFAVMRDQVPYDPGRE

SEQ ID NO: 115318 - protein, 352 aa, unidentified
MKYYIGDDAHKKYSVFSIVDEKGVMSSCERVPHDKETYRKYLSTLPENSPIAIESVGNWYWMVEAMEQAGHTPLLVHPRKAKLMMGRINKTDKLDARGLAMLKLNGSLPEVWIPPAEIRDQRELSRMRMALVSVRTKFKNRIHATLAKYAIVIADVSDIFGVKGRVQLKEVIKELPFETRQSVEEQLILLDQVSGQIEKIEKHMREVVKATPMMQLIKSLPGVGDILAIVIALEIGDINRFASAEHIASYCGTVPRISSSGDRTYFGRVRVDVNHYLKWAYIEAANCIALQQNKMSGRHVCVLLKRIQKHKGYAKAVVAVGRHLAEATYCILKKNQPYKEPNLYKPVLSSRG

SEQ ID NO: 115319 - protein, 351 aa, unidentified
MKTVPTAQPKLYIGIDIHKLSWKVHCATDLFCGKSFSMPPEAKTLYDYVQKNFKDHQVSVAYEAGCCGYSAHRSFTDFGWYSVVTNPADIHRKGKEKHTKTDRIDAQLIARELKDGRLDCIRIPDVEREELRSLFRRRNDIVKDIRRNKSRIKMQLLYFGIKIPEEFSNDKWSHKFRNWVDAVRFTHPTAKSTLEGRMRTFRFLDKEKREISTQLRAYCRKHHKEDYYLLRSIPGIGGIVACGILSELGDLRRFNNIKQFAGYLGLAPGIYQSGENSRGTGITKRANKIMRSYFVEASWQAIRADPVMQAYYRKHVHRNSKSIIIKIARKLASRTLAVVKTGIPYEPGVVQ

SEQ ID NO: 115320 - protein, 346 aa, unidentified
MNITTVGIDLAKTVFQIHAIDGRGKIVLRRQLKRAQVSHYFSNVPPCLIGMEACASAHYWGRVLERFGHTVRLMAPQFVKPYVKTNKNDMADAEAICEAVARPNMRFVQIKSVEQQSVLSLHRVRQGFVKARTAQANQIRGLLGEMGLAIPKGIRFIAQRVPAILEDAGNELPLAFRQLIQQLTNHLKLLDEQVDAIHGQIVAWDRGCDISRKLQKIPGIGPLTATALVATVADVHNFKNGRQMSAWLGLVPRQQSSGGKPTLLGISKRGDAYLRTLLIHGARAAILAAKRRPAQRENCWLGKLLDRRHPNIAAVALANKNARTVWALLAHGREFDPTYVPARAAA

SEQ ID NO: 115321 - protein, 317 aa, unidentified
MLAPTVFVGVDVAKATLDVAVRPAGERWSVANDEPGIQSLVARLLPLGPVLVVLEATGGFEHAAAAALGAARLGVVIANPRQVRAFARAIGQLAKTDAIDAQVLALFAERVQPTPRPLPDEAAQILDALLTRRRQLVEMLVAEKNRLSAARRPVRHGIRQHIRWLERQLGDVDHELEEAVQASPLWRAQDDLLQSVPGVGPVLSRTLLAELPELGRLSRKEIAALVGVAPLARDSGTWRGRRAVWGGRAPVRAVLYMATVAAARCNPVIRVFYWRLRAAGKPAKVALTACMRKLLTILNAMVRTQSPWRPRALEVTT

SEQ ID NO: 115322 - protein, 332 aa, unidentified
MGIDVAKKTFDAAVWTRLGPGEERSSRTLPTHSFPRTPDGVAACLAWAQPYATNSPLSAVMEATGKYSIEIAQWLVATEPTVEPAIINPRLAKAFAESLSVNNRNDKTDARTLARYGAERQPAPFALPTPEMQQLRDLARYRQSLVEDLTEEKNRAGEGAVAATVRRIRTRRMSQLERDIARIEKEIRNSLKKLPELQGDVDKLDGIFGVGWVTAVTVIAELGDLRRFKRARQLTAFAGLAPTSHDSGTSVHRKSHTSKNGSTRVRRVLYLAAIAAIRGDNDFAELYYRMTAAGKKPMVAIVAVMRKLLLVMRAILISGKTYNPHQRTSACG

SEQ ID NO: 115323 - protein, 370 aa, unidentified
MATTVRYVGLDVHKASITIAVAESDRAPAQIYTTVPNDWPQLLKALTRLSPTLSALRCCYEAGSIGYHLYRRMNKAGIDCMVVAPSLVPTQSGNRIKTDRRDAKKLAHFLRSGDLVSVYVPDDECEALRDLERAREDAVRAQRVARQHLQNFLLRQGRPYHSTQWTWDHLDWIRKQKFDNPMRRQVLCDYIKVTEDAGARLKQVTADLEQHAQQTRLWPLIKALQAFRGIRLVTAASVVAEIADFRRFESARKFMAYLGLVPSEHSSGDSNRRGRITRCGNRWVRTLLVESAWHYRFAPKMSRQLRARSQGVAPGVQRIAWKAQHRLHKRFYRLTARGKRPQQAIVAVARELAGFLWAVGQEKEFLIDAT

SEQ ID NO: 115324 - protein, 332 aa, unidentified
METIIMKACGLDVHQASVVACIQRQGIEKQIKTFGTTTQELISLKQWLKDNDIDHIAMESTGIYWRPVFNILEDTNWELLLVNARHIKNVPGRKTDVQDCEWICKLLRAGLLKGSFIPPEDIRILRTFTRHQKTLQHQIQNEKNRVHKLLQESNIKLTQVLSDMFGVTGMKILTDLSKGITDAKKLGSHMGTNKRLLPKKEQAIACLQGKFSRHHQVMIKVMLDTIAFYQRQIDDLEIEVRQLLQPYQQEHQLLQTIPGIKEKAANHIIAELSVNMDVFPDEKHLSSWAGLCPGNNESAGKKKFQTQTWQQSFKIYSNRMCMGFFQNKRHLL

SEQ ID NO: 115325 - protein, 323 aa, unidentified
MNTKTLQNINIGVDTGKSQLDIYIRPLDVFFTVPNNEKGIKQALTTIKKHNPQRIVIEATGRLEMPFVLACTEAKLPIVRANPVHIKRFAGAIGRRAKNDRLDAQLIAHYGEAIKPNLTVIKAKNIRLMSDLVIRRNQLLAMQTMEKNRIQILPKHLHSTITPILTAIKNQVSKIENKLVKLIEDCPEYQTKNTLLQSVPGIGNIAAASIISNVPELGYITNKQAASLIGVAPITRESGRYKGKRVIQGGRAQVRTVLYMAMMSAMQCNPVFKDTYARLLEAGKPKKVAIIACVRKMVVILNSMLRDGVMWDQNIAQNKGLTP

SEQ ID NO: 115326 - protein, 372 aa, unidentified
MSQSSTLYIGMDVHKESIAVAYVAQAHGAEVISLGTIGTRQCDIDKLIRQLRSKSKQLVFVYEAGPCGYWLSRSLMKQGDVCWVVAPSLIPKKSGDRVKTDRRDAMQLARLMRSGDLTPVDVPAVDDEAIRDLSRAREDTLRDLKAAKLRLKAFLLRHDIRYTGRANWSPAHLRWLSEVVCPTPAQQIVFQEYVQTVTEQTERLGRLELELHEQVQTWRLAPVVEALQALRGVQFTVAVTTVAELGDLTRFDNPRQLMNYLGLTPSEYSSGGRRQQGSITKTGNTHARHALVEGAWAYRYPATVSRHLQLRLEKLPTAIQAISWKAQVRLCKRYRQLMAKGKNANQVVVAIARELSAFMWAIAKQVTVPPKA

SEQ ID NO: 115327 - protein, 356 aa, unidentified
MSEKLNSKMAVIGIDIGKNSFHVVGQDRRGALVLRQKWSRGQVEARLANLPPCLIGMEACTGAHHLSRKLQALGHDARLMPAKYVRPYCKGDKNDYRDAEAIAEAVQRPTMKFVATKTADQLDLQALHRVRERLVSQRTGIINQIRAFLLERGIAVRQGLRLLRAELPDILAKRTDVLSPRMLRIIEDLSGDWRRLDERIEGLSSEIEALARQDQGCARLMSVPGIGPIISSAMVAAIGTGDPFSKGRDFGAWLGLVPKQMSTGDRTILGNISRRGNRYLRTLFVQAAWVVLVKVGPKQWERYGLKSWIEAAKKRLHHNVLAIALANKLARIAWAVLHNGRAFEYVKTNATVSRSA

SEQ ID NO: 115328 - protein, 340 aa, unidentified
MNKYYIGIDLHSNNLHLAMKDQDGNRQLHKKLPCDLDQVLAVLKPHRKTIKTVAVESTYNWYWLVDGLRENDYPAVLANPAQINQYQGLKQTKDVDDAYWLAEMARLDILPTGYIYDPQLRSVRDLLRRRTQLVHQRTGLIVSFKSLHARTLGATPRLAEVKSLEPEKAAASFDREGDQLTAQVQVTMIGHLDEQIAIIERAVLRQTKPTALYQRLQSIPGIGKILGMTIALETGEIERFPSAGDFASYCRTVDSKRWSNEKVKGRNNGKCGNKYLAWAFVEAAHSSRRYDEKCAAFYEKKKQQRNTAVATKALGCKLAKAAWWIMKEGTTYDARRMFGQ

SEQ ID NO: 115329 - protein, 347 aa, unidentified
MSKIARVGIDTSKSVFQLHGVDDRERIVLQRKLRRREFLAFFAKLEPVSIGLEACGGSHCWARELQALGHEVVLIPPQYVKAYVARGKNDAADAAAICEAMSRPRIRQRLVPIKSAEQTAAQMLLGIREGLVRRRTQLANTIRGHAAEFGLVVPKGLDKIEPLLALVAEDAAVPALAKEMFALLGQEFVDLRVRTAEVDKKLKTFHGGNELTRRLATIPGVGPIGACLLATRITNPHGFRSGRMCAAWIGLTPKDHSTAGKQRLGGITRAGDESLRSVLVTGATAYIQQVKRGRTVPSPWLAELLKRKAPKLAAIALANKIARIAWKLMTTGQRYDRTRAAAPLAAA

SEQ ID NO: 115330 - protein, 311 aa, unidentified
MNPSAIHYLGVDVSDQTLNFSSAPNTAIPNNEATLSPHLRALRKANPGLHLVCEATGRCHHALLIVATKLNLPISVINPRHVRDFARSLGRLEKTDALDAQMLERYGKCLQPAPTILADKTLRKMRDLLVVRSALVEDYRAWQCRARQLDPSAQRLCQQHMERINGDIAKVEGALRRLLARQDALALSERMQAMCLVCGIGEKTSWMLVTELPELGQCNRRQIAKLCGLAPLNHDSGKMRGQRHIAHGRAPARRALYQAAVVAAQHNEYLSSYYRRLREAGKPAKVAYVAVARKLVIFLNRILADAPAMSS

SEQ ID NO: 115331 - protein, 339 aa, unidentified
MPHYAALDVSNQETAIHVVDEAGRTVWRGKRASDPEALAVALRRHAPDLVRVGLETGFLTPWLYHSLKALGLPVVCLEARHARAATTLQRNKTDANDAETLAQLVRTGWYREARVKSFAAHAVRHLVGARAQLKGVSVDLSNQIRSILKTFGLMAGKGAGHAFAIRVRELLEGRPALAAIVDPLLAAWQGVREQIAVLDRRLIRLAKGDSTCRLLMTCPGVGVIVATSFAASIEAPEHFRHSRSVGAYLGLTPTRHQSGETDRTGGISRRGDRLMRTYLFEAAASLLIRVRQNSALKTWGRDLAKRMGFRHAAAAVARKLAVVLHAMWRRNTPFQAWPA

SEQ ID NO: 115332 - protein, 354 aa, unidentified
MNNIKYIGIDVHQATSVFAVRNAQGKLIAEAFVETQPTPIIDFLKGQRGTVWATFEEGTYANWLYDVIQPQVAKIVVCDPRKNKLDGNKSDRIDAKRLSELLRLNALTAVYHGQNSTRTLKELARSYVSLQQDSTRVMNRIKAMFRGRGIACRGTSVYRPKHRKEWLEKLNDQAPRHRAERLLKQLDLLGELCLDAQKDLLRESRKHKSYKILREVPGLGPIRSALTLAFVMTPHRFRNKRQFWTYTGFSVVRSASAEYEISQGELRRTKKKPLPRGLNHNYNHVLKNVFKGAALTAAYRGPFKELFDQRVAAGTAPNLVLLTLARKIASITLALWKKGESFDIERHRLSEQTT

SEQ ID NO: 115333 - protein, 409 aa, unidentified
MKRIRERVAGLDVHRDTVVACCQVKQPDRSIVVTKQSFATTARGLGELAAWLSDTGVDTVAMEATGVYWKPVYYCLEGLFDELWLCNAQHVKNVPGRKTDLSDAEWLADVAAHGMVRPSFVPPPEIRELRDVTRYRKTQVEARAKEIQRLEKTLQDAGIKLSSVASKVWSKSSREMIEAMIEGERDPKVLAQMAKSRMRAKIPQLEEAFSGRFGSLVCRQVIEHIDFLDRSIATLTADVTELLCPFESAVTILCSIPGVSRTTAEVMIAEMGVDMTRFPTSGHLCAWAGVAPASHESAGKRQPVGTRHGSTWLQRALVEAARGASRTKGTYLSAQYSRLARRRGSNKATIAVAHSILDVSWHLLTNGALYDDPGARFFELRHDPVAEAKRLQRKIEGLGFEVSIAPAAA

SEQ ID NO: 115334 - protein, 340 aa, unidentified
MTVIIGVDPHKGTPMAVAVDGDEQPLARLEVVAGRGQAQRLLAWAAPFEDRRWAIESADGLGKLVAQQLLAAGEDVVDVPPTLSARVRLLGSAKAAKNDSNDALSTAIAGLRHCGLRSVRVEDHVAVIQMLVDRYDDLTGLRTQAACRLHVALRELVAGGAPNRLSADRAGRMLRSVRPVGAAEIERKRLAGELLADVRRLDRDIATARARVTDAVAKSGTSLLELHGVGPVVAGFVLGQVGDAARFPTPQRFASYNGTAPIEAPSGPVKRHRLNPHGNRKLNHAIHMASVTQIRHDTPGRAYYERKLTEGKSKREALRALKRRISDAIWRQLQVDLGRR

SEQ ID NO: 115335 - protein, 404 aa, unidentified
MFKFGIDWSEQHHNLCIRNSKGAIVSQVEFKHTLAGFQRLDDERRKLGVPPSECLVAIETAYNLLVDFLLDRGYLVYLISPQATKGYRNRLRSTNAHTDDTDAALLSSILHTDLDSHRRLQPNSALTQQILAQVRFIDLLRRSIQRQTNQLRAVLFRVYPQALGLFGKLTAQINLHFLMAYPTAQEAQGLTRAVFEAFCREHRYGRVDLISRRYAHLMDPAPEANPITLAAYRDQIRILAALLLPQVLRRTEALSSLDQLFSQHPDAFIFDSLPGAGELLAPALLAKFGDHRDRFPTPAGVQALAGTCPVTKKSGKRKVVIFRRGCDREFRRIAQQFAKASVRQSGWALAYWRDLRPRCRSDSDAYRRLANRWLAIIWKMWQDRKAYDESYHLQQRAQRRRPRS

SEQ ID NO: 115336 - protein, 376 aa, unidentified
MLTIGLDVHQSSSSLCVLDPQGNTQRQIESKGGWDNLIATLTTIKEPFQIVYEASAGYGALYQRLSALPLAKKVVVANPNRVRLIFQSTRKSNRADAARLASLLHLNQVPRIHVPEQEVRSWRGLIEHRRMLVDRRVAAKNQIRALLRTFHIKAPRRLWTKQGVQWLRTITWPTAIEPARMAQLLDLCATLSRLSAACAGQLDVLSSGDPRIELLQSIPGVGPRTAEAFVAYVDNPHRFKSHAIGAYFGLVPREDSTGDKRRLGHITHEGPGTVRKYLAQSAWRGIQDSPTLRAVYDRMLRNDKHRKKIALVGLCHWLCRVMLAMLQSGEAFKESAVTPLSKAPNPAAEFLNPPAIPPADQPVTPNPPATLLRATG

SEQ ID NO: 115337 - protein, 443 aa, unidentified
MAKLPRSERKRIERANALKNKILIGIDPGRTSHTGIIYSPDRLPLTKAMSIKNNRNGLAKLEKIINNIIMTKFPDNQMIFAIEASGEYWKPLWHYFTQRSFETIYVPPLFVKRTRDLDDYTPRSNDPKDAARITNLAYEGRYFTKPNQPEVFNNLQQTVKSWEQITKEVTRTHLRIRSLLDKFFPEYAAVFSNVTGAASLKVLERWPFPGDLLGADKIELIQLINQSSGSRLGETAATQLINLAETSIGITIGIDGGRSRLIRLINQINFYKQQLTPLRRELRTLIGQIDYARRIMTLPGIGLISTARFLGHLGDLNNFDKVNKIIDFAGLDLISSESGKFKSQRQISHRGKSGLRCILYEMNCHFVRFPNTARRKYLKCRINNKRYRQAIVAAIPHLVRAIFAVVKGDQVYQPPQANDPLLNEINFLETVLKEQRKQLKKVA

SEQ ID NO: 115338 - protein, 317 aa, unidentified
MNNQKSITTYLGLDISKGKLDLSGTETSKINYQIFKNTPKGIKELLDFLTPLAPSVQIVLEPTGGYERNVVDALGKAQIAFSKVNAYQVRAFATAIGKLAKTDKIDALVLAKFGEHCTPKPTQPLDKAQEELRALYDRRQQLINAQTRESNRLGTALPTMKDHLNKSLKFIKKQIEEVDSMIGEYVSAHPETQEKIKRLQLVKGVGKQTATVMAAYMPELGKITDKAAVALVGVAPFNRDSGKTNKYRSIQRGRHQIRNVLYMAALCASQKNHILKKFYDHLIAQGKPAKVALVAVMRKLVMLLNHMIKNPNFSLAN

SEQ ID NO: 115339 - protein, 469 aa, unidentified
MSGKAEEMQDSDKRRNNAGSSREIGGLPVVRHRVAGMDLGSERHWVCAPMVEGSGREVADFGATTSELVQMAKWLKVRKVESVAMESTGVYWIAPHEVLEAEGLEVLLVDTRQLARVPGRDQKSDPSDCEWIQRLHSCGLLMGSFRPKEAVCMLRTLVRDKGNLVAEVGDWLRRMQKSLDQMNVRVHRAVSDIDGVTGLAIVRAIVNGERDAQKLATLRDPRCRKSVEEIAEQLNGHWREDHLFSLRQGMKMYDSIQERIADYEKEILRKLAEMEREECRGQEVPKVKNPKKRQAIQRHGEEPMRQALYRMSGVDLTGIDAIGVETVQVVLSEYGPDLSRFPTEKQFVKHVTLAPHKPTSAGRPVKKKKRNSASSRVGAALRMAATSMRHSETALGAYYRQMARRIGGDVAVFATARKLATLIYRLLRWGQPYVDEGAEAYEKRYQEGRIKSLAARAKDMGFRLTPIQA

SEQ ID NO: 115340 - protein, 277 aa, unidentified
MKATTYGLDIAKRVFQMYWVDAQTGEIANRKFGRDDLIAFLAQRPAGRVALEACGSAHWWARKIRALGHEVVLLHAQFIRPFVQTNKTDAADARAIWTAVQQPGMRTVAAKTEDQQVMLSLHRMRSLLVKFRTMQINQLRGLLYEFGVTFRAGRVAGLDEIRERMAELEDALPRSIVLNLLEQLRRINVFEEDINQLEKRIGAWQKHEAACRAISEVPGIGRLTSTALVATIGDAKTFRSGREFAAFPGLVPRQHGTGGKIRLGSISRRGDPYLQRC

SEQ ID NO: 115341 - protein, 370 aa, unidentified
MLDTTTFVGLDVHARSIKAVSLDVMTGEVRCATFGYDAGAVAGWVRSVDPRARCVYESGVTGFDLQKRLSGLGVDCVVGAVSKMIKPSADRRRKNDRNDAEFLARMLSVGNVVEVWVPDDECEAARDLTRALEDARDDLSRSKQRLSKFLLRHGLAFDERTPTGRRKGNWTRAHWSWIESIRFAEGADNDVLAYYVDAVRRAAEDKARLEGLVEAEARKPRWRKRVDSLRCLKGVDTASAADLVFEAGEFSRFRNARSFAAWVGLTPSEHSSGESDRRGAITKAGNKHLRKTLVEAAWHYLTCSGRPKDLAKGQAPDRVARRHAAKGVRRLVERREALLARGVHGNKANVATARELACWVWAVGLMAEEA

SEQ ID NO: 115342 - protein, 394 aa, unidentified
MAFKIFRKNCCGLDVHKTWIYACMGITDTNGRTEYKQARFSSFTKGLQKLADWLAKYDCNDVCMESTGKFWIPVFNILEKTCWVTLAYPKYTKPQKGNKTDHKDAKWICDLYMCDMVNPSFIPPPDIRQLRDLMRYRSKLTNIMTSEKNRALNCLTVSNLKLDDVFSDVFGKSSRSVIRYILEHPGETFQVAPFIDRRCKHPVEEIQAVIDGTISHQQAVKLRECLQHLDELEVHKTNVEKEILCLVQQYPYQLELLQTVPGFSGNIMTAIALISEIGADMSVFPSAKHLISWAGCCPRHDQSSKKVKSTRISRAGVYLKPLLVQVAIQPFTANADKLSAAGALEIRCQICDGRFLSMWAALFIFLGCPLPPCPKNLHVHNGRIVILASVAWIF

SEQ ID NO: 115343 - protein, 410 aa, unidentified
MEVLYPHCAGLDVHKDTVVACVRHMVNGTVKREVRTFKTTTTELLALSDWLAAEKCTHIAMEATGVYWKPVWHILSDGDFSLVLANAAHVKNVPGRKTDVSDAEWLADLLAHGLIRASFVPDTPTQALRALLRTRKQLVREQTSHVQRIQKTLEDANIKLDSVISDIMGKSGRAMIKALIAGERDPDKLARLADARLEASPAELREALRGRVTKNHGFLLRLHLRQIDALDAAIAAIDRQVEADIAPFRVAAEQISSVPGVKALSARVIISEIGIDMSRFPTDAHLISWACICPRSDESAGKRRSNRIRKGSRWLKATLVQCAWAAIKKKDSYFRAQYHRIKMRRGAKKAIVAVAASMLTAIYHMLKDGTMYKDLGSNHFDRRSADQQKNRLVKRLADLGYAVELKPLAA

SEQ ID NO: 115344 - protein, 439 aa, unidentified
MQILYSRCCGIDVHKDSVTACVLVYAEDREPEVRKKEFQTHFKALGNLRLWLFALKVKHVAMESTGVYWKPVWKALEGHFTLILANPYQVKNIPGRKTDARDSQWLAELLAHGLIKPSFVPPAETRELRDLTRYRGKLTEECNRIHNRIHKVLEDACIKLDTVASDILGASGRAIIRAIIAGQEHPDWLADKAKGTLRGKRPQLRLALRGRITDHHRLMLGELMEDLEFVERKIQRLDMQIARKADVEKLTRLATIPGIDLITAWALLAELGSDMNVFASPKHAAAWAGLCPGNHESAGKRLGNRTRKGNRWLRRALCQAAWCATRKRNCYLAAFFYRKAGKHGIRKAIVATAHRLLIIAFCILRDGTVYQELGENYYDRLHPERTRNRLVRRLQKLGLDVILTPRTIWPEPVPVPPAHPKRGRPCKCAERAIPCKHGR

SEQ ID NO: 115345 - protein, 429 aa, unidentified
MQNESTPGARGPVFCGVDTHADSHWLCVLDWRGRKVLSRQFPADAAGYEALAGAIAAAGEPACVAMEGTSSYGAGLTRHLASLGMPVREALSPARMQRRRPGQGKCDEADAERAARAAMSGSRLGTPKSQDGWVDGVRCMLAARSGAVKARTSAINTARSLLTTAPEGLRSRFRGMGGPRLMEELPSVRAEGALGAALGALADLWAAARDAALDMELAIEASLEENCPALLAMYGCGPVSAAKLAVAAGDNPGRLRSEASFAAICGACPIPASSGKTVRHRLNRGGDRQANSALHEIARQRVMRDPETAEYAERARARGKSDREVMRCLKRYVAREAYRALMRPHEIRRPEDASELVAARRAAKVSQVKAASILGTSEKYISMLERGQRELKPIRRAYEAWVEAGLPLDWDRQAFEAERKMDSKKHLAK

SEQ ID NO: 115346 - protein, 393 aa, unidentified
MICVGIDVAKDKYDCFILSSEGEVLADVFTIPNNAEGFDTLLQTIRRCARPEDKIKVGLEATGHYSYNILGFLLNEGLDTYVINPLHTNLYRKSLSLRKTKTDRVDARTIAAMLMSDVDLKSYTDTAYHNEELKSLTSNRFDKVRERAKLKQSVSRLVTILFPELEKLVPTLHTASVYALLSEFPGAKQVAGAHLTHLKAALYDASKGRYGRDMATTFRDAARCSVGSVMPAKSLELRHTIRLIHELDAEIEDIEAAIQSMMDEIQSPITTIPGMGVRMGAMILAEIGDFSRFDSPDKILAYAGISPSTYQSGQLSLSGAYSHMERRGSRYLRYALYNATKYVCLWNPTFAAYLAKKRAEGKHYNVALSHATKKLVRLIYALEKSKRPYSTAA

SEQ ID NO: 115347 - protein, 348 aa, unidentified
MAMLADSVDLVIGVDTHKETHTAALVSPTGAVLGTLTSSTDRAGLARLLAFGRSQSAERRLWVLEGTGSYGAGLTTFLMTAGEPVAEIDRPRRPARRHGAKSDPLDAIRAAREALGRDQLGSPRRRGDREALRVLVVTREALVGERRRALNQLHALIVSAPDELRVRLRPLQGRTLLSRCAGLREASGRTPELEATSRAVRLTARRILRVTAEADELEASVRSLVCAMAPALLVERGVGPISAAWLLVAWSHPGRIRSEAAFALLAGVAPIPASSGQTVRHRLNRSGDRILNRTLHTIVVSRLRYDPATQAYAVGRRSEGRTDREIIRCLKRYVARGLYRQLERLATT

SEQ ID NO: 115348 - protein, 355 aa, unidentified
MNDAKYIGMDVHQATISVAVRDSRGNLVMEAILETKAETILQFIRGLRGSLYVTFEEGTWAAWLHDLLQPHVARVLASDPRKNALLKAGNKSDRIDARKLSELLYLNKLSPVYHGEQGIRTLKELARSYITITRDLTRVMSRLKAIYRGWGIPCAGQQVYAPRYRAEWLAKISEAGVRRRAELYYQQFDALAALRQGTRRELLAEARKHLAMRLLRQIPAIGPIRAALLIALIQTPNRFRTKRQLWAYCGLALRTYTSGEYRFVGGQLKRSKKVLAVRGLNINHNHDLKNIFKGAATRAAAATGPFQDFYQATVARGMKPHLARLTLARKIASITLLVWKKGARFDAEHLKQQAA

SEQ ID NO: 115349 - protein, 319 aa, unidentified
MTKIICGVDVASDSLQARIDCDGPERCFSQTSQGITELADFCRQHHVELVAMEATGGYEKQAFSQLWALGLPVAILNPRAVRRFAEGMGLLEKTDRIDAGVIAWFAQVKRCAPCTPASAQQEHLHALVTRLRQLTELQTMQRNQRLLVTDPTVLDSFTQILALIAAQIRTLAAAISKLISADPLWQQLDQAFRSIKGVADRTVARLMAEMPEIGTLSNKAISKLAGLAPLARDSGSFQGKRPVRGGRAEVRAILFVVASVVRRHDPDFTAFDRRLTAAGKPKKVIRVALAHKLLVRLNAKARQVRSQFQETAFAVLLHS

SEQ ID NO: 115350 - protein, 466 aa, unidentified
MTPHTDAFPDPRPPAPPLPQPSVLSEALQVCHPHAAGIDIGEAEHWVAVPPGCDPQPVRRFSTFTADLDALADWLIDCGVTTVAMESTGVYWIPLFELLEARGVQVLLIDPRQAKRAPGRPKTDRLDCKWLQRLHTYGLLAGAFRPDDQVCVLRGYLRHRQMLLTYAAHHMQHMHKALEQMNLKLTQVVSDITGVTGMAIIKAIVAGERDPVTLAKLRNPHCQHGEDEIAKALQGTWRAEHLFALRQAVELYQFYHQQVALCDQQIKAHLETFADKSAGQPLPPKAHRHKKTNEPHFDARTPLYRLAGVDLTTIEGIEENTALVILSEIGTDMTRWPSVKHFCSWLGLCPQHQISGGKVLSRRVRPGAHRVTVALRLAARSLHHSQSALGAFFRRMKARLGTPKAITATAHKLARLVYSLLQHGSAYVQQGLEAYEAQYRERKVTTMAKQAKALGYTLVPLAAQGS

SEQ ID NO: 115351 - protein, 397 aa, unidentified
MYIVGIDIAKRKHEAAVIDGEGAVIIKPFSFTNNCSGYNRLLAMLTKAKLPLDEVSFAMEATGHYWLALFTRLQKEGFRVQVINPVQTNSIRSFYIRQVKTDPRDALLIAEVIRFGHFSESTLHPENIYELRELCRGRHAIVSMQADVKRKVVALLDQVFPEYETAFTNMFGDTSMAILQTCPTPKELSEMPLEELCHLIEVSSHKRFRMAKAQELQALARNSFGFAMAGDVFSTMIRLYAKHLDFLKQQVREMDRKIAEIMDTLDTPIITITGIGPTLGAYILSEIGDISRFSSAAKLAAYAGIDPTMRQSGEYNGVRNRMSKRGSPYLRHAIWLAASSAVLHDPALKLYFQKKRDEGKPYMASVGHACRKMVSIIYAVMRDNKAYTPYIPNEISA

SEQ ID NO: 115352 - protein, 345 aa, unidentified
MVTTIGIDPHKATHTAVAIDEDETVLGEITIPADRYQTKTLMEWASELDGDGRLWAVESAGGLGYLLSQQLVAGGERVVDVPAVLASRVRVLSSGKSDKNDPNDARSVAIAALRQPGLAAVQQQDHAQVLRMLAKRHLELTSLRTQAVCRLHAVLMLLKPGGMQRRLSAKAASRMLKGMRNLDAVGEQRRRGARAHLGDIRRLDGDIKANKTLIRHAVTAAETTVTDIYGVGPIVAAFLIGYTGDVTRFATADRYAAYNGTAPIEVSSGGKKRHRLSMRGNRRLNHAIHMAAVTQIRFQTPGRVYYDKKQAEGKTKKEALRALKRHISNAVYRRLITDQQQATTS

SEQ ID NO: 115353 - protein, 342 aa, unidentified
MDHFAGLDVSVKETSVCIVDDTGRIVREVKVASEPEALLSVLKNPAYHFKRIGLEAGPLSQWLFSALAEAGLPLICVETRHMRAVLKAQINKTDRNDARGMAQMMRAGIYRPVHVKTLRSQKLRMLLTHRKLLQSKAIAIDNDLRGTLRNFGLKVGIVRTVKFEARIRELVENLPDLAALIEPMLIVRRTLREQFCVLHRRLLAIVRDDEVCRRLMTTPGVGPVVSLTYRATVDVPARFRKSKSVGAVFGLTCAKYQSGEVDWSGRISRCGDEMMRVMLYEAAQAMMRSKKWSWLKAWAMQIARRRGMKKAIVALARRLAVIMHRIWVDGTEFRWTREAAVA

SEQ ID NO: 115354 - protein, 369 aa, unidentified
MKKRIENKKESNNNINGNDYYIAVDIGKRNCVVCVTDKDGSIVEETKYDNTLQEAERFASSLNKKYDSKRCHAVCESTANMWLKTYEAFENHGIDIKLANPMKTKAIAEARIKTDKLDARILAHLLRSDLIAESYIAPDNVREDRSLLRLRINLVSDRTRVMNRVHSLLDKYDQKCKYSHIFGVNGIKWLKSIALKGNDQIQLTNYIHSIEFLNSEIKQIEKKISTEASANEDVRILMSMIGIDCFSAMLICSEIGDISRFSTAGKLVSWCGLCPTVHQSGTSMYMGRMKKDGNKKINWIMIQAANTASRTDERLKKYYKKIAKRHGHHVAITHVANKMIRIIWSMLTYKQLYNERKTEQYERKLKRIQ

SEQ ID NO: 115355 - protein, 346 aa, unidentified
MKVTTIGIDLAKEIFAVHGLDSKGHTVFRKALKRHEMAKFFANLEPCLVGMEACGSAHHWARKLESYGHTVKLMAPQFVKPYVKTNKNDMADAEAICEAVGRPNMRFVTHKTVEQQAILAVHRARQGFVKARTAQGNQIRGLLSEFGFVLPRGIQVITQRVPEMLEDDDNGLPRSFRQLIERLTNNLKEMDRQVDELEAEILSWHQNNEASKKLATIPGLGPITASAIVATVGDAKEFKNGRQLAAWLGLVPKQNSSGGKQVLLGISKRGDSYLRTLLIHGARAVIRFAKNKAEPNIWINKLLDRRNKNVVAVALANKNARIIWALLTKNTVFKANFSPKTVNVGV

SEQ ID NO: 115356 - protein, 369 aa, unidentified
MDQHSVAYVGFDTSKTKHAVAVAEGGREGEVRYLGEIEAAPAAVERLLGKLARQYKSLHVCYEAGPTGYGLYRHVRALGQVCDVIAPSLVPIRPGDRVKTNRRDAVTLARLLRAGELTSVWVPDEVHEAVRDLVRAREAAARDLRHKRQQVLSFLLRHGRIFTGHRHWSRAHLRWLAGQAFRHPAQQVVFQDQVDAVADAQARLERLDRHLAELVPTWSMAPVVAACQAMRGVSFLVAVTFVAEIGDVRRFESPRQLMAFLGLVPSERSTGDTVRRGGLTLAGNRRVRRALVEGAWSYRHPARVTETIRVRLEGLPKAVREIAWKAQVRLSARYRRLVAAGKRAPVAVAAIAREMAAFLWAIGRVVEPA

SEQ ID NO: 115357 - protein, 401 aa, unidentified
MNPVIGLDVSKGESHAQAFSDRGTPYGKTFRFEHNLEGLASFLRFAQSLESFTGRRPAIVLEATGHYHSPVIQFLNEHQYLYIVINPLLSHQAKKLNLRKVKTDVADAYQLGEMFYKEELEPYKKRGQYLMNLRYLTRQHESLTEIYVQVKLQFQAVLDQVFPEYHGVFGDLYSKVSLRLLAQYPTSQSVLALSEENVTAIIKRLVGHVKSNQWSLERAQKLMAAAERNPFRETAFPSHLISLELFIHLLLQYQEHLTKLDKSIETLAEELMEYDLIQSIPGIGTKIAATILAEVGEIDRFDHAKKLVAFAGIDPSVFSSGKFTATRNKITKRGSRRLRTALYQAVRCGLKGSRNKRIRAYYDKKRAEGKLFKVAVIACVNRLIHWIYAILTKKEPFRLTE

SEQ ID NO: 115358 - protein, 303 aa, unidentified
MKKVKESIVEGKEIFIGLEDSKRTWRLCVRSEGMIIHETSMPTDYEALRRFLRNRFPGCTISVMYETGFQGFWLHDLLQADGFKCIVTPAHTVVEEKSNKVKTDTRDARRLALNLEKGDYTVCAVPDQEQREDRQISRTLHQTQKDITRTLVRIRMLLSFHGIRFGMEKKTWRWQEYQTLLDLPMPPCVRICVEVLVRRVGQLREDRDILRKHLQAIAKKERYQRSVRCFESVPGIGEQTAIRLALEWGDMTRFKTKEGFAKYLGLTPQESSSGEQRHQGHITQQGSGLVRSWLVEAAWFAIR

SEQ ID NO: 115359 - protein, 417 aa, unidentified
MESAPSALPEEPPAGLTCGLDWARDDHAVSIVDARGRQVHRCVIEHSTAGLRALPGVLDKRGIREVAIERPDGPVVDALLAAGITVVVISPNQVKNLRGRYGSAGNKDDRFDAYVLADTLRTDRARLRPLVPASPATATLRATCRARKDLIGHRVALANQLRAHLQRAFPGAVGLFRDLDSPISLRFLTRFDCQDRADWLSVKRFAAWLASVGYCGPVDPAVLHARLTAAPRGALGDEGAAQTHITRALLTALTTITEQIRALSEQIDEQLAVHADAHIFTSLPRSGRVRAARLLAEIGDCRARFPTPESLACLAGVAPSTRQSGKNRAVGFRWSCNKQLRDAVTDFAGDSRRANPWAKHLYDQAIARGHDHPHAVRILARAWLYIIWHCWQANLGYDPAKHGALQRLLNQAQQAAA

SEQ ID NO: 115360 - protein, 310 aa, unidentified
MADIVITAGIDVSKDRLDLALWPEPGANGSFTPGEIEPLISWLGAHRVSRIGLEASGGYEREVVRRLSAAGFVVVVANPLRVRRFAQAKGRLAKNDRADAATIAEFTATLAPQRQLREAALDRLGEYLMVRRQLQQAVTDTVNQLEHLREAELRRLVAAQRAGLKRRIQQLDRRIAARVAEQPHWQALAKQLRSVPGVGPVLAHTLIALLPELGRLTRRQVASLVGVAPFDDDSGRRNGARQIAGGRTAVRGALYMAALVAKRCNPTIAAFARRLAGKKPKVILVACMRKLIAILNAMQRDGKPWQPVAA

SEQ ID NO: 115361 - protein, 395 aa, unidentified
MYSLFIGVDVSKDFFSAVGLDKEGKELFSGTYEMNSNGFSEILRTLSFHGQRGDEVMVAMESTGCYHINLFSFLTVEGIRTVVVNPLLISNFAKLSLRKTRTDKKDASTIAKFLLAHQEGILQLSVSQDLQDLRDLSRERESLCHLIAATKVEIKRVLRATFPELESIGNLYTRVMLRFLQEYPSARRVRVAKPRAIAKALKGPYVGNKLRFSSEDILRAARSSVAVVSPAKEVILQGKISTLLHLDERLREVTKLLTDLCKATRKENLKILRSIKGVGPKTAAPFLAEMGQVENFTSHKKLIAFAGWDPSVRQSGNFVGMSKISKRGNRHLRRAIYLITASVVSQNAFFKAYFLKRKKEGLPPQKALFATAHKLIRVIFAMLTQRTYFKPKEVI

SEQ ID NO: 115362 - protein, 357 aa, unidentified
MVHVGLDLHHRNSFVRALTEAGELVPGRRVGHDHMEQLWEYLGQFGDQPKRVVFEATANARWMYRLLKQDPTIEPVAVTPHKVRIIAETVAKTDQIDATVLATLSRMDALPRAFLPDEELEQLREMVRYRGVLVRLRTRAKNLVNGVLVRQGLLRPYGNIFGTLGRRWLLEVSLPPVMRLQVDQWLEMIDVYEAKIQLAEEKLYQELARQERWAPDVRILTSAPAVGRLTAVTILAELGEYRRFGGRSAVSCFVGLVPRSKRSDRSSRYGHISKRGSSTLRSILVEVAITAARKVPRYGQLLSRVKAKKGTKTARVAVARQLLEDCWTMLMKREPFRFEPSQRSARPVQAESLTRAG

SEQ ID NO: 115363 - protein, 414 aa, unidentified
MNQQTSNSYTAFIGIDWADKKHDICLLAANSSKREFHIIPHAVEKIDEWARELFKRFGGPIAVAVELSKGPIVYALQKYDFFVIYPINPSTLAGYRNAFSPSGAKDDPTDAELAMDLMLRYPQRFKPLHPQNTEIRKLMYLVEQRRKLVDDKRRFANRLIDTLKQYYPQTLDWFSHRDSVLFCEFVIRWPSLQKLKRAREATIIKFFHSHNGRSKKRIAQRMESIKVSLPLTDDEAVLVAHQLQAMAIAEQMLATIKAIRTFDSEIKKTFEQSPDFSLFDALPGAGPCLAPRLLVAFGEQRDRYNSAKEIQQHSGVAPVTERSGKKEWIHWRWQCSKFLRQTFVEWAAKTIDKSYWAGVFYHRQREKGNSHQVAVRALAFKWIRILYRCWKTNTLYDEVTYLNSLKRRGSPLVV

SEQ ID NO: 115364 - protein, 294 aa, unidentified
MSALVCGLDVHKESTYATILDANGKIVNQKRMSNSLVSPYISSFKIDKIGMESSNQIVPLYRQLTKDGYTVSVSHPKKTRYIAEAKIKSDRIDSKAIAELVRLNALPQAYMPDQETAMLREKIRRRAFLVRERVRLRTKIKSLLTYEGIRPSIEHGLFTEKGVEWLHSLAVEPVESYLRIIQPLDNEIKQLSKHLKELAEDDGDVKLLMTIPGVGYYTALLVKSEIGDINRFSDGDKLCSYAGLVPSTHASEGTVRHGSITKEGSRWLRWVMVEAAMTHMSTNTIQRSRKHTIE

SEQ ID NO: 115365 - protein, 344 aa, unidentified
MRELYYIGLDVHKKSISYCIKRQDGAIIDQGTIEATRTALTAWAAAIEEHPWVGALEATLFTGWIYDHLKPFARELQVAHPAMLKAIACGKKKNDRLDATKICDLLRCNLLPRCYMAPPKMRELRRVLRYRNLLVSEAVRMKNKISGLLMEVGEPYNAKRLHGRKYFYSHLDSLRDTPESVIELLAITRGSLEMFDRLQGELLRGLRSHPLLRARVELLQSIRAVGEVTALTWALEIVEPERFGALSRVVSYSGLCAAQRESAGKTQRGPLSKQRNKHLQRVLIEAAKLAPRWNPQLREVYERACERGPRNRATLAVARKLAAYLWAVDTSGRPFVPRVEDEAA

SEQ ID NO: 115366 - protein, 467 aa, unidentified
MFAPGRRPGRPAKTRPPFVVLDPHAAGIDVGATVHWVAVPPGTDAEPVRSFGTCTADLEELADWLQACGVTSVALESTGIYWIPLFEMLESRGLVVRLVDARQTRGLPGRPKDDVRDCQWIQRLHSCGLLRGAFRPDDQVVVLRSYLRQRQMLITCASDHIRHLQKALEQLNVKLPEVVADITGVTGMSIIKAILAGERDPARLAKLRDQRCKQDEQAIARALYGNWRAEHLFCLRQALELYEFYQQQLAACDRQIDAQLQTFADQSAGAPMPPRPAGKRKMRRRYKGNVPGFDARARLYRMSGVDLTQIEGVEEGTALVLLCEIGLDMNRWPTEKHFCSWLGLCPQHKISGGPVLSRKVRPGVNRAAQALRLAARSLEHSLSALGAYFRRLKARLGAPKAITAAAHKLARLVYSLLKHGQAYLAKSLEEYEREHHERQLRNLRRKAHELGYKLVQPGQVATAPMPA

SEQ ID NO: 115367 - protein, 414 aa, unidentified
MEKQWNIVCGADIHKKFLIATILSRSGTKKTKRFGMTLDELLNFKNWVIENGCEQVAVESTGTYWTPIHAVLEGSVGFIVGNAYKIKHTPGNKNDLADADWIAELCLNGMIEPSRIFPKADRDIRRLTRIREGYVNDMTREKNRIHHALDSCGMKLSAVLSDIFGKTGQSILDGLLEGRNIDDILKGINLKRIKATAEEIKNAIKGSLDFTQILLIRGSLEQMGAIQKRIDELRKEIKERIAYRKEDLKVAMSIPGVGFTSASTLLAEIGDINDFKKPEQLAAWAGLVPSVYQSAGKLITGSITKHGSRHIRWIRVQVARVIARGRNSKLKRFFLRVKAKKGSNVAVVALARKVLCILHHLLINKEMYKEDGINKKVKVDVGKEFPQQEMNLEEMITYIVRAGYEVRKGSEGGG

SEQ ID NO: 115368 - protein, 445 aa, unidentified
MSNGSGLSRGDRNRNARLARLRELVPLGNAILGIDLADDKQAAVVTDHDSRVIARRRVSARAWELGGLLDWAVVAAAGAGFASVTVACEPTGHRWRVLDQLAVERGLALVCVQPLLVYRAREGEDLTWDKSDPKDAVIIARLAAGLRCYEPERADAVWARLRHLGARRSALIADATAEVNQVRDLLECAWPAVLAAAGVPFRSATWRAALAVTLDRCAGDLARVRRLGPARFESAVRRELPRWGARRPCLRIIRAVFAALADPAGVRVHRPGALERARLVLGDWRETRARLADVEARMVAVLDDLGLTGLVTTIAGLTPAGAAAILAETGDPARFTSPRALVKHAGLCPRDNASGGYQGKTSISGRGRPALRVAAWRAVWAALPNNPVMAARFAYLTNRDHNRLARQQARTACAAALLRWIHVVITRRIAWDPAIAGRTPPCRAA

SEQ ID NO: 115369 - protein, 361 aa, unidentified
MGRQLASSSVVFKALASFLGAERGRTMQVSKQTRWVGVDVSKATFDVAFAPPGTRKGLHHQFPRSRDGCLACLDWVNNQIPGEEWATFVMEATGAYSRELALWLKALDPGCRVSIAQPVQVHYFAKFLGRSNKTDARDAMLLAEFGEQRRPGLFRPMSPAYVQLRALTRERSALVKASVSLGNRNETLSESTQAQAIRERMLAYHQKAVAELEEAIADLLATTPQLKQDYKRLQTVPGVGPVVASTLMGELGDLRDFPHPKALTAFVGVVPAVHDSGSSVHEPAHMTKHGSSRVRQVLYLAAMAAVRGKNPLATSYQHLLEEGKPPMVALGAVMRKTLVLCRAILVADEDFDPNHLRSQPS

SEQ ID NO: 115370 - protein, 346 aa, unidentified
MSESYAGQQIVGIDLHRRRSVIVRMTETGEHLETVRILNDRERLAAVMAEAGESPEVVLEATYGWYWAADALAELGANVHLAHPLGVKMFSYRRVKNDERDAADLADLLRMGRLPEAWIAPPATRELRHLVRHRAKLVGLRSNLKCQVHGVLAGAGVQVPMSDLFGLQGHQLLTKARLSPAERARVDSALRLVTALDFEVELFAKLVAGRLRLDPGYLAIQAIGGVGPILAAVFVAEIGDVSRFAAPAQLASWAGLTPKHRESDTKVHRGRITKQGSKLVRWAAVEAVQRVGAHTRLGQIREQVGERRGRNIGVVAAARELIVLVFYGLRDHHIRCLTQPSPSPAA

SEQ ID NO: 115371 - protein, 366 aa, unidentified
MTNNNITWVGMDTDANKAEVALYRGWETEAAARFTVEMDSKGIKKLIERLKRESNEVRTVYEAGPCGYPLARRLREAGIHCDVIAPSLIPQKPGDRVKTNRRDAANLGRLYRAGELTVIHIPHESDEAVRDVTRAREDVREDLTRRQHRLSRFLLRHGYRYREGDAWTQKHWAWIGKIRFDDANLQMVFAESIRAIEQSREQLKTYDARVEEVAQQAPYAAKVERYKVLRGVRTVTAMTIVAEGADLRRYATAPQFMGSTGLVPSERSTGERERRGRITKTGNAHLRRVLVEAAWHYRHRPISGPQVKRRRKGQPAALVTIAERADQRLHRKFRKLVDRYNKKPAIAAVAVARELAGFIWAIGQLD

SEQ ID NO: 115372 - protein, 403 aa, unidentified
MNSVGIDISKGRSTIAVMRPFGEVVISTFEVCHTDSELSALARRLKSLNGETRVVMEATGNYHAPVAKLLHDAGLYVSVVNAKLVHGYGNNDLRRVKTDRKDAVKLANYGLDRWLTLPRYVPEEDTRLLLKNCYRQYRQYSKVQTVLKNNLISLLDTVFPNVNRLFSSPIRGDGSEKWVDFVAEFWHCRCVSEKSQKAFTNKYQRWCRKHGYNFSEAKAHTIHADACGHIDVIPKSETTKLLVEQAVAQLRATSVALTALKREMLTLAVQLPEYPVVMDMFGVGPTLGPQLIAEIGDVRRFYSKKALVAYAGLDAPPNDSGDVTGRHKSMSKIGASSLRRTLFLVMSVYLQNAPLDEPVYQFMDKKRAEGKPYRVYMMASANKFLRIYYATVKAYLESLEHTA

SEQ ID NO: 115373 - protein, 371 aa, unidentified
MNTIIYVGMDVHKESYTLSCYSFESDEVKYQQKMKPDYKMVLKYLSQIRKRYPEEIEIVCGYEAGSLGYTLYHQLTECGVECKILAPTTMANIDNKRVKTDKRDSGNIAKCLAYRTYSAVHVPTAEDEAVKEYIRMRDAQKKSLKSIKQQILSLVLRQGCCFEDGKSYWTIKHVNWLKSLDLGGLLQESLSEYLITYDYLTDKIIRLDQRIAELAGTESYREKVGKLQCLIGVKTHTALSVVVEIGDFKRFSGAEKLASYLGLVPGEDSSGGRQNRLGITKAGNSQVRRLLVEAAQGYTRGQIGHKSADLKRRQHGNTPQVIAYADKANERLRRKFYRMTLKNNTNRNVAATAIARELACFMWGLMTDNTA

SEQ ID NO: 115374 - protein, 447 aa, unidentified
MPGEKLPNRLPACVIGVALYWLASHRVPCREWLKRGLPKARSSGAFPHGPHTPETGRTTLVAVIIGMDPHKRSATIEILDPTGKILATGRYDTDNTGYAAMLTAAMQYGDRVWAIEGCNGIGRHIAHRLVHDGETVIDVPAKLSAQIRVFATGNGRKTDPVDAHSVALAALRSPNLRRVHADSELIALGMLADRRDELGRARTDTVNRLHRLLLELLPGGAKKFLTAMQARKLVASVKPRDPAGKVRRRLVVELIGELEAIDRKTKAADKELRQLVAERGSTLTELNGIDAVGAARLLADVGDIHRFRDRDRFASWNGTAPLDASSGQQQRHRLSRAGNRKINRVLHTMAIVQLRRPSTGRTYFDRRRAQGKTSMEAMRALKRRLSNVVYARMLDDQRRRETASPGGQSGATTDSNATGSTPHTGTSDKPQPGLTANQNSPDLQPMC

SEQ ID NO: 115375 - protein, 362 aa, unidentified
MRIIGCDLHARQQTLAMLDTATGEVVNQTLAHEGESVREFYSTLPGPVRVGIEATGSMKWFLLLMEELGIDCQVGHPATIRAAEPRRQKHDRRDAELLLKLLVENRFPSIWQPSKELLDLRALLLHRHQWVRLRTRIQNALQAIALANGLRRGSSLWSESGQAAIASLPLATHTAQRRSELQAMYARFEAEIEQLNERVLERAGERPTAGLLMTHPGVGPITALATDVFLGDPKRFRDGKALASYIGIIPRENSSGGRQRLGGLTKQGNPLLRFLWCEAAAHAVRRDPELRQFYRRKLVQKGLGKARVAAARKLGIRLWIMLRDQIDYQEFCRRGQMQQKSGEACAGMPGPRYGAKSHRPID

SEQ ID NO: 115376 - protein, 414 aa, unidentified
MVVWWVQRPTTNTEVVVPQQLWAGIDAGKSEHHCVVVDGDGARVLSRRVANDEATLGELINAVTTLADGGDLTWAIDLAGGGAALLITLLLDASQRLLYIPGRSVYYASGSYRGDAKSDAKDAAIIADQARMRRDLQPLRPGDEITVELRILTARRADLVADRTRAINRLRAQLLEYFPALERAFDYSNSKAALILLTGYQTPDALRRAGAARLVAWLQKRKARNADAVAAAAIEAAHAQHTVLPGQDLAADMVARVAQEVINLDTEIASTEMMIEERFRRHRHAEIILSMPGFGFILGAEFLAATGGDMSAFDSADRLAGICGLAPVPRDSGRISGNLKRPRRYHRRLLRTCYLAAQSAARTDPASRAYYDRKRAEGKHHRQAILALARRRLNVLWAMLRDHMPYETSTATAA

SEQ ID NO: 115377 - protein, 327 aa, unidentified
MYLCILDPQGEILLHRNMPCTPELFLKAIAPYREDVAVAVECIFTWYWLADLCAKQNIPFVLGHALYMKAIHGGKAKNDKIDAHKIAVLLRGGMLPMAYVYPALMRSTRDLLRRRMHLMRKRSELLTHIQNTNSQYCLPQFGKKIAYKANRQGVAEQFTDLSVRKSMEMDLSLIDHYDKLLTEVELYITQTAKVHDVNAFHRLRSVPGIGKILALVILYEIHDIERFPTVQDFVSYARLVKCSKESAGKHYGFSGAKIGNVHLKWAFSEASVLFLRANPAGQRYVGKLTAKHGKAKALSILAHKLGRAVYYMLKREKAFDMNQFFGS

SEQ ID NO: 115378 - protein, 355 aa, unidentified
MNDEKYIGLDVHQATIVVAVMDSTGKLVMESILETKAATILQFLAGLRGTLSVTFEEGTWSAWLYDLLHSRVDKLVVCNPRKNALLKDGNKSDRIDARKLAELLRGNQLKPVYHGETGVRMLRELSRSYLTIVKDLSRVMNRLKAVYRSWAIPCAGRDVYYRRHRAQWLAKIREAGVRRRAERLYEQLEMLQHLRQQARRELLAESRKHAITAKLRQIPYLGPIRVALAVALIQTPHRFRTKRQLWAYSGLALETRTSAEYRFVEGQVRRSKKLLCIRGLNKDHNHDLKGLFKGAATMASVRPGPFQDFYQAALAKGIKPTMARLTLARKIAAITLTLWKKGENFDAEKLKAQAA

SEQ ID NO: 115379 - protein, 529 aa, unidentified
MRGFGAAGRGDRHGIGALCPSVSMVPGAGDHNTGDTLRRDPAWETAYAVVAPAPAAPLTHSFPLILEAAMTPRKDNFPEPHRRSRRARLEVKNPDAAGIDVGATAHWVCVPADRQANPVACFGTCTADLEALAAWLQQCGVTTVAMESTGVYWVPLYELLEARGLEVLLVDARQVARAPGRPKTDAQDCQWIQRLHSYGLLSAAFRPEEQVVVLRAYLRQRDMLVTGASQHIQHMQKALEQMNVKLTEVVSDITGVTGMAILKAILRGVRDPAALAELRDPRCKESTATIARALQGSWRPEHLFALEQAVALYEFYHQQITACDRAIEAHLRTFADRSGGQALPERPHRRRRREANEPRFDARARLYCLCGVDLTAIEGIEETTALVLLSEIGTDMSRWPSVKHFCSWLGLCPQHKISGGKILSRRIRRGANRVKRALRLGARSLHHSQSALGAFFRRIKARHGTAAAITAAAHKLARLVYSLLKHGAAYVAQGLAEYEAKYRERRVHAVTRQARELGFQLVPAAAAGD

SEQ ID NO: 115380 - protein, 392 aa, unidentified
MVVSVGIDVSKDKHDCFILSSEGEVLADVFTIPNTMDGFNCLLQRIQDCTGPQDKIKVGLEATGHYSYNLLGFLLDNGLTTCVLNPLRTNLYRKSLSLRKTKTDRVDARTIASMLLSDAGLKPYTSTAYHNEELKSLTRYRFDKVKERAKLKSSIARLVCILFPELEKLVPSLHIASVYALLEEFPGAKQVASAHLTRLKALLETASKGHYKRDMALEIRNAAKNSIGSQMPAKSLELQHTIRLIHELDAEIEEIEEQIQSIMDELHSPITTIPGMGFRMAAMILAEVGDFSRFDSPDKLLAYAGMSPSTYQSGQLKNCYPHMEKRGSRYLRYALYNATKYVCHWDTNFAAYLARKRAEGKHYNVAISHAAKKLVRLIFAMEKSGSPYHLTV

SEQ ID NO: 115381 - protein, 345 aa, unidentified
MVAQPADLVIGIDTHRDTHACALVGALTGEVICEFSISADPAGYRAALHRARGHECARRTWAIEGCGSYGAGLCRYLAGAGEHVVEAGLPTPGVRPKSDALDAVRAARSVIAHGQAAVPRAGGPREVLRVLMLVRDGAIDIRRAGLCQLRALIVSAPDGLREPLRGLTRQALLRRCAALRPGAHADPVMSASALAMRALARRVLDVSAEARELERAIHEQVTQIAPALLGELGVGPINAARLVLSWSHPGRIRSEAAFAQLGGVAPIPASSGQVVRHRLNRGGDRQLNYALHAIILVRKRADPATRAYIERRVSEGKSRRDATRCLKRFLARHLFRLLEATATTT

SEQ ID NO: 115382 - protein, 354 aa, unidentified
MEKIQKNNPFRTISLGLDVDSETVMVVALDLSNGSIEFEGRLHYDEASWHKLLARFADCRVWACYEAGPVGFGLCRMLCKLGVECEIVAPSAVPKSAVSKQSKTDRRDALMLAQLFVNRPRSFVRVPTEPEEADRQLIRTRYQLMKDKVRVMTRIKAQLLNYGIRPPHRMALWTKSYREWLRTFATPYPSLRISFDCLLAELDGIERQLKIVTEAIVALGETPVYRDRVQRLLQIRGVGILTAMAFLLEVFRPGDFATVEQLACHLGLTPCEHSSAQSYRRGHITHWGSPLLRKHLVEAAWIWVFRDANAGNKYRSIRAGKERKRAIVAMARRLATAMWAMLVKEQDYAYRWAA

SEQ ID NO: 115383 - protein, 409 aa, unidentified
MMKQNIIFGIDVSSKSSTVCVVIDRIKQGETFKITNDSFGYQDLLDRLNQYLITPLVVFEATGVYSLSLQAFLEDYHIKYLKLNPLKAKKLMDNNLRHNKTDKVDAYRLALIQFNAPQKLRAPQPKEYHELQNASRYYEELAQALIINKNQLHRNLQSAFPQIESILSTSSGRVYWTIVSLFPHAQYVLNHNESQVFQSLLAISGIGRQRAHYLTTRLYALARQAYPYDNESSITIRAIQRNIANLLSLSAERDNVINYMEKLAMQANARSLTIYESIPGIAKTTAVRLVAELGDLSRFDTSAQIDAFVGIDPGRYQSGEKDSHLGITKHGNHLARKILYRTITQMETVKATQPCHITDYYDKKKRSSNSRGYKKIAIASVHKLIRTMFALIKHDQLYDYNVATHNQRL

SEQ ID NO: 115384 - protein, 357 aa, unidentified
MKSQEIKYVGIDCGKKTLEVIRIGDNSLHQRQQFSTTEIGISKLINWLNPNDVVGLEAGSQSFRIAKSILNKGIQVIVLNPGDLATIYQSLKKTDKEDSLKIARLIQRFPIEELPTVPIPNDEEEDNRRLCTEQENWTRQLTQSKNRLHSLFTQAGLTHITKKHLRTKANREISVALLPSRYQKEAERILKVLDLVEQNLKLIEEEIKEALKKNKAYAQTIMSMPGIGMITSLAIMSYMGNCKRFSSAKQAAYYVGLVPRVDISGDSAYYGRIVNRGCHSIRRVIVQAAWSLVRCQYGGKIKEFYQRLYPKKGAKKSIIATSRKMIEILYTMIKTGELFDSMPEKVLNRKLTQYGLM

SEQ ID NO: 115385 - protein, 332 aa, unidentified
MNLVSTLGIDLAKNTFSVHGVDAKGAVAVRRTVSRSQLPELVAQLPPCLIGMEACSGAHEWARKFGRFGHTVKLMSPKFVAPYRKSGKNDGNDAEAICEAVTRPNMRFVPVKSVEQQANLGLHHVRQGFIEERTGTLNRIRGLIAEFGYVLPNGPEHIRRGIPAIIDTLPARVARCVRDLLEHAERLAAKVLEYEREIRLGVRDNELARRAQTRQGVGPITASALIATVGNGHDFKNGRQFAAWLGLVPCQYSTGGKTRLGHITKRGDPYLRTLFVMGARSVLQRAARETDPLSRWARAVQARRGYHRACVAVAAKNARVAWALLAKQAVAA

SEQ ID NO: 115386 - protein, 393 aa, unidentified
MYLVGIDIGKLKHSFCLLEKETGEILVEPVFFKNNRDGFNALLSSFKHLPQKDILIGMEDTGHYNLALLKFLLDRNYQVALINPIATNLTRKMQGGISKNDKLDTLTICDVLSSSQRVKSYRISKYNSFDLYEQKLLTREHHNLKEEENQLSNRLQKCIDVVFPEFNSLFKSKYGIVYMNVLKEFGSADAIAHADIRTIRKCFDTGRGKQIALTAEELKEAARNSIGFPSSSEATQIKHLVARIELIKEQIAEIDKKIEEFSIQNNSPILSIPGISHFSGTSILAELGDIHNYSKPSQIIKFAGVAPLTYESSQFTAQHTAITKKGCKYLRKTLYQIITPVIQYNPVFRKFYLLKIAQGKGHRCAQGHCVRKLMRVIYHLLSTGAQFDPALLR

SEQ ID NO: 115387 - protein, 359 aa, unidentified
MKNQRTSVGLDVHVRSVVGCGLDGETGELFERRLTPDHREILEWVQRLPGPMAVTYEAGPTGFVLARLLVAAGVVCVVAAPSKLQRPSGDRVKTDTRDARHLARLLHLGEIVEVTIPRIEQEAARDLVRAREDVRGDLMSARRVSKLRLRQGIVHSGGKAWTGRHELWLRSHTFSTPGRRLAYDAALDAMVSTVDRRDRLDKAITEMAADSVFTAVVTRLGCLRGISTLTAFGLAVEIGDWDRLSGRSIGAYLGLVPTQYSSGSTRSQGGVTKTGNGHARRLLIEAAWHHRPRYRPGRDLRRRWDVASPAARARGEAANRHLHNRWIAFDERTKRSVVANAAIARQLAGWCWSLAVLDD

SEQ ID NO: 115388 - protein, 328 aa, unidentified
MKLQHIIGADLSKESIDLASDQLQTHLKIANTVNGFGQMLKWLRQQKINCSDVMIVMEHTGLYSYHMEKFLYQHQISFAKVSALAIKRSLGLVRGKNDKIDAQRIARYGFEKKDVLVPAKKPHEAIKRLQMLHSTRNRLVRQRASLKCAVKEYKSVTKQSDLIIESQLILIKSFSQQIKKIETQITELITKQQEVNQNFQLLTSIKGVGEVVATAAIIKTGNFTRFMNGRKFACYCGTAPFEHSSGKSIRRKTRVSHLADKQMKTLLDQSAKTAIQYDKELKSFYERRLEMGKSKKSTINIVRNKILYRMFAVIKRQTPFVENYLQTT

SEQ ID NO: 115389 - protein, 354 aa, unidentified
MSQQLNTTIAVIGIDIGKNSFHIVGLDKPGAVALRQKWSRGQFEARLANMPPCLIGMEACVGAHHLSRKLKALGHDARLMPAKYVRPYSKGQKNDFRDAEAIAEAVQRPTMKFVATKTTDQLDLQALHRVRERLVSQRTGIINQIRAFLLERGIAVRQGQRFLRAGLPTILATPSDVLSPRMVRIIEGLASDWRRWDERIEGLSSEIKAIACQDSSCERLMSVPGIGPIISSAMVAAIGTGDTFSKGRDYAAWLGLVPKQMSTGDRTILGKISKRGNRYLRVLFVQAAWVVLIKPKTWQRHGLKPWIEAAKKRLHRNVLAIALANKLARIAWSVLARGRGFEASTINDTATQPA

SEQ ID NO: 115390 - protein, 416 aa, unidentified
MKKHNNSGKKSEPTSKRTKSRGPVQRDTKEVLAELVGKLKEKLDPTKVAATSAGEKHQRGELRPNLDRLTVGVDLGDQWSHYCILGLEGETLAEGQLRTTQEDLATFFQGLNGARVVVEVGTHSAWVQEVIRGCGHEVLVANPRLMDGSKRRKRKNDRIDANKLARLGRVDPESLYPIQHRSREVRQDLVMLRARDALVAARTEIINTTRGLVKSMGTRLPKCSSRSFAQKGEEAVAVEMRESLLPLVRLAATLSADIKEYDKKIETLGQEKYGHTALLRQVKGVGPITALAYVLTLENPQRFAKSRDVGPYLGLVPKQEDSGESQPQLGISKAGDTMVRKLLVGSAQYILGRFGPDTDLRRYGLRLCECGGKNAKKRAAVAVARKLAVLLHRLWVSGEVYEPLHYAMSAPIAAAA

SEQ ID NO: 115391 - protein, 339 aa, unidentified
MEEVTTVGIDLAKNVFSLHGVDEAGKTVLRRTVRRERLVETVAALSPCLIGMEACSGAHEWGRRFQQHGHTVKLMAPKFVAPYRKSDKNDGNDAEAVCEAVSRPSMRFVPVKSTEQQALLAVHRVRQGFVVERTALINRLRGLMSEFGVVLALGSVTLRRQAAQAAEQLPELARGAIGDLLEQLRVLDERIAKYDKQIEAQAGLSEPARRLMQIRGVGPTTALAIVATVGDAREFKNGRQFAAWIGLVPAQHSTGGKSRLGHISKRGDAYLRNLLVQGARSVLQVAGAHQDRISRWALELQQRRGYYRALVAIANKNARIAWALLAKRESVRRAQPNTL

SEQ ID NO: 115392 - protein, 392 aa, unidentified
MIYAGVDIAKMDHVIGAVDETGAEVARPMPFKNSEAGFERCVAWLESVAESEDGVFVGMEATGHYWMACFAYLTAAGYRVCVVNPMQVRAMRSLKGMPGVKNDRVDAWLIAETLRQGDYDETRLATDEVQALKQLTRYHQGLKQELATVKTQAICVLDAYFPGYAGLFSDMFGSASLKVLAECPTPSEVERRRAATIAKLLSEGSRGRFGEAKAAQVKAAAKSSVGIRLGEDAASFQLKTMVSQIEFLNRTIAKVEREVAALLEEIEPNITTIPGVSTTTGAQIVAEIGDVRRFGSAASIVKYAGLNSGVDESGKFSAQGVPITKHGSPYLRRSLWLAANRARQHDDRLREFYEKKRREGKPHRVAVTAVARKLCHIVYAVMRDGEPYDPAK

SEQ ID NO: 115393 - protein, 321 aa, unidentified
MDYFVGIDIAKRFFDAAVKVRGKNRHRQFPNTAAGFLKFLDWLESLEITTAQFCMEATSTYWERLAYFLSDRGDEVSVVNPACIRKFAQSALKRTKTDKVDAIVIGEFCKAMKPALWIPPAPEVKELQGLMRRMHSLAKMRQQEKNRLAMDKDEEDVTASVERTLKFLDAEIDRVQKKIEKVFAKSEQLQRKRELLVSIPGIGDETAKVVLSEVPALDMFTNARQLAAYAGLTPKEFRSGDMIRGKTRLSKTGSGRLRSALYLPAIVAKQVNPVVREFYERLLKQGKPPMLAVCAAMRKLMHIIFGVLKSDKPFTAALSTA

SEQ ID NO: 115394 - protein, 406 aa, unidentified
MEGPIITVDVSKGSCHYQPFIENGHPMRKPKQLSATIDGFQKLGQTIKDLEAKTEREDIPVIFEATGVYHRPLQKYLEDHKIRYYIISPLLSATYRKTDLHSNKTDALDCAHIAKAYYCEKELRQYQAQPQEYKRLYQLSRIYESELVHLRKRKVSLRSMLDIIYPRIDKTFKGNQNLYDPIPMEILKRYPHPSLLLSHREDTIVKTVGHRTGHLKGYTERIVHKIYEKAKECYSGCDIDDIEVINLPRLIENVQEQKKKCDSLLKEMIEIARTCPYFASVVSIVGIGENLAARIIAELGDVNRFDNRAAIVAYAGLNPKIQQSGDIDGLHLKISKKGNKHLRCLLYLGAQCNYRLRKEDPLYEFTKKKRQQTQCPLSSKAAYTASAHKLLVIIYSLCKNGTLYHS

SEQ ID NO: 115395 - protein, 319 aa, unidentified
MNKSTLFFGIDISKDCFDVYGDPLGHKSYPNTKEGFKSFLKVLNTASYCVMEATGCYHHRLSMFLYEKGIALSVVNPVIIKRFIQMKLKRVKTDKSDAFMIYNYACEQALEQWQPEATYIVRSKELLSLMQTYSRQSTALKNKLHALENRGHSKSVLITSIKRQLRHLKKERLLLEDELETLIKSNEPTLFSRLTSIPGIGKKTALLMMVSTSNFKAFDSYKQVSSFLGLAPSERSSGSSIRGRSRISKTGDGLLRNHLFMCSFTACVHNPQCKALFDRIVAKGKSKKLALIAVCNKLIKQAFAIAKSGLPYDPNYALN

SEQ ID NO: 115396 - protein, 415 aa, unidentified
MKVVFPTCCGVDVHKTFLVATIITTPADSLQPNYQKKRFSTFNSDLNRCADWLLEHNCLDVCMESTGKYWVPVFNILEKRGIRVVIANPKWVKAVKGNKDDTKDSKWIGDLFRIGLVKSSFIPELNIRILREFLRYRYKLVSMKSSEKNRFQNAFTVCNVALDSVVSDMFGKSATAITDYLTSDESFDPDHCVSLLQRSLKKKAEKVLESIEGYSISDEQKARIKIIREHYDFIEKLIAKVDTCVNEMVEKYEGEINLLCTIPGIDRNSAITIISEIGTDMSQFGSSKRLCCWAGLTPGNNESAGKKKSVRISRAGVYLKPALVQVAHAAVKDKANPYYALKYERIAKRRGKKRAIIAIARMILTAIYTMLCTGEVWTPVDLFKIDIPEHLKEQQLAKAIKQATRFLEKQGLTVA

SEQ ID NO: 115397 - protein, 353 aa, unidentified
MITIGVDAHKGVHVALALDEAGQEFGQWQGLNSAAGWQAISEWAASVGSPRQWGIEGAWGYGRNLAQHLVAVGETVYEVNPRWTAMGRRRARKPGKTDRLDARAVALLVRQEASALPRVHAEDDTAVLDLLTSEREAAIAESIRLRNQIHAQLLQTDPEYRAYLPTLKSQAALDVLENYTAAGSNPLHTQRAAAIRRLTQRLRLALSQAEELAEQIRDLAARRFSPLTNICGINLVTAGTLAGILGPGDRFATDAQLAAYAGVAPLEASSAGLVRHRLNRGGNRRLNAVLYRIVLTQAHHLPAARAYIDRRLSEGKTRREAHRALRRFVIRAIWRLWQECQPAQTTALVEKAA

SEQ ID NO: 115398 - protein, 403 aa, unidentified
MKEFNAEQVQVQVETVSALGVIQEAGKAKCYAVYVGLDVHKETIAVAIARHGREEPEYRGEIAHTRKAVEKLVERLSKDFGAALMLFCYEAGPCGYGLHRQILGLGHDCEVVAPSLIPKKAGERIKTDRRDALKLAKYLRGGDLTGIWVPDSEQEAMRDLCRARTDMKSQELKARQQLGAFVLRHGHHWPAGKKRWTAAHYNWLESLKFIHEWQQVVLQEYIEAVKAAGKRVADMMGQMLRVLPQWRLAPVVDGLTALRGIDKLSAMTLLAELGDISRFQSPKQLMAYLGLVPGEHSSGGRRRQGAITLTGNSHARRTLVESAWSYRFPARQTAHLKRKAVAASDEAKAIGWRAQKRLCGRYRTLTQAGKNTKLVCVAIARELAGFIWDIVCREMPRLKAVAA

SEQ ID NO: 115399 - protein, 417 aa, unidentified
MIYVGIDWADKNHWVFITDDTGSKLGSFSIENSPEGVQELFSRIRKVVKEQNQAIFALETSKGLLIDSILDAGYTVYPINPKAVDRYRDRYKVSGKKSDEFDALVLANILRTDRNNYQPLLPDSPLTRHLRTLTNEYKFLLRLKTKLSNQITSCLKDYYPVALSLFCKLGQQVSLNFLKKFDSPEAFEKLTKSKIKRFLSKNHYPGVEKKAEEVYHLSQEPQFNVEPSLASAKSLYMLTLVKQLETLLVSLETFEKEIEKLLNQHPDKDIFLSLPGSSTITSAKFISEFGDNRNRYKKISSVQAEAGTCPVTKQSGNQRFVYFRRACRKSFRDAACRFAFTSMKQSSWAKERYERYVGAGKKHPLALRCLANAWLEIIFPMWKNRTLYSEQRHLLKMVVKEQNLPLIKSGALVSVYY

SEQ ID NO: 115400 - protein, 352 aa, unidentified
MYYVGADLHKEQTWFYVMDENGTKIDSKSIPNSQDSLKNYFATIPTPFTLAVEATYNWYFFIDMAEKFAQTAYLANSYELKAFAKRHKKTDKIDARLIADILRKGFLPKVFIPNQSIRQLKELLHHRINLVRDRSRNIFRLKNTLDKLGADSSGDFTTVKRLQMIPVKTLPEHSQYVLTGYIEQIIQLSQRILKMKTYLRNELLEDKEIQNLITIDGLDYFSAALIKSEIVDINRFASFGRLCAYAGLAPKVSQSGDKAAYHGALMTNRRKDLQWILLETVFHFIRGSSERMSRYEELKIRKGANTAKVIMARQMLKVIYHVLKEQRPYYQDVTVTQEKQIQSVAAAALQGV

SEQ ID NO: 115401 - protein, 330 aa, unidentified
MKKYNYFFGVDVSKKTIDITCIIDQEMSHRQFTNDPEGMQLLLQWLKELNIVLGQTLFCMESTGLYCFPLTQFLTANEIDIWIEHAARIKKATALDRGKNDKVDSKRIAVYATKNLDQLRLWKPMDTTLQKIKHLATLRERLVDTKKKLVIPIKEFEEMGNTAMAKMLGKTIKHSLAALDKDLKNIETKIIEIINEDENLKQLYKLITSVVGIGFVTAINLLVYTNGFTVMKDARKLACYCGVAPFEYSSGSSIRGRTKVHFMANKKLKCNLHMASLSAVKLDADLKMYYERKVAEGKSKLSVLNAVKNKLLARVIAVVNKQELYVKKAA

SEQ ID NO: 115402 - protein, 337 aa, unidentified
MAKQKALRRAGVDVSARWMDVSRDAADEAVAVRQCANTAAGQRELARWLTRGGRRAQVVLEATGLYSLDVALTLQRTAGIEVMVINPRASKEFAGAWGQRARSDASAAAVLREYAARMPFTPWTPPPPAALALRAIMRRVVALIEMRVQERNRLHALSATEALPPSVRADVRQHLGALGRQIARLECEARALVEPAPALRAGYRHLCSVKGIGRRSALLILSEVAVLPAELSVRQWVAHAGLDPRPMRSGSSVHPPVHISKRGNVYLRRALFMPALVAVRRNVAVQRFATALTTRGKAPLAILVAVMRKLLHAIYGMLKTDTDFDGEKFRRSVLTAA

SEQ ID NO: 115403 - protein, 321 aa, unidentified
MNYVGIDVSKATFVVAYSSAKGSETKTFENTTKGVHNFIQTITPEENHCVLEATGNYSMLLVYLLSKAGFVVSMENPLKIKNFARVMLSVVKTDEIDARMIAMYGEKMNPAPFKLRSDSLMVLKQKRTVLRQLKKQLNANTNLQESMEALPFIDSVCKKILDKTVKFLRKQIKEMEEELSSLANIEYKKQMDLLTSIKGIGVTLATALIVATGGFTYFDNAKQLTRYLGLSPTYQQSGTSVNRKGHINRNGDSYLRSQLYVAAFSSLRCNTECKACFDRLRANGKPGKVAVIAVANKLIRQAFAVVTQGKEYVDGFISAKK

SEQ ID NO: 115404 - protein, 416 aa, unidentified
MTDHSQWYAGVDWASESHHVFLADSGGKKIGERIFKHGGEGLAAMAAWLMTTSSAADPAHIQIAIEVPHGPVVETLVERGFMVHSINPKQMDRFRDRFTLAGAKDDSRDAEVMASSLRTDPRCYRLLARADPVIIELREWSRMAEDLGTERNRLTNRMREQLWRYFPAMLELEGDLSAEWLLDLWEATPTPAKAARIREKTIAYILKRNRIRRFDAAHVLAVLRMLPVQVAAGTTEAASAHIASLVTRIRLLNRELGQAHRQIDRLTTCLIPDEDEAEPGQRKQHDVEILASLPGVGRIVLATLLAEAFDALQRRDYAALRSLTGVAPVTKRSGKSCIVLRRQACHDRLANAMYHWARVAVQHDLKSRAKYAALRSRGHSHGRSLRSVADRLLNVACAMLKTGTCFKASTNVEIPA

SEQ ID NO: 115405 - protein, 410 aa, unidentified
MHYKQNYVYVGLDLHKNTHTAVIIDCWNEELDKIVIENKPSDFTKLLNKVNKIAGDLTPVFGLEDVHGYGRSLATFLLEKGQVVKEVNSALSYSERMSYATTQKSDGWDAYCIASVLLRLLDKLTDANPQDLYWTIRMIVNRRDAIVKSATTLTNQLHGQLCYNFTSYKKFFADVNSKTALVFWENYPSPKYLNGVTVEKLAELLRKASHNSCSTRKANEILEIVESDGDTTRQYQESRDFIIQSIVRDIRFKGEEVKKVEGEMAKLLKLLGYKLDTIPGIDTVTATNLSAGIGDINRFRNADKLARFAGIAPVNFSSAGKGKDKKSKQGNRELNGTIYFLAVQQIQVAKGSKLPRNPVFLEYYKRKISEGKTKIQALVCVMRRIVNILYGMMKNKRAYEMPVLPLKEAV

SEQ ID NO: 115406 - protein, 420 aa, unidentified
MERVAQEEFAALVGLDWADAKHDVCLQAPGTARREFLSFEHRPEAIDAWVQTLRTRFNGHPVAVCLELNKGPIVSALRTYDFLVLFPVNPFTVAQYREAFTPSRAKDDPTDAELQVELLLKHRDKLKPLQPQSPAMRALAQLVEHRRRLVGDKVRCTNRLTSALKNYFPQVLQWFPEKDPAIFCDVLSRWPTLKAAQLARRSTLEGFFRAHHVRAADVIDTRLQAIKSAMALTTDDGVITPHVLLVQALIAQLRVTLQAIADFDKAIAQHAQDHPDFPLFDALPGAGAVFAPRLLVAFGEQRERFTSAEELQKYAGIAPVTERSGKKSWVHWRLQCPTFLRQTFVEWAAESTRHSFWAQVYYQQQRDKGKAHQAAVRALAFKWIRILSRCWQERTPYNESVSLQALKRRNAPLLHNLAKE

SEQ ID NO: 115407 - protein, 524 aa, unidentified
MRRVGIDLALKAPHRAVIYDGAMPAGRPFRVERNRAGIDELVRRATAGRDDPCEFIMEPTGLAWLPLAAELARRGHRTYVPKPQKTAALRKFLQQFAKTDNADAKAQALVRHVDPSGVHELRVPTAEETTLRLCVKQRARYVVEAAKAKGRIQSWLVLANPKLAEAFGGELFSETGTVFLRRYVDPFAVRAKGKGELQRLWRLHARGASAAEQVERVFAACLEACALYESLRAEGKLPFDYGVLQDLVRRELERIELLEEQVAALDDVIMKTYRRVDPERVLEREVPGFGPTIAAAMEAYGGDVGRFGSAKRFAAFFGYVPRARQTGDKEGKPRQRLTKGGPTLLKQYLFLAAETARRHDPELAYVYERALGRGKHHYDAVCIVAHKLLRKVYALLKLREQARAARAEGQTAPEVAYRLVRPDTGESVTAEQARRWIGEHCPSKTEKLRRNAKKKMAVEAEPQTSSKAPTGTLAQTGSSEDVTTEDFGAPPPKEVASLAAWGKPVDKPVRNSARLQAKSALDSA

SEQ ID NO: 115408 - protein, 312 aa, unidentified
MDAGVIVGIDVSKARLDVHVLPMEEKFAVARDGDGIAALADRLTGLAVAAVGVEATGGFETIVAAGLAAAGLPVVVVNPAQVRAFAKALGQRAKTDPIDAAVIARFIMATRPAIRALPDEETQLLADLVARRRQIVTMIGAERQREKRAPVRVRRSIQRLVKALETELASLDSDIDDSVRGSPAWRDKEDLLASVPGVGKTVARTLIAELPELGTLDRRQVAALVGLAPFTRQSGQWRGKSFIGGGRTSVRAALFIAAMVAARHNPALKAFRDKLVAAGKPKLVALVATARKLVTILNAILRDRQPWRAQTA

SEQ ID NO: 115409 - protein, 336 aa, unidentified
MFQLGIDVSKKTLDLCLLREGVKGRVKTRKLQNDINAVSAVIAWLSKQHCKPEDVHIIMEATGVYHESLAYGLHKAGGRISLANPHRAREFARGMGMLTKNDRVDAYMLACYGALKAPEPWLPPPEEVRHLSALLRRRDALVADSTREKNRLEKYLATDTPSVIAESVEAMIGQLNAEIKRLDSLIRSHLNQHPELKKDFDLLTSIKSVGYQLGLNMLVILRSHDFTTAEQVAAFLGVVPVEKYSGTSVRGCPKLSKIGPPEIRAKLYLASLCGLRFNPLMKAMYERLCLRGKAKMCAIGALMRKLVHWYYGVLKTQKPFDVGYLSSYARSACKAA

SEQ ID NO: 115410 - protein, 350 aa, unidentified
MDTTTPRLASIGIDIGKEVFHVVGFGTDGKIVFRRKIKRLALIETFKRLPASIVGMEACLSAHFVSRALRQLGHEPRIIPAIYVKPFVKGQKNDYNDAEAIAEASLRPNLRTVREKTQDQLDLQACHRVRSRLVSRRTATINQIRAFLIEQGIAVRTGSRALRNSLLAILKNRQDEISPRMGGLIAGLYEDWISLDKRIDTIASEIEKISEKEANCQRLMSVPGIGPLISTAVVAAVGTGEAFERGRDFGAWLGLVPRQYSTGGRSILGRISKRGSKYLRTLFIQAANVILMRPHNWERFSFGTWLLNAAPRLHRNKLATALANKLARIAWSILRNEKTFDINRHEAMAI

SEQ ID NO: 115411 - protein, 422 aa, unidentified
MTDTFSFFVGVDLGAERHAVVVLNAAAEILGRRYFAHNGAEVLELFSWLAKLTDQASPQQIAIAAETPRGSILESALERGHPAFSINPKQLDRFRDRFSMAGAKDDHRDAFVLASSLRTDQHCFRRLQLGDPRLVLLRELSRSQEQLQQNLRRACNQLWSLLQRYFPALLQLSPAADDPWLWSLLQAGPRPATAARLKLPRLEKILAQHRVRRFSASELKALLEQPPLPMAPGAAEALAEPVLLLLPHLELLHKQLAQLSARIDKLIDQLQQDTSFTEHRDIEILRAFPGLGRVFTATVLAEAYLPLVERDYHALRALSGVAPVTRQSGKTELVLLRRACNHRVQHAIFHSANVFVQKDPRAKLQYRRLRAKGKTHARALRGVADRMLNLLFALLKSQSCYDPERRTVPTEPEGTPPPKKNT

SEQ ID NO: 115412 - protein, 382 aa, unidentified
MPAYADPTPTPISADTIFLAFELSGTSWLVALHAPDADKVERHRLSAGVAAEVLGLIARTKARVTRRLGTTPRVACCYEAGRDGFWLHRVLEAEGIASHVMEPTSLQVDRRARRAKTDRLDAQALLRALMAWSRGERQVCSMVRPPSPEHEDERRLSRERGTLLKERLRLSNRIKGLCAAQGIYDYEPLGADRRERLARLVTGDGRALPGRLAAEIGRQLDCFELVLRHLAEVEAVRDARAAQAREEGGSKLATLLRLKGIGPELATVLELEVFHRHFANRRDVAAYAGLAPSPYASGGTSREQGISKAGNRRARKALIELAWLWLRHQPESALARWYRDRVGTATGRVKRIAIVALARKLLVAIWRYVETGLVPAEATVRT

SEQ ID NO: 115413 - protein, 347 aa, unidentified
MTTSSNASTYGLYVGIDIAAISAKVSWLVPAGNPTRAITMEQTPEAFRALQLRLLSTGHPASSILVVMEATGSYWISLATTLTQAGFAVSVINPAQAHHFARALLKRAKTDAIDAQTLAQLACLLQPTPWTPPPQVYAELQQRLAQRDNLLELRQQVRNQLHALSQMPTIIAAVRTRMEQLIETLTQQLAAVDAEIEAALEFDSTWAASAQRLQTIIGIGPLVAAWLLVSTLNFTLCDSAEAVSAYAGLAPHPYQSGTSVHGRACIGHTGNGRLRTVLYLATLSAAQHNPVIKAFYERLRAAGKPMKVARCAAARKLLHLAYAVVTRKEDFDPQYQPQRPQPKATVV

SEQ ID NO: 115414 - protein, 399 aa, unidentified
MLAVGIDISKSKSVAAILNQDGSMHTSPFEFHHTQPELDAFIKYILNSKQSATILMENTGHYHYPVLKAFREAGLPVCMVNAYQIKKFGDMDLRKAKTDKKDAVRIARYALEKSYSLVPYTSMEQKYEDLKFLARQYNQRMLTLKTNKVFLLNLLDETMPGITNILPLTTRTPETSLSVLFINRFKSYDRIKKMGKSRFLDAFEKIARKSRNRQTKTYGLAIYEAALRNITTRGENEYTLAAQDQCLELVCESQKAADSIIPKMQTLAETLPEYAVLRSMAGVGDRLGPLILAEIGDIRRFHSGKALNAYAGNDAPPYQSGTFESHNRHISKRGNAALRKYCFEVMQALKLTRPQDDPVYLFLLKKEQEGKPYNVAKMAGVNKFLRIYYARAMETLKQQ

SEQ ID NO: 115415 - protein, 348 aa, unidentified
MTVYIGVDFHARQQTISYLTTETGEIRQLELLHEDPAKVRAFYEQFAGQRIIVGFESSGYAAWFEELLEELGCEIWIGHATYIRQFAKRRQKNDRRDADLILELLLSGDFPRIHRYSRSTRQMLQQLRYRQRLVKMRTMVVNMLLFMASSRGHSFRTQLQSKRGQARLGQLPLPEPLAQQRDELLSLLAQLDQKITTIERWLEQQTAEDVTVQRLRTHPGIGLLTSICVRYTLEDVGRFATTRKVSAFAGFDPMEDRSDERRRMGAISKQGSRWLRFYLVEAGQVAMRKDADLARVYQRISRRGGHAKAKVAVARRLLVRAFIMLRDEIDYAEFLRRGVAARSSRGSA

SEQ ID NO: 115416 - protein, 345 aa, unidentified
MIIGCDFHPSWQQVCWLDTATGESGEQKLVQASGDAERFYRQVAAPALIGMEATGNCHWLVDLLAEIGHELWVGDAAQIRASYVRQQKRDKRDAVHILKLLVEGRFPRIWMPSSQVRDLRQLLLQRYKLVMIRARVKNEVQHLCLNQGVQRKRKLWSQAGQQVLRELPLKPWAGRRRDDLLKLMAMLDQQIGPLEEAVKAEAQGDKMARLLQTQPGVGPITALAYVLTMGDVGRFPRGKQVASYLGLIPREHSSGGRQKLGAITKQGNRMLRMLLVEAGQIAVRYDPQFRRQYLHRCHQKPKAVAKVAAARKLAVRLYWMLRTQVAYPEIVRIESSPRVPLVGAS

SEQ ID NO: 115417 - protein, 482 aa, unidentified
MKSKPREKANKTTNPTQRYWHDMNRKQRREMMREIQSEDLSLEVVHPDAAGIDIGNESHYVAVPPSRDSQPVQRFGCTTGELKTMANWLKQCRIRTVAMQSTGVYWIAVFDILESAGLEVYLVNARDTKNLPGRKSDVQESQWLMKLHTYGLLRNSFRPSQEIRMMRTYWRQRNDLVQSASRHIQRMQKTLTQMNVQLANVLSDVSGVTGQAIIKSILAGERDPHTLAAFRDPRVKASELQIAQSLEGNWQQDLLFVLKQEQDGYEFCQKQMAECDRQLNQYLEQREDRSHGASLPEEKRKGRLTKKRGNTPQFDLRTGLFRLTGTDLTRIDSIDVITASTVLSETGYDMSKWETENHFVSWLRLCPDNRISGEKIIGKGRLPTNNRATIALKMAASTLRQSNTYLGAQFRRLRTKLGAPRAIKAMAAKLARLVYRMLRYGMKYVDKGADFYDAEHRQQQIKHLKRKAASLGYELTPTPAAA

SEQ ID NO: 115418 - protein, 410 aa, unidentified
MELLHRRCCGLDVHKETVVACLRLLIDGKVTTEVRTFQTTTADLLRLSEWLAANACTHVGMEATGVYWKPVWHILDDGEFALVLANAAHVKNVPGRKTDVNDAMWLAELLAHGLIRASFVPDTQTQEMRNLLRTRKQLVREQSSHVLRVQKTLEDANIKLDSALSDLMGRSGRSMIEALIAGETNPVKLAGLADRRVKASPEKLREALRGRVTKHHRFLLRLHLDQIDALDAAMATLDAEVEANLGPFRIAVDLLVSIPGIKDLGAQVIVSEIGTDMSRFPSDAHLISWAGICPRNDESAGKRRSNRLRKGAPWLKTTLVQCAWAAIKKKDSYLKSQYHRIKARRGPKKAIMAVAASILTAVYHMLKDGTTYQDLGPNHFNRHSADKQKNRLVKRLADLGYAVEIKPLAA

SEQ ID NO: 115419 - protein, 358 aa, unidentified
MYKFMKKFFIGVDVSKDTVDVSFFDDDRMKSPEYLAQYSNSPKGFREMVKDLRMCCHGVSSGQWLFCCETTGRYDHPMCHWLVDHGMVVWRESALQIKWSSGIQRGKNDRVDSLRIAEYAWRHQDKMQKFVKPSESLSNLKAAFTHRRRLVEKRTATRCQLKSMSSEKGLSASVARMIVRDLSREIERLSASITTMDESIQKIIRSDSELDRNYRHIISVKGVGPITAVALIVCSGNFKAITSAKKMACYCGVASFRSQSGTSINRKASVSNLSNRQIKSLLSMAARSASRSNPVFAEYFNRTLSRGKPVALVYNNLRNKIITVVYKLIERDCDFDVDYMRMHSTGQRANEPAIREAV

SEQ ID NO: 115420 - protein, 461 aa, unidentified
MNVNTKNTKNQAQERNSEKLTRAELRRRQKAEAKMEKSKEKKKITVKSPKTQEQEVLLQDAEAIFKNLKSYTWRDLETNGKFSKNDKLSFISDDMLIVGCDVGSETHYIRAIDTRGRELSRKAFAFDNNEEGFQKAKEWSVELAVRNGKDQIVLGLEPTGHYWFVLAAWMVANGVSVVQVNPYAVKQTKELEDNSQQKDDTKDPKLIANLVKDGNYGMPYLPEGVYADLRRLSMFRDQLTEDRIRNINRLHREMKIYFPEYREAFGKLDGAFSIRLLKKAPFPKDILELGEAGIRNIWKEARLRGRGYSKAGEIVRLAKESVGLNDGMEAGKAAVKWFAEKIEELTEQLSDIENRLHQKCREIPYAENILEISGIGENILAGILAEMGDIDRFDDVKEIQKLSGLGLVACSSGKHKGETRISHRGRKRLRYWLFQAAKSAVSHAGEFKMLHAYYTTRADNP

SEQ ID NO: 115421 - protein, 400 aa, unidentified
MRKPKQRQTKPRQSKQRKPNDLSRCLAVLDLDRTLIAVIEMGASSWLVAGLVPGVERQPLKKLKTDKHALLALLERWRGEAVRSGYAITRIVVAYEAGRDGFWLARWLRAQGIEAHVIHAASVAVSREHRRAKTDRLDTELLKRAFLGWLRGERDHCKMVAIPTVAEEDARRPGRERESLVGDATRIINRIKSALARLGIGTFNPTLKKAPVLLNDLRTPEGDPIPPNTLDEIKRDMERRQLICEQIRRIEQERVKRLKQAPDTGPNAMVHLLARVTGIGIETADTLVREVLTRNLRDRRAVARYGGLTGAPNQSGSFNRDKGLARSGNPRVRRCMIGLAWRFVRLQKDSPLVKWFELRTANARGSRKTMIVALARKLLIALWGLVHDGVVPEGVVMRPV

SEQ ID NO: 115422 - protein, 334 aa, unidentified
MNYNFFIGIDVSKKTLDFAVFKGKDLLFSWTSENDESGIKKFWTQLKSQQGFCVNEALFCMEHTGIYNHHLLSFLYSKKACVCLEAAVHIKLSSGLQRGKNDQIDAIRIAQYAYKNCTELRLWQPKRQVIQQLKHFSVLRNRVINARKQLTVAINETISFNKATANECKKLCKGSLKSLEVDIERIELKIDQVIASDPELKRLFSIVTSIQGIGKITATEMIITTNEFKNITDPAKFACYSGVAPFEHSSGSSIKGKSRVSHKANKTMKSLLHMAALVAINYNTDIKAYYNRKVEQKKNKMSVINAVRDKLIRRVFACVKNNRLYQKNYQPAIV

SEQ ID NO: 115423 - protein, 286 aa, unidentified
MEQGQLQNDISAVRSFLARLLKDGRRLRVIVEATGIYFLDLALVAHELGAEVVVINPKAGHHFAKGLGLRSKTDAIDARMLLEFLRRMPLTRWEPPARECLQLRQIGRYLVQLTDESTAAKNRLHALESTEETPRFLREDLRRSIRSLEGRLERIRAQAIELIGCSESLNAAFQALNSMVGMGDKSAVAVLGELCVLPRSLSGRACTSHAGLDVRHHQSGTSVNKPGRISKHGNKYLRRALYMPALSAGTHDPHAAAFKQRLQARARRACRSTRRSCARCSPPPGR

SEQ ID NO: 115424 - protein, 348 aa, unidentified
MKKIVKQVVGIDVAQKELVVCLGRMYDDWCPSVYAHKTFVNTEKGFKALLLWAKEKTDDSIAIRFVMEATGVYHEGIAYFLDALGHEVSIVLPNKISNYFRTLEVKTITDKTSAETITLFGLERKLDRWQKPKEVFKKLRQLTREKDQLVQERTAIKNQLHAEQAEAEPNKKSIQRAKERIRLLNKQEVEINQEVAALISQDEQIHQMVKLVCSLTGVGLLTAAIVLGETNGFELIRNKRQLASYAGFDIKEKQSGTSVKGKPRISKKGNRHLRKAMHLPALCAIRYDERFKAIFARLVSKHGIKMKAVVAIQRKILEMMFTLYKTGNTYDKNYLNRKEIKNLATDVI

SEQ ID NO: 115425 - protein, 462 aa, unidentified
MKLYLGGDVSKGYADWVILSEKKQAVLENFQLDDTYAGHFKLYAMLEAYIDKHPGLEIYAAVESTGGYENNWFNTLKSYQKVFNLKVARINPAGVNFNRRAGMKRNVTDAISALSIAEYMINHPGNIMYDQDDKWKSLCRHWNFVEMQKQQRIQTINQLETILYSANPTLMRFKKGGFPNWLLELIIQCPTSDKLAKAKPEKLAKIPYLTLARAKALVAEAKQNIASATDKNAEILVSQIALQIKAFDKNIKSQMQLIERELTCPEIDLLKSFKGIDTISAIGLLLEIGTIERFPTVKGFSCYFGLHPKFKQSGDKVIGVRMSKQGSKNMRKILFNIAKGAITNNPLIRVVYEKKLSQGMSKMAAIGVCMHKILRIIYGMLKHKEAYNPLIDKQNCERSKEKQQEKQQQGKANIEKSRRYQEFDEKAPISRKQTKKRREHDLSQGEIISQSTGSTCSSETKL

SEQ ID NO: 115426 - protein, 321 aa, unidentified
MSTTGRTTCYVGIDVSKATLDVAILPTEECFAASNDEAGIEELIGKLAELPEALVLLEATGGFERPVVAALAASGVALFVVNPRQARDFAKATGQLAKTDALDALVLARFAQAIRPTPRTIPDQEAREFGEILARRRQLVRMLSAEKNRLGASGFEAVRGRIEAHIRWLEEELARTDRDLDETIEKSPTFIKANEALLRSVPGVGPVLCRTLLAELPELGSFSPKELSALVGVAPLNRDSGTLRGRRTVWGARARVREALYMGALIASRFNPAIREFYERLLTAGKPKKVALVACMRKLLIILNAVMRDRTPWRSPHTLHP

SEQ ID NO: 115427 - protein, 338 aa, unidentified
MNATTIGIDLAKNVFQLHGADTHGRTVFSKRLTRNKLVAFLADVPPCLIGIEVCSSANYWARRFGDLGHEVRQISPQFVKPYVRTNKNDYNDAQAICEAVARPDMRFVPTKSIAQQDIQALHRVRMRLLRERTALVNQTRGLLREYGVFLPVGIRAFRSKLPEVLEDANNELTTLAREIIADQARRLHELDERIDAYDRRIDRCVRENEVCQRLCTVAGVGAVAASAIAAAVGDARCFKNGRHFAAWLGLVPRQHSSGERQRLLGISKRGDTYLRTLLIHGARSVMRRCEGRTDARGRWMQALKLRRGFNRACVALANKNARVLWALMATNEAYRASA

SEQ ID NO: 115428 - protein, 402 aa, unidentified
MKVSGLDVHKDSIFCAIYDGAEYSEVKEYASMTNSIREMGAHLKEEGVERIAMESTSIYWTPVWDILEEMGFDLILVNPFLIKQMPGRKSDIKDAQWIASLLHKGLLRSSMIPCSIIKELRIYTRKYVRLQQKASQILTEMDRVMVTANIRISSCVSKLTNKSVIRVIEALIRGETDPDRLVKLVYGNTKNKQSGKLREALTGNLKEHHQQSLKWSKELYDLYEKQIQECLFYVEKICQEHYSKEMELLQSVPGISKISAMCIIAETGADMSAFENSGKITGWAGLRPRNDESAGKFKSTAITKGNKYLRSILVQVAWAASRTKGSYFKEKFNRLSLRKTNKKAIVAIARKMLVIIWNMLNEKKPYNPTLVHIYDPVKVERSIAYHQKEIEKASKLLPKNVN

SEQ ID NO: 115429 - protein, 332 aa, unidentified
MLIIGCDYHPSVQQIAWLDMETGECGERRLTHSGGEAEQFYRQLKEKRLIVRVGMEATGHSRWFERLLAELNYELWVGDPAQIRAKRVRKQKNDRKDAAHLLKLMLENNFPRIWVPTPENRDVRQLVLHRHRLVGMRTRVMNQLQAIAMNEGVRRKRGLWSEKGRRQLESLQLLPWTNRRRQELLELLDRFDPSIDQLSQEIEQEAERVPEVVRLQTHPGVGAITALAFVLVIGTPSRFNCGKQVASYLGLIPCEDSSADSWRLGHISKQGNALLRYLLGQAAQTLARCDEKWRGQYVHIAMRRNRAIAKVAMARKLAVRLYWMWRHGWDYQ

SEQ ID NO: 115430 - protein, 345 aa, unidentified
MKIVGCDLHTRYQQIAMLDRETGELVERRLEHENGEARAFYAALSGSVRVGIEATGHTRWFERMLAELGHELWIGDAAQIRASMVRKQKTDARDAAHLLDLLLSERFPRIWRPTLEERDLRQLVWHRQKLVWMRNAVGNQLHALAMGEGVCRKKTLFTKKGRVELESLKLGPWASHRRQELLTMTDQLDTSLQKLDQAVAEQAERNPTAVLLMTHPGVGPVTSLAFVLTIGPVGRFERSKQVVSYLGLNPREHSSGGRQRLGAISKQGNPMMRSLLVEAGHTAARLDRELRQDYQRLKLRRGSGGAKVAMARKLAVRMYWMLRSPANYAQLVRMQGSPRGTLVGQ

SEQ ID NO: 115431 - protein, 422 aa, unidentified
MLAKTQDNEEIIERVAALDIGKAELVCCVRVPDEGRPGRRLQEVESYSTMTRPLLSMADRLACLGVTRVVMEATSDYWKPVFYLLEAAGFETWLVNAKDVKHLPGRPKTDKLDCIWLCKVAARQMIRPSFVPPPPFRRLRDLTRYRADLVAARTAEKNRVEKLLEDAQIKLSVVVSDIFGASGRDMLAALVAGERNAKVLAQLARRTMRKKLTVLEEAFTGSFTDHHAFLLGVMLARVDAITGDIAALDTRIEEQIAPFAAAVAKLDEVTGISLAAAHAIIAEIGLDMARFPTAGHLVSWAKYAPGVTESAGKKKGKNSTGHGNTYLARILGNAAAATARTDTFLGERYRRIARRRGAKKANVAIGRSILVIVWHLLSDPDARFVDLGSDFYATRTDPDRRMRTHVRQPEALGYTVTLQPAA

SEQ ID NO: 115432 - protein, 358 aa, unidentified
MEQITRGECGRVVVRVGVDLAKRVIQVHAVDAAGRLVTGRALARDRFIAWCAQLPGGCVVAMEASSSAHHWARKLSSLGLDARIIAAHLVKPYRKQGSSGKNDANDAAAICEAASRPSMHFVPIKSVEQQSMLCVHRLREGIKEERTACINRIRGLLAEFGLVFAQSPKVLRLALADTIEDASNEMGTLARLTLQRAYAQWCELDEHMAWCDERIAEHACTNEQVKTATALLGVGPVTASAVVATVGDFRQFRNGAQFGAWVGLTPKQHSSGGKARLGRITKRGDTYLRTLLIQAAKSAVLTAHRRSDRISNWLCMLRERSGWQIAAVALANKNARILWALMTKGAAFNANHLSVKPA

SEQ ID NO: 115433 - protein, 355 aa, unidentified
MTSVKYIGMDVHKEAISIALMNGAGKLLMESIIETKAGTILQFFAGLRGDLRVTFEEGTWAAWLYDLLKAHVTEIVVCNPRKNALLKDGSKSDRIDARKLADLLRGNYLKPVYHGEHGLRMLKELSRTYLAISKDLVRVMNRLKALYRGWGIACSGRSVYAPNQRAVWLKKITEPGVRLRAEYFYQQLDTLQRLRREARRHLLSESRKHSATKILSQIPTIGPIRAALLVALIQTPHRFRTKRQLWAYSGLAVETHDSAQYRYLDGQLLRSRKPQQLRGLNEDHNHDLKNIFKGAAQKAIGATGPFHEFYERLLTKGIKPSMARLTLARKIAAITLTIWKKGARFDPQQLKPQAA

SEQ ID NO: 115434 - protein, 586 aa, unidentified
MSTATSFDRIGVGIDTARYGHRACFLGPDLHPAARPLTVTEDRAGYQALRDRLDQLRRRHPQAHFHIRIDAAGQYAANLEQFLRGLDGPMTLSVGQPKRNKDYRAAHLPKRTTDDTESQALARFALVERPAATPAPPAPMAPLREAVSRLQGQVKQTTRATNRLHNLTARTFPELATLAEDITAGWVLRLLKRYPTAERIAAAHLASLEKIPHIDGERARALHQAAGRSVASFRGPVAEALARHLVEQVVRSRAAERDLLRLVTAAWEDLPASPHVRVLTIPGIGQATAAILVAKIGDIDRFARPEGLVNYFGVFPEEDSSGVDKEGRPRPTAAMHMSRKGNDLARAYLWSAARSAIRHNPAVRPLYRRLRAKGTRGDVAIGHCMRKLLHLVYAVWKTDRPFDAGHYPWEPAGEPAPTTTAAGEPVGGVADEGAVGHRRDEPAGRVVATAPPTVGPIPSVVNPPAPSIRVARPRVDYAFLRQQIDIGRVLAHLGLLARLRGVGPRRRGPCPLHSHPAAAGRTFSVDLDKNIFKCFDSECGAQGNALDLWAAVHRLPLYEAALHLAETFGLARNREEEPVPGTRRPE

SEQ ID NO: 115435 - protein, 340 aa, unidentified
MKKEVKFYLGIDVSKLTIDISVLRITDHQKDEMVTDRFDNNAQGMTALHKWLKNQKVSFDTNSLVVIENTGAYHRIIWEYCSKHNLPIYIGNATHIKWSFGIARGKNDRIDSQRLCSYAFKHADELKATPVLNPVLLGLKDMMTARSRLLAQIGSINVYLGELKLSNSNEVQKIMEQAHKAALQGLKKSLAVVEKRIHEIISMHKAISTNYALLITVPGIGHLTAVYIICCTNNFATKITGKQLACYAGVAPFEHTSGTSIKGRNKVHKMANKTLKKMLYMCALASIKYYSEFTSYYERKVAAGKNKMSVINAIKNKIILRAVAVVNNQQPYVDNYKKVA

SEQ ID NO: 115436 - protein, 378 aa, unidentified
MSRTPTAEVNNINPTLYVAFELGWKTWKLASTVGLGQRPRISTIPAGDTEAVVKEISKALERFGLPRDSRVVSCYEAGRDGFWLHRFLTHVGVENVVVDSASIEVSRRSRRRKTDRLDAIKLVTMLVRYHLGEKTWCVVQVPTVEGEDSRQLHRELKTVKKDATRHNNRIKGLLANHGIRIGSIPKNFESWLEEQRLWDGSPLPRGVGVRILLEFERLCFARTQILAIEKERRRLLAERTTRDAQFAYKLKRLGAIGDNGAWTFSTELFATRTFKNRKQVGSLVGLTPTPNDSGESDREQGIDKAGNKWVRGMAVEIAWAWLRFQPRSALSLWFERRFGAGSKRLRKIGIVALARRLLIALWHWTEHDVLPQGATLKA

SEQ ID NO: 115437 - protein, 341 aa, unidentified
MKKFIRTAIDLGKTYFQVHGLENEGGQSISRKMKRSKMREFYEQIEPCRVGMEACGSGHYWARELVAMGHEVMLIPPAYIKPYIKRGKNDAVDAAAICEAMSRPGMRFVPIKSADQQAVLMLHKTREMFVKQRTMSVNALRGHLAEFGIIVAKGIGRVDELLALAQSDAELPQIAKSAVAGLAQHLEGLDQSIEAVGDEIARAHKQNPTSRLLDEIPGIGVLIASVIASSVPDPSVFKTGRDFAAWLGLTPRQNSSGGKEKLGSITKQGNRYIRKMLVVGATSVMRVAGKRKGALADWINALQAKKPKRVAAVALANKLARICWAIMTTGEGFRVDTYVKA

SEQ ID NO: 115438 - protein, 403 aa, unidentified
MNAVGIDVSKGKSKVCVVQPGGDVVCKPYDVGHTVFELNELADFILSLSGETKVVLEHTGRYSEPIANALSKAGIFVCAVNAKLMHDYAGGGNTIRRDRTDKIDSMKIARFCLDKWDNLSQYIPENEDRKMLKVFNRQLSEYSKIKTMLTNNLIALLDQTFPGINKLFTSPTRESDGHEKWVDFVGAFYHSDCVLSKSLGAFSERYEKWCRRNSYNYSYEKAVEIYALAEQSVTTLSRTPFEKSLITNLVLQINNLCETIACTKYDMTQIASELPEYDIVLDMHGVGKTLAPQLIAEIGEISRFPKRSSLARFAGIEPPSNQSGTYNQHSRRISKQGSPHLRKSLFMVMKAVLQNKNQDQPTFQFLDKKRSEGKPYKVYMIAGANKFLRIYYARVTECLGFVE

SEQ ID NO: 115439 - protein, 398 aa, unidentified
MHYCGIDIAKRKHETSVIDESGRTLSRSFPLDNSAGGAAKLFKFFSDNDIDKDSVIVGMEATGHYWLALYSFLTEEGYNVKVINPIQSDAFRKMYIRQTKNDSKDSFIIAQIMRFGEYHTTELAEENIIALRQLSRYRLCLVESAGNCKRRIIALLDQVFPEYATLFSDIFGVTSLELLETYPLPDDIMNVPTQQLVDFLAKASKGRFKEEKARELKAIAKGSFGVGFAKDAFCFQMKQLVAQLQFLEEQISDLEQEVEILMQSVDSPITTITGIGPVLGAAILSEIGDIRRFDSPTKLVAFAGLDVKVVQSGEFTGTQGKLTKRGSPFLRRALWLAANIAAFKDPTMSVYYQSLRQRGKHHYVGISAVARKMCNVIFVILSENKSYDPHYQKRTATD

SEQ ID NO: 115440 - protein, 400 aa, unidentified
MLSIGIDVSKGKSTVCGMKPGGEIVYAPFEVQHTREGMSELVSLLRSSGEEVRAVLESTGSYHCPVVAALLENGIFVSVVNSLRMKRFCSQSIRKVKTDRIDAMQIALYGLAYWQELQPTKLPEDTYRELQLLARQYYQMTSMLIKAKVDFNAICDQVLPGMQELMSDHAGRHKLSDFVLRYRHTTHILEMGETRFRKDYCKWAEKKGYRNCERMAALIFATAQNGIPVLPNAPSTQIVITEAIRVLHTVEASRDAILTQMQALAKTLPEYSLVREMPCIGDTLAPRLIAEIGDVRRFHSKRALIAYAGIDAPPYQSGKFCANNRHISKRGNRYLRKTGYEVMQSYVMHKPANDPIFTFIEKKRGEGKSGKLAMVAGLNKFLRVYYGKVTELYRSLPAIE

SEQ ID NO: 115441 - protein, 392 aa, unidentified
MIYVGIDVAKDKHDCFITNSDGEVLFKPFTISNNREGFENLFQRIESVSDDFTKVKVGLEATGHYSYNLLGFLLDKGLTTYVINPLHTNLYRKSLSLRKTKTDKVDSRTIATMIMSDLNLKSYSDISYHNEELKSLTRYRFDKVKERAKLKSSVARLINILFPELEKLVPSLHMVSVYALLSEFPGASHVASAHLTRLTNLLSQASKGHYGKDTAILFRETAKTSIGSLMPAKSLELKHTIKLIQELTSEIDEIESAIKQIMVEEIQSPILTIPGISYRMGAMIIAEIGDFSRFDSPDKILAYAGMSPSTYQSGQLDNCYSHMEKRGSRYLRYALYNATKYVCHWDENFGAYLAKKRAEGKHYNVALSHATKKLVRTIFAMEKSGQAYIPTV

SEQ ID NO: 115442 - protein, 410 aa, unidentified
MDTLIERCGGLDVHKDTVVACVRVPARGGGREQFIQTFGTTTVQLLALRDWLVAQGVTRVGMESTGVYWKPVYYVLEDALECWLLNARHLRNVPGRKTDVADAAWICQLVEHGLVRPSFVPPKPIRELRNLTRYRKAQIEERTREAQRLDKILQDAGIKLSSVASDVLGVSGRAMLRALIAGTRDPETLAELARGTLRRKIPALRQALHGRFGPHHALLVGTILAKLEFLDEALEHLSAEIEQVIAPFAAEAALLRTIPGVDRRTAEAVVAEIGVDMSRFGAAGRLASWAGWCPGNNESAGRHGPGKTRKGSKWFYTYLTEAAKAAARTKGTYFGAQYARLRGRRGPARATVAVGHSILVAAYHILARHEPYRELGPDYFRRRHSREHQTRRLVRQIEALGYHVRLEEVA

SEQ ID NO: 115443 - protein, 344 aa, unidentified
MTCFAGIDVSLRSVNICVVDEVGELVAETKLSSDVQDIIVYLDKLEHSIDIVGLEAGILAQYLTYRLQAAGFNVACMEARQVKAALSAMRNKTDKHDARGIAQLLRSGWYSQVHVKSMESHQTRMLLTSRKAILDKCIDLENEIRGLFKIFGIKLPPKLGHGSFDRTVRAIIEADDKLSHALLPLLDARLVLYKTFRVLDNRSRHLAQGDPICERLMTAPGVGYITALTFKAGVDDPSRFKRSRTVAAHFGLTPRRLQSGEMDIDGRISKSGDVEVRRALYVAANSVLTRSSRWSTLKAWGMKLKKNRGHKKAVVAVARKLAVILHRLWIEETQFRWGMEGVRS

SEQ ID NO: 115444 - protein, 356 aa, unidentified
MSRDIKYIGMDVHKEAVVIAVLNSSGKLIMESIVETKASSILQFIHGLRGELHVTWEEGTWAAWLYDLLQPQVTRVLVCDPRRNALLKEGNKSDKVDARKLADLLRTGMLRPVYHGEHGLRTLRELGRSYQTLSQDLNRVMNRIKALYRGWSIPCAGTQVYAPRYREEWLHKIEHAGVRRRAELLYQQLDGLQTLRRTLRPELLAESRKHKASKLLRQIPCIGPIRAARLIALMQTPHRFRSKRQLWTYSGLGIETRDSAQYRFVRGQLQHAKKPQQIRGLNQNHNHEMKEIFKEAATRASCGVGPLRDFYLSLLAKGMKPEMARLTLARKIATIALTLWKKEERFDAEQLKPQAA

SEQ ID NO: 115445 - protein, 416 aa, unidentified
MKHKTNQFTAFVGIDWADQKHDVSVSAGSGDPVHQVIPHTPEALSGWLGELRKQFPKGKIAVCLEQSKGSLIFHLLGYDFLTIFPVNPKSFSRFREAFITSGAKGDPSDADLLRELVAVHNDRLRPWKPDDEQTRTISFLAEGRRKTVGERTRLTNRLRSTLKMYFPQAIELVGESLHSTMVLDFLRKWPQLTDVQRAKEKTVQAFYSTHNSRSPERIKERLELIRSTVPLTNDQAVIKTCLITIKMLIGQVTQLNSTIVEFDRELKTFYDKHPDHDIFDSFPGSGDVLGPRLLAAWGTDRNRYDASDSMQKYSGTAPITRASGKSKSVVRRVASPKFLLQTFHEFANCSRRFSVWAQAYYEMKREQGKTHHMAVRSLAFKWIRIMYRCWQNRTEYDEVKYIQALKRSNSPLLKFI

SEQ ID NO: 115446 - protein, 352 aa, unidentified
MLIVIGADVHKATHTFVAVDEVGRKLGERTVKATTAGHDGALRWARAQFGTDLTWGIEDCRHLSARLERDMLAAGQEVVRVPPKLMAHARSSARERGKSDPIDALAVARAVLREPDLPAASHDESTRELKLLVDRREDLIGERTRQINRLRWHLHELDPEFDVPVKGFRVRRQRRRAAEWLTGRPGLVAELARDILADIDAVSSRIDELEKRVDGLVADRYPHLLAVPGCAALTAAKIAAETANVTRFRSEACFAMNAGVAPLPVWSGSTRGRVRMSRTGNRQLNVALHRIAVTQIRLDGLGRAYYRKRLDQGDSTIEALRCLKRKLARIVFHELHADQQPHTTPASIPLAA

SEQ ID NO: 115447 - protein, 343 aa, unidentified
MGEVSTIGLDIAKSVFHIHGVDADGAVVIRKRISRAKLLEFFAALPACLVGIEACPSAHYWSRQLQALGHTVRLLPPSYVKAYLKRSKNDANDAAAICEAVMRPSMRFVPTKSEEQQSGLMLHRSRQLLVCQRTMLSNAIRGHMAELGIISAKGRNGTAELLEIIADEQDGRIPAAARFSLEVLARQYAAVRVEIVAIEKRIHAWHRSSEESRRLEEIPGVGPIVATALVAEVGDWKTFSSGRSLAAWIGLVPRQHSTGGKKRLGRISKQGNRHLRWLLVAGAMAVIRYARRHGTKRPWLRRLMDRRPIKVAAVALANKIARIAWAMMVRGERFKEPKLLPAA

SEQ ID NO: 115448 - protein, 345 aa, unidentified
MKITTVGIDLAKNLFQVHAVDERGNAVLRKQLRRRQVAVFFWKSAPCVIGMEACASAHYWGRTLQRFGHTVRLMAPQFVKPYVKTNKNDVADAEAICEAVGRVNMRFVPIKSVEQQAILSVHRVRQGFVKARTAQANQIRGLLGEFGLVIPQGIINVAKRVPEILEDASNELPVPFRHLIDRLTKHLKDLDRQVKEFEREIIAWHRSSELSRKLEKIPGIGPLAASALVASIADAHSFDNGRQVSAWLGLVPRQSSSGGKPTLLGMSKRGDAYLRTLLIHGARSAILAAKNKADNTQGWLTNLLKRRHPNIAAVALANKNVRTVWAILAYGREFKADYMPTPMTA

SEQ ID NO: 115449 - protein, 347 aa, unidentified
MALATVSVLGVDLGKNVCSVVGLDGSGKVVMRRRVRRETLVGLAEKLPPCMVAMEACCGAHHLGRVFAAHGHDVRLMSPEYVRPYIKAQKNDERDAEGIAEAATRPTMRFVDLKSQDQLDVQTLHRSRDRLVGERTALINQLRAILLERGMVVPKGRRNLEQFLMVLMDEQGGAGLSPRMILLVADARMQWAELDRRIAAFDAEFVRWTKENEDARRLAAIPGVGPIVASALVAAVGHAESFDHGRDLAAWLGLVPRQFTTGGKPKLLGISKRGNRYLRKQLIHGARAALPYVAEKDSPLGRWAKALMSRAPRNVAIVALANKLARIAWAVLRRGERFVAAGVSMAA

SEQ ID NO: 115450 - protein, 520 aa, unidentified
MVTASRSKKSSRAYFVHKPNGQIHQRVQAVGPEHFGIVSVDCAKLRSKFILCDFFGNVLIPPTVLPHIQADLQAAITRIRQAVEKHQLRDILIAIEQTGVYHRPVQDAFRHAGWETRLVHPFASHQFRQPADPANKTDDTDLAAIFRATVNGFGLLDPVWPDEYQQLQLFARHRRDLVRKQAKLRCQIRVQIHRLMPGFADCFADLFEYPAALAIACQIGSAQAMRDLGLPGLERVVNQAGLRCQRGTLSKILAWTQTAVAPTPPLEPRRQILADLEADRQAKNKQILSMERELARLLVHTPYLLLIVVPGLNVVSVAELAGELGPITNYANANRITGRAGLRPSRYQSDTVDRASGPLRRCSNRRLRCALMQIADNLVNCNHHFNIRALSYKQQNKNPRWIRIKVAKTFTRFAFAMVSSRSLFRHPCCQERHYILDKLLDFHQRRDNPMSLVLQDLDAATGQLPRSSFAEEAKPLHERLENIQNRKRGPQPLGEILPIVLARLGIHVILSTAAEELDPG

SEQ ID NO: 115451 - protein, 343 aa, unidentified
MEHYVGLDVSLKQTSICVVNQVGSVVREGVVDSGPEAIAAFVRSKAPGAVRIGLETGPTATWLWTELKQLGLPVVCIDARHAKAVLKMQINKSDRNDAAGIARIMQTGWFKEVRVKDLDSHSVRAMLASRALLVKIKRDLENQIRGLLKNVGLVIGRAKFNVFAVRAEELIEDRPDLIAVVGPLLKARQAIEQQVDDLDRKVLKLARYDAQARRFMTVPGIGPITALCFKATIDDPTRFKRSRSVGAYVGLTSRRHASGEIDWTGRISKCGDAMLRSYLFEAAGVLLTRVPKWSALKAWGMRLAKRTGLRKATVAVARKLAVILHRMWIDQTEFNWSKKEVAA

SEQ ID NO: 115452 - protein, 361 aa, unidentified
MKKPTQHLIAEVPRRQARTELTIGIDLGDVWSHYCTLNQDGEVIDRGRFRTTAKAIEKWFKDLPPTRVAMEAGVHSIWISEQLQELGHEVIVANVRELRAISHSDRKSDQVDAEKLARYARLDPEILRPISHRTVEQQEALTLIRARELLVRLRTAAVNAVRGLTKACGYRMPASSTKCFAQRGQAAMPPGLQLALGPVLEQIAAMTLKIKQYDREIQRMTQTEYAETQPLLTIHGIGHITALTFVLTLGDKQRFGRSRDVGCYLGLRPRRSQSGERDPQLGITKAGNAYLRSLLIECANHILRPHGRDSALRQWGLHLAARGGKQAKNKAVVAVARKLAVLLHRLWITQEFYIPFHAEAA

SEQ ID NO: 115453 - protein, 333 aa, unidentified
MNCVGIDVSCKELVVVANVNGNARKARIFENSAGGHKLLIKSLLKLKGETKVCIEATGIYHFDLAVALSRTEEIEVMVINPKTSHNFAKVLMNRSKTDAIDAEVLAIYCEKMPFEVWQRPHDEIIALKAISRRITALTKLKAQTKNQLHALTSTEETPQLVIDQTEELIQLLDQQIENHRDAGLNLIQQHSELKEAFTLITSIKGIAVASGIQILAELMILPQDMNAKQWVAFAGLDPRQYESGSSVAKKPRISKAGNKYIRQALYMPALVASNYEPHIKGYYAHLINDNGLKPMQALCAVMRKLLHAIYGMLKTNKSFDGERFYTFPAGENA

SEQ ID NO: 115454 - protein, 405 aa, unidentified
MKYVIAFDVSMGKSTMVVYDHKHQCHYEGELEHSQAGFRGLKARIHALREQTGELPAVVFEATGVYSQPLERFLQENSYPYSRLNPLEAKLQTAAMRRQKTDISDAHELAKSHFRVSRQATYIQSDYYEQMRALGRYGEDIEKEISQTNNRLHAFLQMSFPLVEKVFTRNSALFLNIVQLFPHPAYLDEVSRETLFAQIKGATRKRMAAQEIEKKASLLLAAAVNSYPSIGPEDVRCQHLKTYAKRLLALRTQKKEVIRQMVVLSQDRLEFQVLKSFPGIGDQTAVQVISELGDIRRFQNAKQINAYIGIDIRRHQSGKLHYQDKINKRGNRRLRTILFFMVMTMIAQRKKAKNTIVDHYDQLKKQPNGKPHQVAVIACVNKFVKVAFHLIRHGLLFHYESGKAS

SEQ ID NO: 115455 - protein, 392 aa, unidentified
MKVTTLGIDLAKNNFRVHGVDARGKTVLSKSLSRRQLSIFMAQLAPCLVGMETCPISNHWARGLEKFGHQVRLMAPRFVRAYVKANKNDTADVEAIGEEVRWPSMRFVAVKSAVQQDVQAVHRVRAQLVKTRIALANQVRGLLGEYGIVIGKGFAPLRRALPTVLENRDQRLSGLLLELIAEMSEQLKLLEQRLHEYDLRVRRLLRADERCLRLAEVPGIGELTATALVATVGNAREFKSGRELAAYLGLVPRHRASGGRTVMLGISKHGDTYLRTLLIHGARAALCINSRWRGAHGAWAEGLKVRRGPNIAAVALANKNARVAWKLLSTGERYRPLPPRPNESQDTGTRAPRAPLRQPTGRRGELRVVADPNLAAFRPPSNSVRGRAENPL

SEQ ID NO: 115456 - protein, 375 aa, unidentified
MQNKVRFLGLDVHADTIAVAIAEPNGEVRSLGTIANRAESIRKMVKKLGTVDQLRACYEAGPTGYVLYWQLAELGVNCEVIAPTLVPVKAGDRVKTDRRDAERLARSHRSGDLTAVWVPDAGSEALRDLVRAREAAKQDQLRARHRLSKFLLRSGQRPAQGMKAWTQPYMIWVKQIRFAQVAQESTRLDYLTEVEHMGERVLRLEKAITEAVKLASPELQEVVKDLQALRGIAQISAVTIAAELGNISRFEGARQLMGYSGAVPSEDSSGKRLKRGSITKTGNAHLRRIAVEAAWSYRLRPGVGPALRKRQEGVPEEVKEIAWKAQHRLHKRYMKLSAAGKDRRKIITAVGRELLGFIWAIGTKAEAAVKQQKAA

SEQ ID NO: 115457 - protein, 387 aa, unidentified
MSQVSDLSRSLVPFDQNITLTVVVELSEASWLVAGLIPGVDRQPVKKQEPEPVALLRLLERWRVEAVRAGRTIGRIALAFEAGRDGFWLARWLQARDIEVHVVHSTSVAVSREHRRAKTDRLDTAMLMRVFLGWLRGERGHCRMVAIPTLEQEDAKRPSRERESLVGERTRIVNRMKAALARLGIRGFKPTLRKAPQRLDALRTPEEVSIPPNTLDEIRRDMVRLAVVREQIDVIERARLARLEQAPAAGPHAMVRLLARVIGVGLETADMLVQEVLSRNLRDRRAVARYVGLTGSPDESGRRRREKGLAKAGNARVRRGLIQLAWRFLRFQRDSALAQWYRARTGGPKGARKTTMIVALARKLLIALWRMVTIGEIPAGVALRQVI

SEQ ID NO: 115458 - protein, 424 aa, unidentified
MKNCNKQNEKIELVDEKTLVIGVDIGSYDEYARAFTCRKQELSKKPLHFHNTAEGFKTFKDWAVNIMKANGLEKIIVGMEPTSIYWEALATYCKDNGMILVHVNPAAVHKSKELDDNDPSKNDRKDPKVIAGLVADGRYQFPYMPEEEYAELRELSNLRIRTQESLTQCKNRLSRWYSRYFPEFKGAYKNVVSKTAMMILDLYPLPEDIVTLGVEGILQIWRSKKVRGAGERKARKLYEAARNSIGRKEAASIARIEFKSIKEDLDRYQERLDEIEKKADEILPKIKNVDKLFEIKGVGKATVLTFLSEVGEISRFDNPKEIQKLAGYAIVTNESCKHQGEKRISYRGRKRLRWVLYQTALSVIGKNAEFRQIHAYYTTRTNNPLKGIQSVVAVACKMIRIFYKILTDGVSYDGTKMTQDIVHA

SEQ ID NO: 115459 - protein, 383 aa, unidentified
MKNTIVHDEGAASLEVAVQRIKLSGSMIKIGLDMHARLYVAVAQYDHLLPKPARRLAPMEFLPWVEQLLRAGHTVHVVYEACGFGFGLYRELKALGAHCYVTAPRKLDEQCTRVKTDPRDATTLCQRLSRYLDGNTGELAVIRVPTEREEQDRHVSRQREQLVRLRQKLEAQGRSLLISHSLASPAHWWKNQTWSRLRRLLPAWICIRLEVHRPGLLILQKQIDALSVQLQAAAPADVPLGIGKLSTVVMTREICLWERFNNRRAISCYTGLCPGEHTSGTKRVPGSVTKRGNPRLRAVLVECAWRMVRFQPNYPPVKKRLSVLAKGARATGAQRKKAIVAVARHLAVDLWRIHTGRCSAAQLGLNNAETLRCSRGTVVNPST

SEQ ID NO: 115460 - protein, 461 aa, unidentified
MLVVAMPTSPSYWVEEERENAMAKVIIGVDPHKLSATIEVVDRRERLLGSGRFSTDQAGYTAMRTFAKAWPERVWAVEGSNGAGRPLAQRLLEAGEHVVDVPAKLAARVRLFDTGHNRKTDPRDAHSIAVVAVRTRTLRVLAADGELEGLRMLCDRREELTRLRVQTVNRLQRLLAELIPGQGQKDLTALQAKAILATVRPRDIAGKTRRRIAVEELADLVAVEAKMKKATAELKTIVLARGSRLMDIHGVGPVVAARILADVGDITRFADRNRFASWTGTAPLDASSGEQNRHRLSRAGNRRMNHMLHIAAVTQIRLDTEGRAYYSRKRAAGKKPLEAMRCLKRRLSDVVYRQLVADAERAAMTASSGEAGTGPGGHCGATQESSAVDLPPHIDTSDQPLPGPAHPTLPATKPHANPCAASAPRRSRRRAGAVKVERPTGRTTLTAPSAGAHSAAPKPTS

SEQ ID NO: 115461 - protein, 355 aa, unidentified
MQKYKISFKGQNIYVGIDVHLKTWHITTLTESGCKFSFAQHSDAKELFDRLNKKFPEAHFKSAYEAGFCGFSAHYALSEQGFENIVVNAGDIPTTGKEKVMKTDAVDSEKIAWALKRGQLTGIYIKDKSFMDDTNLVRLRQRFIKDLSRQKNRLKHLLYTQGVVYPKCFTKSGTHWSCNFMKWLREEVVLLSEEKRTLMLLCDHVDNTRKAILEVTREIRRLSKDDKYKANFNLLTSVPGFGLITSMSLLTELDNNPTRFPNERKFVAILGLIPTCHDSGEKKVSGEKTFRGNKYLGPLIVEASWIAIQRDYQLGAYYTNCCQSMKPQMAIIKVARRLACRAYAVMKTKKAYVLQ

SEQ ID NO: 115462 - protein, 413 aa, unidentified
MDKIYDICCGIDVHKKMIVACLNHKRKKELREFGATTRELMELAEWLQKNECEIVAMESTGSYWKPLYNIMESYGLHAIVVNPAHMKAVPGRKTDVKDAEWIAELLQHGLLQPSYIPSKDQRELRELVQYRKSLVGERTRELNRLQKMLEGANIKLSGTVTNINGKSARKILEYILSGNEIDEKKYEEMYEEKLIAHNLKASKEQILDDLKGFMSPLQRRMLKELLQHLDELNVHIENLNDEIDNFMKPEEKQASQVIQDVTGIGNTSAQTIIAVIGTDMERFPSDRHISSWAGLCPGDNVSAKKRKSGKIRKGNALLKSTLVLCAHAAVRHKSSYFHAQFKRISTHRGKKRAYVAVAHSILIAIYHILKDGVKYQDLGAEYYNQFNAERKIHAYLKKLKALGWEPPKEAVPA

SEQ ID NO: 115463 - protein, 450 aa, unidentified
MGNGNGVSRGDRNRNARLDRLRALVPVSNVIVAIDLADKKQMVVVCDHDSKVLARKTYRCRAWDLGAALDWAGERAKSNGFAGVTVSCEPTGHRWRVLAQLAADRSMSFVCVQPMVTSWARRAEDLTHDKTDEKDAVLIARLTAQLRCYEPEPVDETWARLRHLGIRREQLITETSSQVQQMRDLLECVWPAALDTAQQPFRSQTWIAALTVIVDRDGGDLARTHRLGPARFEHAVRRVIVKHGGQKPCLRIVDKLFAALTDPAGVIAHRAGALERVQLLLEDWTHAHHRLAETEARMTGVLDELSLTRLVTSITGISAVGAAAILAQTGDPRRFATARALVKHAGLAPREKLSGAFVGRTKLTGQGRPGLRLAAWRAVWGAQRANPVYGARYRHLTTRENNKLKATQAQTVVAAAILRHLHAVISTGQAWDPAIATHGRRRPFEPAAAA

SEQ ID NO: 115464 - protein, 343 aa, unidentified
MQAEYDGRQIVGIDLHRRRSVIVRMAESGERLGSTRIDNDPMALAAEIVKAGEHPQVVLEATYGWYWAVDVLQDAGADVHLAHPLGVKGFAYRRVKNDLRDATDLADLLRMGRLPEGWIAPPAVRELRELVRHRAKLVAWRSGLKASVHAVLAKQGVHLRVSDLFGVAGRQLLKKVPLDAGYRLRVNALLRLIDAVDFEIQAVSGPLRVALTGDPGFAAVQAVPGVGPVLAAIFVAEIGDVHRFTSAAHLTSWAGLTPRHRESDTVVRRGPITKQGSTLVRWAAVEAAHGAGHAGWLSEKRSVITERRGRNIATVAVARKLLTLVYYGLRDGHIRALAQTRAA

SEQ ID NO: 115465 - protein, 314 aa, unidentified
MEAAVVVGIDVSKRTLEVALSSGGGFSVANNEDGISELLARLRQSGAALVVLEASGGYESPAYLALWEAGVPTALINPRDAYHFAQANRQLAKTDQLDARGLCEFGLRMQPEPLPPPEAADEELKALAVRRRQVVKMLAAERTRVQQAPRSVRPSVKRMIRVLERELGAVDHQIEQRLRDNPGLAQRCAQLEQVPGLGAVTCAILVSRLPELGRLGPKQVAALVGVAPYDHQSGEWRGRSPIFGGRAEVRSALYMATLSAIRCNPVLRSFYRRLRAAGKPAKVAIIAAMRKLLVILNAMLKTNSPWRPPCAVVA

SEQ ID NO: 115466 - protein, 353 aa, unidentified
MRIVVALDVHRRQITYKTLDRESGEVRRGRIAPATRGAVRDWLEQFAGRGAEFALEGTTGWRFVVEEIERAGHRARLADPAETAVKRGRKRRAKTDNADCDLQLRLLLAGELPESWIPPAHILELRIRVRTRKLLIDQRTAWQQRLQAQLLHQGVAAGLKPRTRAGREALARAELSPAGRELVALALRTIEAIDRELAPLDRALRSFARRQPACRALIANLYGVGPISATAILAELGDCRRFASSDDAVRHSGLDVTVHQSDNKRSAGHLSHQGPELLRWALFEAAHQSARRGSPDHDYYLQVAGRIDHNRACLSVARKLCRRSHHILRELGDAALASVEREPQTEEAIQAAA

SEQ ID NO: 115467 - protein, 339 aa, unidentified
MSLLYIGCDISQASFTSSGWVGQAAQELGQYTNEPDGFAACIAAVNAMQQEGGYDIVHVVLEATGGYELPLLVACQRQGWQFSLPNPKQVRDWAKGRGYRVKHDRIDGRILAHYGSACQPKAQEPVSAVIEELDSLLQRQADIEKSLRQEKNRAHALTYRPQAAAAVVSDVAATIVYLEAALQRLGSAIAALLAANPELQAQKARLLTVAGVGAKTVLPLLVYCHRYHARTAGQGTAKGFTAFAGLDSQEFSSGHSVRKRPTISKMGSKTMRAKLYLAALGGTRSKNSPLRHFYLRLLGRNKSRKLALVAASRKILVWSWAVFQQGVDFDPSRFPIPAN

SEQ ID NO: 115468 - protein, 419 aa, unidentified
MLTARWFVGIDWATKAHEVCVLDPEGQVCDRRSVAHSATALQAFVDALLERAHGDASTVAIGIEVPRGALVDVCVERGFGVYAINPKQLDRFRDRFTAAGAKDDRRDAHVIGDSLRTDPQAFRRVRLDHPLVIQLREWSRVDEDLAGDLTRMTNQLRDLVYRIAPGLLTLCPAADERWLWTLLRDAPTPADQRRLSLRRLERLLRDHRVRRLEAAQVREVLQQPSVYTAPGVVDAVAAHIQLLLPRVDLLAGQRRDAEKQLERLLDALDAQEPAAGDQREHSDVAIVRSMPGIGTRVAARMLAEASQPLVERAYHVLRATMGVAPITKQSGRRRTVSMRYACNARLREAGYHWARTGAQKDPASRAYYAQLRARGHSHGRALRSVADRLLRVLMTLLNHGQLFDLTHGQHAPAAIGAGA

SEQ ID NO: 115469 - protein, 365 aa, unidentified
MTETTASPVTLPTSPVILVTLTTGLDLGDRTTHFCTLDEQRQVVGRGKFKTTREALAREFGGIAPRRIVIEAGSQSLWISHLLRELGHEAMVVDPRRVQKLVAGNRKTDRRDAESLARLAVGVPELLGAAHHRTLEAQADLSMLRSRDILVRMRTKLVCHVRGILKSFGFKLPACSASCFHRRAADLIPANLQPALKPVLEALGDLDRRIDELDASLQEVAAVRRPEVKVLRQVSGVGPVVAMAYALTVGDPRRFRRSRDVGAWVGLTPDKRASGDSDPQLSIHRRGDGYLRRLLVVASHYILGPFGKDSDLRRYGLRLCERGGSNGKKRAVVAVARKLAVLLHRLWVSGVPYEPLRNSTKQAVA

SEQ ID NO: 115470 - protein, 386 aa, unidentified
MATSVTSRIEQDTLPHPTLYLAFELGKDTWKLGFTIGMAQPPRERTIPAGDVARLQQEIARAKQRFGLLADAHIMSCYEAGRDGFWLHRYLVAQGITNHVIDSASIEVNRRQRRAKTDRLDVRKLLTMLLRHSAGEQKVWSVVRVPSVDEEDRRQLHREMQTAKQDRTRVINRIKGLLAGHGVQLALQGDVEAQLDQMQQWDGAPLPSALRTRLKRAWQQVGFLTAHIQTLEAERRALLRRREDPVIAQVRQLFTLRGIGINSAWLYVMEFFAWRDFQTPKQVGALAGLTPTPYQSGQARRELGIAKAGNRHIRAMAIEIAWAWRRFQPDSALSQWYERRFGAGSARLRKLGIVALARKLLIALWRFVKTGVLPEGAVLKPAAPSR

SEQ ID NO: 115471 - protein, 405 aa, unidentified
MYNAVGIDVSKGKSTIAVLQPGGVIVRKPFDVFHTSQSLKELSNYLASLEGDTRIVMECTGRYHESMANSLSNAGFFVTVVNPHLIKNFGNNTLRKVKSDPADAKKIARYTLDNWAELRQYSCMDNTRNQLKTLNSQFSFFMKQKVAAKANLIALLDNTYPGVNKLFNSPAREDGSEKWVDYAYSFWHVDCVRKTGLKAFTVRYEAFCRKHHYIYQPSKPEELFNASKELVAVFPKETSYKLLIQQSIQQLNLASAHIEQLRREMNALASTLPEYEVVMGMYGVGKTYGPQLIAEIGDVSRFTHREAITAFAGVDPGVEQSGQHNSKSNKASKCGTGRLRKTLFQVMTTLLQNAPENEPVYQFLNRKRSDSICSTLFQRIDRSANSGGAWAGNMISAWTTPPFRV

SEQ ID NO: 115472 - protein, 343 aa, unidentified
MQIHSVGIDLGKTTFHLVALGAAGKVLVKKKFTQKQLLVFTANLQTSLIGLEACSGAHFLGRALRKQGHDVRLIPAQLVKPFVKSNKNDFVDAEAIAEAVERKNMRFVPIKTDDQLDLQAIHRVRDRLISRRTAVINQLRAFLLERGMVFAQTPAKLKAAMADILENAEADLTPQMRSLIDMLWSEWKMVEQQTVELTTQLERISAADAGCTRIRQIPGIGPIVATAIVAAIGNGAAFRKGRDFAAWLGVVPRQYSTGGNAKLLGISKRGNVYLRKVLIHGARAAVLRIKRDRAPIGAWLDRLDARAPKNVVVVAMANKLARIAWAVLSSGEDYRPLPSISAA

SEQ ID NO: 115473 - protein, 339 aa, unidentified
MSKPIKPQQAMTFCGIDVSAATLAVAVRQEDQRFEERVFDNTAGGHRALIAWLRKGRVAARVSLEATGIYSLDLALALDQAEGIEVAVLNPKLIHRFAQTLRRSKTDSADAQVLAEYSCRMPFAPWSAPELSGLQLRTISRHIQGLVVEHTRQNNRLHAAEKSASTPRCVVSDLKRSMASLKLRIARLRREALELVRRDEAIEKRFELLICIPGIAAISALQLLGELAPLSPEMSVRQWVAHSGLDPSHQVSGTSVHKPSRISRAGNRHLRHALYMPALVAVRRDPHLKAFYETLLSRHKAKLQALIAVARKLLHAIYGILRTQTPYDGSKLFPQLRIA

SEQ ID NO: 115474 - protein, 344 aa, unidentified
MKEVITIGVDVAKNVFQVHGVDAEGAVIVGRQLRRAQMLPFFKKQRPCLVGMEACATSHHWARQLIELGHEVKLMPPSYVKPYVKRSKNDAADAAAICEAVTRPTMRFVAVKSAEQQSVLMLHRTRELLVRQRTMLVNAIRAHMAEFGIVAPVGIPRVKELFAVIADADDDRLPPIARTCLEGLAKQFLSLHEEIAIAERRIHAWHRSNEASQHLETIPGIGPITATALAATITDPSVFRSGRELAAWIGLVPRQNSTGGKERLGRISKQGDQYLRWLLVAGAMTIIRHAKRRGTSNLPWLADLIASKPTKVAAVALANKMARIAWVLLRTGQDYQKPALSHGT

SEQ ID NO: 115475 - protein, 390 aa, unidentified
MLYIGIDISKYKHDCIVIDESGVVIRNVFSFDNSRTGFDQFMEMYRSLDPTEIKKIGFEATGHYQDNFKVYLERSGIEFMQLNSLLVHKFKNSQTLRGVKTDKTDARLIANYLSSIEFKPYPKISYHTLALRSLCKRHFDLINERTKYLIRITNFLDRTFPEFKEFIKGNIKSKTCMYILHNYAIPNKIMNINIQSYENLKKESHGHFSVAKFTELRELAKNTVGFSYETDLFEIKSLLRVYDTLQDEISLVENEITTIMSKINSHIPTIFGIGKVSAATIIAEIEDITRFDNPNKLLAFAGLDPRIYQSGTQEFKGRMNKKGSVVLRRVLMNSAESILIYNPAFYSYYRKKRDEGKSHRVAISHVARKLVRIIYKLETEHIDFDLSFIK

SEQ ID NO: 115476 - protein, 423 aa, unidentified
MEVMYKRVAGLDVHKETVVACVRAMAGRKPTRECRTFATTTDGLLALLAWLTASRVTHVAMEATGVYWKPVWTILSDGPFVLMVANAAHIKNVPGRKTDLNDAMWIADLLACGLIKASFVPAADIQELRSLMRTRKQLVREQTRHVQRLEKTLEEANIKLGAVISDLMGVSGRRMIEAMIAGERNPHRLAALAERTVKASPKQLCDALHGRLREHHRFLLKLHLQQWDALDAAIQQIDRQVAGQIERMDAEAAASQPPFRDLILRLSAIPGVSSLSATTILAEIGRDMSRFPTAGHLVAWAGLCPGQNESAGKRKSARLRRGAPWLKTMLVQCAWAAKRAKDSYYRAQFFRLQSRRGPQKAICAVAASILTAIYHMLKSGLPHRDLGADYFDRRSPEAKAKRLVAQLAKLGFGAQLQPLADAA

SEQ ID NO: 115477 - protein, 308 aa, unidentified
MTTWIGIDVSKATLAVCLLPREQALSLSNDAAGHAQLLDHLQSLDIGNVLLEATGGYERSVMAALAGAGIPVTRINPRRARAFATAMGKTAKTDPIDAALLARMAQLVHAPSPPPEPARDQLRALVQRREQLVQQRDDERRRLHQTTSPEIRDSLIEHIGDLRRYIQRLNSAIKHARGQLDDSLSRRLNAVPGIGEVTTASLLAYLPELGRLDRRQIAALAGLAPYNVDSGQHAGKRRIRGGRSPIRRVLYMACWSVIRKQPDFKVRYDQLRLRGKCAKVALTACMRVLLIRLNAMARDQSEWKLLPA

SEQ ID NO: 115478 - protein, 407 aa, unidentified
MNGNGKRYIGLDVHKHYLIALGVDERLDVVMTARRVELSNLESWMKKNLTKQDEVVLEMTTNTWQLYDELVEHAGSVTVVHPPHVALITRSQVMTDKIAASILARLLAKGLLVGIWVPPQEVRELRGLVAQRQKMTRLATQAKNRLHAVIQRHHLRPPDGNPFAKTNNGWWQGLPLGRLEKMNLQSDLETLQFAEQQEVRMQEEMTGIVAENEEIGRLLHIAGFGVITAVTVYAAIGDIRRFEEAKKLVGYAGMGTRVHDSGMTTRTGKITKAGRRDLRVALVEAAHVAANSHPHWKAELARLEPRLGRNKAIVAIARELLVTVWHVLARKVVDRFAEPEKVSKKMLHFAYEVGKANRAGKSAAQFARERMDTLGLGSELTSIPWGAKKPIPLPPSKLKGRSDVPNR

SEQ ID NO: 115479 - protein, 428 aa, unidentified
MLKINPLSTFYVGIDVSSKSNYVCALDFYKNKYINSSFANNQPGAEELAKKILECLKEHPDLNTIVAALESTSVYSIHIANFLSSCEELMHFKPYVFVLNPKCTANYKKSYIGLGKSDPIDAFVIADYARAGNIETEPWRGSQFLALKRLTRHRLHLIECMTREKTYLVSNLYLKFSELQMLEGDDQPFCDIYGATSSSVLTEYLSPEEIIDSSEEDLISFLAQKSRNRIKDISKTAELLRKAARDSYRLDKALYEPLNVSIASSFNCIETFKKEIKLIDIAIEREIRGLNPNAFIILQSIDGIGPVFAGGIVAEIGDISAFHSSDALAKYAGLMWKSNQSGDFDGEDTPMSKAGNRYLRYYLGEAANSMRKHNVEYGAYYRKKYNEVPKHQHKRALALTSRKFVRLVYGLLARNQLYSGVSLDTSNE

SEQ ID NO: 115480 - protein, 443 aa, unidentified
MCDGSVNAFPSLFLLREGRFLKVVYPICCGVDIHKTFFVATLITTEGMQPTYKKRRFSTFNNQILAFRDWLLENNCRDICMESTGKYYIPVYNLLEDSINVVVANPKWVRAVKGCKDDEKDSKWIGDLFRLGLVPGSFIPSKDIRILREYTRYRFKLVSCKASEKNRYQNVFTVCNVALDAVVSDMFGVSASSITDYLVNSDTFDPAHCVSLLKRTLKKKADDVVASIEGFQMTAAQKDRARFVKGHYDYLVAHIQVLDDKIKEIAAPLESYINLLCTCPGIERNSATTVISEISTDMSQFGSSKRLCSWGGLTPGNNQSAGKKKSVRINRAGVYLKPALVQVAHAAVKDKENPYYRIKYEQISKRRGKKRAIIAIARMILTAVFHMLSSGEIWNPCDLQQVDMPPELRERELHKSLRRAVNLLAAHGIVAPDAITIPEVNSA

SEQ ID NO: 115481 - protein, 347 aa, unidentified
MTVYCGVDFHARVQTVSWLDTQDGEIHQKDLNHRADDVRGFYQQFAGEVIVGIEASGYSSWFEEMLEGIGHQVWVGDAGEIRRLARRRQKNDKRDADHILDLMVKGEFPRVHRLSRESREVLGQLRYRHRLVKMRTMAANCLKAIAIGAGLSEKTRLATRKGRSKLDAVGLGEVLKEQSKRWLELIDDLTTKIEAVERWLEERAQADERVERLRTHPGIGLLTGLALVHTLEPVERFASTRKVAAYVGLDPMEDSSAERKRYGGVSKAGSTLVRFLLVEAGQTAAKRDPQLRTFYQRLRDKRKTAKAKVAVARKLAVRGFIMLRDQIDYSEFLRRGVEARSSRTGSR

SEQ ID NO: 115482 - protein, 389 aa, unidentified
MLLDHPSDGPTAIRTHIGAIFVSLELSRSTWLVTSLSPGKGEKMSKHSVAAGDMAELLTLFAELRRKAEVRTGQSYPIITIQEAGLDGFWLHRVLQQNGIESHVVDPASIATPRRRRRAKTDRLDGEMLLRALLAYKRGEPRVCAMVVAPSPEEEDRRRICRERRTLIEERITHVNRIKGLLFAQGISDYGPLRRDRRARLEALRTGDGRELPSHLKAQISRELDRIELLLKQIKSVEAAQEALLAAARKPASEKAVPDPVTTLLALKGMGANFAAVLWSEAFYRSFSNRRQVAAYAGLAATPWQSGGIRHEQGVSKAGNPRLRTTMIQFAWLWIRHQPQSALTRWFKERSPQGRKRAIVALARKLLVALWKYVTQGVVIEGAVMKPAA

SEQ ID NO: 115483 - protein, 435 aa, unidentified
MEEVEDEPLFCDRVAGIDIGKATVMVTIRVPSEARAKGRQQETREFGTTRRELLALADWLRCWQVERAGMEATSDYWKPVLFTLEQEGFDCLLYQASQVKALPGRPKTDKLDSVWLARITEQGSLAGSFVPPEEIRRLRTHTRCRRKLVQMRTAQKERCEKLLEDAHLKLSSVISDIHGVSGRDMLRAIAAGERNPKVLAQMARGVMRSKIARLEQALDCSFFTGEHAFILTMMLDSIDSLTAQAGVLDARIADMCQPYQRQLEQLDEIPGFGTTTAQDLIAEIGTDMNVFPTAGHLASYARQAPRVKESAGKRKGKNATGRGNPYIGGALGEASISAGRTQTFIGEKYRRLTRRMPKRKAQVAIMRSQLVVAHALLSDPDARYQDLGPDYYERKADIRRRARNHARALERLGYKVTLEAIDPGTGELHLVATAG

SEQ ID NO: 115484 - protein, 364 aa, unidentified
MTGVRNVSTSEGKETTSSLKGMTVGLDVSDTYSSFYVLDDSGDVVEEGRVRTTKAALTRRFGTEESWRVILEVGTHSPWISRLLQDLGHEVVIANPRKVRLIADNTQKNDRSDAETLARLGRIDPRLLSPITHRSPQAQADLAVIRARNALVRSRTLLINHVRGAVKSSGYRLPTCDAYMFHKKVASAIPGELEPALKPLLDFIGSLTSQIAAADKRIEAIIRERYPEARVLQQVPGVGPLISLTFILTIGDPARFRKSRAVGPYVGLVPRQRQSGEHSPQLRIAKTGDRYLRQLLINGSQHILGYRGADTDLRRWGLKRAASGGKNAKKRAVVAVARKLAVLLHHLWVTGEVFEALRSQEVTA

SEQ ID NO: 115485 - protein, 363 aa, unidentified
MGMLAEHYDYVIGGGPDRDTIDLAVIDTATGGVRAHIVERADGPGYIRLLEWANVHAPGLRVWALEGTGSFAAGLATVLAEAGEDVVEVSGPRRSRGRVKNDRTDAIQAARTALASEHQSQPRARGLREAIRQILVTRQAVLVSRTKAINELKSLIVVAPEHLRAGLRGVSLLKQLDRIEALSSLPTASVEHRITVFTMQSIAARIRFLFDQASQLDPQLLALIKEHPAGPILLSEPGVGPVAAAQLLVSWSHRGRVRSEAAFATLAGVAPLEASSGQRTRHRLNRGGDRDLNRALHTIAITRMRCHQQSRDYETKRAAQGKTHRDVRRSLKRILARQLYRKIQAATQPIPAEIAAEVLASAA

SEQ ID NO: 115486 - protein, 400 aa, unidentified
MISVGIDVSKEKSTICILKPYGEIVSRPFEVCHVEKELSELTSMLLRLNDDIRVVMEATGIYHLPVLSYLKEKGLFVAVINPFEMKEYRCQGLRRVKTDKQDAITISNYGIDHWYRLKDYEAEESVYAELKLLGRQYRHYMRMRVESVLELTHLLDYTMPGIKTLLKGWNETNGKDKLGDFAEEYWHYDNITKKPEEQFIESYLKWAKEKGYHQSQDKAVKIYALAKEGIPTVSSDTPSTKMLVQEAVRVLREVDNTLMTILTQMQALAKSLPEYPVVRAMGGVGNVLAPKLIAEIGDVRRFHSGKALIAHAGIDAPPYQSGQFIGTERKISKRGSSSLRKIGYEVMRCLKTHKEPEDAAVYRFILKKEKEGKSKRAAKIAGLNKFLRIYYARVMEVYQN

SEQ ID NO: 115487 - protein, 407 aa, unidentified
MDLLKTVFGIDVSSRKSNVCIMVNGQKVNDYAISNDMVGFNRLLGDLKQVTKPQIIFEATGVYSRRLQAFLDMHELRYVMMNPLEAKRKTKDDLHQNKTDKLDALYLAKLQSEHPQRLAYVQNKEYQELMANNRIYEQASHDLITNKNRLHKAVQLTFPEIEHLLANPRGKNYWSIALRFPHPDIVLETKEVDIIDFLKGLSGIGKKRANDITQSLIRLAKVACPAVKKNSAHIRGLKMAINNILSAEEECQTALQEMAKLAPKRDLEILTSLPGIGENTALRIISELGDIRRFNNPSQLNAFVGVDPQVYESGNLTAHLSISKRGTAIGRKVLYLAINQIQSAKKAGNPCHIADYYEKRKRSSETASHKKAAIASIHKLLRTIFALIKNDQLYSYDVAKHNQRLLS

SEQ ID NO: 115488 - protein, 523 aa, unidentified
MGVFCPAVIMLSSEKYNTVAADSPPDSAVSDCEVDLKEAVSMVLPVDDGVEVMPTRDYGVGIDCHSRFLEINVLVKRGPSFFEYCREVSTDWNAIKSAHEWVIHVLRTCSDPPVMLSSPLHYCIESTSTYHLPVLLAWEGTPSVVNPSIAGATKKKTDKLDARLLAVHDLTGIWRPFYVVPENVQDLRVLIGQRDYYSRLASAIGNRINSTILKFGFTVGKDGSVVKNTEVRAIVENLICDHPEPVSTDLPQRNIPEDTRHVLSEEYQLYDRFSLCVTDFDKQIRDKVCSMDWPVSGGKTVSGKKLLSILMTAPGIGERTAITWLANIMDPTRFPNAKAVAAYCSLDPSLKISAQKVTSTKKRKGNKALHSSLCMSASIVIAKHSEFFGRWGYRIYQQTGKWKKATNAVARRLATALYFMHMNAEPFSYEKYQLTKEVHVLDMALDDLVQLNGSFRRYIPVLKSAGILRTQSLIQSYYSCELRGCKGLGPKFYTLVKEFIETQDNYRELYNSFLTEKASKGES

SEQ ID NO: 115489 - protein, 424 aa, unidentified
MGAGKMNRKQRKELGRRLQSANPGLEVVHPRAAGIDVGNGAHYVAVRPEQDAEPVRRFECFTADLHRMADWLEACEVKTVAMQSTGVYWIPLYEILEQRGFEVYLVNARHTKNLPGRKSDVQESQWLLKLHTHGLLNNSFQPTAEIRVVRTYWRQRGEHVRGASTCIQRIQKVLTQMNVQLANVISDLSGLTGQAIVRAILAGERDPRKLAELSHPRIRAGREQIAKSLEGNWRSELLFVLKQEMEMYDTYQHKIAECDRELEATLKQFGVPERASTEQPKIPNAKKTKRIQRNAPGFNLTSELHRITGVDLSRIDGVNAIVAQTIISEVGLDMTRWKTEAHFASWLGLCPDNRISGDKVLARGTRHVINRAATALRMAATNQAGSAEGDHRDGSPARPAGIPHAEIRSRVRRQGHSVLRAKTS

SEQ ID NO: 115490 - protein, 337 aa, unidentified
MTIIRIGLDTSKHVFQVHGVDENEEAVLRRQVRRGEMERFFAKLAPTWIGLEACGASHHWARVLRGLGHEVVLLPPQYIKPYVKRGKNDAIDAAAICEAMSRPGMRFVAVKSAEQQAGLMLLKVRDLLVKERTMLINAIRGHAAEFGVIAAKGPVKVAELVQRAHAEESAVPGLALDMLSVLSGQLDALDIKLKLLETRLLALHKDNPVSRCLATQPGIGPIGAISFALKVSDPQGFRSGRHFAAWLGLTPKENATGGRHRPGRISRQGDQGLRRLLVLGATAVIRFAKAGRASPWLINLLARRPKKLAAVALANKMARTLWAMMVSGELYRRPQQA

SEQ ID NO: 115491 - protein, 343 aa, unidentified
MDIAVLGIDLGKNVCSVVGLDASGAVVMRRKARRETLIAVVAKLPPCVVGMEACCGSHHLGRLFAAHGHDVRLMSPEYVRPYVKAQKNDDRDAEGIAEAATRPTMRFVGLKSQDQLDMQTLHRSRDRLVGERTALINQLRSILLERGLVAPQGKRKLEQFLAVLMDEQGGAGLSPRMIELVADARTQWAGLDRRIAAFDAEFVCWAKENEDARRLTTIPGIGAIVATALVAAIGRAEVFDRGRDLSAWLGVVPRRFTTGGKPKLLGISKRGNTYLRKQLIHGARAALPHVAERDTPLGRWAKALMERAHHNVAVVAFANKLARIAWAVLRSGERFAVTGTMAA

SEQ ID NO: 115492 - protein, 363 aa, unidentified
MTSMTTNSTAVTGGVDTHGQTHHGAALDSVGRQLGDREFPTTPAGYRALLSWLQAFGHLERVGVEGTGAYGAGLTRQLRAAGVTVVEVNRPDREARRAQGKSDPLDAYSAARAALVGKATGVPKTRDGHVEAIRILRVARSSAVKARSQATNQLKALLVTAPAELREQLRTLSNTKLIATCARLRATGDIADPEHATKTALRRLARRHQYLSEKISAADTELRTLVTAAAPRLIALPEVGTEVAAQILITAGDNPDRLRSEAAFAHLCGVAPIPASSGRTHRHRLNRGGDRRANNALYIVVIGRLRYDSRTRAYAARRTTEGLSKPEIIRCLKRYVSREIFTVLTARAAGDQSHTAQAMSTAA

SEQ ID NO: 115493 - protein, 422 aa, unidentified
MLTTTQDNEEIIERVAALDIGKAEVMCCVRVPDEDHPGKRLQEVQPYPTMTRSVLGLADHLASLGVTRVVMEATADYWKPVFYLLEAAGFETWLVNAKDVKHLPGRPKTDKLDAVWLCKVAERQMLRPSFVPPPPIRKLRDLTRYRADLVAARTAEKQRAEKLLEDACIKLSAVIADIFGVSGRDMLAALAAGERNPKVLAQLARRSMRAKITVLEEAFTGHFTDHHAFLLRTMLGRVDAISADIAALDDRIAEQAAPLADAVARLDEIPGISLASAYVILAEIGTDMTRFPTAGHLASWARLAPGIKESAGKKKGKGSTGHGNAYLAAILGNAAAGASKTDTFLGDKYRRIARRRGSKRAIVALGRSILVIAWHLLSDPGAHFYDLGPGYYAARIDPERRKLSHIRQLEALGYTVTLEPAA

SEQ ID NO: 115494 - protein, 367 aa, unidentified
MKQSSKIFVGMDVHKDSIDITVAEQGGEVRRFGEVGGERSALLKAVRKLTSRGGELVFVYEAGPCGFWIHREITALGHACWVVPPSLIPQRPGDHVKTDRRDSENLARLARAGELACVHVPDVRDEAVRDLVRARDDAVIAQRRARQQLKALLLRNEIRYVGKTSWTSAHLRWLSELKLPQPAQQIAFQEYVDAITVATGRIERFEQSMREEASTWRFAPVVAALQAMRGIQFVHAMTLVAELGDLTRFESPRQLMAYLGLVPSENSSGQRRRQGSITKAGNAYARRVLVEAAWAYRHPARLTRIIALRQEELPKPVCDIAWKAQLRLCAKYRRLRARRVLETKIIVALARELSGFVWAIGQQVKPR

SEQ ID NO: 115495 - protein, 340 aa, unidentified
MNATTYGLDIAKLVFQMYWVDAQTGEIANRRFGRDDLITFLAQRPAGRVALEACGSAHWWARKIRALGHEVVLLHAQFIRPFVQTNKTDAADAKAIWTAVQQPGMRTVAAKTEDQQAMLSLHRMRSQLVKFRTMQVNQLRGFLYEFGVTFRAGRLAGLAEVRERMAELEDVLPGSIILNLQDQLRRIDAFEQDIEQLEKRIGAWQKQEAACRAISQVPGIGRLTATALVATMGDAKTFKSGREFAAFLGLVPRQSGTGGKIRLGSISKRGDPYLRTLLIHGARSVLCHAKVPTAWQKGMQERRPGNVVAVALANKMARTAWAILAHESTYEMSHVSIRPG

SEQ ID NO: 115496 - protein, 352 aa, unidentified
MDRYIGLDVHSASCTAGVLSAKGKRLKETVLETNGKVLVEFLKTTPGNRHLIIEEGTHAAWLYEILSPHVQEMLVLGAPKTKNVGQKSDKFDAFGAAEKLRIGSIERRVYKRLGEFSTLSSLSKAYTNVMVDSVRVMSRLKAVFRSRGIPTGEGQIYSQETKEAWLKKLPTKMRPPAATYYLELEALLPVREQAMKDMLKESKRHRVFHVLKSIPGLGDRRVAELLPIVITPYRFPSKRAFWDYCGLGVVTRSSSDWVRTPDGKWQRAATIQTRGLNFNHNHTLKKIFKGAATSVVGQKRVQDPIYQHYLSLLDNGTKPNLAKLTIARQIASVMLSLWRSGEEYDGKKMKKK

SEQ ID NO: 115497 - protein, 323 aa, unidentified
MSEHITICAGIDTGKYKLDVAIDGSVDQLKVDNTVEGHAALSTWLKRHRVKRIGIEASGGYEQGVVAHLRRDGFVVVVFQPAQVRAYARFLLQRAKNDKIDAALIAACTAAIKKIHAPPDPRLAPFAARMTLIEQLTDQIACCKNYREGHREPQIREFWKKEIARFNKQLRVELKSLAAAIRQHRDLAERLDLIESVDGVGLKTAVAILVRMPEIGRLTREQATALAGLAPYDDDSATHLGIRHIAGGRERLRGSLYKAALAAAFHWNRQLIALYRRLTKAGKPHKVALVACARKLLIFVNTVVERGTPWVSARPLSVTGNPA

SEQ ID NO: 115498 - protein, 319 aa, unidentified
MAQNGLVVAGIDIAKDKADVCIRAVSQRQTFPNTAEGRRQLVSWLRKYKVTKAVMEASGGYERDWAKALREKDMEVRIVDPKRVRHFAQSAGRLAKNDIIDADTIAWFAETFGEAPGQAHDAARETLLQMVKARQGLLDMKTMLSNKGEHDVPEPVQKSHARLLKAIVVEIAKIEAAIAAMIKATPHFAALAEIIESVPGLAGTTSAGLIAAMPELGQVSNEAISALLGVAPYDDDSGKRRGERQIKGGRRKARNLFYMACLGAATRHNPALKAFYRRLIAKGKKAKVALVACMRKLIVILNIMIARGEKWDASRHAVG

SEQ ID NO: 115499 - protein, 450 aa, unidentified
MSTLETPQPTPAVAQPPAFAAHIGLDWADQKHFWTMLVDGHKTRGQLDNTPEAIEVWAAELAQRWGGRPVALALEQSRGAVIAVLSKYAHLVLFPIHPTSLANYRKSFSPSGAKSDPVDGDLILDYLVKHPEQLRCLRPDTVETRSLQFLTAERRKLVDAHTATLQSLIHWLKQVFPQIMRWFDDPGAPLVADLLLRWPTLQELQKAKPKTLLRFFHQHNCRSEERTQERLQQIRQAVPATNDPALLQAGILSIHNAARILAGMRQGIAEFDRQIAVTYQAHPDRFITESLPGAGPALEPRLIAAAGSLRDRFDSAYHMECCFGIAPVTEGSGNSLWIHWRWACSKFVRQTFHEWAACSIRTCDWARQFYDRQRANQKDHHAAVRALAYKWIRIFFRCWRDRVAYSDQRYEQALRTRAAQSKPVVTDSQVDFSVEWKSCGGFSKPAKVSS

SEQ ID NO: 115500 - protein, 349 aa, unidentified
MSVDPAYKVARSGARAAETRWKDRTVIEAILGIDVSKNTLDVSISSCTKVRTKSFPNSSDGWRHLLDWLITQKIQRVHACLESTGRYSLGIACALYEAGHVVSIINPAQIRDFVRTKLGRNKTDRIDASRIREYCELFKPSPWAPPLEAHRRLGELQTIRSGIIAGLTEWKNRKNSGIVDAEAQALADATISHFTSQLGAVDKAIALTIDNDSDLRSKRDLLLSISGVGDTLAGVVLAELPGPDVLRSSGAVVAYAGLNPRQHQSGTSVDRATRISKIGNAVLRAALYMPALSAMRYNPAIMALVTRLKSRGHLKPKQIVVAAMRKLLVLCFGVLKTGKPFDPAIAMGC

SEQ ID NO: 115501 - protein, 425 aa, unidentified
MNSISNKKINQVTDQTLVVGMDIAKKKHYACFVDERGRVLKKSFPVLQSKEGLEWLYQCIVEAMKEFGKTEVIVGIEPTGHYWLNLAYFLDEKGIPLVMTNPMHVKRSKELDDNLPTKHDAKDALVIARLVKDGRFSYPRILKGMEAELRVGATFRSKLVEEQGAVRNQMIRWLDRYFPEFTQVFPSFGKMALAVLEYTPFPSDLAGKELEEVLALYRQSEGLQSPQRPKAKKLIERAQHSIGVTEGQQMARIEIATLVRRYRQLEKEIEALTEQLIELVQTSVEYEWLKTVPGLGDATIVELLSEIGSFSHYQDPRQLIKLAGLTLREHSSGQHKGQKRISKRGRKRLRALLFRAMMPMIRHNEAFRQLHDYYTTRPDNPLRKKQSIVVLCGKLLKVLHAVCTKHQAFDAKRMMQDIFGLEMAA

SEQ ID NO: 115502 - protein, 422 aa, unidentified
MTELNRTPVPATLVAIDIAKHRHEVLIEAAGHQRRRRLTILSKKAEYDRLVEIIMAYGGPVLIGFEATGDYHRGLAYRLLSAGFELRLVSSVALARTREALHNGWDKNDPKDAQVILHMLRIGATQRYVDPLAAGINDLQELSKTHEAISKAKTETWHRILTHYLPLYFPEIERFAGNSRSDWFLALLERFPTPSSIMALDRESFVEEAWPVIGRKVSKARLLNDIYETARSSTALPVAEGSAAIAMFRMVLAEVRSLIRQRDQIEKLAHAMLADHVDYQRLCTIPGIGPIHALTILAEAGDLRRFGHHRQFLKFCGLDLATCKSGTFRGRTKLSKYGNARLRRALWMAAQVAARQRDNSFRDKLGRYTERDRHDADLRRKAVTALTAKMARVVHAVIKGGAEYRPFFERCAFETIVIMGSR

SEQ ID NO: 115503 - protein, 371 aa, unidentified
MKKNLRTKFVGMDVHQKSISIAIADDGPDGEVRLYGTIKNTTEAIDKAIRKLVSTGAELHFVYEAGPCGFALYRHLTGNGFSCIVAAPSMIPKKSGVRIKNDNRDALALARLLRAGELSPIYVPDTEDEAIRDLTRARNDARIAERKAKQRLHSFLLRNEFIYHGKTKWIKSHFNWLAQLKMKHPAQQVAFQEYIEALNECSERITRLDEQIAKAADEWRWASTVKALQALRGVSLLTAVNMVAEIGDFNRFQNPKELMAYLGLVPSEHSSGDRIRRGGITKTGNSHARRICVESAWSYRYQARVTQLLRKRHEGLPKDILQIAWKAQLRLCTRFRRLRARGKPVQVVVVAIARELVAFMWDIARRIPAAA

SEQ ID NO: 115504 - protein, 353 aa, unidentified
MDGEVLISVDPHKASSTLAVFDPVTRTAIDGARFANTKDGYRELARFAGRWAHRRWAVEGCHGAGRSLAQRLVADGERVVDVPAKLAARVRVFSQGHGKKTDRHDAVSIGLAALDANGLHDVALDDATVTLRLLSDRRQELVSLRTQAICRLHRLLAELTPGGVRRELNATKAAAVLGRLRPRDEPGRIRRQLAMDHLGDVRSLDRRIKAVGVQITDVVATTGTTLVGIFGVGPVLAARILAEVGDAARFPDKDHFASYNGTAPIDASSGEQQRHRLSRAGNRRINHALHMAAVTQLRNPTSAGRAYYERKLAGGKTRKEALRCLKRRLSDVVFRQLVIDLQPAATAPNTITP

SEQ ID NO: 115505 - protein, 410 aa, unidentified
MDAIVKCCCGLDVHQATVVACLLVTDGRKKPREEIRTFRTVTRDLLALREWLESERCTHVAMESTGVYWKPVYVVLEGAFELIVGNARHIRNVPGRKTDVKDSEWIANLVRHGLISKSFVPPKPIRELRDLVRYRRKLIESGAAERNRLLKLLETANIKLSSVASDVFGVSGMQMLRALIEGTSTPAEIAQLAKGQLRKKLLELELALEGSVEEHHRFMLGIQLGRLETVEADLAKLDQRIDEKLEPYRDVHTLLMEIPGVNRVVAAVLIAELGVDMSVFLSAKHLASWAGLCPGNYESAGKHKRGNSRKGNVHLSTALVGAAVSASRTKGTYLKDKYFRLKARRGGMRAAVAIAHRILIAAYHMLSTGESYRDLGDAYLDQLEEKRTANHLVRRLERLGYAVAIERKAA

SEQ ID NO: 115506 - protein, 338 aa, unidentified
MNITTIGLDIGKRSFHVFATDTDGREVVSRKLRRDQVLPFFAKVPPCAVAMEACMSSHYWAREIAALGHETSLIPPAYVKPYVHRQKNDAADAAAICEAATRPRVPRVPAKSADQQADRIVHRTYELLSRQRVGLINALRCHLGEFGIIAPAGVQHIKRLAERVSHPATDLPELARSMIQLIIDQIAGIDAEIDRLKRLIAKRCREDADGQRLLTIPGVGPITASAILAGVPDMARFASARSFAAWLGLVPRQNSTGGKSRLGHITKMGDRTIRQLLVSGATSVLLWARRKPGFPDSWLGRLAARRPAKLAAVALANKLARIIWAVLTKGEVYRPAET

SEQ ID NO: 115507 - protein, 400 aa, unidentified
MNPELQVAVDVGCTRHRVAIGLSEGKLLEEFDIGHDAAGLNEFFSRIERHERQWGLPVAVAMEGYNGYARPLDERVLLHGYRLFNVNNMKLARFKEIFPGPAKSDPVDARKMLEMFSLKDKLPLAREVLQEVAPVAPVNVQLKALTRRRKQLVNERKRVSSRMQTDLQAVCPGLFDITGEADNLWFLNFLTCRADLTKLRTVREASLLALSGVGKGYAGKIRLWQKQATFSDTVAWIGPMIVEDARRMLELRHKIGALQKQIDTLATHSEMACHIDTIPGFGRVCSAELAGEIGSLQRFSGESSLALYVGMAPLNNSSGARSGSKPPRHVNVRAKAAMMIAAAQNAATVPDSRAFYDKKRSQGKTHNQALRALARVLVRIIWSMLKHGRDYQTVSPTKNA

SEQ ID NO: 115508 - protein, 330 aa, unidentified
MTNADVRESTMPPLEFVGVDMAQQGFEWAVHGVRGTHSARNDDSGFEALREALQGRNIGLIVIEATGGLERALAGFLLRHGLPVAVVNPRAAREFARSMGHLAKTDAIDAVALAHLAQTLAAKADQSGVRLTPPSAAVELLQAMVARRVQLLAMRTAEKNRLGGAVRVLHQSIEAVIKTLDKQLAKLDRDIDAHLEQHFTDQAQRFDAIKGLGMTTCAAVLAFMPELGTISGARAAKLAGLAPLNNDSGKERGKRHIWGGRSIVRSALHMATLSAVRFNPVIKAFYDRLLAAGKPKKVALTACSHKLLRILNAMARTGQPWNDKFHAVTS

SEQ ID NO: 115509 - protein, 354 aa, unidentified
MNHLGIDVGKRKCRAALKDDKGKILDEFFFSNEGNGIHNLLSRIQSHGKCVAVLESTGNMWMRIHDMLEEIGIDTKLANPNKTRIIAEAKIKSDKLDARILSDLLLRTDLIYESYVPKRENRDKRSLVRHRITLSRTKTKLVNKVHSILDKYDYRTELTDIFGKSGIEWLKALSSQVTPVDRIILDTSIESIEAINRQIDTVSKEISKYARDNNDIKILLSITGIDIFSAMLISTEIVDIKRFSTPWWKLVSYAGLAPSIRESSGKIKTGGITKQGSPWLRWILVQCALIAIKYDTHLRIFYDRIKNRRGHATAIVATAKELLVIIWYMLTRNELYRYMDKQRYERKLQKLEQR

SEQ ID NO: 115510 - protein, 345 aa, unidentified
MKKNIIGIDFSKETFDATLLDCRNSELSEAVQSAVHEKFTNNKEGFQAFVKWIKSSVKKITPDELLLCGEKTGKYSLPLSNFLYAKGYSIWLDSGLRIKRSLGISRGKSDKADSLKIALYAYRYQDMAVCYVPLSKNVSRLKELFLYRQHLVSQVKAMAVRKNVTDDFKKELGDVKFIVDSAAKIIQQIKATIKKCEEKMQELIEEDDELKTTHDSITSIKGISLINATAFIAYTNNFKDFGGNAKKIATYWGVAAFAQESGTSVHKVARVSKIASKMLKSLLTQAARITVRWEPKFRQYFEQFISRGKHQGVALNNVKNKLIHVITALAVSKEKYNREYEYIKR

SEQ ID NO: 115511 - protein, 356 aa, unidentified
MQTQVTKKIDFTGKDLFIGLDVHKKSWSVTIVIDGMEHRTFTQPPDPDALNRYLQRMFPGGNYNSAYEAGFCGYKIHRELNTHGIKNIVINAADIPTSQKDKLQKRDPVDSRKIARELEKGSLHGIHIFNRDMEELRSLNRTRFYLMRDLRRSKNRIKSFLQYYGEPIPEELDNNQWTSKFVSWLKQVQMKTPGGQDAFSYLVRSYEHQREQMVSLSRQVRVRIREYDNELYSLLKSISGIGPLTSSALMTEIGDINRFPHIDHLSSFVGFVPRVRESGETTHTGGITFRCNAFLRTLLIEASWQAIRQDPALMQYYHRHLINNKGHKVIIKVARKLLNRIRYVMKNRKPYETRVA

SEQ ID NO: 115512 - protein, 360 aa, unidentified
MEVVHARCAGMDVSKKDAKVCVRVAGAGRRKTVESVTTWGSMTNQILALRDHLVAEQVTCVVMEATGDYWKPFYYLLEAAGFEVLLVNARQVKTLPGRKTDVFDVTWLARLGAHGRVKGSFVPPEPIRRLRDLTRARTAITRERGREAQRLEKLLEDAGIKLSAVASDILGVSGRAMLEALIAGDRDAVGLAELAKRRLRSKIPELTEALNGRFTEHHAFLARVHLDLIDRHTAAIHKLTARIEVMIEPFQGFRDLICTIPGISTLTADVIIAETGADMTRFPTAKHLASWAGTTPGHHESAGKVKSSRTRPGNPYLQGALGAAAMASSQNPRTYLGARYRRIAARRGPKKANVPSNARC

SEQ ID NO: 115513 - protein, 331 aa, unidentified
MQNESAPDARGPVFCGVDTHADSHWLYVLDWRGRKVLSRRFPADAAGYEALAGAIAAAGEPACIAMEGTSSYGAGLTRHLASLGMPVREALSPARTQRRRPGQGKCDEADAERAARAAMSGSRLGTPKSQDGWVDGVRCMLAARSGAVKARTSAINTARSLLTTAPEGLRSRFRGMGGPRLMEELPSVRAEGALGAALGALADLWAAARDAALDMERAIEASLEENCPALLAMYGCGPVSAAKLAVAAGDNPGRLRSEASFAAICGACPIPASSGKTVRHRLNRGGDRQANSALHEIARQRVMRDPETAEYAERARGRGKSDREVMMDWLH

SEQ ID NO: 115514 - protein, 397 aa, unidentified
MYIVGIDIAKRKHEAAVIDGEGTVIIKPFSFTNNCSGYNRLLAMLTKAKLPLDEVSFAMEATGHYWLALFTRLQKEGFRVQVINPVQTNSIRSFYIRQAKTDPRDALLIAEVIRFGHFSESTLHPENIYELRELCRGRHAIVSMQADVKRKVVALLDQVFPEYETAFTNLFGDTSMAILQTCPTPKELSEMPLEELCHLIEVSSHKRFRMVKAQELQELARNSFGFAMAGDVFSTMIRLYAKHLDFLKQQVQEMDRKIAEIMDTLDTPITTITGIGLTLGAYILSEIGDISRFSSAAKLAAYAGIDPTMRQSGEYNGVRNRMSKRGSPYLRHAIWLAASSAVLHDPALKLYFQKKRDEGKPYMASVGHACRKMVSIIYAVMRDNKAYTPYIPNEISA

SEQ ID NO: 115515 - protein, 340 aa, unidentified
MDTIGLDLHKRESQLCILTDDGELIERRIVTSRARFSEVLGSRPPARILLEASTESEWVARHLESHGHTVVVADPGFAPMYATRSKRVKTDKRDARTLCDALTLGAYRGIHRASDAQRHIRAELAVRDALVRTRTRYVAMIKAFVRREGLRLPSGEVEGTEAKLAQLVLPLHTTQQLAPLVALLAPINAEIDAADARLLGYSKDNPVVGRLRTMPGIGPVTAIAFVAALDDVARFQNAHQVQAYLGLVPSEFSSGDRQVRGHITKRGDARLRWLLVEAAWRILRSPNPELAALKAWAEQIAARRGRRIAVIALARRLAGILYAMWRDGADFRSRPVARAA

SEQ ID NO: 115516 - protein, 341 aa, unidentified
MGQLNTIGVDLAKNVIQVSVVSPSSKELLNRALTRTKFKEFLATQRPALVAFEACASSHYWARTAQRHGHDVRILPALSVAPFRQGHKTDQNDALAVAEAAVRPNLKEAPIKSLDQQGLQSIQRSRELLVQERTALSNHIRGLLFEFGIVMPKGFATLHARIPEILEDAENEVPHLFRSTLQLMYGRLLALKEDLDVLTRQIEQLVQANDACKRLLDIEGVGPISAVLLYATLGTGEAFHSGKEFSAYIGLTPKQYSSGGKTKLVGLSRHVANKRLRAVLIQGARSYIHRVKEPKTTKDQWLLAMVARSGYGKASVALANKNVRTAWAMLTRGTDYERVAA

SEQ ID NO: 115517 - protein, 392 aa, unidentified
MLYLGIDIAKNNHVATLIDEQAKPLFKGFSFANTTDGGESLITKLHHHTQTITDVEVGMEATGHYWLSLYSFLVEKGFNVHVINPIQTDGWRKGVEIRKRKTDQIDSFLIADLIRYGDFVETSLSDENILSLRNLSRFRHYLVAFIGDLKRKAICVLDQTFPEYQSVFSNIFGQTSSELLLNFQTADDFQNITAEQLESVLENISFKGFAKNKLTQISELAANSFGLKFCRDSFSLQLKLLLEQIRFIEAQVSDVEAEMAKILNILNSPITTIPGIGPVTAAAILGEVGDISRFSNPSKLVAFSGIDASVSQSGESSGVGYRMSKRGSPYLRKALFQAALVASSHDPVFKAYYQKKRAEGKHHLTALGAVARKLCYTIHAILKNNTPYKPQF

SEQ ID NO: 115518 - protein, 340 aa, unidentified
MMNVTRIGIDVAKQVFQVHGVDASGHTVLRRRLSRTQVRTCVAPLRPCLIGLEACGSAHDWAREMRALGHDVRLMAPQFVAPYRKNDTNDGNDAEAICEAVGRPHMRFVPVKDVGQQAVLTVHRARQLLIAERTALVNQTRGLLAEYGLIVPAGICALRRALPGLLETPALPALAREVFTDLADRLRAVDERIAAYDRRVDQLARQMEPAHRLLQVPGVGPVTATALVATVGDARTFRNGRQLAAWLGVVPRQHSSGGTRRLGRITKRGDVYLRTLLIHGARAVLRQIARRTDATSRWVTALQARRGFNKAVVALAAKQARILWALLATGRTYQLAATCP

SEQ ID NO: 115519 - protein, 358 aa, unidentified
MPCPRQLNGKIAAIGIDIGKNSFHIVGQDRRGALVLRQKWSRGQVEARLANLPPCLIGMEACTGAHHLSRKLQALGHDARLMPAKYVRPYSKGDKNDYRDAEAIAEAVQRPTMKFVATKTSDQLDLQALHRVRERLVSQRTGIINQIRAFLLERGIAVRQGLRFLRIELPGILASRTDVISHRMVRILEDLSVDWRCLDTRIEGLTSEIEMLAHQDQHCERLMTVPGIGPIISSAMVAAIGTGDVFSKGRDFGAWLGLVPKQISTGDRTILGSISKRGNRYLRVLFVQAAWVVLVKLGPEHWERYGLKSWIEAAKRRLHHNVLAIALANKLARIAWAVLNKGRAFACIKTDAMASRPA

SEQ ID NO: 115520 - protein, 350 aa, unidentified
MIIIGCDYHPGFQQIAYVNTDTGELSEARLGHKEQAEQFYYDLKTQGVPVRVGMEASGHARWFERLLAELQFELWIGDAAAIRTKRVRKQKTDRQDAQLLLRLLLEDRFPRIWVPDAENRDLRQLLWHRHRLVQMRTRVMNQLHVVALNEGLRRKKALWRPAGRRELEALSLAPWASRRRQDLLDLLDRLTPKIHELNERLEQMVARRPVTRQLSTHPGVGPLTALAFELVIGTPERFACAKQIASYVGLVPAEESSGDRRRLGHISKQGNALLRFLLVEAAQVTVRSDAQWRSQFFHLAMRRGRKIAKVAMARKLAVELYWMWRRGWDYHEMQKLGSHAGAPGNRHGVQ

SEQ ID NO: 115521 - protein, 451 aa, unidentified
MPASKPRRANSAAQISVVHPHAAAIDIGAQFHVVAVGPERDPEPVRSFRSFTKELHDLANWLKHVGITTVAMESTGVYWIPVFEILEAYGFEAVLVNARDVKNVPGRKTDVKDAQWLQKLHTHGLLRASFRPRHDVATLRSYLRQRERLLEYAAAHIQHMQKALTLMNLHLHHVVEDVTGATGMKIIRAIVAGERNADELAKYRDVRCRASVETIRNSLIGHYQAEHVFELTQALALYDFYQTQVAQCDERIELALKHLQTGVEPPTTPMPAARARTKQPNGFAFDVRAALYGMLGVDLTQIHGLGPYVALKLFAECGNDMSRWPTVKHFTSWLCLAPGNKISGGKILSSKTRRSSSKAAAALRLAATTVGRTDTALGGFYRRLSARIGKTKAVTATARKIAVLFYNTLRYGMDYVDPGAAYYEERYRQRVLSNLTRRADSMGYVLQPKAG

SEQ ID NO: 115522 - protein, 326 aa, unidentified
MLYAGMDVHKEFCQVIICTKEGEVIKEGKIRTNEEEIKKFFYGIKDLKVAIEASTNYSYIVDALAKERYEVLMAHPLKTRAIAEAKIKSDKIDAKMLADLARGNLLPTSWIPPKEIRDLRDLVRQRIFLVRQRAKIKNKIKAELIKRGIDYKRNIFSKAGKEWLHSLKIPAIETYFSIMDKLEDEIKKMDKKLKREEEKFNEIELLKSIPGISTFSALVIIAEIGDVNRFPDEKKIFSYAGLIPSVYKSGEKVYYGHITKQGSKYLRWILVECARIHVRKCNSKITEFYKKLKKKGKHENVAIIGAARKLLQTIYYMLKKGESFNG

SEQ ID NO: 115523 - protein, 302 aa, unidentified
MEILAIDVSKANLEVFDGSVSREVKNCVGEIEALLLSHPNAVVVCEPTGRYHYFLVETAVRLGHTVYLVNPREAKNYKESMSFRAKTDKLDAHYLYQYVMRNSDLLRPYRPASKELAQLRELLGRRQGVVESRTALTQSLGKELSASEQALLSTFDAVLRDIEAKMDAIASQYPTYELVRSIPGVGRISGCALVFVLESKSFENSDQLVAFLGLDVRIRQSGKFRGLEKLSKRGDPILRFLICFAGRGLLHSLLGRDKRKRLEDQGRKFPERMVIAARKILRVAFQLHKTQTAFQAAKWSWA

SEQ ID NO: 115524 - protein, 401 aa, unidentified
MFDTSDIAVFLGLDVGKGDHHGHGLTTAGKTVFDKRLPNSEPKLRAVFDKLTAKFGRVLVIVDQPASIGALPLAVARDAGCEVAYLPGLAMRRIADLYPGEAKTDARDAHVIADAARTMPHTLRALELADATAAQLTVLTGFDQDLAAEATRTSNRLRGLLTQLHPSLERVLGPRLDHPAVTHLLEQHGSPAALRKAGRRRLVTLIRPKAPRMAERLVDEIFNALDEQTVVVPGTTTLDTVVPSLARSLAAVHEQRRTVEAQIGELLEAHPLSKVLTSMPGVGVRTAATLLVTVGDGTSFPTAAHLASYAGLAPATKSSGSSIHSEHAPRTGNRLLKRAMFLSAFAALHDPDSRAYYDRQRDRGKTHTQALLRLARQRISVLFAMLRDTLYETRTPETAPA

SEQ ID NO: 115525 - protein, 340 aa, unidentified
MKEVITVGLDIAKHVFQVHGVDQKGDTVLRRKLRRSEIISFFDHLPPCLIGVEACATAHHWARVLINLGHEVRLMPASYVKPYVKRQKNDASDAGAICEAVTRPTMRFVPVKSEEQQSVLMLHRARELLVRQRTMLINALRAHLAELGIVMRQGPTGVSTLIGLIEDDEHDLIPAFTRRALTPLVEQLRDLYRRIAELDHEIIQWHRTSELSRRLETIPGVGPVTASALSATIADASLFKSGRQMAAWLGLVPRQNSSGGKERLGRISKQGDPYVRKLLVIGAHAVLRFSRKEGTGPKKWAADLLVRKPYNVVAVALANKMARIAWAIMVSGERFRSIPA

SEQ ID NO: 115526 - protein, 366 aa, unidentified
MAITHVALDDSKRVIVAGILRADATQPELREIPNEPRHVRRLFERLLQAGPVRACYEAGVSGYDLYRQLTALGVDCAVIAPALTPRKPGERVKTDRRDAAKLARLFRAGELTAIHVPTQAEEGVRDLTRCRDDVRADIVRWRHRVLKLLARHGRIYQAGKNWSQAHWTWIRAQRFDDPALVRTLEASLEALEQALRRRADLDRVIEGLAGEPRYRDAVGALRCFRGINTLSAMILVAEIVDFQRFARPRALMAYLGLVPSEYSSGDRHRRGALTKAGNSHARRILVEAAWHYRHRPALSPRLARQTADQPPAVVAEAWHAQQRLHRRYRHLVAHGKRPTVAVAAVARELAGFIWAAMTHPPRMLAA

SEQ ID NO: 115527 - protein, 389 aa, unidentified
MNAEIPTNEIDDAIVTKLGAIFFSMELNRSKWLLTFLATGIDRMSKYVLNAGDVSGLRDRLADVREKARLRTGQRFPYVAIQEAGMDGFWIHRVLLRDGIESHVVDPASIATSRRRRRAKTDRLDGETLVRSLLAFKRGDPRVCAMVVAHTREEEDRRRNSRERQSLIKDRIKLVNRIKGLLYAQGTVGYEPLKSDRRAKFAELATGDGRELPSHLKAEIYRLIDRIELILQQLKAVEAIRDELLIAPPVNAAAPACPASLMQLRGIGPDFANVLWSEGLYRHFGNRRELASYAGLAPTPWQSGTIDRMQGVSQAGNPRLRTVMVQISWFWLLHQRESALTRWFHQRVGLEGGRRKKPAIIALARKLLIALWKFVRHGVVIEGAVLKHA

SEQ ID NO: 115528 - protein, 344 aa, unidentified
MDQYVALDISLREVSVCVLDATGAVVFEGRSPSDPRCLAALIRSKAPRAVKVGLETGSTSTWLAHALLAEGLPVVCMDARHAHAALSIRPTKTDRSDARGLAEMVRVGWYRAVAVKSLEAHERRALLAARHRLVVMRVDLDGQIRGLLKTFGLIVGPGNSDAFLRRAEALAEGHSVLSPLVTCLSEVRRHVAAQISALDKQIGRIVRNDTTLRRFVTVPGVGPITALAFLSTIDDPSRFRRARDVGPYLGLTPRRHQSGEIDRTGRISKCGDGFTRKCLYEAATVLLTKVQRWSPLKAWGVRLAQRIGAKKARVAIARKLAVILRCIWSDGTQFWWTKQETAMA

SEQ ID NO: 115529 - protein, 438 aa, unidentified
MHFSGEVEEREERLNKQKVVAWVGIDWADEGHEVWEYTVQTDSATCYAIKHTAESLQEWVNQLRIRHGGKPVAVVLEQARGGLIYALMNTGFMEIYPVNPESLAKFRKALYPSGAKSDPTDAELLGQMVRQNPGRFRAWVPGDEQTRSLQLLAEGRRKLVEDMTALTNQLTSVLKTYYPQALNWAGDLSSEQACSFLEKWPTLADLQKSRPFRIREFYEKYGRPPREVLDERVTQMEKAQPLTADPAVVMAGKMMVNAVVAQIRPLRAAIEKYDVEIERIFRQHPDRAVFESFPGAGKVLAPRLLAAFGADRDRFEAALEVQQFSGIAPVTERSGKTIWVHRRLACPKFVLQTFHEFANQSRRFCVWSKLYYQQQLTRGKKHNAAVRALAYKWIRILFRCWKDRRLYDDSRYEKSLIKRGASLAPLLGCTTELGHEKF

SEQ ID NO: 115530 - protein, 355 aa, unidentified
MNSEKYIGMDVHQATISVAVMDSSGKLIMECILETKAATILEFIDGLRGTLSVTFEEGTSAAWLHDLLKPHVSHLVVCDPRRNALLKDGSKSDRIDARKLAELLHANKLHAVYHAEHGVRTLKELGRSYLTITKDLTRVMSRIKALYRGWAIPCTGTTVYAVRHRAEWLAKIPQPGVRLRAERLYQQLDLLQPVRQGARCDLMVESHKHHAVKLLRQIPSIGPIRAALLVALLQTPHRFRTKRQLWAYSGFAVETHDSGEYRFVRGKLVRNRERITVRGLNHNHNHDLKNLFKGAALSASTRPGPLCDFYVALVEKGMRPTMARLTLARKMAAITLTIWKKGVDFDAKQLNRQAA

SEQ ID NO: 115531 - protein, 326 aa, unidentified
MNLMPLGIDVAKQKFNVCLRFAHDKLKHKVFTNNQAGFTQLHRWLQQHAGDRVHACLEATGAYGEALALYLHEQGHLVSIVNPAAVKAFAASCLSRTKTDRVDAELIARFCLAQQPPAWEPAPAEVRELQALVRRLASLIEMRVAEENRLAAGPTVPEVHRSLEESLAHLQAQIKRTEKLIRTHLDQHTGLRQQRDLLTSIPGIAATTAALLLAELPHLKQYRSARQVAAVAGLVPRERQSGSSVKGRVRLSKIGNARLRKALYFPAITALRCSPFMQQWAQGLRERGKSKLSVVGAVMRKLLHLAYGVLKTNQPFDPEWTTRAAG

SEQ ID NO: 115532 - protein, 410 aa, unidentified
MDTLYPRCCGLDIHKRDLVACLITPGTDGHPTKAIRQFGTMTADVLAFADWLTAAGCTHVAMESTGVYWKPIYNLLEESFTLLLVNARHIKAVPGRKTDVKDCEWIADLLRHGLLQASFVPERGQRELRELTRYRTALVRERTAEANRLQKTLEGANIKLASVATDILGKSGREILAGLIAGETDTEALAQLARGRLREKLPALEQALIGQFGPHQRFMVAEQLAHVDYLDTAIERVSGEIAQRVCGSDDLIGRLDAIPGIGRYVAEALIAEIGTDMSRFPTDRHLASWAGMCPGNRESAGKRQSGNTRKGSPWLRALLVQAAHAAGRTKGTYLAAQYRRLTMRRGRNKAAIAVGHSLLVIIYHMIQQGTEYNDLGPQHFDERDRQAIEHRLVRRLEGMGYTVSLEPRAA

SEQ ID NO: 115533 - protein, 349 aa, unidentified
MGTFLNPTEAEMTCYSGIDLHSNNSVVVVSDEADRVFYQRRLPNDLAMIGAALEPYRGELAGVVVESTYNWYWLVDGLQAAGYRVHLANTTAMKRYEGIKHSGDETDAAYLAHLLRLGILPTGYICPPAQRAERDLGRKRLQLVRTRNAQVLAVETIVARQTGAGMSANAVKRLEGETVGALGFPEDVSCAVAANVAVIQTLNVEIDKLEARLRQRVRLRRPFRMITTTPGIGEVLGTTIMLEAGSIERFAAVGNFASYARCVDSKRTSNGKKKGEGNVKNGNKYLAWAFIEAANFARRYCPEAKRFYERKKARTNGIVATKALAHKLARACYHMLKDGQPFDVKRCFG

SEQ ID NO: 115534 - protein, 322 aa, unidentified
MAMLSFGGIDVSKDRLDIMVLPDEQCSWVSNDAAGWAELVEQLRGSSITAIGVEASGGYERGVVRALLAAGMSVRQINPFKLRQFAKASGTLAKNDRLDARMIASFVAIMPTRPAQRQAPMIEQLAAMLTVRRQLSEQKVATENASRLLEGAMLQRLSRRRVAGLTADIDLLDQRLVEIVTADAALAHRFRLLTSMPGVGAVLACTLIALLPELGQMSRKQVAALVGLAPYDFDSGKLKGRRCIWSGRARVRHVLYMAALSASNWNPALKAFHNRLAATGKKPKVVIVAVMRKMITTLNAMLRDGTAWVDRYSGRRSASTAR

SEQ ID NO: 115535 - protein, 363 aa, unidentified
MSQISNTTIAVVGIDIGKNSFHIVGLDERGAIVVRQKWSRGQVEARFANMPPCLIGMEACVGAHHLSRKLNSLGHDARLMPAKYVRPYSKGQKNDFRDAEAIAEAVQRPTMKFVATKTAEQLDLQALHRVRERLVSQRTGIINQIRAFLLERGIAVRQGQRFLRVQLPVILATPPEVLSPRMVRAIEDLAADWRRLDERIESLSSEITTLAEQDNGCERLMSVPGIGPIISSAMVAAIGSGDAFSKGRDFAAWLGLVPKQMSTGDRTILGRISKRGNRYLRVLFVQAAWVVLIRPKSWERHGLKPWIEAAKKRHCPLLSDRRIPAPLTIRRARSRSATLCWQQTGLDRRQRPDCPTPQRVRRC

SEQ ID NO: 115536 - protein, 406 aa, unidentified
MRFYIGLDWADAEHAVWVEDENATKIVGRIVPQTAEGLSEWGRWLDERRAEGIELWAAIEKPEGRIVDFLLDHGVLVFPVNPKALDRARDRFRISGAKSDPFDARVLATFLRTDHGHLAPLRPSSEAAQELKGLTRDHARQVRQQTRLLNQLTATLKAYYPRALEVCDDLKSQWARAFLREYSTPAALAALTARRWQRWTREHRLGAERTAELWAILQGPQLPVPAHVVRVNARLVGALLAQLEATVTAVEAYREAITDFFASMPAAEWATSLPGGRSGTPVPQLYAELGDAAGRWQTFRHLQGHAGSVPVTDRSGKQVSVQFRFACNMHLRQAVHQFAFQSLRKSEWARAYYDRCRKRGHSHHHAVRALAAKWLKIIFVLWTRQVAYDETYHLATMARQHLRQTA

SEQ ID NO: 115537 - protein, 384 aa, unidentified
MTQHHDGAPVGGHSGTILVVFELSKAKWRLGIVVPGSEKMSRYMVDGGDTGSVAQLLAKARAAAERRGLAEVRVASAYEAGFDGFWLHRWLAGEGVENRVLDPASIEVNRRKRRAKSDKIDLAQLMRVLAALERGEPKVCSVARPPSVAAEDAKRRTRERTRLVRERIGHTNRIKGLLHGQGVRDVDPIGSGFIASLETLVTGDGHALEPRLIGEIEREHERLLMVVGQIAASEAQSRQALKSAEAGTNAAQVAQLVRLNGIAFRSAEPLVDEAFYRRFVNRREVGGYFGLGGTPYDSGASRREQGISKAGNPKARAIAVELAWLWLRHQPKSALSQWFFKRVGDVKGRNRRIAIVALARKLMVALWRYLETGLVPEGAVLREV

SEQ ID NO: 115538 - protein, 337 aa, unidentified
MKYCGIDLHSNNAVVAVTDDHDRVLYCKRLANDFPLITAALAPHRADLQGVVVESTYNWYWLVDGLMAAGYAVHLANTAAIKQYEGLKYAGDERDAVFLAHLFRLGLLPQGYIYPPQDRALRDLARKRLQLVQQRTMNILSIENILARQLNLRLNAEQVRHLDTAALKAFHLPSLVERALIANLAVLGTLQSQILALETVLHNEVKLRPEFQILKTAPGIGDILAATIMLESGTILRFPGVGQFSSYCRCVDAKRISNGKKKGQGNAKNGNRYLAWAFIEAAAIALRSCPPARRFYERKKARRMPVVAMKALAHKLARAAYYMLRDGKPFEVTKCFG

SEQ ID NO: 115539 - protein, 346 aa, unidentified
MLHAGLDLSRKRLDFHLLDEQGESVEVGAAPPDADGLRGLSVRVDRYRQPVRAAIESMTGARFVHDQLELHGWEVEIADAVKVKGLAPLACKTDRIDAWVLAELSRRELVPAIWLPDPRVRAERERARFRLHLVRHRTSLKQRVHATLLTHGKPCPVSDLFGVRGRELLAALELPEPWATDVEASLRLIDELEREIAACEVELRTLGAEHRYVPLLTTIPGIAWVLAYTIAAEIGDIARFSSPAKLAGYTGLCPRVYQSGESDRRGPLSKMGPRYLRWALIEATTHASRHPAYRERYERTKLRLGKQRGPRVAQVDLARRLAEAIWHMLTHNRPFAPAGATAPMTA

SEQ ID NO: 115540 - protein, 342 aa, unidentified
MHITSIGIDLGKITFHLVTLGEQSKVLARKKFSRKQLLAYTANLPASLIGMEACSGAHFIAAAIRGQGHEVRLIPAQFVKPFLKSNKNDFLDAEAIAEAVARQNMRFVPIKTDEQLDLQALHRVRDRLVQRRTAVINQIRGFLIERGIVFPKRPANLRNNMAVLLEDAEANLSPRMRRLLEGVWQEWKQLEAHIAETGDEIERIASADASCQRLRQIPGVGPLASTATVAAIGNGAAFRKGRDFAAWLGLVPKQRSTGGKARLMGISKRGNEYLRRMFIHGARAVLYRVKYDTGGFGRWVHQLEVRAPRNKVIVAIANKLARIAWAVLSSGEAYQHQPIAAA

SEQ ID NO: 115541 - protein, 322 aa, unidentified
MAMLSVCGIDVSKDRLDVMIWPEERWSAVSNDPTGWADLVEQLGRLSIAAIGIEASGGYERGVMRALLAAGLPVRQVNPFKLRQFARASGVLAKNDPLDARMIASFVAIMPTRPAQQQAPAAQRLTEMLAVRRQLSAEKVAAENASRLLEDAMLQRLSRRRIARLAADIAMLDKHLVEIVGSDPALAHRYRLLTSMSGVGAVLACTLLTLLPELGSLNRKQIAALVGVAPYAFESGATKGRRCIWGGRAHVRNVLYMAAMSASNWNPALKAFHDRLKAAGKLPKVTIVAVMRKMITTLNAMIRNDVTWADRHSGRHNVPTAR

SEQ ID NO: 115542 - protein, 341 aa, unidentified
MEYCGIDLHAEYSQICILDEQGEVMESSRIRTSLKVLERFFKRDPMRVVMEAGGSSPWVSRLLDSLGHEVVVCSPRRVRLIAESKLKNDRVDAEVLARLVRLDPEFLKPIQHRSEEAQLLRANLKVRSAMVEARTKWINTVRGLLRSFGYKVCGKAPHTFAERVDQMELPGELRTVIEPLLEQLDLLSGEITRRNEHLEEMVKELPEVDHLREIPGIGPVVATYFVLTIDDPHRFRHSRDVASFFGLRPSMRESASVTHFGRITKEGDPEMRRLLVQAAHACLHTKADSELKSWALALAQRKGKGKAAVALARKLAVLMHHLWVTGEVYQAFPNKEATQAA

SEQ ID NO: 115543 - protein, 341 aa, unidentified
MSDYSYFCGIDLAKNHFSLHAVDQNGKVILHKSVTRSKLLTTIANMPLMRIGVEACGGAHYWARTLNKLGHDARIMAVKYVVPYRTKGKNDLNDAVAICEAVQRPSTRFVPIKSPEQQAILSVHRMREHWVRERTALMNRMRALLSEFGLIIPVGRSSLMKHVPLMLEDAENELPHLARTVIADAYHHLGELNQRIADTEQVFDSFAKVSTNVQRVMKVRGIGPQTATAILASIGNGSQFDKSRDFSAWLGLVPKQYSTGGKPRLGRITKHGDKYLRTLLVHGARTVIANLGDKQDKLSQWCRGVLERRGMNRAIVALAAKNARIIWSLLHNQTEYENYAA

SEQ ID NO: 115544 - protein, 342 aa, unidentified
MDLGDKWSEGAVLDARGELSERARVRTTQKGFAQAFTGYEGARLVLEVGTHSPWASRGFAARGFEVIVANPRRTRRIAESDKKSDRFDVEQLARLGRIDPDRLSPIVHRGEEAQRDRILLLSRAGMVRARTQLINQARGFAKSLGTRLPSSASEVFAKRVRAAVSEDLFPGLSTMLGRIEQLTEQIRTMDREVERLCRDRYPQTALLRQVSGVGPQTALAFVVTLEDPWRFAKSRSVGAYLGLRPRHRDSGGQRPQLRITKAGDGLLRCLLVSAAQYILGPFGPDTDLRRFGLRLAEHGGKSAKKRAAVAVARKLSVLLHRLWVTGEVYEPIGYGERHEQAA

SEQ ID NO: 115545 - protein, 344 aa, unidentified
MKITTLGIDLAKNVFQIHGVDALGKVIVKKQLKRDQLAAYLVNLPPCLIGMEACGGAHHWARKLMGFGHTVRLMAPQFVKPYVKTNKNDAADAEAICEAVARPNMRFVPIKDVGQQSVLSLHRVRQGFVGARTAQANQIRGLLAEFGVIVPQGIAHLYTRVPELIEDGSNEMTGSFRLLVQLLLEHLKALDKQVDEMEAQIVQWHKHSQASLKLAAVPGIGPITASALVASLGDAKNFENGRQVSAWLGLVPKQHSSGGKEKLLKISKRGDTYLRTLLIHGARSVLYREQSKADSCSWVKGVATRRHHNIAAVALANKNARIVWALLTREKGFDAKHVSLRVAA

SEQ ID NO: 115546 - protein, 364 aa, unidentified
MSQSKWLVAALVPGVERQPLKKLDAQEEGLLKLLHRWRTEAGQAGRAIKRIVVAYEAGRDGFWLARWLRAHDVEAYVIHPTSIAVSREHRRAKTDRLDTELLMRAFLGWLRGEKRHCSMVAIPTIEEEDARRPNRERQNLVTEQTRLVNQMKAIFTRFGIRTFQPMLRKAEDKLKGLRTAEGTPLPENTRAELCRHLARLRVVREQIRAVEQERLRKLAAAPAAEYGPHAMVRLIARVLGVGIETADMLVNEVLSRHWRDRKAIARYAGLTGSPDESGKRRRERGLARAGNARVRCGMIQFAWRFLRFQKDSALAQWFAARTADRRASTRKTMIVALARKLLIALWRLVTSGQVSDGIVLRPAS

SEQ ID NO: 115547 - protein, 412 aa, unidentified
MEVVYPRCCGLDVHKKSITACVLWAEAKGKSRKEKKRFGTFTHDLLQLADWLAQCGVTHVAMESTGVYWKPVWNVLAEQFEALLVNAQHIKAVPGRKTDQKDSEWIADLLQHGLLRGSFVPPRPTSELRDLTRYRVSLVQEINRIANRIQKVLEDANIKLASVATDALGASGRAILEAMLAGERDSARLAEMAQGKLRNKIPELQLALEGRMTEHHRFLLRQLFDHLRFTESKRSEIEQEIDKRMRPFQDEVIRLCTIPGVDRVTAWGLLAEIGLDMNQFPSSGHLASWACLCPGSFESAGKRLSGKMRKGNVSLRRCLSQAAWAISMMKNNYLSALYRRIAARRGAKRAIMAVAHALLEIAYHMLKRKEDYRELGADHFDRIDVNRIRRSLVRRLERPGHKVTLEPLAQTA

SEQ ID NO: 115548 - protein, 361 aa, unidentified
MVYLGVDLHRKRSVVTALAEDGTVLLSRRIASRPDDFRHVFGELEPRTLSVTFEATYGWSWFADLLADAGIEAHMAHPLATKAIAAGRVKNDSVDARTLAHLLRTHLLPEAWIAPPAVRERRRLARTRTSLVRIRSRLQCQVHAILADHCVQPPVDSIFGAAGRRFLQTVELLAVDRGRVDAALRLMDAVTAEVIALDKELRAAFTCDERIRRLTAIPGIGFLSAAVVLAEVGEVSRFASPDQLASWAGLTPTERSSDEHTQRGHISKQGSRWLRWVMVEAASRRFRDPALRRFEERIARRRGKKIARVALARRLLTLSFYALRDQEGCRAFPVRARASRQIRSGALAGSHGLPVGDGRAY

SEQ ID NO: 115549 - protein, 411 aa, unidentified
MDRIVERCAGLDVGKSIVVATVRVPGPGGERVQTTHTFAATTAGLLALSDWLASYGVTRVGMESTSVYWKPLFYVLEDRFECWLLNAQHLRNVPGRKTDVADSAWICQLLEHGLVRPSFVPPAPIRELRDLTRYRRAQIEERTREVQRLDKVLQDAGIKLTSVASKTLGVSARLMVEALVAGTHDPEVLAELARGTLRKKIPALREALHGRFRTEHHGLLVGHILAHIDYLDEAVATLSARIEEVVAPFSRQVELLDTIPGVDRRTAEVLVAEIGVDMAQFPSAGHLASWAGMCPGNNESAGKHKTGRTRPGPKWLRRALTESAKAAARSKGTYLAAQHARIKRRRGPAKATGATRHSILVAAYFILRDGVPYRDLGADHFHTAGSTQAHVRRLVRQLEALGHQVTLQPVA

SEQ ID NO: 115550 - protein, 419 aa, unidentified
MSFKILKNNCCGLDVHKTWIYACIGITDSHSRTEYKQARFSSFSKGLQELCDWLAKYNCTDVCMESTGKYWIPVFNVLEKNNVWVTLSHPKYTKPQKGNKTDRKDAKWICDLYMCGMVKPSFIPPADIRELRDLVRYRYKLTCMITGEKNRAQNCLTVSNLKLDDVFSDVFGKSSRSITEQILQHPGETFDVAPFVDSRCKTPLEEIQAAVDGAISAEQAVKLRQCLDHIDELESHQSELEREIFRLSDKYADALSLIRTVPGFDKNPMTAVQVLSEIGGDMSVFPTAKNLVSWAGCCPRNDQSNRKIKSTRISRAGSYFKPILVQVANALIKSKKHPEFTARYRRIKARRGHKKAIIAICRMILTAIWHILTDLKPYTPERFLESRPVNETKVLTTSQALNLLRQRGYVIKDDVVSST

SEQ ID NO: 115551 - protein, 389 aa, unidentified
MIYAGIDVAKDKHDCCILGSDGEKLLPIFTIPNNRSGFNEFYGNLFSVSKDVSQIKVGLEATGHYSRNLLGSLIEKGLVTYVINPLHTNLYRKGLSLRKTKTDKVDASSIAMMLITDKTLKPYTSSSYHNEELKSLTRYRFTKVQERSKLKTSVSRLVNILFPELESLVPSLHLASVYTLLSELPGASYIAECHLTHLTNLLMSASRGRYGRDKAILIRDAARNSIGLESASKSMELKHTIHLVEEISKEIHEIEQAIKKAMLSMSSTIVTIPGISYRMGAMILAEIGDFNRFENADQILAYAGLSPSTYQSGQLTSCHSRMEKRGSKYLRYALFNAAKYVCKWDPCFAAYLAKKRKEGKHYNVAVSHAIKKLVRVIFAMAMSGEPYKG

SEQ ID NO: 115552 - protein, 370 aa, unidentified
MQTVRSFVGMDVHKETISISVAEDGRNGPVRFIGVIPNQPDDIAKMAKRLAKHGELDFCYEAGGCGYNIYRQLTALGHSCTVAATSLIPRKPGERIKTDRRDSQKLAILHRSGDLTKVWVPDATHEALRDLVRARVDASMHLMRARQQLLAFLLRHGRSYPTGKHWTQRHRSWLAGQTFQQEVHRIVFQDYVETVWTAQERRDALIERIGAMTVSWSLGPLVEALRGLRGIDLLSAATFICTTGDLSRFESPRMLMGYLGLVPSEHSSGGSIRRGGITKTGNREARRMLIEAAWSYRYPARVAKEKAEILVRLPKSIRDIAWKAQTRLCARYRTMIARGKKPTVVVTALARELAGFIWAIGQEIRTPMTT

SEQ ID NO: 115553 - protein, 418 aa, unidentified
MEVIHERVAGLDVHKKTVVACVRLQSGSKVRRESRTFETTTAGLEVLLAWLSEMGCTHVAMEATGVYWKPVWNILSAGDFELILANASHIKNVPGRKTDVKDAEWIADLLACGLIRASFVPDQVIQDLRSLMRTRKQFVREQTRHVQRIQKTLEEGNIKLDAVISDILGVNGRRMIEAMIAGESNPQKLAALADRRLKASPTELRDALHGRLTDTHRFLLRTHLKQWDELDATIAEIDRQVDVVINSMAKPAVFRALILLLCTIPGVGKLAAITILAEIGPDMSRFRTAGHLVAWSGLCPGQNQSAGKRKSSRLRKGAPWLKTMLVQCAWAAKRQKNSYYRAQFYRLSGRRGPQKAICAVAASILTAVYHMLKDGTQHADLGADYFDRRPTEAKARRLVAQLNKLGYEVQIQPIAAAA

SEQ ID NO: 115554 - protein, 321 aa, unidentified
MTYVGIDVSKVTFVVAYSSVKTNKTRTFKNTVNGVHEFVQTISASEHNCVLEATGNYSALLVYLLSEAGITISLENPLKIKNFARVMLTVTKTDEIDARLIALYGEKMQPAPYKLRSDAILVLKQKRTVLRQLKKQLVATRNLKGSMEVLPFFDPKCKKTIEKTITFLEKQIKEMEEELASLAQGEYKKQMDLLTSIKGIGVTLAAALIVATGRFSYFDNAKQLTRYLGLSPTYQQSGTSVNVKGHINPNADSSLRSQLYVAAFSSLRCNTECKACFDRLRSNGKPGKVVVIAVANKLVRQAFAVVTQGKPYVDGFKSEKP

SEQ ID NO: 115555 - protein, 326 aa, unidentified
MQCYLGVDVSKAKLDLALLTANDKYRSKVFANDTQGFQSLVQWLQTHVPDGLTSVHICMEATGIYHEALACFLHDQGLKLSVVNPVLVKRFAEANRLRNKTDSADAKCLAMFCKNCNPQRWEAPSPGVRALQALVARLETLQAMRQAEANRLDVAHESVADSIRTMLAKLDASIAKVREQISGTIDDDPDLKGRANLLHTIPGLGDKTIPQLMAYIGRPERFKSVKALMAYAALTPLIRQSGTSLNKHRGTHPLGNHEFKRMLYFPAMVAGKYNPLVAQFWARLKAQNKPGKVIIVACMHKLLAIAYGVLRSGKPFDVNHLKQTGA

SEQ ID NO: 115556 - protein, 408 aa, unidentified
MLNAVGIDVSKDRSTVAVLQPGGVVIHKPFDVSHKSSDLRDLARYLGSLNGETRVVMESTGRYHEPICNALSKAGLFVCAVNPHLIRNYGNNTLRKVKTDPADAKKIARYTLDNWASLREYSVMNTTRTELKTLNSQFAFFMKQKTAVKTNLIALLDMTYPGVNKLFTSPVRPDGSEKWVDYADSFWHVDCVLDSGPKVFTERYQSFCKHHGYDYQPDRPEKIYVQAKELVPTVPKDPVYKEMIRDSIAQLNLMSKHVEELRRKMDELASSLPEYQTVRSMYGVGPSLGPQIMAEIGDISRFNHREALTAYAGVDPGKNDSGELVHKSGHASKCGSARLRKALFQVMEAMLQLGPRDDDPVSQFLFKKKAEGKPYLVYMTAGANKFLRVYYGKVKECIRNLPAADSED

SEQ ID NO: 115557 - protein, 356 aa, unidentified
MRAISSVDGLDSVDEVVLGVDTHLDLNVAVALDQLGRRLGELKVPTTTRGYERLLRWAEGFGPVGCAGIEGTSSYGAGLARHLRAAGISVMEVERPKRRHLRRNGKSDPIDAEAAARAVLAGEAVGEPKSADGKVEMIRVLRSARQSAVKARSQAANQLQSLLVTAPEDLRQRLRQLPTKELIATCARFRLGSDPDDVRTATRFALRSVARRHEALSVEIAELDAQLERLVAEVAPALISRPAIGTHHAATLLVLAGDNPQRLNNEASFASLCGVSPIEASSGKVVRHRLNRGGNRDANRALHMICVVRMGSDRRTQHYVARRTAEGKSKWEIMRCLKRYIAREVYRVLVPPTAAS

SEQ ID NO: 115558 - protein, 387 aa, unidentified
MPVSVSCHAAVSTQLNAIFVSLELSRSTWLVTSLSPGRGERISRHQVKGSDVPALLERFAQLQAKAEARMGEQYPLVVIQEAGLDGFWIHRCLVREGIESYVVDAASIAASRRSRRAKTDKLDGEALVRTLLAYKRGEPRVCAMVAVPSVEDEDRRRISRERRALVVERVRHVNRIKGLLFAQGVGDYEPLRADRRARLDELVTGDGRPLPRHVRREIERELDRLEMVVGQIKQVEAERDALLEPRSDAAGEADTGPRLIQLRGIGPEFAGVLHAEAFFRSFSNRRQVAAYAGLAPSPWQSGSMDREQGVSKAGNKRLRTTMIQVAWLWLRHQPDSELTKWYAERVGANGGRARRVMIVAVARKLLIALWQFVSAGVVPAGALLKAA

SEQ ID NO: 115559 - protein, 354 aa, unidentified
MKRTRKYVALDVHQATTTSSVREGSGRVIARSVLPTEATALVEYFSGMRGSIYVAFEEGTQAQWLHDLLVPVVDRVVVCDRRGEPRAGNKADQLDADKLSRLLQSGSLRAVYHGSTDRITLRELTRAYRSVVEDATRVMQRLKALYRSRAIRARGRRVYSPKQRAQWLEQLPDRGARFRAQALLTQLDVLRVLRPKAKAAMVAEARRDPAWEVLRSIPFFGPVRVALLLATLKTPWRFRTKRNLWGYGGLAVVTESSADYEFGRGRVVRRRRQPLTRGLNPNHNRVVKEVFKGAATAATGRPGALRDFYEARVARGMRPEMARLTLARKLAALTLRLWKTGERYDPAKLTAQST

SEQ ID NO: 115560 - protein, 393 aa, unidentified
MYLVGIDIGKLKHSFCLLEKETGEILVEPVFFENNRDGFNVLLSSFKHLPQKDILIGMEDTGHYNLALLKFLLDRNYQVALINPVATNLTRKMQGGISKNDKLDTLTICDVLSSSQRVKSYRISKYSSFDLYEQKLLTREHHNLKEEENQLLNRLQKCIDVVFPEFNSLFKSKYGIVYMNILKEFGSADAIAHADIRTIRKCFDTGRGKHISLTAEELKEAARNSIGFPSSSEATQIKHLVARIELIKEQIAEIDKKIEEFSIQNNSPILSIPGISHFSGTSILAELGDIHNYSKPSQIIKFAGVAPLTYESSQFTAQHTAITKKGCKYLRKTLYQIITPVIQYNPVFRKFYLLKIAQGKGHRCAQGHCVRKLMRVIYHLLSTGTQFDPALLR

SEQ ID NO: 115561 - protein, 410 aa, unidentified
MDTLVQRCAGLDIGKADLKACLRIPGDRGHRRQEIRTFATTTPALLELRDWLVASQVTVVGMEATGDYWKPVYYLLEDAFDVQLLNARHMRNIPGGKTDIADSAWIAQLIEHGLIRPSFVPPPRIRRLRDLTRYRTTLVQERTREVQRLEKVLEDAGIKLSTVASKLLGVSGRAMIEALIAGERDPDVLADLAQARMRGKIPALRDALIGRFSDHHAFICRTMLDRIDAATATIDAVSARIDEEISPFLAIVARLDTIPGVNARIAQVIIAEIGVDMTRFPTAGHLASWAGMCPGNYESAGKHLGGTTRKGDSWLRGALGEAGASAARSKDTYLQSRYRRIAARRGKKRALVAVGHSILTAIWHLISNDADYTDLGATYFLTRTDPARQARRLVGQLHQLGYQATLNPAT

SEQ ID NO: 115562 - protein, 354 aa, unidentified
MQYIALDAHKHYTFASVERANGALLQETQLMHERGVIRDFLCQYEPGSPVAVEAVGNWYWLVNEIEEAGMVPHLVHPRKAKLMLGMINKTDKLDARGLNRLQRTGTLPTVWIPPATIRDQRDLPRTRMVLTRQSTRLKNRLHATFAKYAIRLPDVSDVFSQPTALATHLVTLPSHTRFAADRSMEQLEIVGEQIDEFESRMHEVFEESDELKLLMTLPGVGFILGTVILLELGDVSRFPDAVHLASYAGVTPRISSSGGKKHYGPMRPDVNHYLKWAYIEAANVVSRHQAHWPHRHVTKTYVRIRERKNHAKAVGAVARHLAEATFWMLTKKEAYREPALRTDRVHEGVSAAVS

SEQ ID NO: 115563 - protein, 314 aa, unidentified
MRTQVFVGIDVSKAQLDVAFRPEGRFSAPNDEAGCAQVLERLRAVPPTLVVLEATGGLEIPLTGVLAAAGVPVVVVNPRQVRDFAKATGRLAKTDTLDARTLAHFAEVMRPELRPLPDQQTQALAAILARRRQLVEMLTAEKNRLGSAPKPVRKSLRTHIAWLERELSHTDSNLAHAIRESPVWREKDALLRSTPGVGPVMTTTLLANLPELGTLTGKQIAALAGVAPLNRDSGTWRGKRTVWGGRAQIRATLYMAALVAARFNPVIRAFYQRLCATGKAKKVALTACMRKLLIILNAMLKHRTPWRTELVQCA

SEQ ID NO: 115564 - protein, 382 aa, unidentified
MYIIGIDIGKNHHEASIVSPEGKQIGRSLRFATTHKGADSLMSFIFKNIGNSPCVFGMEATGHYWYPIYSFLKAKGYTICVINPIQSDSLRKMYIRQTKNDSIDSFLIAEVIRFGQFGTTSMADENILAMRQLCRYRDSVISSRTEIKLRIGTIMEQIFPEYEKQFSSLWVSTSMGILEKYFTPENIENAPIDELFEIIKDKSHNRLTKAKAISIKEAAADTFGIKIAQDAFSFQLKQLIDRMNFLDKQIEALDIEIMKYYEQFDCYLHTIPGIGMIATATILAEIGDIHRFKSSSALVAFAGIDPTVRQSGEFNSTHNHMSKRGSPYLRHTIFLAATTCSFHNSPLNAYYKKKRDQGKHHLTATGAVARKLTTVNLCRVTG

SEQ ID NO: 115565 - protein, 381 aa, unidentified
METLHSHCAGLDVHHKEIVVCIYIGNSETELTKEIRTFPTLTKHLFEMLQWLEELHITHLAMESTGIYWKPVFNILEDYFDITFANAQRIKNVPGRKTDVADAEWIVKLLRYGLIEKSFVPPSDIRELRDLTRLRKKMIGNMTAEKNRIQKTLECSNIKLGSIISDVFGVSGRKLLTRLVEQGYVNSHEVEENIHGSMMPKASQITESLFGTLHPHQIFLIRQSWNHILFLEESIQQIEEKIDELLSPYQEQVELLLTIPGVKKHAAASIIAEVGVEMRQFPSAQHLASWAGLSPGNHESAGKKKNSRTTKGNPHIQSMLCEVAWAISRTRHTWLSGKYWSLAARRGKKKALIAIAHKVIKIIYHILDQRSGFIEYSKVLS

SEQ ID NO: 115566 - protein, 337 aa, unidentified
MTIIRIGLDTSKHVFQLHGVDGSEQPVLRRQVRRSEMAKFFAKLPATRIGLEACGASHYWARVLGGLGHEVVLMPPQYIKPYVKRGKNDAIDAAAICEAMSRPGMRFVAVKSAESQAGLMVLRVRDLLVKQRTALINAIRGHAAEFGVSAAKGPVKVAELLHRAHAEAAKVPAPALEMLRLLAGQLDAIETRLTTLEAQLIGVHKANPTSQCLATIPGVGPIGAVSFALRVPDPKAFRSGRHLAAWLGLTPKENSTAGRHRPGRISRQGDANLRRLLVLGATAVIRCARPGRASPWLLHLLARRPKKLAAVALANKMARIIWAMMVSGETYRRPQQA

SEQ ID NO: 115567 - protein, 342 aa, unidentified
MSIYVGMDVHRKRSQVAIVDDAGAQQRNRNVPNDPAKLVPILGALAPGTPVAFEAAYGWGWLVELLEELELEPHLVHPSRCKAIASARLKNDKVDARTLAQLLRADLLPEAWIAPQATRDLRALLRHRASLVRLSTSCKNRVHAVLADRGIGEDRGLWTGPGRAWLAGLALPPVPREVVDDCCGLLDALAAPIVRLEQEIGALAKPDPRVQALMTLPGVGRLTAMTLVAEIGDIGRFPTARKLCAWAGLTPQVRNSDRKVRHGHITKQGSPWVRGILQEAAQTAKRHPMFASAYGQLAHRRGNNIATVAIARRLLARSFHILKQLEAAPPEKAITGRARVFA

SEQ ID NO: 115568 - protein, 340 aa, unidentified
MEKLYGAFDLHSSNNYLGISDEKDRRVYKKRLPNQPDVILAELEPHRDNLIGIVVESTFNWYWLVDLLMEEGYRVHLANPAGIQQYKGKKHSDDKHDAFWLAHLLRLGILPEGYIYPKEERPVRDLLRKRGHLVKLRTSLINSLQGIIHRNCGVKLNARKIKAIRENNVAPLLSGQEDLALSGMVSKDTIDYLGQQIRKVENIVLGKIKLKKEYLYLLTIPGIGKILALTIMLETGPIARFQKVGNLTSYCRKVPTKWTSNNKQKGKGNKKNGNKYLAWAFSEAAEFARRYDDQARAFYNRKTSKKNFMVAHSALAHKLARAAYYVMRDQVEYDPQKLFA

SEQ ID NO: 115569 - protein, 420 aa, unidentified
MRSVAVVNPSWIFADELARIPLAPSRDSRRPTRPAPMGNKKAASPFNLEGVRMSLVNHFNPYGGAAMAKYNIGVDYHKKFSYLVVKDQGGQVLRSGQIQNTQDSVSKFLAPYKKDSAAVLESCRNWCVMHDWLEDIVDDVVLANPFKVKAIAEAKIKTDKIDATVLADLLRADLIPQSYIATREVRDMRSLLRERMFFVRLRTMTKNRITTIFDRYPEEIRKFKSQTDLFGKKGREQLEKIKLREADRALIDRELNFIDLTNVFIKEIEEVINDNFKQSESAQYLETIPGIGKFFAMLIDAEIGEIDRFKTPEKLASYSGLVPSTYSSGGKTTNGRIIKGGNQLLRWAFVEAVIPAITSNEELRFEYDHLRKRMNWNKAKVAIARKILNIAFRCLKEKRGFKKLNKLELEKKILRRAACA

SEQ ID NO: 115570 - protein, 345 aa, unidentified
MFADELDYVIGVDSHRDRHALGVVQASGVVAAEAELSASSGGYRQALRFAKERAPGRRVWAIEGTGSYGAGLARFLAGRGERVVEVERPKRSGSRGRLKTDRLDALRAARQLLAGEPLATPRQGGKRESLRALLATREGAVAAKRAGLCQLRALLVVLPEPLRGELRPLARAALLRRCAQMRPNSESDAYGQLLALRACARRVLALTQEAAELEQAIHSQVQQLAPSLLNKPGIGPISAAQLLTSWSHHGRITKEASFARLAGVAPIPASSGNTTRHRLDRGGDRQLNRALHTIIINRRKTDPATIAYIQRRQREGKTSREAIRCLKRYLARNLYRHLEGLPQHT

SEQ ID NO: 115571 - protein, 414 aa, unidentified
MLTHRFQFLVGIDLGRWLHQACVLDANGELVAEKGFAHSREGLSETVTWLLSLVKDPDHLAVAIEKPHGAVVDTLLARGLAVFAVNPKQVDRFRDRHSLSGAKDDRRDAFVLADALRTDGHRFQRLQLPPPEIIALRQLLTARFQLIKLHVALSSQIQDLLIQCRPHLLSLAPRNRPLDSFFAELLELFFDSQPRPPAPDEIRALIRKHHIRRVKLEDILHVLQQPSLQLASGTLEALSAHLAVLFPQLKLVRRQRRDVDQYLERWFAEIQRDCPPHQPSDNALLASLPGVGALVLATLLGHAHDAIRLRNRDALRSLGGIAPVTKQSGQRRQVLMRRARSQPLAYALHHWAAIAVLRDSHFKHHYQRLRRKGHHHARALRGVMDRLLSLAVAMLRDRSFYDPSRFRKRAARTT

SEQ ID NO: 115572 - protein, 401 aa, unidentified
MATMRDNATRVKRFRELKSTLRTNRKRLLVGLDIAQAEHVVHLRHAHTRVVVPQFAIPNSTRGFTQLWARIEQAQRATGCREVVCGLEPTGTYHEAVARFLETQGADVLLLSSSVAYWNRRTQDGTWDKNDRKDAANCADLLEQGKVLFYSQPEGPLAELRRLVKCLRRARGELAACKARWRTTLRPALGPMGEPLPNRLRAELPALLQAWEPAAPGRPAVAKGRLPLGLATACADLGAQVAAVQARITAIEGALTPLAERLPAYPLLRTIPGVGPTVAAILLAEVGDIAWFTKFSQLRKLAGLDIIRVQTGNFTGQWRISKCGRGLLRWALYHAAMGLARTTAGRARLAALKAKRHGDRYAGLKAIVELAAKVLRIVWGVWRSGTPYDPLRTGGLRRQPR

SEQ ID NO: 115573 - protein, 351 aa, unidentified
MSEKTGSHIAVVGVDIGKNSFHVIGLSSRGAIVLRQKWSRAQIEVRFANMPPCLVGMEACVGAHHLSRRLKALGHDARLMPAKYVRPYSKGQKNDFRDAEAIAEAVQRPTMKFVATKTVEQLDLQALHRVRERLVSQRTGIINQIRAFLLERGIAVRQGQRFLRTELPGILASPADVLSPQMARIIEGLAADWRHLDERIDQLSNEIHAMAREDKGCERLMCVPGVGPIISSAMVAAIGSGDAFSKGRDFAAWLGLVPRQMSTGDRTVLGPISRRGNRYLRVLFVQAAWAVLIRPGSWERYGLKSWVESAQKRLHRNVLAIALANKLARIAWSVLAHGRGFEASAIASSIA

SEQ ID NO: 115574 - protein, 273 aa, unidentified
MAKHTTICAGIDTGKRKLDVALDGSSEPLQIDNTPEGYKVLLDWLRCHRVKRIGIEASGGYEQAVVAELRRKRFVVVTFQPAQVRAYAKFHLQRAKNDKIDAALIAACTAAVKKIHPPPDARLLPFAEHLTMIDQIGEDIALLKNRLETCRNLRIQQVWKEDLARLAKRERVEFKALVAAIREHSDLAERLDLIYSVNGAGMPTAVTILVRMPEIGQLTREQAAALAGLAPYDDDSGNHIGTRHIDGGRKRLRRALYTAALPASRSSLPFTSG

SEQ ID NO: 115575 - protein, 348 aa, unidentified
MDKIIRIGIDTSKSVFVLHGVNTAEQAVLRKKLRRRQVVDFFGKLEPTRIGLEACGAAHHWARELTALGHEVVLLPPQYVKPYVQRGKNDAADASAICEAMSRPRMRFVPVKTAEQQAALMLMGLREQLIARRTQLANMIRGYAAEFGVTAAKGLDKIEPLLARIATDGAVPEFAKELFATLAEQYGELKPKLHGIEAQLLAWHRQNEVSRRLAQVPAIGPIGAVLLAMKVSDPRAFRTGRDFAAWLGLTPKDHSTAGKQRLGIITRAGDEALRCTLVLGATAVIQQVRKARGKPSPWLLALVKRKPPKLAAVALANKTARIAWKLMVSGERYDRNHAAAAQTARIAA

SEQ ID NO: 115576 - protein, 359 aa, unidentified
MQTQRKELNFEGQSIFVGIDVHLKSWNVSVFTENLHHKTFSQPPEAELLSSYLKLNFPKANYYSVYEAGFSGLHAHYELTNLGIHNIVTNPADVPTSDKERRRKTDTVDSNKLARSLRNKELKGIYTPSQEILEDRSFIRVRNSIVKDQSRVKNRIRSMLYYYGIEFPPEFRNSNSHRSRRFMEWLKTVQLKSQSGNLSLGMLIKEAEQLRGLLLEIYKALKDLSITEKYAKNMEFIRSVPGIGLVTGMLFLSEIETIGRFENNDKFAGMIGIVPDCHSSGDKEQIGEITPRRHIHLRGGLIESSWIAVRIDPALSKAFSDYCKRMEPNKAIVRIARKLSNRIYFVLKNEKKYETRIIK

SEQ ID NO: 115577 - protein, 384 aa, unidentified
MRSVCGLDVHKDSVYLCILTGEGELIEKVFGVLTFQLQQMRDLLLAHNVDEVSMESTSAYWIPIWRVLAPHFHMRLVNPYFIKQLPGHKSDVADAQWIAECTLKNLVSGSFVPPEDIQQLRQYDRRIFDLDEEIVRKLSKLDAVMQRCNFRLSNYVSNVDCKSYKDVVRKISEGVTDPESLIGEIHGRIIKHHGRETILASLTGVISQAEIDVLRQLREELALAEEHKRECLERMLEICQEKYPDELRRLQTIPGVKERTTASLIAEIGTNMSKFETANHLSAWSGLRPRNDESNKKFKSRRITHGNVYLRKNIIQCAWAASRTKGCFFSRFSYHQTQIRKKNKMKVIVAVARKLLVAVWHVIHDKTDYVDFQKRDRQAPASNG

SEQ ID NO: 115578 - protein, 361 aa, unidentified
MNSIGIDVGKKICRASIKDQHGRILDELSFSNDTAGIRSLLSTAIRYGDARAVVESTGNMWMRIHDTLEDHGIETVLANPVKTKVIAQAKIKSDKLDSRILADLLRGDLVYESYVPSKEFREKRSLVRHRGALVKARTALRNKVHALLDKYEYKTELTDIFGKAGLEWLKGLELSPIDRVIMNTSIASIVNLSVQMDVVSRHIAKYAWDSRDVRLLLSMNGVDIFSAMVIATEIVDIRRFPTPWKLVAYAGLAPGQRESAGKTRRGKITKQGSRWLRWVMVQSARQAVRHDERFKAYYERIERKKGDGKAVVAVAKEMLVVVWHMLTKQEPYRGVKEELYQRKLAKLEKFSSGLVEEIDEQ

SEQ ID NO: 115579 - protein, 377 aa, unidentified
MSKVRFIGLDVHADTIAVAVAEPSGEVRSVGVIPNRPESIRKLVKKLGPAEQLRVCYEAGPTGYVVYWQLTALGVKCEVVAPTLVPVKAGDRVKTDRRDAEKLARSYRAGDLTPVWVPDAAHEALRDLVRAREAAKKDQLRARHRLGKFLLRHGRRPSPAMRPWTQRHLSWVKQAVHFEQPAQEATLLDYLHEVEHMAGRIEQLERAIDDAVKTAPARMRAVIDALQALRGIALVSAVTIVAEVGELSRFARAPQLMGYSGLGASEDSSGPRTRRGRITKAGNAHLRRIVVEAAWAYRHRPAVGGALRKRQAMLSDEVKGMAWKAQHRLHGRYRKLLGRGKCPQQVVTAVGRELLGFIWAIGVAVETEQKNRHSVAA

SEQ ID NO: 115580 - protein, 412 aa, unidentified
MEVVYPCCCGLDVHKKSITACVLWAEVKGKSRKQKKRFGTFTHDLLQLADWLAECGVTHVAMESTGVYWKPVWNILAEQFEALLVNAQHIKAVPGRKTDQKDSEWIADLLQHGLLRGSFVPPQPTRELRDLTRYRVSLVQEINRIANRIQKVLEDANIKLASVATDALGASGRAILEAMLAGEQDAGRLAEMAQGKLRNKIPELQLALEGRMTEHHRFLLRQLFEHLRFTESKRSDIEQEIGRRMLPFEDKVTRLCTIPGVDRVTAWGMLAEMGMNMNQFPSSGHLASWACLCPGSFESAGKRLSGKMRKGNVSLRRCLSQAAWAISMMKNNYLSALYRRIAARRGAKRAVMAVAHALLEIAYHMLKRKEDYRELGADHFDRIDVNRIRRSLVRRLERLGHKVTLEPLAQTA

SEQ ID NO: 115581 - protein, 394 aa, unidentified
MKLVGIDIGKHKHFVSIVDKLTGEIILQPVAFSNNAQGFEFLISQIALYPVDSVLIGMEDTGHYHFALLRFLLQKNYSVALINPKTTDLNRRMDGGITKNDKLDTLNICDILSSNKLKKPYRLTSSKKFDLYEQKQLTRLHHSLKEQINVLSNRLQKCIDLVFPEYNALFKSKYGKVYMSILKQFGSAKAIAQADIRTLRKCFDITGRGNRISLTAEKLKESAKTSVGISSLADEMQIKHLIAHIELLNDQLKEIDKKIEEFSTDLNSPIISVPGISHFSGTSILAEYGDIFNYSKPSKIIKAAGVAPFHYESSQYEAKHSAITKQGSSYLRKTLYQVIVPVIRFNKVFKDYYDLKRSQGKSHRCAQGHCIRKLLRVIYHLVTTNQQYDASLLR

SEQ ID NO: 115582 - protein, 365 aa, unidentified
MTTRQRSTSSSTDPPARKEVVLGVDTHGEVHVAAVISPLGKILGSESFPATAAGYRQLLVWARKRGTVRRAGVEGTGTFGAGLSRYLLAQQIQVYEVNRPDRSARRLLGKSDPLDAQAAARAVLSGRARARAKSGDGPVHSARLFKLAKDSAVKARTQAINQLKAVLVIADPALREQLSSLGNAELFRTCARLGSPDGGGDEDAVTQATHLTLRMLAERIEQLTAQIDELNQRLTRLVERHAPQLLEPVGIGPDSAVTLLITMGDNPDRLNTEASFAALCGVSPIEYSSGRRSTRRLNHGGDRQANAALHRIVFTRLRHDPRTQAYYERRTQEGKTRREIIRCLKRYAAREVFNLVRPVARTPAL

SEQ ID NO: 115583 - protein, 375 aa, unidentified
MAIIGCDLHSRYQQIAMLEFSDGEIVTCRLEHENGETQKFYARLPKPSLIGIEATGYTQWFERLLGRLGHELWVGDPAEIRARALRRQKTDTRDAEHLLDLLLTKRFPRLWVPTPEERDLRQLLRHRDQLVRMRTSVKNQLHFLAMSQGVCRGRKLWSPAGRQELVELGLDTWANRRREELLQLLDQLEPKIAELDRAAEAEACRRPGVLQLMTQKGVGPVVGLAFVLTVGPVERFASSRKLVSYLGLNPREDSSGGRQRLGHISKQGNSLLRWLLVEAAQTAARLDPELRRKYLRLKFRRGANVAKVAIARRLAVGLYSAPPSASRSVAGPHARQPDALHGGGNSIDALIGRLASLPEAGRLQQESWSVSNRIE

SEQ ID NO: 115584 - protein, 374 aa, unidentified
MKKNTTTTSSARSKKTRQTVSTKTTPTRTVGIDLGDQNSAYCVLDAQGDVLSEGTIRTSESGFAEQFQSMSPCRIALETGTHSPWVSRLLQKYGHDVIVANARQLRVIYESDRKNDKVDARTLARLARIDKDLLHPIRHRSDKAQADLAMLRARDALVQVRTKLINCARGMVKSVGGRLPGASGPYFAKKVREHVPDAIREALTPVLDQVEQLATQVRDYEKRIEQMAQTEYAQTQLMRQIPGVGVITSMAFLLTIEDPHRFAKSRDIAGYLGLLPRQSDSGQSKPQLSITKAGDPLVRRLLVSCAHYILGHWGPDCDLRRWGLSLMEHGGKNAKKRAVVAVARKLAVLMHKLWVTGEVYDPLREAHRDKAAAA

SEQ ID NO: 115585 - protein, 343 aa, unidentified
MDYFAGLDVSVKATSVCIVDDTGKVVREVKVTSEPEALLSVLKNPAYHFKRIGLEAGPLSQWLFSGLAEAELPVVCVETRHMQAVLKAQINKTDRNDARGMAQMMRVGLYRPVHVKTLRSQKLRMLLTHRKLLQSKAIAIENDLRGTLRNFGLKVGMVGKVRFEARIEELVENFPDLAELVEPLLIVRRALREQTVILHRRLLAIVRDDEVCRRLMTTPGVGPVVALTYRATVDVPARFRKSKSVGAVFGLTCSKYQSGEIDWSGRISRCGDEMMRVMLYEAAQSMLRSKKWSWLKAWAMQIARRRGMKKAIVALARRLAVIMHRIWVDGTEFRWTREQAVAS

SEQ ID NO: 115586 - protein, 321 aa, unidentified
MAMPKTPIEAGVDTAKDELVIQSAPDTKPFAIPNTPKSIKAWLKTLPAGSALAIEATSTYHIEMAEQAHAAGFAVYVVDGFRLSKYRESIAVRAKTDAQDAALLARYLRNERSSLKVWTPPPAGHRQIQVLLRRRAKLVEVRGMLRESFKGDKMFAAELKKIERTLKRTELAIAKALREEVKDAGLSDQLRRVQQLPGIGFLTAVGLVMSFMRGEFANSDAFVAYLGMDVTVVQSGKWSGRGRLSKRGDSEVRRLLYNASMSGSRTATWKAFHAYHLGRGKKTTQAFVILARRLARLAFGLMRHQQDWKPEIYTGGAKLTS

SEQ ID NO: 115587 - protein, 414 aa, unidentified
MKETKFAAYLGIDWADRKHDFAIYDVASGKTRRDSVVQTPEAMQSWLGGLAQSYAGELIAVALEQTRGPLFSALMMRENLVLFPINPAALSSFRDALYPSHAKDDPVDADLLMRLIRDHGDRMRPWKPDSVATRTLRRLGEDRRHLVEARTALTNQLTASLKESFPQALQWAGGLQTRQACDFLEAWPTFADLQKASKSQLIKFYREHRHSLRWAEERVAEVRAAAPATQDQALIEVGSFLVESVVGRLRALNVSIASYDARIAELFAAHADAPIFASLPNAGAALAPRLLAAFGDDRERFASAQDVAEFSGIAPLQRRSGGTKTIHMRIACPKFIRQTFHEYARLSIGVSSWAKAFHDEQRSRKKGRHAILRELAYRWIRILFRCWKDSVSYDEAFYLEQLLRRGSPYARQAA

SEQ ID NO: 115588 - protein, 347 aa, unidentified
MALHGQIVLGIDTHKHTHVGVILDGLGRVSGALQFPATEAGTQRLLAWNQENGGAKIAGVEGTGSYGYPLTRALQLAGVTVLEVNRPDRANRRRRGKNDTVDAEAAARAVLSGQANAVPKDREGAVDALRALTMTRNSAVKATTQASNQIKALLVGSPERLRQQLTVKSLLQLATRCAELDPCSGMHTALRSLGRRWLLLHAEIVELDTQIRALVRDTIPTLVARPGIGIHSAAQLLITAGGNPTRLHSDAAFAALCGASPVQASSGQRQRHRLNRGGDRAANNALWAIANNRLIHDPATRAFAAKRRAQGDSRNEILRILKRYIARETFNLIISSLRPLVALAAAC

SEQ ID NO: 115589 - protein, 339 aa, unidentified
MPLYAGCDLHSNNNYLALVDQKGKRVDHWKLANDPKVILATIASQCLKIVGIVVESTYNWYWLVDALMEAGYKVHLANPAAIQQYRGLKHVDDKHDAFWLAQMLRLGILPEGYIYPKEERPLRDLLRKRRHLVRLRTSLVISLQNILSRNQGIHFPAHEVKRLKEDRVNPLLEGNEDLALAGQVSKEMIDHLTRQIRKIEEVIVQRVELRETYQHLLTLPGVGKVLALTIMLETGPISRFADVGHYASYCRKVSTRWTSNEKIKGRGNLKNGNKYLAWAFSEAAEFARRYDAQARAYYTRKMRKTNSLVAHGALAHKMSRAAYYVMKDQVPFMPEKLFS

SEQ ID NO: 115590 - protein, 360 aa, unidentified
MGEGSWIGLDVHARSVVAAVIDDATGEVVAARAPVGVDELVAWVRSHRGPVRVAYEAGPTGFGLSRALEAVGVGCVVAAPSLIPRSVAGKGRKRDATDAELLARSLRRGELVAVRVPDARDEAARDLVRAREDARADLMRARHRLSKLLLRHGRVFDARAWTLAHDAWLRRQVFEHPGSGAAFDDYYQAVLTVRLRRDGLDEKIAELAGDPRFAPVVGRLGCLRGVGTLTAFALCVEIGDWTRFTGATIGSYLGLVPSEHQSGQKHTRGPITKAGNSHARRLLVESAWHHRQPHRTSLELERRRDGQRPEVRARAEQAGRRLHQRWRHLEQRRGVRSTVVAVAVARELAGFCWSLAVMDD

SEQ ID NO: 115591 - protein, 348 aa, unidentified
MSITMIGLDTAKAVFQVHGIDDGGKVQLKRKLRRDEVIPFFEKRTGCTVVLEACGGGHHWARVLRTLGHEAKLIAPEVARPFVKKGKKNDAADAAALCEAASRPEVNFVPVKSPEQQGVLALHSTRSLLVKQETMLANAMRGLAVEFGLTAPKGVQKLAELRTQVLDDASVPATAKLAFDEMHKQRCEKAEHIEEIEARIVDHARHNETARRLATIPGVGPITASLMAATVGNNIGAFQNARHFAAWLGLVPRQHSTGGKTRLGRITKAGNSEIRKLLVLGATSMVYRAGQWNSEAGAWLRGVLERRPVRLATVALANKMARIAWAMMTRQEDYRARGRATAAAAAVA

SEQ ID NO: 115592 - protein, 318 aa, unidentified
MNVIGLDVSKDTIDATLITTKGSKDYIKISNNTEGFQNLINWIKTKRIRKIAISMEATGIYYEQAAEYLSALYTIFVINPLKIKEYAKSQFSHTKTDKADSKLIAEFANRHLDKLTPFRPSENPILYKLVNLLQQLKEQQKETQNRLHTAKDIYIKSTHEAIIELLEEKIDQTSKRIEGMIKQKESLNIEYQNLQTIPAIGKETAVILLRHLTDKNFETANKFVAFAGLSPKIEQSGTSVNKKGRLSRYGNRQLKRALFMPALVAYRMNAFPQLVRNLEAAKKPKMIIIVALMQKLAKIAFYIHKSKKPFDKARHQTV

SEQ ID NO: 115593 - protein, 366 aa, unidentified
MDAIYIGVDFHARQQTICYLKTETGELVISELKHEDKEQLRAFYQQFQGHVIIGLEASGYSPWFEAMLEQLGKEVWLGDATEIRRRARWRQKSDRRDAELIWDLMVHDEFPRLHQPTAQSREILRMLRYRQKLIKVRTMSKNSLQAIALQAGLAKGNRLFTKDGQAEFKAAAMSPALQWQRDHWFELLKPLNEQLLETMVWFKAQSKDDLVIARLRTHPGIGLLTALCIWHTLQPVSRFRNQRKVVAYAGFDPMIRSSAERAIYLGISKAGSRMLRYLLVEAVHTALRYDDDLKRFYKRVAERRGRPKAKVAAARKLLIRAYIMLRDEIDYAEFRRRAVAVDLPDEVKGQAKVPEVLIRKSTSPGA

SEQ ID NO: 115594 - protein, 356 aa, unidentified
MKITTVGIDLAKVVFQVHGVDERGTPVVRKQLKRSEVSSYFANLQPCLIGMEACGSAHYWARKLQEFGHTVKLMSPQFVKPYVKTNKNDIADAEAICEAVTRPNMRYVPVKTVEQQAILSVHRARTGFVKARTAQGNQIRGLLSEFGIVISQGIHSIVKRIPEILEDGENGLPGTMRNLLQRLMENMKAVDRQVDELEKQIQVWHRENEASRRLAQIPGVGPITASAIVATIGKAREFKNGRQLAAWMGLVPKQNSSGGKHNLLGISKRGDTYLRTLLIHGARSVIQCVEKRPDEDNWLRKLTVRRNKNVAAVALANKNARTVWALLAHDQTFRLDYMPKAMSAAAQPNGLSGVSN

SEQ ID NO: 115595 - protein, 337 aa, unidentified
MMKLKYSICCGLDVHKNVIVATIVITNKDGISEYKQKSFSTINSDIQSFHNWLIGNNCYHVCMESTGKYWIPIFNYLENDIDVCLTHPKYVKAIKGKKTDKKDSKWIADLYKFDLVRCSVIPPKDFRQLRELARYRFKLVCMKSSEKNRIQNCMTVSNVGIASVLSDPFGRTATEIMSYLLEHTADSIDEKAVRKLIKKGAKAKTDEIIEAIRGYNIETDQAKKLELARGHLEYLDDMITQTEVELYVRIKPYYEFVEFVSTMPGMTELSSTIVLAETGVDMNIFDDAKHLCSWCGLSPANNESAGKKKSVRIAKAGDYLKLMSLLTLKALVTIALS

SEQ ID NO: 115596 - protein, 421 aa, unidentified
MKRVSTEEFAAFIGLDWADAKHDICLQASGSAHREFLRLDHRPEAIDAWAQSLRTRFNGQPIAVCLELNKGPIVSALRQYEFLVLFPVNPLTVAKYREAFTPSRAKDDPTDAELQVELLLKHRDKLTPLSPQSPTMRALAQLVEHRRRLVGDKVRLTNRLTSALKNYFPHVLQWFQEKDTAIFCDFLSRWPTLKAAQLARRATLEGFFRAHHVRSADVITTRLEAIKSARALTTDDGVITPNVLLVQALIAQLRVTVQAIADFDSAIAQRAQDHPDFPLFDALPGAGAVFAPRLLVAFGEQRERYASAAELQKYAGIAPVTERSGKKSWVHWRLQCPTFLRQTFVEWAAESIRHSFWAQIYYQQQRDKGKAHQAAVRALAFKWIRILYRCWQERTPYDESIYLQALKRRNAPLLHNLANLS

SEQ ID NO: 115597 - protein, 323 aa, unidentified
MYVGIDVSQKTLDVAYAQGRGISVVQFSNDSAGFSALHVVLSGFEAAVHCVMEASGPYYLPLATFLFEAGIGVSVVNPLVVKRFAQMRLVRAKTDRQDAKCLLSYGITEQPQEWKPSPLYINELSQLQALLDQYVKQHTALKNQLHAQKASGVLNEAFKTSAQKVLETLEAEIAELEQQMEQLAREHHKDQMDAVLSVPGVGRKTALVLTVITHGFTRFDSAKKLAAYVGICPRVFQSGSSVKGKSRICKLGMGRIRQLLYLCAMQAMKVNQPCKELYQRLLAAGKPKMKAIIAVAHKLLRQTLAIAKSQRTFNQNFQPFPCS

SEQ ID NO: 115598 - protein, 429 aa, unidentified
MKNSVANKLKQVPVGYLVIGIDPHKKKHAAVIMTQDFTIHSKFKFNNSKEGFEMALERIRMEMVRTGSRGAIFAIETGGHYWRNLAYFLDERGIPFRFINQFTLKRRREGKDLNRRKNDYRDSEVAAQLLCTGEFTDTKLSHGVYAELRAAHNAYRRLVKERTRIINLVKGLLDGLFPEFTQVFQDPCGLTALSVLSICPVPEGVAAMTEDEFVNTIRTGHRGLLMRKKLRALHYAAQTSIGVKADAQSVSYELSFLVEKLQLIKRHICRIDETLVRLVNETEEGKYLLSIIGLNYISVAGILAELGSFRSYKSAKQLIKMAGSNPTESESAGKRSSHTPMSKKGRPVLRYCAWIAVIPMLRFNPDFRAWAKKLRERPVHANPLSGREIVGAALNRLLRLAFVLVKNQTFYQVPEIESMPEPELLPVAN

SEQ ID NO: 115599 - protein, 448 aa, unidentified
MKMDIINPYAAGIDIGSRSHFVAVGQGEKDVKEFGVFAQDNEDLANWLLSYGIKTVALESTGTYWQNLYLVLQQRGLEVILANGKFTKNIKGRKTDVQDCQWIQKLHSLGLLTGSFLPDDQTEQLRTYCRQRTAWLNQGASVIQKMQKFLRLLNLRLDVAVTDIAGLTGLKIIKAVCKGITDPNELSKLVHRNCKKSPEEIALALNCNHRQDLLFGLKQEYEMYLTIREKIVECDFYIKEFIDQYLNLNPAKKKLHAPKKIYKKKNKNAPKNMDMNQIAYQYFDGVDLMSIEGVSDRTVIALMSELGPEGFKKFPTHKHFTSWLRLAPNNKISGGKKLSRRVGRGSNKLKTALRRAANVLGNLKDSHLGQFFRRIAFRKGRVAAITATARKLAVIIWKMVVEKVPYRPPNPYEFRDQKRSRLLKQMKNRINKLNISPMELGLDISNLQ

SEQ ID NO: 115600 - protein, 321 aa, unidentified
MANCAKAFQIGVDVSKHELVISVEAQAPFTLENSSKAIKAWLKSLPEHCQIAMEATNDFHMALTEQAHGLGHRVYLLNGYRLNRYREGIGGRAKTDSADALLIVRYLQREVDELRPWEPAAPGYRELQMLLHRRATVVRARTQIQQSLQGLSLLDNALKRLMKEIDKVDRQIARLIQATLQQAQWEADWQRCQQVEGIGPITAAALTMAYKRGPFKDSDAFVAFIGMDVRVRDSGQKQGKRKLTKQGDPELRRLLFLAAMQAKRHAAWEGFYQAYIARGMAAVQALTALARKLARVVFALLRSQSDYDPQRRLQVQALMHC

SEQ ID NO: 115601 - protein, 426 aa, unidentified
MRSVALDVHRDFCEVAIKDESGLRLAGRVKTSPRELELFAGSLAPDDQVALEATGAALQIARVLEPHVGRVLIANTRKLRAIAESKVKTDKVDAATLCELLAAGFLPEVWSPDEWTRALRRRLQRRAKLVRSRTRAKNECHAVLARNLKGRPPMSDVFGKQGRRWLAALQLPADERETVECCLREVDFLDAEVGLIERELARQALSSEAIRRLMTVPGVSLVSAAAFVAVAGDVHRFSSPKQLVSYVGLDPRVRQSGEAPARHGRISKQGSAEARHMLCEAAWVAVRTPGPLRAFHERVRARRGAQIALVATARKLCVLFWHLLTREQDYAFGRPSLTRRKLRALELKTEEGWRHGRYSGPRVHETKKQREHEREFAEQIETAYRRFVQDWRPKPTSGAGATRGRAPSKPTSGKQRGKASVPNPAL

SEQ ID NO: 115602 - protein, 342 aa, unidentified
MEQIVRIGIDTSKQIFQLHGVNAAEEPCLRRRLRRGQMLEYLEKIQPTVIGIEASGAAHHWARTLTEMGHEVRIMAPQFVKPYVKRGKNDAADAEALCEAMSRPTMRFVPVKSVEQQAALMLVSLRSRLVRSRTRLTNTIRGHAAEFGLIIGRGVNNIGLLLRRIQEDECLPDLARSLFREMGAEYSEVDTRLRKASAELMAYHRQNELCQRLTQIPGIGPIGATMLALKTPDPGGFRSARHFAAWIGLTPKDHSSGGHTRLGTITRAGDEALRSTLVVGATAVIRQMRCGSGRRWPWLEQLLERKPPKLVAVALANKLARIAWKLMTSGQAYNPGYAMRMA

SEQ ID NO: 115603 - protein, 475 aa, unidentified
MNHRRLVGIDLGIASAHTVRVLDGEGSTVAKRKAWPTAESLSEIEAAALAGCPEGTRLEVVVEPTGPAWLPIAVFFTTRGHIVHRVSSAKAADLRRFLSRHTKTNGIDADTLARLPLFDPAGLQPLVLPGAAQAGLDRRVRATDRLTRAGAEHKRRIKDLTRQVLPMSPLVGDLGVADLAVLERYADPNALLTLGVKRLTTLIEKASKGHQGIDRARQWIGAAEASTALYNGHPAIAFCDLAAEIATEVRLLRAVQAELAAHATERESAYRCVDPAGLARSLPGVADVGGPALVAAIGDPARFAKGKQFRSFTGLVPKASETGDTNRKGQPMSKAGSSLLRTTLIRAADNARKTDPQLARIYYTQMVERGKDHLGALCVVAANLAERFWAVYTRGMPYVICDTNGTPVTPDEAKAVIAQHWTVPPDVRARRRNKKTGKAPHTTQAGQHTRGDLPRHGIVDHHHPHRQHQPQQHTT

SEQ ID NO: 115604 - protein, 344 aa, unidentified
MDHFAGLDVSVKETSVCIVDDTGKIVREVKVASEPEALLAVLTNPAYRFKRIGLEAGPLSQWLFSALAEAGLPVICVETRHMRAALKAQINKTDRNDARGIAQMMRVGLYRPVHVKTLRSQKLRMLLTHRQLLLSKAIALENDLRGTLRNFGLKVGMVGKVKFEARIRELVENLPDLAVLVEPMLIVRRVLREQIVILHRRLLAIVRDDEVCQRLMTTPGVGPVVSLTYRATVDIPARFRKSKSVGAVFGLTCAKYQSGEVDWDGRISRCGDEMMRTMLYEAAQAMMRSKKWSWLKAWAMQIARRRGMKKAIVALARRLAVILHRIWVDGTEFRWTREQAAAAA

SEQ ID NO: 115605 - protein, 369 aa, unidentified
MISTEAETVIGGVDTHKHTHYAAVIDQHGRLLGHQQFPATDAGYRALLAWMRTHGSLEAIGVESTGSFGATLTRALTAAGEHVIEVNRPNRIARRMDGKSDRLDAEQIARAVLGQTSTAIPKSKSGMVEVIRTLRVTRSSAVKARTQSFNTLFGIMIGAPSPLRDELVVLTKRTLINRCLGLRPETTDFAQLHAHPERLLMASIKTALRDLARRWKALDGEIKTLNKQIETVVRATAPGLVELFGVGVELAGQFLVTAGDNPERIRNERAFAKLCGVAPQPASSGRTTGRHRLSRSGDRQANSALYIVTIVRLRHHEPTRAYVERRTNEGLSKREIIRCLKRYIAREIYANLPRPQDDSLTKNTQPAAA

SEQ ID NO: 115606 - protein, 408 aa, unidentified
MTKRFSTPTGAVLVAIDMSKHRQEVLIERPEGGRRRRMTVLATRPDYDRLAAELSAIGRPILVGFEATGNYHRTLAYRLLTAGFELRLISSVALARTREALHNGWDKNDPKDAQVILHMLRIGATQAYVDPLAAGINDLQELSKTHETISKAKTQTWHRILTHYLPLYFPEIGRFAGNSRSDWFLALIERFPTPGSITALEREAFVAEAWPLVGRKVSKARLINDIYETACSSIALPVPEESAAITMFRMIIAQARGLIRERNRIEEIAQITLADHHDYQLLRRIPGIGPINALTILAEAGDLRRFGHHRQFLKFCGLDLATCQSGTFRGRTKLSKYGNARLRRTFWMAAQVAARQCDNSFRDKLGRYVAGHVDDADRRRKAMTALTAKMARVAHAVVKTGTEYRPFE

SEQ ID NO: 115607 - protein, 342 aa, unidentified
MKVYYIGLDVHKKNISYCIKTENGKIIDEGRIAANRACLLLWASHLPTPWIGAMEATLFTGWIYDFLKPQALKLEVAHPQMLKAIIASKKKNDQVDARKIADLLRCDLLPTCYMAPEKIRELRRVLRYRNLMVREAVRMKNKMSGLLMEVGGIYSKKRLHGKKYFSHLLESIEDVPESVKDLLLLSRANFEMFNRIQKRLIEALHHEPLISDRTQRLMTIEGVGEVTALSWVLEVGNPLRFGSIKQAISYCGLCSAQKESAGKNHRGPISKQRNKHLQTVLIEAAKLAPRWNAQLAEVYEHERHKGHHNRATLAVARKLVSYMLAVDRRGTDFIPAAKAKVA

SEQ ID NO: 115608 - protein, 338 aa, unidentified
MYYTGIDLHQKTSFITTVDETGKVIAKVNLPNEERIILRHFQDLGDKTKVVMESMRSWYWLYDLLTDQGIEVVISNPVKTKAIASARIKNDKVDSAMLAQLLRSNLISPVYVSSRKTRELKELLRHRAKLVRDMTRLKNRIHVLLAKNNIQVPWSDLFGVRGIAYLEDIQLPQYQRRSLETYLSLSKELKAQIEPLNKEMQELAKSNPQARLLMTIPGIGSIVALFILAEIEDISRFPSHRHLASYAGLVPSLDSSAGKDRRGRITKQGSPYLRTALVEAAQVISRVKRSRLHLFFRKRIVKSGYQRAIVATAHKILHYAYYILKHQTPYRELDPACA

SEQ ID NO: 115609 - protein, 461 aa, unidentified
MPKRRSSAKTKLDPTLHCLQPNAAGVDVGATQIYVSVPPDRDTQSVRCFATFTEDLHAAADWLQGCRIDSVAMESTGVYWIPFFQLLEARGFKVFLVNARHVKNVPGRKTDVEDCQWLQYLHTVGLLRASFRPEQDVCNVRSVLRHRDSLVQMASVHIQHMQKALDQMNLQLHHVISDITGLTGTAIIDAILQGERDPVKLAGLRDGRIKATEQTIAKSLVGDYRREHLFTLRQSLAAFRHYQQLIAACDVEIQHYLQKFESRVDTTALPLEKPKDLHKPRRNELRFDLRGELYRIFGVDLTQIPGINALTAHTMLAEVGPDLSRFANPAAFASWLGLCPDNRISGGKVLSVQTRVVKNRVAAALRMASQSLHRSQSFLGDYYRRMRAKLGTPKAITATAHKLARIIFHLLSTRQAYDESIFSQHELQHRHRKELRLRNHARKLGFHLIPTPAVSKGESVP

SEQ ID NO: 115610 - protein, 407 aa, unidentified
MNAVGIDVSKGKSMMAALRPMGEVALPPKEYPHTEVGLERMALDILALGEDTRALMEATGRYHEPVAAALHEYGIRVTVLNPLFIKQSGGGSIRKVKTDKADAMKIAKYALDNWVDLREYTPMEAIREQLKLCSRQYNLYMKNVVALQNNLISLTDKTFPGVNELFTSPERADGSQKWIDFVTTFWHCECICLVSETAFTERYRKWCKRKGYQFSAQKAAELYMDSMGHITTLPRNSNTKLLITTAAKELTSAKATLAVLRTEMTRLAQQLPEYETVRAMYGVGETTAVQLMAEIGDVRRFPRRSSIVSFAGIDPAVDDSGKHISKSNPTTKRGSPHLRKTLYQVVCTYLRKAPADEPVYQFLDKKRAEGKPYFVYMTAAQNKFLRIYYARVKECLIAADTKELSKD

SEQ ID NO: 115611 - protein, 343 aa, unidentified
MSKRIYVALDVHLKFIVAVWQVMGMGGRKKLTIEGTPEGLRKLVQAVGPGEVWAVYEASGSGLEVHDRLTEHGWKVWLLAPTHLPQSTDSRKNKSDERDAHRMLDVLVAHGELGTKLPWAWIPTRKTREDRELVRRRLKLAEKLGQIKNETTGLLRVEAIRKPESLKTAWSDKHIAWLRGVAGTISAPVGKVLRGLLDELGFYQDQIRQMDEELRKLSEEPEYRDSTARMMELEGVGRLTAMTFLLELGDVNRFTNRRGLARYTGLTPNRYASSDVDHKGHISRMGPYRLRKVLNQAAWAHVRTGGHWASWYAETAKRRGAKIAIVGLMRKLAIDLWHLAKAA

SEQ ID NO: 115612 - protein, 326 aa, unidentified
MSAVVCGLDVHKESTYATVLDQNGQVLVQRKMPNEDIPRFLEPLHPEKLAMEASTYIIPLYRKLVEQGYTVTVSHPKKTRYIAEARIKSDRVDSRALAELLRLDSLPESYIPPREIAEIRERVRRRAFLVRQVTKFKVKIRDVLAYEGIKPPTGYGLFTEKGVEWMRSLGLEPVDCYLRLIEPLKSEVRMLSRDLKREAGKDPDVSLLMTIPGVGYYIALLVKAEIGDVNRFPDAERLCSYAGLVPSVRRSGGSTVHGHITKEGSRWMRWGLTEAVHSHLRYDTELTRFHRRLSSRKPGQVATTATARKMLKAIYCMLKAGEPFQS

SEQ ID NO: 115613 - protein, 314 aa, unidentified
MKKAAEIFVGIDVSKAWLDVAVHEQAEVVRVSNDAAGIASLVKRLKKLKPILIVLEPTGGFEMLVVAELSQAGLPVAVVNAKRVRDFAKATGQIAKTDKLDAKVLAHFATAVRPAVRSLRSEEEEQLTALLTRRRQVLDMLTVEKNRLVTVRAKMRTDIEAHIQWLSNSLKELDEEIEDFVKGSPILKEKDSLLQSVPGVGPVTSATMLGMLPELGLLNRQEIAALVGVAPLNKDSGPKQGKRRIYGGRGEVRSVLYMAALAATKFNPFIRTFYERLLRHGKEKKVALTACMRKLLVILNAMLRTNQPWRTHPA

SEQ ID NO: 115614 - protein, 367 aa, unidentified
MKKVSTAAANASKNCSQQKLTIGLDLGDRSSCYCVLDEGGRIVLEQRVSTTAKALREVFGKMPRSRVALETGLHSPWVSRLLGEFGHEVIVAHARNVRLIGESRKKDDRLDAQTLARLARIDPQLLSPVKHRSAKAQADLTVIRARAGLVRARTALTNTARGLAKSYGEPLRGCNVRNLNPEKAEKLSRELQKALEPLLTASAALSEQIAEYNERIEQMAKESYPQTALLKQVKGVGTLIALTFLLTLEDKHRFQKSRDVGCYLGLQPGRRNSGQSEPQMHISKEGDPYLRTLLVQGAQHILGPFGVDCDLRRWGLKLAERGGRSGKKRAIIAVARKLAVLLHHLWVSGEVYEPLHNRPQSAVAIAA

SEQ ID NO: 115615 - protein, 348 aa, unidentified
MDKITAVGLDLAKQIIQVHALDAAGRVVLRKTVRRERLLALLAQFPRCVVGMEAGSGAHHWARELARLGHEPRIMAAEFVRPFRKSIAAKNDANDAEAVCTAMRQPNMRFVSIKSIEQQAVLGLHRVRQGFIEERTAMINRLRGLLAEFGIVIAQSPAAVARTLPALLADADRLPALAQRCAGALQAQVRELEARIAEFERAIGQHTKGSESAQRLTARIGVGAITASAVVATIGNARDYRNGRQFAAWLGLVPRQASSGGKVRLGRITRRGDAYLRTLFIQGARSTLQSALRRAPQHHDRLSAWIVRLVQRVGYHKALVAIANKHARIIWALLARDQKLDHMRTAMA

SEQ ID NO: 115616 - protein, 350 aa, unidentified
MLIIGCDYHPSFQQIAFVDTDTGELQERRLEHREEAEKFYRDLGAQGMKVRVGMEASGHARWFERLLAELNFELWIGDAAEIRTKRVRKQKTDRQDAQLILKLMLKDDFPQIWVPSGENRDLRQLLWHRHRMVQARTRIMNQLQAVALNEGLRCKKRLWREHGRKQLESFRLAPWASRRRQDLLELLDRLNPTIAELSQAIEQEAEKFSEARWLMTHPGVGPLTALAFVLIIGEADRFQCGKQVASYLGLVPLEDSSGNRRRLGHITKQGSSILRFLLVEAAQVTVRSLPEWRSKYFHLMMRRGRKIAKVAMARRLAIRLYWMWRKGWDYEQVKKFGSHAGQLGTGDGVQ

SEQ ID NO: 115617 - protein, 364 aa, unidentified
MYYVGLDVHAKRSSLSILDANGKLVKHLEVKGSWQKLLEVVDAQVPRPFAICYEASCGYGYLYDQLGRRAERVSVAHPGQLRLIFRSKKKNDRVDGEKLAKLLYLNEVPQVYVPGLDVQSWRGLINYRRKLVGRRAAVKTQIRAHLRGLGQLAPATGGLWTKKGIKWLREQAMSATDGLRRDIMADDLDGLEEKIRKVEKELNKIAKSHPGVMLLMTIPGVGVRTAEAFVAHVDDVKRFARTKAVGSYFGLVPCQDASADRNRLGHITKDGPAPVRWLVAEAAWQGRRRSARIRGFFDRVMRNDPSRKKIALVATAHYLTRVMAAMLRTGEAWREEESPAPAAEPGPRLQERNKTKKKKGANKE

SEQ ID NO: 115618 - protein, 406 aa, unidentified
MIVDFTTYRKERRYEPRKVYWHGVHQATISVAVMDGRGKLIMECILQTKASTILEFIQGLQGTLSVTFEEGTSAAWLHDLLKPHVAHLVVCDPRKNALLKDGSKSDRIDARQLAELLRLNRLSPVYHGEHGVRTLKELGRSYLTITQDLSRVMSRIKALYCSWAIPCGGTTVYAPRHRAEWLAKIQEPGVRVRAQRLYQQLDLLQPVRQQVRHDLLLKSHKHAAVKLLRQIPAIGPIRAALLVALLQRPHRFRTKRQLWAYSGFALETHDSCEYRMVRGKLRRNRERVTVLGLNDNYNHDLKNLFKGAAISASTRPGPLYVYVGLLEKGIATDHGASHLGTKDCHHHFNDVEERSKAYPDGVGLAPFSRALCRFGTTKFTRVWEPTLLWNISPTMVWVRPPHHSHC

SEQ ID NO: 115619 - protein, 318 aa, unidentified
MMQPVLNVGVDVAKDAVVVACAEPGFPVQSVPNQRAPLRAWLKSLPAGSRIGLESTGDYHELLADLAQTQGHTVFLLNPLDTRHYAKAMGNRAKTDRVDAELIARLIAQEHTRLRAYRPPTANQRKLDRLIRRRATIVRIKGTLKLTMRNLGGFAAELKAVMSKLDALIAKIDATMSALAAGSPQHQEAQQRLQTIVGVGPLVGISLTNTLERVPFRKADAFVAFTGLDPRANDSGHKAGRRRLSKRGPAELRRLLFNAAMAAIKTKVWKPIYESYRTQGWSTTASLVIIARKIARAAWSIHHYGTTFNPERITKCLT

SEQ ID NO: 115620 - protein, 351 aa, unidentified
MLILALDLGSTSSKPTKSYGTLLETDTGEINRTVVPTTPAALVELISTHRPARVVLEVTRGCGWVVDLCRGANIVEIQVANPMDPAWRNRTNKTDRNDADLLARLSATGQLRTVHMPKREVREWRDLIGYRHRLVRERSRIKNHIRSILMTQGLPTGRLWNKDGFARLAELARPMDQCAVTELWRGEMATDLARYGEISAHIATVTKRLDALVGANEPAAVLLEEDGIGQRCAEIITAAIDDPLRFRNRKDIGAYFGLVPRVLQSGGSMRHGRITKAGDGLARAMLVEVVHLGIRRDGWMRETYKRYLREDPQRVKRALTATARRLVVRLWAKLRDHRRNHPSTTTLPIAA

SEQ ID NO: 115621 - protein, 342 aa, unidentified
MNYGAIDLHLRHSQIRVVEADGSVVLDRRITTSREGFTQLFGDRLPMRILLETGTESEWVAQCLEACGHDVVVADPNYLLMYGARQRQIKTDKRDVAALAEACRLGIYRKAHRVSGAQRQRRRELRVREQLVRVRTQAINLLRAQLRQEGYRLPSGSAETIGKRYARLVVPAGLHQALTPLLDLLTHLGPVLKTAGEAARVHATADPVVQRLMTVPGIGPITALTYRATVDDIGRFKTAGSASAFFGLVPHEDSSGERQRRGRITKAGPPVARSLLIQAAWVVWRNKAGGGALHAWVLRLADRRGKRVAVVALARRLSRILYALWRDGTDYRLSPLQAPAEA

SEQ ID NO: 115622 - protein, 344 aa, unidentified
MIYYAGIDVSLRTVNICLINDDGKLVAETKLASDVQDIVAYLDDLEFDVESIGLEAGTLTQYLTYGLQAAGFDVVVMEARQVKGALSAMRNKTDKHDARGIAQILRSGWYSRVHVKSMASHHIRMLLSSRKAVLSKCVDLENEVRGLFKIFGIKLPPKLGHGAFDPAVRDIIEVDETLSHALLPLLDARLVLYHTFRELDNRTRKMAHADPVCVRLMSVPGVGFITALTFKAGVDDPHRFKRSRTVGAYFGLTARRFQSGEMDIDGHISKCGDANVRATLYTAANALLTRSARWSPLKAWGMKLAKTRGHRRAVIAVARKLAVILHRVWIDDTQFRWGTEGARS

SEQ ID NO: 115623 - protein, 410 aa, unidentified
MDTLIERCAGLDVHKDTVVACVRVPARGGGREQSIQTFGTTTAQLLALRDWLVAHGVTRVGMESTGVYWKPVYYVLEDAVECWLLNARHLRNVPGRKTDVADAAWICQLVEHGLVRPSFVPPKSIRELRNLTRYRKAQIEERTREAQRLDKVLQDAGIKLSSVASDVLGVSGRAMLRALIAGTRDPETLAELARGTLRRKIPALRQALHGRFGPHHALLVGTILAKLEFLDEALGHLSAEIEQVIAPFAAEAALLRTIPGVDRRTAEAVVAEIGVDMSRFRAAGRLASWAGWCPGNNESAGRHGSGKTRKGSKWLHTYLTEAAKAAARTKGTYLGAQYARLRGRRGSARATVAVGHSILVAAYHILDRHEPYRELGPDYFRRRHSREHQTRRLVSQIEALGYHVRLEEVA

SEQ ID NO: 115624 - protein, 479 aa, unidentified
MRTDKRLWRNRKAKKELARRLQSENPGLEVVHAHAAGIDVGNGAHYAAVRPDRDLQPVRRFECFTADLYRLADWLQNCGVKTVALQSTGVYWIPLYDILEERGFEVYLVNARHTKNLPGRKSDVQESQWLLKLHTYGLLNNSFQPSSKIRILRTYWRQRLQHVTGAATCVQRMQKALTQMNIQLANVISDLSGVTGQLIVRAIVAGERDPQKLTELSHPRIQASRGEIAKSLEGNWRQELIFVLQQEIEMYDTYQRRVAECDQELQKHLRAFADTVAPVQQELPPKKKKKQNKNNPHFRLADELQRITGVDLTRIDGVDVMVAQTLVSEVGLDMSRWKTEAHFASWLGLCPDNRISGDKVLSRGTRHVLNRAANALRLGASTLLRSQTYLGAQYRRLRSKLGAPKAITAMAHRLARLVYRMLKYGQQYVDKGAEYYERRNRQQQIEFLKKKAARLGLQLTPVYPTYRASIAKNRSRALI

SEQ ID NO: 115625 - protein, 401 aa, unidentified
MQDTQQRDAVDVFVGVDVGKGHHHAVALDRNGKRLYNKALPNDEAKLRALIAELKTHGRLLFVVDQPSTIGALPVAVARAEGVLVAYLPGLAMRRIADLHAGEAKTDARDAAIIAAAARSMPHTLRSLRLADEQLAELTMLCGFDDDLAAQVTQTSNRIRGLLTQIHPALERVLGPRLDHPAVLDLLERYPSPAALAGTSEKTLANRLTKLAPRMGKGLAAEIVQALSEQAVTVPGTQAATIVMPRLAQQLAALRKQRDEIAAEVERLVLAHPLWLVLTSMPGVGVRTAARLLTEVAHKAFASAAHLAAYAGLAPVTRRSGSSIRGEHPSRRGNKVLKRALFLSAFAALRDPVSRAYYSRKIQQGKRHNQALIALARRRCDVLFAMLRDGTIYQPKSVPNA

SEQ ID NO: 115626 - protein, 392 aa, unidentified
MRKPKQCRPHNDLSRSLIPLNLNHTLIAVIELSQKSWLVAGIIPGVERQPLKKLEPGEDALSTLLDRWRKEANKAGYKVERIAVAFEAGRDGFWLARWLRAQGIEAHVIHAASVAVSRERRRAKTDRLDTEQLKRAFLGWLRGERDHCKMAAIPTFAEEDAKRPSRERESLVGEQGRIVNRMKATLARLGIRSFNPKLKNAAESLEDLRTAEGEPIPPNTLTELHRDLERRRLVIEQIRQIEAARLERLRRTPKAKPNAMVLLLARVIGVGIETADMLVQEVLSRNLRDRRAVARYAGLTGSPDESGSKRREKGLSRAGNARVRRGMVQLAWRFLQFQKDSALAQWYRVRTEHARGSRKKMIVALARKLLIALWHFARDGVVPEGVLLRPAH

SEQ ID NO: 115627 - protein, 320 aa, unidentified
MEMEKAYVGIDVSKETLDVAVHGTDRRWRFANSDKGITETVSCLEELSPLLVVLEATGGMECPLAAALAVSGVPLVVTNPRQVRDFARATGRLAKTDVIDARVLAHFAAAMQPESRRLPDSQGQELKAILARRRQLIEMLTAERNRLHSARSKAVKANIKAHIDWLEKEMTHIDHDLEQSIRQSPIWREKDDLLKSVPGVGPVLSTTILADLPELGLLNRRQIAALVGVAPFNRDSGHMRGQRTVWGGRAVVRSALYMATLVATRRNPIIRDFYRHLLSLGKPKKLALTACMRKLLTILNAMVKHQTPWHYPASGTLQTP

SEQ ID NO: 115628 - protein, 335 aa, unidentified
MANSLIFTVMSGVYLMDKTPVGIDIAKLKFDVAVWIERKKYKTKVFDNTASGFSDLLKWLLPYGDCHICLEATSHYSVPLATFLVDNGVEVSVKNPARIHAFAQSELSRNKTDQGDAKMIARYCALYAPARWFPAPLNERQLTALIRRLNHLVEMKQMECNRKKGADEIVQPFLTESICALEKQIREIKQKIKQHINDSPELKKNKQLLESIPGIGEILSATLLAFVGDVSKFTSSKQVVAYAGLNPKLCESGLFKGRSRLSKLGCTKLRKALYMPALTSITHNPIIKFQWERLVKRNKGGKVGVCAAMRKLLQLAYGVLKSGLPFDEKIALAKT

SEQ ID NO: 115629 - protein, 394 aa, unidentified
MRFVGIDIGGESHAVAVVNDGGALLVKSTLFGEDAVGYQRLRELLGNHDDCLVAMEATGHYWRNLFAFLVSHGFEVALLNPLRTRRFAEEELERTKTDSVDALGIARFAAQKRPAPTPIADEVTAELRELVRLRTRYVDELSDRMRQLHRAVDLGFPEFTRHVRIKTLLATAILARYPTARSFARVSIHKLARLAYDGRHHVGEALARALVESAKISVGTHHSEAYQLQVSYTCSDIELLRGRVKQLEQDIERKLQDHEVGKLLTTIDGIGARTAACLIAELGDPSRFRDAGALASYVGVVPRLRQSGKRAFSGARGLLLGNAHLRDRLWMPILVAVRRNPWLRAHYDRLLAAGKRPKVALVACMRKLLCAVYSVARTRRPFVLVLAPGSSTLK

SEQ ID NO: 115630 - protein, 424 aa, unidentified
MKRTQNDKILQIKFETLVVGIDIGKDTHYARAFDCRGIELSKLLRFSNTNQGYEALEDWMQEIMKDKGKTEAIVGFEPTGHYWFTLGDHLQRKGHRLAIVNPFHVKCTRELDDNSQTKNDKKDPKTIAMLVKDGRFRDVYIPEDVYQELREAVSERERLVEQMISLSNQVIRWLDIRFPEFNQVFKNWRGEAAWLTLRYFPTPAKVAAAGALSIVSTWRKKMKKPSLKKAEKLVNLAISSIGRTAGNEAAEAALQNLLTQYEMVMQQKQDIEQLMQELLIKVPNASKLVGIKGMGMVAAAVIASEIGDISRFNDPRQIQKMAGLSLRENSSGKHKGKTTISKRGRRRLREGLFRAMITMLATNSEFRQIHQRNLSREQNPLNKMESIVALCGKLIRVIFAILTKGNDYDADRMLNDMKRSMKAA

SEQ ID NO: 115631 - protein, 409 aa, unidentified
METVVERPAALDVHKESVTACVRVPGAGGRREQHLHAFKTTVAGLLTLRDWLRAHGATQVAMEATGVYWKPVWAILEDDFDCLLVNARHVKQVPGRKTDVQDAAWLCQLLEAGLLRRSFVPPKPIRTLRNLTRYRKAQLRERQREANRLHKILEDTGIKLDCVASDILGVSGRAMLEALAAGTTDPAVLAELARGRLRKKLPALREALEGRFTDEHALVVSSILAHLDFLDEQIERLSEAIEQAIAPFANAVELLCTIPGVQRRTAEVIVAEIGVDMSQFASAGHLVSWAGLCPGQDESAGKRRNAHTRKGSKWLRSALLEASLAATGTTDTYLAAQYRRLKPRRGHGRASIAVCHSILAACWHMLTTGELYREPGGDYFQRRDPERTTRRLVRQLEALGHTVILEAAA

SEQ ID NO: 115632 - protein, 359 aa, unidentified
MQRKQISFEGQRIFIGIDVHKRNWSVAVSTETGCVRIHSQKASAQTLLDFLKGNYPGADYLAVYEAGFTGFSTYYALTGLGINCLVIHAADVPTSQYESVMKTDKIDAVKLVKALRAGMLKGIYVRPKQSLDDIGIVRARQCILRDQNRYKVRIKHKLMSNGVEIPERFEGPSGTRWSNVFINWLKHDVALMSETRASLDLLTSQLERMRGAQLEATRELRRLSRTERYRQGHDLLCSIPGIGTVVAMALLTEICDIRRFGNEKQFASWLGLVPTCHSSGEKISHGEKTFRGNKQLGPALIEASWVAIRKDPGLSASFVRLCRRMKRQEAIVRIARKLANIIFAVLKNKTGYVPYAYNV

SEQ ID NO: 115633 - protein, 417 aa, unidentified
MAEEIEWFVGIDWASQSHQVCLIDAHGECLGERAVAHGGAGIEELCDWLIARTGATPEVIGVAIEITHGPVVEALLERGFSVYGINPKQLDRFRDRFTVAGAKDDRRDAHVLADSLRTDRHAFRRLSNDEPVIVQLREWSRMADDLQQERARLASRMREQLWRYYPQMLELADDLAADWFLDLWSHAPTPAKAVRLRETTIERFVKAHRLRRWQAPEVLRILKQKPLSVAPGVVEAASDHIRTLTVRIRLVNQQLKAAHRKLDELCAQLVPSEEDEPGQQCEQRDVVILRSMPGLGRIILAVLLAEVWQPLRRRDYHALRSLSGVAPVTRRSGKTCVVVRRYACNKRLANALYHWARLATQHDAVSRRRYDALRQRGHSHGRSLRTVADRLLSVACTLLEQQTLFDPSYEVRDAAGA

SEQ ID NO: 115634 - protein, 339 aa, unidentified
MKLYVGIDLHSNNSMLVILDETDKVVHEHRHPNELGIILAQLAPHRKNIQAIAVESTFNWYWLVDGLMEAGYIVKLVNTVAVKTYDGLKYTADEHDARHLAHLLRLGLLPTGYIYPKEERAVRDLLRKRAQLVRNRTMHILSIQNLVIRNSGKAIAAKDIRKLDTDAMSSICGGNSTLVLAMQSSLAVLRCLDEQIETLERAVLKQAKLRPEFQKLLTINGVGPIIGMTIMYEAGSMERFEEVGQFASYARCVQSSRWSNGKKKGEGNRKNGNKYLAWAFIEAANQVVRFNERISRFYQRKKAKTNGVIARKAVAHKLARACYHMVKDQASFDEARAFA

SEQ ID NO: 115635 - protein, 352 aa, unidentified
MPRTTRFHSVTTTIGIDMGKNTLHMIGLDSNGAIVLREKVSRGRIASRLTNLPPCLIGIEAGMATRYVARELAALGHNVKQVPPTYAKPFRQGHKNDFRDAHAVAEAVQRPTTRFVPAKTAEQLDLQALHRVRSRLVSERTAVINEIRGFLLERGIIVRQGLRFLRQSLPDFLAKRTDVLSLRMVRIVADLADDWRRLDQRIEAVTDEIETVVKSDDNCRRVMTVPGIGPIISSAMVAAIGNGVAFARGRDFSAWLGLVPKQMSTGDRTILGRISKRGNGYLRMLFVQAARVILRRPTNWSKHNFGGWLVCAAQRLHPNVLAAALANKLARIAWTVLAQQRCYEARVTKAAA

SEQ ID NO: 115636 - protein, 341 aa, unidentified
MQITTIGLDIAKNVFQIHGIDAAEKVIVRKQLRRGQVTAFFEALAPCLVGMEACATSHHWARELTKLGHEVRLMPAKDVKAYVKRNKNDAADAEAICEAVRRPTMRFVRIKSAEQQGQLMLHRARDLLMRQRTQVINALRAHLAEFGITAAQGREGIKELLAIVAQEEGSRLPSDAHASLTVLATQLQAVQTMIGSLEKRIVAQHRSNEASKRLETIPGIGVIGATTIAAVVPDPRVFRSGRDFAAWIGIVPRQDSTGGKQKLGPISKQGDQYLRRILIVGAHAVLRRARQQPEKYPWLTQLLARRPFKVVAVALANKMARIAWALLARGGTYRAPQLVAA

SEQ ID NO: 115637 - protein, 364 aa, unidentified
MTTFAQSCEPRRVLGGVDTHKDVHVAAVIDDVGRVLGTASFPTTRHGYRQLFVWLGGFGEVVAVGVEGCGSWGAGLARSLTERGVRVVEVNRPNRQNRRRRGKSDTVDAEAAARAVLAGDATVTPKAGTGPIEALRQLRVARGGAMKARTAAANQLHSLIDTAPDPVRAQLRALTFKKKLALAASWRPRNATTPEGASRYALASVARRWRDLAGEIGELDARIKTILTDIAASLLAVHGVGPDTAGQLLVTAGDNPDRLTHESAFAALCGSSPVKASSGKTNRHRLNRGGDRHANSALWRIVIVRMTSHQPTKDYIARRTGDGLSKQEIIRCLKRYVARELFPHVQDVIATQQHEAAQGDLRAA

SEQ ID NO: 115638 - protein, 393 aa, unidentified
MTGSICEHVTDVDSAKIFAAIELSKTSWLVALHLPSHDKISVFQVPGGDVDRLLAILERARETAMARGVSPTVEIHTCYEAGYDGFWLHRLLHAHGIHNQVVDSASIQVSRRHRNVKTDHTDAESLLRVLMAWHRGETKACSIVRVPTPEEEDLKRLHRSRETLLHERVRHVNRIRGLLCLQGVRHIDPGRDGWTAALVGLQTRDGRPFPVRLMAEIRREGKLLAVAQTLLREVGAELEALVRVKSSGRRQHAVRSTVRHPVALQLARLRGIGPTFAAVLSTEVFYRTFSNRRAVASFVGLTPTPYSSGTSSREQGISKAGNAWARHNAVELAWLWLRHQPASGLTRWFHARVGDAKGRVRRIAIVALARKLIVALWRFVDTGLVPDGAIVKG

SEQ ID NO: 115639 - protein, 353 aa, unidentified
MKKILKQVVGIDVAQDELVVCLGRMYDDLTPELYSHKTFPNTSKGFMSLVEWVKKLSVSVVGIRFVMEATGVYHESLAYFLAEQGIEVSIILPNKISNYSRTLDVKTVTDKTASEAIARFGLERKLDNWAPPKGIYKKLRQLTRERGQVVEARTVAKNQLHAEQSEAHPNKTSLIRTKKLIALLDKQEEEIRQELAQLLKEDPEMKKMLVILCSTPGIGLLTAATILGETNGFDLIRNKRQLTSYAGLDVKEKQSGTSVKGKPRISKKGNKYLRKAMHMPALAAIRSDERFKAIFARIVSKHGIKMKAAVAVQRKLLEMVYTLYKNQTLYDKTYLPKGGIEMAENLQEAGIKN

SEQ ID NO: 115640 - protein, 343 aa, unidentified
MRFYNRQHTYYCGIDLHVKTMYVCILDGAGQVLVHRNVPSTPAAFLEEVAPYREGLVVAAECMFTWYWLADVCAAEGLTFVLGHALAMKAIHGGKAKNDRIDSHKIAVLLRGGMLPQAYAYPATMRSTRDLIRRRLHLVRKRGQLLAHIQNTRAQYNLPVFGRKLAYRTNRAGVFPDPSVQQSIAVDLALIDQYDALVTDLELTIVREAKRHNADAFHRLRSVPGIGKVLALTILYEIHDITRFDRVQEFASYARLVKCKKQSGGKTLGTGGAKMGNVHLKWAFSEAAVLFLRHAEGKKLIARIEKQHGKGKALSILAHKIGRAVFYMLSRKTIFSMEKFLAA

SEQ ID NO: 115641 - protein, 349 aa, unidentified
MLADELDYVVGVDTHRDEHVLAVLAAATGAVVARKVLRASASGYREALGFAEQQAPGARAWAIEGAGHYGAGLARFLADRSETVLECRRAPRAERRLAGKDDALDAARTARAALASETLALPRSGQRREALRLLLITRRSAVDVRREALVQLRSVIVTAPDRLREELRGLPVGRLLERCRRLRRSSSASADELATRLVLRSLARRIEAATLEAADLEQEILAHVRALAPQLLDEPGVGPIIAAQLIVAWSHRGRVRSEAAFARLAGVAPVPASSGQTQRHRLSRGGDRQLNRALHTVVLHRRQHDPATKAYIARRIAEGKSRRDATRLLKRYLARHLYRLLENQEPRMA

SEQ ID NO: 115642 - protein, 317 aa, unidentified
MSKHSMICAGIDTGKRKLDVALDGRAERLQVDNNADGHKALSAWLRRHRTKRVGIEASGGYEQAVVAELRHDHFQVIVFQPAQVRAYAKFHLQRAKNDKIDAALIAACTAAAKKIHAPPDPRLAPFSEHLTMIEQITEDIARFKTRRESCRDPRIGQFWDEEVARLKRRLKIELEQLVAAIREYRDLAERLDLIASVDGVGERTALAILVRMPEIGTLSREQAAALAGLAPYDDDSGDQVGVRRIDGGRERLRKSLYAAALAASFRWNPQLGAMYRRLLAAGKAHKLALVACARKLLIFVNTVVARGTPWTKKTAAV

SEQ ID NO: 115643 - protein, 418 aa, unidentified
MSFKILKNNCCGLDVHKTWIYACIGITDSLKRTEYKEARFSSFSKGLQELCDWLSKYNCTDVCMESTGKYWIPVFNVLEKNNIWVTLSHPKYTKPQKGNKTDRKDAKWICDLYMCGMVKPSFIPPADIRELRDLVRYRFKLTCMITGEKNRAHNCLTVSNLKLDDVFSDIFGKSSRSITEQILQHPGETFDVAPFVDGRCKTPIEEIQAAVDGALSTEQAVKLRQCMNHIDELEMHKAEIEREIFRLSDKYESVLNLIRTIPGFDKNPLTAIQVLSEIGGDMSVFPTDKNLVSWAGCCPRNDQSNHKIKSTRISRAGSYFKPVLVQVANALIKSKKHPEFAARYRRIKARRGHKKAIIAICRMILTAIWHILTDLKPYTSEGFLESRPVNEAKVLTTSQALNLLKQRGYIIKDDVSVS

SEQ ID NO: 115644 - protein, 338 aa, unidentified
MPLYSGIDLHANNSVVVLLNEQDQVIYQRRLANHLPEILEALAPYQADVSGVVVESTYNWYWLVDGLMEAGYRVHLANPAAMQQYSGLKYTNDHSDARWLAHLLRLGVLPEGYIYPKAERAVRDLLRKRAHLVRQHTAQVLSVHNLMVRNTGVRFGAKRIEELTPSELVSMLSNPEQVLAVTSSLAVLHCLGQQIKTLEKAVQKRLKHTPAYAQLQTVDGIGTILAQTIVLETGDVGRFPTVGNYASYCRCVGSTKISNGKRKGQGNVKNGHPYLEWAYMEAAQFAIRFSPTVQRFYQRKQAKSHLMIARKAVAHKLARACYYIMRDLIPFDVHKAFG

SEQ ID NO: 115645 - protein, 348 aa, unidentified
MYYIGLDVHKKTISYCVKDASGQVHQEGKVGATRRELDSWIKTLPQPRTMAMEATIFTGWIYDHLLPHAQQVKVAHPLMLRAIAAAKKKNDRIDAGKIADCLRCDFLPECHMASTQIRDRRRTLRYRHLLVRQMVQMKNRISGLLMETGVSYNKQRLHKVGYFRELLSTNEDVHESIRPLLKLSRDTVVRLQKTEYALVSSLQRDPLLADRVKRLRTVPGVGPITALAWALEIGEVARFRSIRQAISYCGLCGEEKSSADKVMRTPLSKQRNKHIQRVLVEAAKLALFSLDKDLHGCRQFGSYPRVDWLPIRVNYAHRPRPKANRRRKLVQTPVCSNCRAVQVPLAQR

SEQ ID NO: 115646 - protein, 346 aa, unidentified
MKISRVGVDLAKNVFQLHGVDSRGKAVWKRQLPRDKWLRALSDTVEPGALIGLEACAGAHHWARLLIAKGYTVKIIPPQFVTPFVKSNKNDANDAAAICEAMVRPNMYPVTVKTVVQQDLQAIHRIREEIKAHRVAKANQIRGLVTEYGLVAPKQLSSLRPAITDWLEDASNGLTDFFRQLLNGLREDLSIMDQRMAMLDQQIAEIASNHPTAKRLQQLRGVGPLIATALVATIGDGKQYRKGRDMAAAIGLTPRQHSSGGKDRLLGISKRGDTYLRCLLVHGARSAIRTMKDKDDRLSRWVTSLQARRHKNVVAVAMANKLARTAWAIMSKGMDYNPDMNHAVPH

SEQ ID NO: 115647 - protein, 412 aa, unidentified
MTEESFTWFVGVDWGSEKHHACILDTRGTVVGERQFPHSGVGLAELGDWLLSIAGTTATVAVAIEVPHGPVVDSLIDRGFVVHAINPKQLDRLRDRFSVAGAKDDRRDAYVLGDGIRTDRRLFRRLHVADPRIVELRAWSRLTEELQEERVRLGNRVQQQLWRYYPQMQKITNDLAAPWFLALWVMAPTPGKARQLRRSTVEQILKKHRIRRIDADTVLRMLREPAIKVAEGVAEAARIHLRSLIARLHVVNRELRQAEQKLDQLCAGIGETEGAPGECLQRQDIMILKSVPGIGRINLAALVCEASGPLRSRDYPALRTLCGAAPVTKRSGKSQIVVMRYAAHARLRETVYHWARTATQHDAKSRCRYAALRQRGHSHGRALRGVADRLLGLTCVLLQRQTMFDPHFGQAG

SEQ ID NO: 115648 - protein, 410 aa, unidentified
MTKIIVAQDAPVLVAIDIAKARHEVLIAIPDKKRRRRLTVLNEFADFNRLATALKEYGRPVRVAFEATGNYHRALAYHLATAGFEIKLVSSVALARTREALNNSWDKNDPKDAQVILHMMEIGNEQYYHDPLVCGTNDIQELSKTHDIVSKSKTELWHRVLTHYLPLYFPEAGRFYRSSRSDWFFAFLERYPSPHLITAMGKAAFTTDAWDVIGRKVAKERLLADIYETAKSSVGLPVAPDSDALRMFRLVLGEGRGLIAQRNQIEDRAVALLKDLPDYQLLTSIPGIGPINALTILAEAGDLRRFGHHRQFLKFCGMDLATIQSGTFRGQTKLSKYGNARLRRTLWMAGQVAILQRTNSFRDKFERYIAKDRHNSHLRRKAYTAIAAKMARTVHGIIKHGEPYRPFFEG

SEQ ID NO: 115649 - protein, 344 aa, unidentified
MSQHSVRGGDFAGLMERFAQLQEKARLGTGQSFRIIVVQEAGLDGFWIHRALQNEGIESHVVDAASIATSRRRRRAKTDKIDGETLVRVLLAYKRGEPRVCAMLKVPTPGEEDRRHLCRERKALTAKRVRHVNRIKGFLFSQGISGYQPLRRDRRQRLEELQTGDGRAFPQHLKALINRELDRLELLLKHIKTVEAARDALLAEEQTAKPGPAAMLLDIRGIGPEFAAILWSEGLFRHFENRRQIAAYAGLAPTPWQSGAVDREQGVSKAGNPRLRTTSIQLAWLWLRNQPRSALSLWFHERVNRNGGRLRKTTIVALARKLLVALWKYVTAGVVIEGVTMKVA

SEQ ID NO: 115650 - protein, 344 aa, unidentified
MVVLGTDAHKRSHTVVAADEAGVEVGSITVGATAEGHLKLVRWAAKWPERRWAIEDCRALSRRLEADLLKLGEQVVRVPPKMMAGVRRSARTRGKSDPIDALAVARAALREPDLPVAQLDGPSRELRLLVDYRESLVKDRTAAQNRLRWRLHELEPGYDPPAGSLNRYKTLDEIEQLLTAHTTMVAVLGRREVTRIRELTREANQLESDISQRVTEQVPTLLEIPGCGGLTAAKLVGEAADITRFKSRDAYAMWAGTAPIPVWSANNQRFRLNRGGNRQTNAAIHRIAITQLRIHPDAQAFIARRLKTGSTKREALRLLKRKLANVVYRNLITDAQKPALADAA

SEQ ID NO: 115651 - protein, 387 aa, unidentified
MSQTVAALIPAAVDYERTLVLAIEASNKSWVLAAQVPGLPHTKAKRTINPEAEALLAAIAGYRARAAAMGRSIERVIAVYEAGWSGFWLARWLMRHGVEVYVVQPSSVPVDRRMRRAKSDGIDSELLLRTLLAWLRGEPRVCSMVPVPDEADEDARRCVRERTELISERVGLTNRIGAVLATLGVNDYNPLLRNRGHRLAELRTGLGEPLPANAHAKIKRLLARLELVLTQIAELERERDAVVETEASDKASKMIQQLTALRGIGVQSATVLVREAFVRRFANGKALGSYAGLASSPYSSGGIDREQGIGKAGNRRVRTVMVELAWLWTRYQPGAAQVCWFRERVVSTGRRVRKIMVVALARKLLIALWRFVIDGVVPEGAVLKPAA

SEQ ID NO: 115652 - protein, 413 aa, unidentified
MSMLHVGIDPAKTKCVARVVDQSGQSRGQTIAFKPDRPGVEGLIARVQKIDPEAKSHFFIESSGINWYAPAALLQEQGHPVSFINPSCTKAQRNISSRYAKSDAKDAEAIARAPFNMGDRALHPADIPEGPRLNLRLLCRHRHMLQGDATAIKMRVIAWLGLSLPGLTQIIGTDLSALDRELIVRYPVAAKLLRSGKKRLRDLLERVDEDALDDADIEALFDMARKAYSPRDFDDKLMARQFKLEFQRLALIEKQIKELDKEIANLLPECDPEGFARTIPGFGAVVAPIMVAEAGTDVSRFASAPKFAGWTGVVGRAAGSNGKQKDGLPMTKAGRSIVKWALYMAANAAVMHDPETRAFYDRLRAKDKHHNAALGAVANKLARIYWAVMTEQRPFKQRSPADPDDAQKGLDAT

SEQ ID NO: 115653 - protein, 343 aa, unidentified
MQDVATVGLDIAKQVFQAHGADASGETLFNTQIKRENVLEFFSKLKPCLVGIESCATSYYWARQLLEFGHDVRLIHTSYVKPFVKRGKTDANDAEAINVALTQKTMRFVPVKTLNQQAAVTIFRTRSLFVSQRTQLVNALRGHLAEAGLVAAKGIQNYSKLVKLMESAADTALPTVLKQALTDICDQIHLLNDLVTKLDKEIDRRVKHDENACRLLTIPGVGPKTAMCVIATISDIHRFPSGRHFSSWLGLTPRTYSSGGRSVLRRITKMGNSELRAMLYLGGTVIMMRDSKTPIGRWAARLRARRPYKVAAIAVANRIARIIWALLANGGVYNPTYGREASA

SEQ ID NO: 115654 - protein, 369 aa, unidentified
MLTVGLDVHFRKSSLCILDSNGKIAGQRQVHGHWDKVVEELGRLKEPFQICYEASLGYGHLYEQIGKLPKAKKTVVAHPGQLRLIFKSRKKNDRVDSQKLAKLLYLDQVPAVHVPSQEVRSWRALIEWRQKILGRRVMVKNQIRSLLRSCGIVPLKGNRLWTNKGIEWLCLQTFPTVYEALRRDMLVSEFYEHQQRMVQVEEALFKIAAGHPGMAVLQSIPGVGPRTAEAFLAYVDDARRFGHGRDVGAYFGLVPCQDASADKNRLGHITREGPSTVRKLLTEAAWQGTLRSQRIKGHFAKVSGGDKQRRKIALVATARWLSTVMIAMLKSGECWRAELPAAKTAIEAATKQSVQKEPAAIESTAPAGG

SEQ ID NO: 115655 - protein, 375 aa, unidentified
MVKIIRIGMDTSKNVFQLHGVDEQEQPVLRKTVRRRDLVSFFAKLEPTKVGIEACGASHYWARTLKQLGHEAVLLPPIYVKAYVKRGKNDKIDAEAICEAMSRPSMRTVSVKSIEQQAGQVLIGTREALLRRRTQVSNSIRGYASEFGLVASKGLGHIEPLLVRVQEDKTMPSLAKEVFAMLAGQFQHANAQIKEIDAKLMAVHRTNELSRRLAQVPGLGPIGATAMAIKVTDPKVFRCGRDFAAWIGLTPKDHTTAGRKRRGVITKAGDEMLRSLLICGATAVIQQAKKDRGKPSLWLSGLVKRKEPKLAAVALANKNARIAWKLIVSGERYNPKRNDSEDAAREGRCAALLGGSTTRPSLSSTTRERKLAMTA

SEQ ID NO: 115656 - protein, 378 aa, unidentified
MPSEIAIRVAIELSHSSWIVAVRLPDVEKSRLHRLEGGDTAALLTLIDDLRSRAATKLGGPVKVACCFEAGRDGFWLYRVLMAHGIAAYVLEPTSILVNRRARRAKTDRLDAEGMLRVLAAWLNGDRQICSMVHVPSPEEEDAKRPHREREHLVQERLRIENRIEALLFTQGIRGRPSLRSWERDMAELCTGDGRKLPPLLRAELERLRRRLVLTLELIREMETQRDETLTVTSGAMTTQKVTALQRIRGIGPNFAAILVCEVLYRSFANRRQLASYVGIAPMPYQSGGIDRDRSISRAGNPRARTTLIQLAWLWLRYQPDSALAIWFRERVGTLQGRTRRIAIVAMARKLLIALWRYVETGVVPDGVEIRAEAEASA

SEQ ID NO: 115657 - protein, 316 aa, unidentified
MSKHSIICAGIDTGKSKLDVAIAGSVKRWCFDNTAQGHAMLSARLRQHHVERVGIEASGGYERAVVATLRRDGFVVIVFQPIQVRAYAQFHLQRAKNDKIDAGLIAACTAAREKIHAPPDPRLAALADHQTLIDQIIDDIAMFKNRRESAREACFRRFWTAQIADLKKREKSEFNKLVAAIRQHDDLSRRLDLIASVDGVGLPTAVAILVRMPEIGRVSREQAAALVGLAPYDDDSGERNGAKHIAGGRERLRKTLYNASLAAAYHWNAQLIAFKDRLLAAGKLHKVMRIACARKLLIYVNTVVARGTPWVSRVLP

SEQ ID NO: 115658 - protein, 322 aa, unidentified
MAAYLGLDISKLTIDACLLDDRGEHVKKIANNPKGFEQLSRWLGNRKVIKSVHVCMEATGSYYEGVAEHLSDVGVLVSVVNPSQIKAFSETLLARTKTDAVDAHLIADFCRKYQPAAWVPPTAQERKLRGFVRFCSKLKETRASYLVQKETPNLVPAVLQSIAEVIENLDQQITKLESEIDEFIDKDSDLRRKRDLLCSIQGIGKTTAATILVEAPRLEEFTDSKATSAYAGLSPKTRTSGTSVRGSGAICKTGNARLRKALWWPAIAAMKHNPRIKALADRLDSRGKPNKKIIIAAMRKLLVLAYGVLKSGRPFDGALTPS

SEQ ID NO: 115659 - protein, 342 aa, unidentified
MNQYAGIDVSLECSSVCVVDANGKILREAKVVSEPEALIAWFRSSGFELERIGLEAGPLSQWLFAAMKAGGFAVELLETRHVRKAFEAMPVKSDRNDARGIAQLMRLGWFRPVHCKSMSAQETRSLLTARKLVQSKLRDVENSLRGILRGFGLKVGKTTERRFAGRIEELVADHLHLERIADALLAVRAVLRKEFAAFEKQVRKLARSDARTRLLMSTPAVGPIVALTYASAIDDPTRFKSSKQAGAHFGLTPKKHQSGETDYTGRISKIGDASVRTALYEAAHIMLTKPLKGCSQLKSWAMRIARRAGMSKAKVALARRLAVIMHRMLADATPFNTAAAAA

SEQ ID NO: 115660 - protein, 445 aa, unidentified
MIRKVMEVIYQCVAGLDVHKETVVACRRRLIGNWQVELEIETFRTTSAGLRALAGWLLEWGVTHVAMESTGVYWVPVWNVLEGQFTKLLLVNAQHLKKVPGKKDDQSDAEWIAQCLQVGLLRGSFVPRSEIRQWRQLTRQRTKLTDHRTSVINRIHSVLEQGNIKLSSVATDIMGVSGRAMIRALSQGESDPVRLAALARGRLKTKYEQLVESLDGQLSANQRWMLKQLLEQLEELENKDAIYSERIRGQMLAYERQLELLDTISGIGRRSAENLLAEIGPEMDPFPTDNDLVSWGGLCPGKNESAGKKRSSKTPDGNKWLKRVLVEAAWAGTNEKNSYLAALYRRLASRRGKNRAIVAVARTILQAAWHILKEDVNYKELGGDYFERLNEEKSTKYLVKRLEKFGYEVVLKPKKAKKAALELKPKKTKKAKVELKPKKASEATA

SEQ ID NO: 115661 - protein, 380 aa, unidentified
MEFVGVDVGKRKCVASKEAGDDYLSLAFENNAGGFEKLMAFCPPKAQIVMESTGHYGNCLMMKARNRGMTVKMVNAFSMSKFSKAVNRDTKTDKTDARQILMFAKINPRAFRVPTFSDLKPITRLRMETSSELSRTRLQIGSVMDQLFPELGHVFHDMGAVTAVRLLESHPTPKSICQLGLEDLTAFLKKHSRGQLGQERAEKLLDAAQNSFGLENSGLEIQLKVLLIRYKSLRRQRRLLDEQIKLLCPQNLLMSIPGMGPVFSAVVLAELGDEPRASADQIRGYAGLRPQIHQSGEFVATQKRMSKTGNRYLRTAFYMAAMSAVGNNPQFRALYQKKLEAGKRKKVALCHIASKLASITFGVLKNQKPFDEACLKASTA

SEQ ID NO: 115662 - protein, 364 aa, unidentified
MESVRFVGLDVHADSIAIAVAEPGRGEPSGLATIPNDTVMLLKRLKRLGRVKCCYEAGPTGFVLQRDLTAAGIDCIVVAPSLVPMKTGDRVKTDRRDAVKLARFLRSGDLTEVHVPEPATEAMRDLERARDAAKRAERTARHQLGKFLLRHGRRYSGKTAWTHTHLEWIRTQRFEHEAQQRVLEDYLKTVEDLGERVNRHARSIVELVEGWSLKPLVKALQALRGVNIIAATVLAAELGDFARFATAPELMGYLGLVPSENSSGETRQQGRITRAGNGHARRILVEAAWAYRFRARRSKAIRARSRGVSDEVQRIAWQAQERLCARYRKLTARGKNKNRTVVAIARELAGFVWAIGHQPHLLAA

SEQ ID NO: 115663 - protein, 338 aa, unidentified
MTCYSGIDLHSTNSVVVVSDEADRVLYQRRLPNELGKILAALEPHRGELAGVVVESTYNWYWLVDGLEAAGYSVHLANPAAMKRYEGIKHSGDETDAAYLAHLLRLKILPTGYICPPQERAVRDVARKRSQLVRSRTAHVLAVENGFARETGSRLSSNVIKRLEAAELEEFGLGEDVSCALAANVAVIQALNVEIGKLEARLRERVRLRPQYRLLISVPGIGEVLATIIMLETGAIERFAAVGNFASYARCVDSKHLSNGKKKGAGNVRNGNKHLAWAFIEAANFARRYCPEAKRFHERKRAQTNAIVATKALAHKLARACYHMLKEGQRFDVKRCFT

SEQ ID NO: 115664 - protein, 370 aa, unidentified
MKSIIYVGMDVHSTNYTLASYTFETDRPFAVTQVDPDYKHILNYLKQVQKNYGGSCEFLCGYEAGCLGFTLYEQLKAHNVSCVILAPSKMPKVKNEIKTDKRDAIKIAKCLAYNDYSAVYVPTKEDHQVKEYIRMRDVHKASLKKVKQQILAFCLRNGFQFSAGKHYWTVKHMAWLKGLKMDEMLREILDEYLATYQASVDKIERFDRRIEELAADSRYAQKVKMLSCFIGIRTHTALALLVETGDFHRFAKADQYAAFLGLVPGEYSSGCNNNHLGITKAGNSHLRRLLVESAQCLARGRVGYKSKALKAKQYGNSAQVIAYADRANERLRRRFYHLTLKLKKKRNIAIAAVARELCCFIWGMMTERTA

SEQ ID NO: 115665 - protein, 445 aa, unidentified
MICAAVERCAGIDVGKKFLAVCVMIGPLEGEACVHRRRVGTTTAELESLRDWLKAEDVTHVVMESTGSYWKPVYNVLETSVKVYLANPQEVKNRKGHKTDDKDGWWLAHLLRHAMIHPSFIPPRPIRELRDLTRRRKRLLGDATAEKNRIQKILEDANVKLGNVLTDVFGVSGQLMLDALLKGKARPDEIAQFAKRKAKRKIPEIIQALEGHRMSEHHRQMVRYSLKHLEFLEEQISEIDSAIAEKIKDSGYEPQWQLLQTLPGIQDRSAASILAETGADMQQFPTAKDLSSWAGVCPGNNRTAGKNKSSHTTGGNPWLRSALTECAWAAASKKNCFLKDKFWRITSKSGGDKAPAIVAVAHLLLLLAYQVLSTQKPFEDRMAPPLDERQKERMIRHHIRRLGKLGIAVRGYAPVTPAKGKCRPFAEVETPKRRKKRSAPKSLKT

SEQ ID NO: 115666 - protein, 343 aa, unidentified
MGEVSTIGLDIAKSVFQVHGVDGTGAVLMRRRVGRSKVLEFFAGLSPCLVGIEACPSAHYWSRELQALGHTVKLMPPSYVKAYLKRSKNDANDAAAICEAVTRPSMRFIPIKSEQQQSGLMLHRTRQLLIRQRTMLSNAIRGHMAELGIISAKGRNGTAELLQIIANVADERIPPVARFCLELLARQYLSLVAEVSSIDKRIHAWHRSCQESRRLEEIPGIGPIAATALVAEIGDWGTFRSGRSLAAWIGLVPKQHSTGGKERLGSITKQGNRYLRWLLVAGAMAVIRYARQHGTKRAWLTRLMDRRPAKVAAVALANKIARMAWAIMVRSERYREPKLLLAA

SEQ ID NO: 115667 - protein, 408 aa, unidentified
MEVVYRCCCGIDVHKKIIVACLNQGGEQSLREFGTTTSEIKSLATWLTESGCEIIAMESTGVFWKPLYNLFELMDLDAIVVNAAHMKALPGRKTDVKDAEWIADLLRHGLLKASYIPSREQRELREITRYRKSLTEERCRETNRLQKILEGANIKLDSVVKDINGTSARKLLEKIIEDDVPTSEEEISKMIHGRMRSKLGQLVTAIEGITTPLQRKLLAQVIDHIDDLNRRIADLDKLVQDYMDEYEAAITALCDIPGIARRSAEVILAEIGLDMSRFPSAAHLCSWAGVCPGNCQSAGRRKHGKTTKGNKPLKTILTQCAKSARSVKGSYFSAQYQRIAARRGKNRATLAVAHSMLIAIYHMLRNNVPFRDLGSDYYDSFNRDRKIHGYLKRLKALGWEPDALPGSA

SEQ ID NO: 115668 - protein, 435 aa, unidentified
MNCVDDIRLEQFLQLKKEIRGSEKHLIIGIDAAKEKHNAFFGTAHGRTLVKNLVFDNSLEGFQKLLAFVERIKVQYSLTAVVFGIEPTANYHKPLAEHLIKCGYLVVLVGGVAVKNNRPLLDGRWDKHDVKDAANVADLISQGKCLFYEYPLMTMRNVRVLIALKRRLKRREHGASVCIRNNLIAQYFPELDQHYGSSETLSVVRECLDPSEIAGMEYDAFCRTVAPGKMTLARERRVGSIWRSAVGSIGCTMGEAAYFEGQVMVDSLKQIRQAIKSVEEKLEDACMEFPEYTYLLSIPGFGPDVSSKVLGAIGNPHRFTNAKQVLKMAGLDLCANRSGKKSNSAIPVISKQGKADLRYALYQAALIASLKNKDFIAYFTNKLRDRAKEKGIGTKMRVKLAAKLLVIAWTLMKKKECFDPKYLKQKDRDAQKMAA

SEQ ID NO: 115669 - protein, 319 aa, unidentified
MAQNDLAVVGIDVAKDKVDVCIRALALRQTCPNTAQGRRKLVVLLRRHQVGKAVMEASGGYEREWRKVLHDAGIAVRIVDPKRVRHFAQSAGRLAKNDTIDAEMIAWFAETFSETPGQTHDAAQEELAALVKARLALVELKIRLQSQSAHAAPRPVQKAQARVLKSLAAEIEKLELAIAAKVKATPHLAERAEIIESVPGFAETTSAILVAGMPELGQVSDKIAAALVGIAPYDDDSGKRRGERHIKGGRRWVRNAIYMPCLGAATQNNPVTKAFYRRLIAKGKEPKVALVACMRKLICILNVMIARRQKWDAARYAPA

SEQ ID NO: 115670 - protein, 403 aa, unidentified
MGNHVVIDCHQSSLYVVAATPAGEVLWRRRFAATALGEEDLLRRLGPEDVVVLEATRGAHYLANRLDASGATIRIIDPQQAALVGFRGKKTDYRDCLALLQHLRSGSLVDVWRPDPVTRTFRQLTRERAAYNQGVVQLKNRIRALLKEEGLSCPGERLWSEQGAEWIAAQALPEQVRRVLLREWAALQAWCAVKAGQEEELAALALARPEAARLLQIPGFGPTAILVFLGEVGSLDRFASPKHLVSYSGLDPRVSQSGDRCRGGGISKAGRAPLRWMMVEVAWAHVLADGPEAGHYHRLVARGKPKQVAIVALARRLLILAYLLLTRQETHQRLDAEKFEAKLRRVAARRPKPEVREERHVDWAAARFEEVVGQPAPSRQRRRSRTVSEEGEGAEHSPTVNST

SEQ ID NO: 115671 - protein, 456 aa, unidentified
MKIPQSTIRLLTGRLVKILLNREVSTMKSNTQNAKIEAITEKTLVLGIDVGSETHYARAFDYRGVEYSKKPFKFSNTEAGFVTFKAWVLDIKEKHGKDKVIPGMEPTGHYWFNLGKFLQDNEMKPVLVNPHHVKKSKELDDNHPTKNDRKDPKVIAGLVREGRYMIPYLPDGVYADLRTASNIRFQLQAELTRIQNRINRWFNIYFPEYKTVYGKPDAKSGILILKEAPLPEDILTLGIDGVNQIWRDAKLRAVGKARAKTLIEAAEHSVGSKEGAVSARMEIRMLLEDYESRNMRLQEVMVLIEELVKQIPMAEKLLEIKGVGIKTVSGFLAEVGDISRFNNPKELQKLAGLALVENSSGKHKGKTTISRRGRKRLRYLLFEVAMSLVAKNPEFRELHNYYTTRRLNPLKKMQSLMAIAAKMLRVFYAILTKGVGYDPKKMVNDIRRPAAYAQAA

SEQ ID NO: 115672 - protein, 348 aa, unidentified
MARITRIGIDTSKSVFQLHGVDEEERTVLRRKLRRSEVLTFFAKLEPTSIGLEACGGSHYWAGELQALGHTVVLIPPQYVSPYVGRGKNDAADAEAICEAMSRPRVQKRFVAVKTAEQIAAQMLLGVRENLIRRRTQLSNAIRGHAAEFGLIAAKGLSKVEPLLARIAADDSLPALAREMFATLGQELAELAPRIAAVETRLRAWHRANELSRRLAEVPSIGPIGACLLPIKIANPHAFRSGRMCAAWIGLTAKDHTTAGKQRLGGITRAGDEALRATLVAGATAYIQQVRRGRTKPSPWLDELLKRKAPKLAAVALANKTARIAWKLMVSGQRYDRTRAAAPLAAAA

SEQ ID NO: 115673 - protein, 363 aa, unidentified
MIVIGADTHKHSHTVGAIDAMSGRVIADRTVKAKRRSFDDLLLWARGLDGERVWAIEDCRHVSGALERFLLRRGERVVRVAPKLMAEARRSARERGKSDVIDAVAIARAATREGLDTLPVARLAGRELDIRLLVDHRERLVAQRTALINDLRWHLHDLWPGFEIPARVLTSGCWQDRVAGRLARAEQTPRVRIARDELRRIRELTRSIDALQRELAVLVAQLAPRLLAEPGCGVLTAAKLIGEIAGIERFASDAKLARLAGSAPIPASSGRTTRHRLDRGGNRQLNCALHRLAVTKGRLDPDTAAYLARKQADGKSRREALRCLKRHLARRVWRLLQSTASPLKASLPVPAMIHCNVPYSRFS

SEQ ID NO: 115674 - protein, 345 aa, unidentified
MTVYIGVDFHARQQTISYLTTEEGEIRRLQLDHGRPIEVRKFYQQFAGQQVVVGFESSGYAAWFEELLEELGYEIWIGHATAIRLFARRRQKNDRRDADLILDLLVSGDFPRIHRYSAASREVLQQLRYRQRLVKMRTMIVNSLLFMASSRGLSLRTQLKSRRGLERLQQLALPQPLTEQRDELCQLLQELKTRVDKVEDWLTAKAESDVRVKRLRTHYGIGPLTGLCLVHTLECPERFANSRKVTAYVGFDPVEDSSGERRRIGSISKQGSRLLRFYLVEAGQIAIRQDQDLARVYQRVLIRRGHAKAKVAVGRRLLVRAFIMLRDEIDYAEFQRRGVAARSSR

SEQ ID NO: 115675 - protein, 359 aa, unidentified
MQIADRMSVETKITLGVDTHKDTHVAVALDGLGRHLGTLSVPTNTAGYRELLGWARELGSIEQIGVEGTGSFGAGLARLLKAEGIPTREVIRSKRRDQYRSGKSDPIDAEAAARAVLAGTATGEPKDADGQVEMIRALRTTRRSAVKARTQAANQMKALLVSAPEELRAQLRDLSTARLVCRASRFRLGENPDSVMAATKLSLRSVARRYRHLCEEIRELDEQLDRLVAEAAPELMAVDGVSTDTAASLLITVGDNPERLNSEAAFANLCGVAPIPASSGKTVRHRLNIRGNRDANRALYVIALGRMGRDERTKAYVAKRTAEGKSKREIIRCLKRYIARELYRILVQPLSPLPSVSAP

SEQ ID NO: 115676 - protein, 425 aa, unidentified
MNYKQNEKINQVKESTLVVGIDIGSTTQYARAFDWRGIELGKVFTFSNSREGFEAFKAWMQHLQDKYRKSDVIVGIEPTGHYWFDLGAYLEDEGILLVMVNPYAVKQTKELDDNSQSKNDRKDPKVIAKLVTEGRYSAPYTPDGVYADLRIMVANRKRLIREMTQIKNRFARWFAIYFPEYTDVFGDYEAQSSMLLLKKVCTPEAIVELGAEEINQIWRDAKLRAVGMKRATTLCETAKRSIGLKKGSSAARYEMKLLLEDYEYKKAQLDAVMEEIEKLCRKIPESEQMLAIKGIGVITVAGFLAEVGDVRRFESPRQIQKLAGLSLRENSSGKHKGQTTISKRGRSKLRAVLFNAAIPLIAKNPEFKSLHEYYTTRANNPLKKKQSVIAISCKLIRVFYAILANGVTYDSQKLLSDIHRQPQAA

SEQ ID NO: 115677 - protein, 385 aa, unidentified
MGVAVSPTTKNGDKHMKKLNKYVGLDVHKDTTVVAVAEAGRAGEVRLYGTISSDLGALEKVLRKLGGEGITLHVVYEAGPTGYVLHRRLEQLKIDCIVVAPTKTPTEKGPRQKTDRRDAEQLARLHRAGELTGIHLPDAVDESIRDLTRARADAVHDLTRAKLRLKSFLLRQGYHYQGKANWSEAHQRYLRELILPLPALKAVLEEYLLALDQGVQRVSRLDELIAAQVPAWRMYPAVRALMGLRGFQLTAAAVLVAELGEVRRFRHPRNLMAFLGLVPREHTTGDSRKLGGITKAGNAHARWILTEAVQHAFLPPKVSAPLALRQQGLPPAQRELSWKVQVRLFKRSRHLLGRGLMKPKVTIALAREMSGFVWALLRQVPAATA

SEQ ID NO: 115678 - protein, 423 aa, unidentified
MMKLKYSICCGLDVHKNVIVATIVTTNKDGISEYLQKSFSTINSDIQRFHNWLIENNCYHVCMESTGKYWIPIFNYLENDIDVCLTHPKYVKAIKGKKTDKKDSKWIADLYKFDLVRCSFIPPKDFRQLRELARYRFKLVCMKSSEKNRIQNCMTISNVGIASVLSDPFGKTATEIISYLLEHTADSMDEKAVRKLIKKGAKAKSDEIIEAIKGYNIETDQAKKLELAQGHLEYLDDMITQTEVELYVRIKPYYEFVEFVSTMPGMTELSSTIVLAETGVDMDIFDDAKHLCSWCGLSPANNESAGKKKSVRIAKAGDYLKPMMVQCALAAIKSKKQPYFAIKYGRIKKRRGHKKAIIAIARMMMVCIYHMVSEKKPFTPTDYEELMDPQNHVESVVLNENNVFAYLESLGYDSSKLVKRNDN

SEQ ID NO: 115679 - protein, 424 aa, unidentified
MKVSYQTCCGVDVHKSFLVATIVKTTGGIEPSYQKKRFSTFNNSILEFKQWLLDNDCHDVCMESTGKYWVPVFNLLEDDINVVIANPKWVKAVKGNKDDTKDSKWIGDLFRLGLVKGSYIPCKKVRILREYTRYRYKLVSCRSSEKNRYQNALTVCNVALDSVVSDIFGKSSTSIIDYLLEQSGTSINHEEIASKLLRSLKSKEDAVIESVEGYQMTDAQKYRMRLVRAHMDYITAEINDVDKMMENMISSNPDFENAVQFLCTIPGVKRDSAITIISEIGTDMSQFGGSKRLCCWAGLTPGSNESAGKKKSVRITRAGVYLKPALVQCAHAAVKSDKSPYYKKKYDSLVKRRGKKRAIIAIARMILTAIYQMLSTGEQWNPSDLYKIDMPVALVEKQKAKAIKQAKKLLQREGLLPPDEPLAS

SEQ ID NO: 115680 - protein, 349 aa, unidentified
MKIIGCDFHPGYQQIAMWDKATGETLEKALSHERKEEVRTFYAGLTGPVRVGIEASGHSQWFERMLAELGHEVWIGDAAKIRASCERKQKTDRRDAELLVKLLDEDRFPRIWVPTPAERDARQLLLHRHKLVRLRMQVKNQLQALAMNQGVQRKWKLWSEAGRKQLEALSLLPWASRRRAELLVLLDQLEASIGELDRAAAEQANTRPAARRLMTHPGVGPITALAFALTMGPADRFRRGKQVASYLGLIPTEHSSGGRGQRLGHISKQGNPFLRGLLVEAAQSAVRHEPEMRRAYQRLAQRKCRALAKVAMARKLAVRLYWMLREEVDYAQLLQGSHAGQPESSRGRS

SEQ ID NO: 115681 - protein, 403 aa, unidentified
MIYEQLYVGIDISKLKHDIAIMNEAKKLVRRPIVIQDSYDGYHYLLGIFNQLQQQYETKQFHIGLEATSDYWKNIYYFLKQQSDAFVLTVLNPIRTRAFVQSELRRARTDPVAAQDIALFMVEKQPAPSIDRAPMFDGIKDLDGQIYVVKKQQTMISNKLRLELTKVAPEIEKAVRGINGQQLLSLLQNFPTAEAIAHAAVAELATVQYGKHHWSLPLKFIQKMKALATNSIAYKTGPGAGYVVQSLVRRIMETQQEAELLKRQLVEQYKLVKEHDSVLTSITGISQQVSTVLEAYIGDVHRFPNAKKMVAYFGMNPTIDESGSSKKRKSHLQKKGSGIVRHKLFMVMLSIIRSQNGPIYDYYARLVAAGKPKLVAIAAAMRKLLVIIYNMLKNQEQFDPNKM

SEQ ID NO: 115682 - protein, 310 aa, unidentified
MTQQDVIAGIDVSKDRLDVCLWPTGETMAFANDPAGCARLARRLAGRAVTAVALEASGGYEREAMAALRAAGLRLHRLNALRVRRFAQGCGIMAKTDRIDAAVIARYLAAVPQRAAIDEPAAEAVAELVTARRQLVEEMTRCTNQAAQSRQAVLQRLARRRIARIKADILALDQAIATAVEADADMARKSRLMRSVPGVGPVLTHSLLALMPELGRLSGRQAAALVGVAPFACESGRYKGQRRISGGRKPLRDTAYMAALVAARHNPVMAAFKQRLVDAGKPPKLIIVAIIRKLVVALNAIIRDEQPWKA

SEQ ID NO: 115683 - protein, 334 aa, unidentified
MLNVLRSHINVMEGKMEVGVDISKLKFDVVLINQMGKSKQNAFTNDQKGFDKFKPWLESFDALSAHVCMEATGRYGEDLALFLSNNSIKVSVVNPSRIKAFAQSEGLRVKTDNVDAGSIARFCKAHQPAPWLAPPSEIIEIRDLYRCLQDLIEDKQRCQNRMEKLSPKKASFKTWTKLVKEYEKKIKDIEDQIKALVDSNNDLAKKEELLTSINGIGFKSAIAILSEMPDVSSFDNAKQAAAFAGLTPSIRQSGSSLHSNGSLSKAGNVRLRKALFMPALVAIRHNPVIKAFYERLLKKGKKKMVAVAAAMRKLLHIIFGVLKHQKPFQCGAKT

SEQ ID NO: 115684 - protein, 339 aa, unidentified
MGSHHKEGSTKMSKHSILCAGIDTAKHKLDVALEGRAETLQVDNAADGHVSLSAWMRQYRVERVGIEASGGYEQEVVAHLRRDGFVVVVFQPAQVRAYAMFLLQRAKNDKIDATLIAACTAATQKIHAPPDPRLAPCAEHLTLIEQITDDIARLKNRRETCRDGRIRAIWRDEIARLDKILRSELKVLTAAIRQHRDLAERLELILSVDGVGLRTAVAILVRMPEIGRLTREQAASLAGLAPFDDDSAEHEGVRHIAGGRGRLRGSLYAAALPAAFRWNPQLNALYQRLIAKGKPHKVALVACARKLLIFVNAVVERGTPWVAEPPPARLKLAAAAPRP

SEQ ID NO: 115685 - protein, 300 aa, unidentified
MNIKRIGLDLAKQVFQLHGVDHQEKTVLRKHLRRNQMLAYFANLPPCLIGIEACSSAHYWARELQKFGHTVKLMAPQFVKAYVKGNKNDANDAEAICEAVGRPNMRFVAIKSIEQQDIQFTHRIRSQLVKQRTEKVNQIRGFLAEYGLTVGRCIEKLRKALPLLLEDAENGLSFEFRRLLQELQQDLITLDKRVSEMDKKIHVLASSNAAAKRLQQIPGIGPITATALVCALGDGKQFKRGRDLAAWLGLTPKQHSSGGKECLLGISKRGDTYLRTLLIHGASRGSLSASVRPASVASTR

SEQ ID NO: 115686 - protein, 376 aa, unidentified
MGIDVGKSSHWACLVTREGEVALNRRVRNSEGDLDGLFSQVACDTIVVVDQCRNIGLLAISRARLAGLGVAYLPGLAAHQAARLFAGDAKTDERDALVIAKTALGIPDALLPVPEPDEALEAARSLAAQRSHMVTCATRDKNRLRSILLESCPAFEALADLGDRRWLNMLEKLGGPWGCIDAGKPAFGAVTKGANRARMDAAWNAAMASTRPSKRRVDAENPQVRMLARRIREALEEADGIDREITALLAGDGTYECLVTIPGIGPRTAAELVIGINIEDFPDHDHLASYCGIAPRNRQSGTSISSVSASRQGNRRLKNLLIFSCNSLVRSENRFGEYYRACRGRGMCHGEALKAVARKRLKVIYAIMRDKVPYSA

SEQ ID NO: 115687 - protein, 392 aa, unidentified
MYIVGIDIGKNHHEASIVSPEGKQIGRSLRFATTHKGADSLMSFIFKNIGNSPCVFGMEATGHYWYPIYSFLKAKGYTIYVINPIQSDSLRKMYIRQTKNDSIDSFLIAEVIRFGQFTTTSMADENILAMRQLCRYRDSVISSRTEIKLRISTIMEQIFPEYEKQFSSLWVSTSMGILEKYLTPENIENAPIDELFEIIKDKSHNKLTMKKAISIREAAADTFGIKIAQDAFSFQLKQLIDRMNFLDKQIEALDCQILEYYEKFDCYLHTIPGIGMIAAATILAEIGDINRFKSSSALVAFAGIDPTVRQSGEFSSTHNHMSKRGSPYLRHAIFLAATTCSFHNSPLNAYYKKKRDQGKHHLTATGAVARKLTSVIYAVLRDSKPYEPKSFC

SEQ ID NO: 115688 - protein, 410 aa, unidentified
MELLHRRCCGLDVHKETVVACLRLVSDGKVTTEVRTFQTTTADLLRLSEWLAANGCTHVAMEATGVYWKPVWHILDDGEFELVLANAAHVKNVPGRKTDVNDAMWLAELLAHGLIRASFVPDSQTQEMRNLLRTRKQLVREQSSHVQRVQKTLEDANIKLDSVLSDLMGKSGRAMIEAMIAGETNPAKLASLAHPRAKASHEEFREALRGRVTKHHRFLLRLHLNQIDALNAAMATLDTQVEANLGPFRTAVELIMSIPGIKNLGANVIASEIGIDMSRFPSDAHLISWAGICPRNDESAGKRRSNRLRKGAPWLKTTLVQCAWAAVKKKNSYLQAQFYRIKARRGPKKAIMAVAASILTAIYHMLKDGTMYKDLGSNHFDRRSTDQQKNRLIKRLADLGYAVQIKPLSA

SEQ ID NO: 115689 - protein, 391 aa, unidentified
MIFVGIDVAKDKHDCFITNTDGEVLFKSFTISNNLDGFDELYHKIESVMEDVSKVKVGLEATGHYSYNLLGYLLDKGLATFVINPLHTNLYRKSLSLRQTKTDKVDARTIASMLMSDVNLKSYSDTSYHNDELKSLTRYRFDKVKERAKLKISISRLICILFPELEKLVPTLHQNSVYELLYEFPGARQVANAHLTRLTNLVETASKGHYTKDTAIAFREAARTSIGSNMPAKSLELKHTIKLIHELDVEIEEIEKEIKTIMDEINSPILSIPGISYRMGAMIIAEIGDFSQFDSPDKILAYAGMSPSTYQSGQLDNCHSRMEKRGSRYLRYALYNATVYVCLWDPTFKAYLTKKRSEGKHYYVALSHATKKLLRVIYQLEKTGQQYIKAV

SEQ ID NO: 115690 - protein, 467 aa, unidentified
MKNYDYNLFVGIDVSKGKADAAVLAVPELRSVKPRFLRKKLSFKFIKADVAEFLNTVRKYSSDPHCLHTYFALEVTGIYSTNVYSFIKENCNSDEEIHQLNTDFVNKWRESHNISKSDPLDAQTISTIIGTDDDVRYVSDSVFENKNGYQDLKALVHRHYQIKKLYSQETNRLIALCDCYFPELQYVFEPKSAAFLAVLSQYPTSHDIINASKNEVFSLVYEASKHRCNMDKIDKLFNYAQDTLVPHVSDHIRCVISNTVESIVNIRTQLKLIEKDIRKLASTFNVYSLLMTITGCGPLTAAVIIAETGDIFRFKNADHYVSYSGSSPRNKRSGKSVEIMGKISKKGSKYLRHALYMIAEFARRHNPVLKHLFERVKNGNKKRHKLAVIAVANRIARYIYSIMKNESSFVIMHENIMRLPEETRNTFFNSISLDFPKNTRKQIYQYSDVNGEIHRFVYKNETTESIA

SEQ ID NO: 115691 - protein, 354 aa, unidentified
MSGLNSGIAVIGIDIGKNSFHVVGQDRRGALVLRQKWSRGQVEARLANLPGCLIGMEACTGAHHLSRKLQALGHDARLMPAKYVRPYSKGQKNDFRDAEAIAEAVQRPTMKFVTTKTAEQLDLQALHRVRERLVGQRTGIINQIRAFLLERGIAVRQGLRFLRAELPTILATRSDALSPRMLRLIEDLAGDWRRLDARIEVISGEIEELARKDQACERLMTVPGIGPIISSAMVAAIGTGDAFSKGRDFGAWLGLVPKQISTGDRTILGSISKRGNRYLRALFVQAAWVVLVKLGKKWERYGLRSWIEAAKKRLHHNVLAIALANKLARIAWAVLHKGRAFEYVKTNATAPRCA

SEQ ID NO: 115692 - protein, 428 aa, unidentified
MDPRFAVDNVLALGVDPHRESLDVIAIRFPEEILLDAAFDNCPAGHGALWSQATTLAAEQDLVLVVGLEDGSNYGCTLGRYLANQGCPVKEVNPRMTNRQRDFYGQDKTNRLDALATAAIVLRAYDQLPDITPVQEALQATRELSRYREQLVKDQTITINRLQCHLANQYPAYKTFFSKVNGVTALHFWATYPTPAHLQGVTSEELAHFFFQTSHHRLGKVASRKKADQILQLLDDSPPQVPGLLTDVEATIITDLAQRLLQLGRSIETMEAKLAETLPATGQKLETFQGISTALAGVLVGETQDAARFNFDKDRYASYNGTAPATRGTGRHVRQVENRWCNRRLKSAFGQVALNARRCEPLSAEYYQACLDRGLTPAQAHKCLSRRLSDVLFAMMRDKTTYDPEIHRHKQMLHKMKGKSVAPTVAGG

SEQ ID NO: 115693 - protein, 372 aa, unidentified
MRRRQLAGDSPTCPGSKRPTFSRGVVRRLLVASPNSCLGSQARIVQGRVETSRFRVGGLMTAPTVFVGIDVSKDSLDVALRPSGERWQVAHDSRGMEGLLQRLGPLPEALVVLEATGGYEQALAAALASAGVAVVVANPRQVRDFARATGQLAKTDAIDAAVLALFAERVRPEPRPLPDEARQGLEALVTRRRQLIEMLIAEQNRLLHARRPVRRSLTDHIRWLERQLGGVDKDLDQAVRSSPLWRAQDDLLQSVPGIGPITSRTLLAELPELGRLSRKEIAALVGVAPLARDSGTLRGHRTIWGGRASVRAVLFMAASAATRWNPVIRTFYQRLRAAGKPAKVALTACMRKLLTIVNTMMRSQTPWRVVTA

SEQ ID NO: 115694 - protein, 347 aa, unidentified
MEQYAGIDVSLEASHVCVVDAQGKILKEAKVASEPEALIAWFAAHGTPMARIGLEAGPLSQWLFAGMKAAGLAVELLETRHVRAAFKTMPVKTDRKDARGIAQLMRLGWFRPVHCKSLPAQEVRALLTTRKLLQAKRHDVEMSLRGVLRGFGLKVGPTTPKTFAGRVRALVAHHDTLQTIADALLSARTVLEQEFKAIEKRLSGLARANGPTRRLMTTPGVGAIVALTFVSAIDDPARFRSSRMVGAHFGLTPRKHQSGETDVTGRISRIGDHGVRVALYEAANVILTRAVKGSDLKSWALGVAKRAGMKKAKVALARKLAVVLHRMLADGTTFMASKVAPSAAVAA

SEQ ID NO: 115695 - protein, 426 aa, unidentified
MDTIIERCAGLDVHKKTVMACVRSAEPDGRIQEVVKEFGTMTADLDCLSNWMAAQAVTHVAMESTGVFWKPIFNILEERFEVLLCNAQHVKQVPGRKTDVKDCQWLAQLLQHGMLRGSFIPPRPHRDLRDLTRHRVQVTGEKSRVANRIQKVLEDANIKLSSVATDILGASGRDMIGAIIQGTENPEALAELARRRLRGKMPELREALSGHITDHHRYMLRTLYAHLQYLEGVIAQLDQRIEQLTHSEPLNVKAKENDVLPFDEAVEVLDSVPGIDRVAAQAIVAEIGTDMRRFPTPGHLASWAGISPGNNESAGKRRSGKTTKGSRWLRRTLVQAALAASHSKGTYLGAQYHHLVRRIGKKRAVVAVAHSILVSIHCMLTEKVSYTDLGADYFDKRDPERLLRYYTKRIADLGFKISLQPTAQVA

SEQ ID NO: 115696 - protein, 408 aa, unidentified
MIFVGVDWAEVHHDVCILDEGGDVLARKRIPDALAGVQQLHAMIAEHLGEENDAESVVVGIETERGLLVTALVAAGYQVFAVNPLAASRYRERHHVSGAKSDPGDAKVLADLVRTDRHNHRAIAGDSVLSDVIKLLARNHQNTIWECQRQVNTLRSALKDYYPGALEAFGTELSGPDAVAILSIAPTPTKARALTKARIETALRKAGRRRLLHERVNRIYEILRREQLTQPALLEDAYGVATEATIANIAQLNASIQKLEASLSTHFEQHPSAKVILSLPGMGTVLGARVLGEFGDDPNRYADAKSRKNYAGTSPVTKASGKSRVVLARHSRNKRLASALDQWAFSSLLQSPGGRAYYDELKSRDKHHRKAIRQLANRWVGILHGCLENDTLYDEAIAWSHHRSDVAA

SEQ ID NO: 115697 - protein, 352 aa, unidentified
MESITVGIDLAKQVFSVCLMDERGRVTQRRELKREALHEWLRQLPAGTVVAMEACSGAHYWGRFCERHGLKPKLMAAQFVKPFRKSAAIKNDRNDAEAIATAARQGNMRFVIIKTEAQQARLSWHRVREGYKKDALAVMNRIRGLLAEFGVVINKSAVALSRALGKLDELALPAEFRELIRQQQQHWQQIEVQLATCYARIKARAEQDERCKRIRGLTGVGPLTADAMVATLGNASEYKNGRQCAAWMGLTPTQHGTGGKVLLGSISCRGDAYLRTLLIQGARSSLNCANATPPDKMTPEQQWIIQLRARLPFGKVLVAIANKHARQIWAMLARDEAYDAEAWLKHPMVQRG

SEQ ID NO: 115698 - protein, 357 aa, unidentified
MEASPRPPGARKPETELGAVSTIAVPHPDSRSGPSPHLQGRVMDEQRTVFVGIDVSKDRLDVHLRPSGEAFFVSREGKGMDDLVIRLQGLSVALVVLEATGGFEATGAAALAGVGLPLCVVNPRQIRDFARAMGRLAKTDTLDAEVIALFAERVRPQARPLREPERVHLAELVGRRRQVIEMIGMETNRGRQAIAKPLARRLARHVAYLQKELDAIDHDIGEAIKHSPAWREAEALLKSVPCIGDVTARTLLAELPELGTVSRHQVAALVGVAPINRDSGLMRGRRAIAGGRTSVRAVLYMAALTAIRRRSPFRAFYDQLTARGRPKKVALVAMMRKLLTILNAILRDHTPWRPLNA

SEQ ID NO: 115699 - protein, 318 aa, unidentified
MSAPNDAHCVIVGIDVDKDSADVCLLPEGRRWTFREPAEMVQELIQQQPSLVVIEATGGYERRWVAPLLDAGICVAVVNPKRIRDFARAMGYLAKTDAIDAGVIAEYGRVAQPRPLEKMPAKQAELQELVNRRRQLLGMRTMEQNRKGSAISTATRRSVEKILKAFERELDHLETAITELLESDDDWRDKVRLLRDVPGVGPITGVTLVAEVPELGKLNRQEIAALVGVAPYNRDSGQFKGKRFIAGGRSHVRSVLYLAALSASRHNPLVRRFAERLKATGKPPKVRITACARKLLVILNALLKTKNPWDPLRCVQGT

SEQ ID NO: 115700 - protein, 350 aa, unidentified
MSKGTRWVIGFDIGDRRSTALLLDAQSGDMKELPSVATTRRGVERLFRGLPAGTRVIVEAGTHAGWIATLGRELGIDVFVADARRLDAVTKNIRKSDRHDAEMLARMGASSMDLLRASFVRDPKLQADLAVVRVRDAMVSTRSQLINAARGVAKSLGERLPSCSSAAFAKRVAQDLPPNLAAALGPTLLAIEQITKSIALYDAEVERLCAKHTDTNYLRQVSGVGPLTALCFVLTIADTKRFRDPRDVGAHLGLVPRLGQSGKADPQLRISRTGDGLLRRLLVQSAHHILGPFGKDCDLRTRGLALASRGAKSGKKRAICATARKLSVLLFVLWRERAVYQPLRGGPSAA

SEQ ID NO: 115701 - protein, 350 aa, unidentified
MLIIGCDYHPSFQQIAFVDTETGEFQEQRLSHREEAERFYRDLAAQGRKGRVGMEASGHARWFERLLAELKVELWRGDAAKIQAKRVRKKKTDREDARHILQLMLKDDFPQIWVPSWDNRDLRQLLWHRHRMVQMRTRIMNQLQAVALNEGLRCKKRLWGERGRQQLESIGLAPWASRRRRDLLELLDRLTPTIAELTKQIEQEVEKYPAAQRLMTHPGVGALTALAYVLIIGEPERFECGKQIAAYLGLVPEEDSSGERRRLGHISKQGSGLMRFLLVEAAQVTVRSDPEWRSKFFHLALRRGRKIAKVAMARRLAVRMYWMWRQQWDYEQLKKFGPHAGQPGTAHGVK

SEQ ID NO: 115702 - protein, 387 aa, unidentified
MIFVGIDVAKDKHDCFICYSDGSIYKDAFTFSNDKIGFNILLSFMPEPSDNVKVGLEATGHYSLNLINFLVDNGFNPVIFNPLQINLFRKAHTLRKTKTDKTDAKLIALMLSSSDAKPHLDLSYHFVELKSLTRYRYRLKEQLARLKISISRIVNIIFPELENLVYSINQKSTLALLHEFPANFLIANAHITRLTNILKSNSRGKYGKSKALEIRTAALNSIGSDSDAYRFELVQTIDLINFYSSKIDELDSKIKDILLELESPILSIPGISFNLASIILAEIVDINKFDTPSQLQAFAGLDPATHQSGKFVASDVSMVKRGSPYLRWALLNAARLISMRDPNFKEYYQKKRNEGKHHFVALTHVAKKLIRVIFKLLKTNTLFVSQV

SEQ ID NO: 115703 - protein, 314 aa, unidentified
MSEPTLFIGIDVSKASLDVAVHPTRESWTLSNDPVGLQALVHRLRGLPIKLIVFEATGGYETLAAATLAEAGLPVAIVNPRRARRFAEAMGHLAKTDKIDAHVLANYARTLTPNPRPLPDEESRQLSALLTRRRQIVEMLTAEKNRLHTARRPVQERIREHIAWLEQDLHDLDQDLQQRIRQSPLWQEKDRLLRSVPGVGPVLSLTLLAELPELGQVDRKQIAALVGVAPLNHDSGRQQGRRLIWGGRASVRAALYMGALVATRHNPVIRALYQRLLAAGKAKKVALVACMHKLLIILNAMLKNETPWRCPSAT

SEQ ID NO: 115704 - protein, 360 aa, unidentified
MIVIGADTHKRTHMLLGVDAGTGEVSQSKQINASDDGHRDAVRWARELDSERVWAIEDCRHVSRRLEQALLAAGERVVRVPPKMMGQTRRAERQSGKSDEIDALAVARAVVKDGVERFPSAYLDERAMEIRLLSDHRDQLVTERTRIQNRLRWHLLQLCPALEAQLPQAGLTRQAVQERIARRLRTFGDDTRARVAREQLSRVRALTHQINGLERELQRLVAAHRPALLAEQGCGALIAATLIGRTAGAERFPSDSHFARQAGAAPIPVSSGRVDRHRLHRGGDRQLNRALHMIAITKARIDPETRAYVERKRAEGKTRREALRCLKRHLARKIHRLLAMPAADPDPAQFNIAISGRCLT

SEQ ID NO: 115705 - protein, 343 aa, unidentified
MQSISTIGLDIAKSVFQVHGVDAAGQVVIRRQLKRRFVLSFFEKLPPCLVGIEACASSHYWSRELRALGHTVQLMPPAYVKPYVKRQKNDSTDAEAICEAVTRPNMRFVPIKTIEQQSCLMLHRVRHLFIRQQTAVINSIRAYLAEFGIVAPVGRRGVEQLLEVVADPADRRLPEVARACLAALGSQLRALKAQILDFDRRIIAWHRSNATSKRLDAIPGVGPALATALVASVADANAFRSGRDFSAWVGLVPKQNSSGGKGRLGSISKQGDRYLRSLFTAGALAVIRYAKIHGARHRPWLTALLARRPTKVAAIALANKLARMAWAMMARNECYREPAALTA

SEQ ID NO: 115706 - protein, 414 aa, unidentified
MPEEGRFAWFAGIDWGSEKHQACIVDQQGNVAGEREFPHSGAGLAELSDWLLSIAGAVSTVAIGIEVPHGPVVDSLIDRGFVVHAINPKQLDRLRDRFSVAGAKDDRRDAYVVADGVRTDRRLFRRLHVDDPQLIELREWSRLAEELQEERVRLSNRAHHQLWRYYPQMLKLTDDLTAPWFLELWTLVPTPAKARHLRQSTVEQLLKRHRIRRIDAGTVLRTLREPAIKVADGVAEAACIHMRSLVTRLRLVNRELRDAAGQLDKLCAAIGETEAAPGDCLRRQDVMILRSMPGIGRINLATLLSEGSGPLSRRDYPALRTLCGAAPVTKQSGKSRIVVMRYAAHVRLRNTVYHWARVAIQHDPKSHRRYVALRQRGHSHGRALRGVADRLLDLACVLLQRQTPFDPQFGQSAT

SEQ ID NO: 115707 - protein, 334 aa, unidentified
MKIIKQTIGIDISMDSFVCRVGIIRTDQQIEISNFQEFKNTKQGISKFYRYAQNQKLKGVTQYFLMEATGVYYEALAYFLKSKAAHVIVVLPNKAKYFAKTLTIKSKTDPIDAYMLTQMGLEKRLNEWSPPSELMKTLKQLTREHLSLKGLKTDAKNRTHAKAHSFKPGKDTIRRLRQEIKLYDHQIEEIEVSIRTVLKSDLQMWQKIQNIQRVKGLGLMTIAKVLAETNAFNMIQNGKQLTSYAGLDVVLKESGKYKGKTRISKKGNHHLRMSVYMPAISAIKSNRRMKVYYNRMIEKGKPKKAGVIAIARKLLLLIYFLWVNETEYDPNYSG

SEQ ID NO: 115708 - protein, 370 aa, unidentified
MKKHNSREKSPRRSKAALEHDPVTIGIDLGDKTSRYCALTGSSDKGAEGSVATTRKAMAQKFGAMPACRIAIEVGGHSRWVSQLLASFGHEVIVANAREVKAITASSRKNDQTDARMLARLARVDPALLRPIRHRGEQAQEHLMKIRVRAALVETRTSLINTARGLAKSAGERLPGCDADQMGMARAEGLPEWLIEQLKPLLVQVEQLTVQIKKCDRELEQIARTEYPETKLLEQVWGVGTLIALTFVLTIDEPHRFGKSRDVGCYLGLRPRRSQSGEREPELPITKEGDRYLRVLLVQAAHRILSRPGPDTDLKRWGWKLAQGGGKSKKAKKRAIAAVARKLAVLLHRMWVTGEVYEPLRNSGAMAAAA

SEQ ID NO: 115709 - protein, 338 aa, unidentified
MFYGGIDLHSNNNRIGIIDELGKELYQRTLPNDLIAVRKVLDPFRADLQGIVVESTYNWYWLVDGLKESGYCVHLANTTASQQYSGLKHTDDGSDAYWLADLLRLGLLKEGYIYPAKARAVRDLLRKRGQLVQQRTRNILSIENLTSRNCGVRLNGDRVKQLTAAEVKEAYQDENLALALTSTLCIVEALNRQIKAIEKQVKQQVKLSEPYQLLKTVNGIGEILAMTIMLEAGDMSRFPTVGDFSSYCRCVDSVRLSNGKKKGSGNRKNGNKYLSWAFIEAANFAIRHDPTVRRFYQRMKARTKSVVARKAVAHKLARSCFYVLRDQVPFEVAKCFGP

SEQ ID NO: 115710 - protein, 382 aa, unidentified
MKYVGVDLHKHLIVLCVVVRAEGRPKVVKRSRFQCNESDAIRAFFQELGPFQVVVEATAAYEWFFVLIENLADRLVLAHPKKLRVIAESTRKSDKIDAEVLATFLALDMIPEAYRPSPRIRQYRVLVRHRCRLQRRITSIKCMVRNVLGHYNADIAELFTRRGKQYLAEVRLSAADRFTAQALWEQLEFFQRQLGEADGELARFATTAPLAEEEARALLDTIPQVGPVTIDVVLSEMGDWRRFRSQKTVTAFAGLNPGFRKSDGKCLELHITKDGSRLLCWALIQAAWRLQGRSPRWRQMFTRLQTNTGSRKKAIVGVARHLLCMMFAMLQSSRRYETLGVPNGNQHVAPQEAAKTSAPARQKGAAPSHLLVASAPSGCAVG

SEQ ID NO: 115711 - protein, 351 aa, unidentified
MLIIGVDYHPSFQTIAFLMEETGECGEQELKHSDGEAERFYRELKQRGVSVRVGMEATGYSRWFERLLAELGFEVWIGDAAEISRQRVRKQKTDREDARLLLKLLLGNRFPRIWVPSPENRDLRQLLWHRHRLVQMRTRIMNQLQAVAMNEGYRWKKKLFSEQGRALLEKLSLAPWASRRRKELLELLDQLDPKIAELTAAVVQEANQRPEVLRLMTHPGVGPVTGLAYVQVIGTPDRFPCGKQIGSYIGLIPCEDSSAGKQRLGHLSKQGHALLRYLLGEAAQAAVRCNPHWRRRYMHLAMRRHKNIAKAAMARKLAVRLYWMWRNGWDYSQLVSFGSNAGKLATGHGVK

SEQ ID NO: 115712 - protein, 387 aa, unidentified
MQKPHDDSKMCPAAFQQDSTLVVVVEMSLSSWLVAGLIPGVSREPLKKIDPDPERLLRLLYRWRDEAVAAGSKINRIAVAYETGRDGFWLARWLRNRGIDAHVIHATSVAISREHRRAKTDRIDTAMLRRGFLGWLRGEPGHCSMAIVPSIAEEDAKRPHRERDTLIHERTSIVNRMKSILIQFGVRNFNPVLRKANEKLDAVRTPEGIPLPANAVAALRRLMDRLRVIKEQVKAIEQTRLQRMQRNPADRMNAMVFLLVRIIGMGVETAEQLVREMLFRNFHDRKAVARYAGLTGSPDESGSKRREKGLSRSGNGRVRNILIQLSWRMLQFQADSGLVIWYKKRTESARGSRKPMIVALARKLIIALWRYVNTGVVPDGFALRPAV

SEQ ID NO: 115713 - protein, 338 aa, unidentified
MKFYAGIDLHSNNLVLVILDSNDKVIYSKRLPNDVQSILGVLAMYKEQIEAVAIESTYNWYWLVDALQAEGYEVRLVNTAAVVVYDGLKYSGDKADARHLAHLLRLGLLPCGYIYPREPRALRDLARKRAQLVRQRTTQLLSIKNLLARNCGQDTASPVIKKWTEEQLAQLPLLPEQRLALQANWAVMHTLEQQIDVVESELLRQLKPNKEFQLLKTMSGVGDILSMTIYLETGDIERFDSCGQYASYARMVDSKRESNGKKKGEGNRKCGNRYLCWAFMEASHFAIASNEDIRRFYQRKCSKGPKVVAMKAVAHKLARASYNMLKNGEAFDVKRAFS

SEQ ID NO: 115714 - protein, 359 aa, unidentified
MQRNKISFKGQKIYIGIDVHAKTWEVCVLTESGYKERHPQQASAKTLFDFLKKHFPDGEYHAVYESGFSGFSTYYALKEYGINCVVTHAADVPTTQYEEVMKTDKVDAAKLARSLRTGDIRPIYIREKENIDDRSVIRIRKTIQKQLSGYKARVKHLLHCNGVEIPERFARPGTHWSRAFIKWLKEDVVLLSSSRLSLDLLVKQVETIRQTLLDATKSIRRLAQTDRYRNNYELLMSIPGIGVSVAMCILTEIYDVKRFRNENQFASYLGLIPTCHNSGEKTASGEKTFRGNKHLGPMIIEAAWIAIYRDYGLGMAYARYKQSMKPQEAIVKIARKMSNIIFSLLKNGRKYEPYRWDKE

SEQ ID NO: 115715 - protein, 412 aa, unidentified
MLKIVYPICCGIDVHKTFVIACIASTNEAGITKYQSKRFSTFTKGLRELRKWLLSNSCIDVCMESTGKYFIPVYNVLEDGLKPIVAHPKYVKAIRGKKTDKRDAKWIADLFKHDLIVPSFIPDKNIRDLRDLMRYRFKLTNFGSSEKNRFQNCLTVSNIQLASVVSDTFGKSSMNIIEHILENPLDKNIDIPSLIHGSLIKKIPELELAVDGVITETQAEKIKIIKEHYDALDLCKLNLESVILNLSKPYHKEIELLLSVPSISNIFTAIGILSEIGADMNVFPSAKHLCSWAGLTPTNNESAGKKKSVRISRAGCYLKPLLVQCATAVVKSEKHPEVRNRYLNLKKRRGHKKAIIAICRMLLTAIYHILKKQEAYNPSLYKKAELLPVSREITPEQAIYIVQRQGYRVMVV

SEQ ID NO: 115716 - protein, 398 aa, unidentified
MLSIGIDVSKGKSTVCGMKPGGEIVYTPFEVQHTREGMSELVSLLRGSGEEVRVVLESTGSYHCPVVAALLENGIFVSVVNSLRMKRFCSQSIRRVKTDQIDAMQIALYGLAYWQELQPTRLPENTYRELQLLARQYYQMTSILIKAKVDFNALCDQVLPGMQELMNDHAGRHKLSDFVLRYRHTTHILEMGETRFRKDYCKWAEKKGYRNRERMAALIFATAQNGIPVLPNAPSTQIVITEAIRVLHTVEASRDAILTQMQALAKTLPEYSLVREMPCIGDTLAPRLIAEIGDVRRFHSKRALIAYAGIDAPPYQSGKFCANNRHISKRGNRYLRKTGYEVMQSYVMHKPANDPIFTFIEKKRSEGKSGKLAMVAGLNKFLRVYYGKVTELYRSLPQ

SEQ ID NO: 115717 - protein, 336 aa, unidentified
METFSFFIGIDISKATLDWAVIVSNKLLFHHQSTNDKAGIEGFIKQLKVHCPNANFENSLYCMEHTGIYNNHLLNFLHSKQANIWLEHPIHIKDSLGMIRGKNDKVDAQRIATYAYKNRDEVRLWIPKRDVIQKLDRLTALRNRFIKVQKMMQSPLTDCKDFISKKDLNEAKKACENTLKALDKDIKKVNQDIQSTIQNDPYLKELYEFIESVKGVGPAIATEIIIVTNEFKAINDPKKLACHAGVVPFNYSSGQYKGKSKTSNKANKQLKALLHNGAMSAIQHSPEIRQYYLRKTAEGKNEMLVVNNVCNKLIHRVFSCVLRKEKYKDFYTPSVA

SEQ ID NO: 115718 - protein, 420 aa, unidentified
MKSNTQNAKIEAITEKTLVLGIDVGSETHYARAFDYRGIEYSKKPFKFSNTEAGFVTFKEWILDIKERHEKDKVVLGMEPTGHYWFNLGKFLQDNEMKPVLVNPHHVKKSKELDDNNPTKNDRKDPKVIAGLVREGRYMIPYLPDGVYADLRTASNIRFQLQAELTRIQNRISRWFNIYFPEYKTVYGKPDAKSGILILKAAPLPEDILTLGIDGVNQIWRDAKLRAVGKARAKTLIEAAVSARMEIRMLLEDYESRSIRLQEVMTLIEGLVKQIPMAEKLLEIKGVGIRTVSGFLAEVGDISRFNNPKELQKLAGLALVENSSGKHKGETTISRRGRKRLRYLLFEVAMSLVAKNPEFRELHNYYTTRRLNPLKKMQSLMAIAAKLIRVFYVMLTKGVNYDPKKMVNDIKRPAVYLQTA

SEQ ID NO: 115719 - protein, 350 aa, unidentified
MRHVIGCDVHKRYSVFVAINTHGKLSKPTRVEHDRDGFRAFLQALPPHCEIAVEATGHWYWIIDEMEKAGHQPHLADPHESKKRMGKPNKHDALDAGGLAILLHNGTLPESWIPPGELRDVRELLRTRMALRDLRTALKHRIHAAIDRYGLHNDAISDLFGKAGREFLLHQLYGLPPETHAMLLLELDAMDDLTPRIETIEARIAEVIVPSPEVQLLLTLPGAGQILAPLLWLEIGDIERFPRAENLASYAGLVPRVFSSGGHTVLGHTNRYVNHYLRWAFVEAATCAAHLHAYRESHIGVLFQRLLPTRGYGRAIVAVARHLAEASYWMLRKRQPYRPPKPKLSSSRIG

SEQ ID NO: 115720 - protein, 331 aa, unidentified
MDNQIDLKYYIWRYSHALCGIDVAKNKHDVTALNVSGKTVLKPLTFSNNKAGFELLDLSLRQLNQDYLIALEDTGHYAFNLLNFLHEQGYKVYTYNPLLIKKFAKSLLLRKTKTDKKDAHGIALKLLSDPNREQFQHDNRQVELKILTKHIHRLKKKQSDWKVQYTRCLDIIFPELDKIVGKHSEYTYQLLTRYPNPQKRIEAGFDKLIEIKRLTASKIQDILSVAPRSIGTTSPAREFEIIENIKHYKRLIDKAEKCVNDLMAELNSVITTVTGIENRLGAVILAEIQNIHAFDNPAQLQAFAGLDSSIYQSGQIDLAGRMVKRGSPHLR

SEQ ID NO: 115721 - protein, 491 aa, unidentified
MSLRDTAKHENACEMVYAGFSLRGMEAVTQWRAKPETQSGPDIASNRKLSPLAFRRESTQGRVFNFSMSSGAERKESIMNTMETIIPCCAGLDVHSESVEACVRRREANDRLHQETRPWKTMTHDLQMMADWMAAQGVTHVAMESTGVYWKPIYNILESRFTVLLVNARHLKQVPGRKSDINDCQWIAQLLQHGLLRGSFIPPRPQRELRDLTRHRTQLVEEKGRTINRIHKVLEDANIKLGTIASDILGVSGRAMLQALIDGEEDPVKLAHFAQGQLRGKIPELQKALEGHLTDHHRFLLRLLWKQLGEEEELIAKLESRIKEQTVPFAQEIEHLDGVPGVDRRVAEVVLAEVGADVEPFPTDQSLSKWAGMCPGNEQSAGKRKKSGIPPGNRWLKRTLVQAAWAASHTKHSYLAAQYRRLVGRRGKKRALVAVGHSLLVIFYHMLKDKTTYTELGADFFDRLEPERLTKYYVKRLEDLGHKVKLESIAA

SEQ ID NO: 115722 - protein, 343 aa, unidentified
MQTVTTIGLDIAKSVFQVHGVDAAGQVVIRRQLKRRVVLAFFQKLPSCLIGIEACASSHHWSRELQALGHRVRLMPPAYVKPYVKRQKNDMADAEAICEAVTRANMRFVPTKTPEQQSCLMLHRTRHLFIRQQTAVINSIRAHLAEFGIVAPVGRKGVTELLQVVADPSDKRVSEIARACLAALGAQLLGIKEQIVEFDRMIMAWHRSDETSKRLRYIPGVGPMLATALVASVADPKTFRSGRNFSAWIGLVPKQHSSGGKDRLGSISKQGDRYLRSLFVAGALAVIRYAKIHGTKHRPWLTALLARRPTKVAAIALANKLARMAWAMMAKGERYRQPVALAA

SEQ ID NO: 115723 - protein, 392 aa, unidentified
MKISIGIDAAKHTHWACAVDEAGRVVLDRAVENDPQEIEGFVAALRGLGGDPVIGLDVVGSFARFLEAVLLAEGCALVHAPGIAVNRAGQGFAGGERKSDPRDARTIAELVRTRDLRPIAPDNETVVAIRLKVGRRRELVAGQTRRLARLRDPLCGIHPGLERELDVTTKAPLALLSRFVTPAEIRRAGKARLIAHLRKTPQLRNVEALAERALEAAQAQRLVVLGEAATADLIRELAAEALQARERIVRIDRDLEGLLTSHPDGALIRSLPGMGAVLAAEFIACVGDIGRFPSADALASAAGLAPVLRQSGRSAAHRRAFGGDKALRRVFFQSAFCAVMTGDPLSRAFYDRKRREGKHRTQALIALARRRVNVLWTMLHSRQNFDPARKAA

SEQ ID NO: 115724 - protein, 475 aa, unidentified
MRTIGIDLALTGTHKAVIGDEQGNAIGGVIHFRTTPEDLETLLRRAREGADEKEPLRVVMEPTGLAWLPLASYFIQRGVTVYLVNTQQVADLRKFYSKHAKSDRISARVLARLPWVNPETLHPLELADADHLSGQRWCKQQEELAERITATKNRVQAWERAFWPGLEEVVGDLFAPWVRRWREVWYDPWLLQGVETKERAAFLVEAGADLEEAESLASGLQAVARRAVALLGTPQGGPSPYLDYTALQDQVLRELRLLAGYEAGHQAVRHHVQRLYRQLHPGRELETIKGVGDDSAAVYVFFVGEVERFTSQKKLRGWSGLVPQSDQSGDVEKKGLPITHAGPDLVKKYAYIDAEVGRQWDPQLAAIYYDQMVNKGKHHVQAVCCCATHLIDRVRAVLRDGRPYELRDVDGTPVTWQEARAIIAERYQVPEEVRQRNSQRARQARRDRQAERKQKRGEAVQTGKRLTTGRHLHQG

SEQ ID NO: 115725 - protein, 490 aa, unidentified
MARLLEHSPRPESTYRPTWAVVFGKAEKMQDSDQRKVSADSSKQIAGLPVVRHKVAGIDLGSERHWVCAATVEGSGREVADFGATTCELIRMAKWLNARKVESVAMESTGVYWIAPHEVLEAEGLEVMLVDTRQLARVPGRDKKSDPFDCEWIQRLHSCGLLMGSFRPKEAVCMLRTLVRDKGNLVAEAGDWLRRMQKSLDQMNVRVHRAVSDIDGVTGMAILRAIVDGERDARQLAKLRNPRCHKSEEEIAEQLSGHWREDHLFSLRQGLKMYDAIQERITDYEKEILQKLAKMEREECRGQEVPKSKKPQKGRAIQSRGAEPMRQALYRMSGVDLTGIDAIGVETVQVVLSEYGPDLSRFPTEKQFVSHVTLAPHKPTSAGKPVKKKKRNSASTRVAAALRMAASSLRHSETALGAYYRHIARRIGGDVAVFATARKLATIIYRLLRWGQPYVDEGAQTYEQRYRENRIKSLTARAKELGYQLTPTTA

SEQ ID NO: 115726 - protein, 407 aa, unidentified
MNAAGIDVSKGKSMMAALRPMGEVALPPKEYPHTEVGLEQMALAILALGEDTRAVMEATGRYHEPVAAALHEYGIRVTVMNPLFIKQSGGGSIRKVKTDKADAMKIAKYALDNWAKLREYTPMEAIREQLKLCSRQYNLYMKNVVALTNNLISLTDKVFPGVNELFSSPERADGSVKWVDFVMTFWHCECINLASEASFTERYRKWCKRKGYHFSPQKAAELYMDSAGHITTLPRNSNTKLPITTAAKEVASAKSTLAVLRAEMDRLARQLPEYETVRAMYGVGEKTAPQLIAEIGDVRRFPQRSSISAFAGVDPAVDDSGKHISKSNPTTKRGSPHLRKTLYQIVCTYLRKAPADEPVYQFLNKKRSEGKPYFVYMTAAQNKFLRIYYARVKECLIAADLRENAQL

SEQ ID NO: 115727 - protein, 316 aa, unidentified
MTCYVGVDIGKNQFDVHLHHQARGQSFSNSPEGFTAFLSILPATQTCHIAMEATGKYFFNLAQFLFNHQIKVSVVNPASIKYYAQSQLKRTKTDLQDAKLIAHYCQSQQPKLWQPPSQVIVELQEWQQFQALLIKQKTQLTNQMQTTECERLKQLQLEQIVQLEQEINEVSEQIKTLISQDEKLNEQTSLLTSIKGVGEKTAIQVLTLIKDIDGFDNAKQLASFAGVVPQIKQSGSSVNSSSLSKIGHSELRKCLYMPALAAIKFNPVIQTFAQNLQSRGITGKKKVVAVMRKLLHIMFAVLKHGKPFDPCYKIST

SEQ ID NO: 115728 - protein, 417 aa, unidentified
MTKTSQRVQASVQGTANNAPASVFAGVDTHADTHHAAIVDALGHPLADRQFPSTPAGHQDLHDFITSHGRLALVAVEGTGSYGRTLTSHLLSQGLQVRQALRPGAPKRPRGKTDTIDAYRAARAAAADDGSLPVPKTGTGTSIAIRAAKNARRQAVRAQGDTMRQLKDLLITAPTSVREDYRGLDDRALLDALAALDQPDPQQGPDQIVRAVLGCLARRWLDLDAEITQHTRLLDTLTLQANPALRATKGVGAVVAAELLSLAGDNPGRIRSQAALAAMTGTCPIPASSGRTHRHRLNRGGDRQANWAIHRIAHNRATHDPATRAYIQRLISRGKTKREAIRCLKRAITREIYKTLTNPQPLPDHTTLRQRRKAKGITLTQAATALHTWPARISELERGKRPDHDLATTYDQWLTTA

SEQ ID NO: 115729 - protein, 322 aa, unidentified
MKYIGIDVSKATFVVAYSCEKSGEIRTFTNTTTGIKQFIGTLPKDGSIHCVMEATGNYSALLLYMLNIAGLTVSMENPLKVKNFARAMLSTVKTDQNDARLIALYGEKMTPQPFKVQGEAVLRLRQKRTVIRQLSKQITALSNLGGSLDCLPVPDKGASHTVEETIKFLEKRRDRLQSELTGLVEAEFSRQLALLTTIKGIGITLATALIITTGGFTYFQNAKQVSRYLGICPTYEQSGSSVNIRGHINRHGDAYTRGLLYVAAWPASRFNAQCKETYTRLRSNGKSGKLAMIAVANKLVRQAFAVVSHDKEYVDGFVSNRP

SEQ ID NO: 115730 - protein, 358 aa, unidentified
MTEYSATIPSRTIGIDLGDQYSHFFVLDEAGQEVESGRVATSQAGMKKFKGMERARIVIEVGTHSPWVSRKLEEWGHEVVVANARQVHLISKNDRKSDRVDPELLARLGRMDTKLLRPLRHRAAKGQADLAVLRSRDALVQGRSALINHVRGSVKSWGARIRKGSAEGFHKRVGDIPEALQPALKPVMQTIERLTQEIRQYDRKVEKMGEAEYPETAQLRQITGVGPLTSLAYVLTLEDPHRFPKGRTVGRYLGLTPKQSDSGDQAPQLRISKAGDRMLRRLLVSSGQYILGPFGPDCDLRRWGMQRYERGGKNAKKRAVVAVARKLAVLLHRLWVSGEQYDPWRHHRGQPPVVEAVA

SEQ ID NO: 115731 - protein, 364 aa, unidentified
MSANVTSVGLDVHARSVVACGLDGRTGELFERRLTPDHGDIESWIRSLPGPVAVTYEAGPTGFGLARYLTGQGIECLVAAPSRLQRPSGDRVKTDLRDARHLARLLHLDQIVAINVPSVEREAARDLVRARDAVRGDLMRARHRLSKLLLRHGIVYYGGKSWTGSHELWLRAQRRGALFAAPGLGLAFDTAYDTVLATLARRDRLDAAITAMAAQSAFTPVVCRLGCLRGVATLTAFGLAVEIGDWHRLTGSSIGAYLGLVPTESSSGDSRSRGSITKTGNGHARRLLIEAAWHHRPPYRTERELRRRQDTASPAARDRGQRANRRLHARWAAFDARLKLPVVANTAIARELAGWCWSLAVLDD

SEQ ID NO: 115732 - protein, 391 aa, unidentified
MVCVGIDVAKDKHDCCILDSDGMVRADCFTIPNNMDGFKQLLQTIRNCTKKSDKIKVGLEATGHYSYNILGFLLDNDLAVYVMNPLHTNLYRKSLSLRKTKTDRVDARTIATMLLSDVDLKSYTDTAYHNEELKSLTRYRFDKVRERAKLKQSVSRLVTILFPELEKLVPSLHGVSVYALLSEYPGAKQISQAHLTKLTNLLSIASKGHYGKEKAIQIREAAKSSIGSVMPAKSLELKHTIKLIKELTSEIDEIEDSIQQIMDELHPPILSIPGVGIQSAAMILAEIGDFSNFESPDKILAYAGCSPSTYQSGKLTNCYAHMEKRGSRYLRYALYNATKYVCHWNPVFAKYLAKKRAEGKHYNVALSHATKKLVRLIYALQKSGKAYLTAA

SEQ ID NO: 115733 - protein, 414 aa, unidentified
MELLHERCAALDIGKKDLKACVRTPGPKGKRSRHQEIRTYATTTNALLELRDWLIAEQVSLVVMEATGDYWRGAFYLMEDDLNVMLVNAAHAKGLPGRKTDVCDSAWLCQLGECGLLRASFVPPEPIRQLRDLTRYRTTLIAERSREAARLEKELEDAGIKLSAVASDILGVSGRAMLAALIAGERDPQELAEMAKGRMRPKIPQLVQALTGNFGEHHTFLCRLHLRRIDELTAAIEELCARIEEQMRPFARQLEQLATIPGVGQCVAEVIIAETGADMARFRTAGHLASWAGVCPGQHESAGKRKSGKTRHGNRWLCGALGTAAMAAARTKDTTYLGARYQRLAPRLGKSKAIVAVEHSILTAVWHMLTDDIDYHDLGGDYFARLDPELAMRRIVRQANALGFTVRFDPIQAA

SEQ ID NO: 115734 - protein, 366 aa, unidentified
MSKSSTVVNNRVEIFKDDKLTIGVDLGDRFSHYCVLNGAGEIIREHRLPTTPKGIDEVFSKIPTGRVALETGTHSPWVSRQLARWGHEVIVAHARNVRLIGGSSRKDDRLDARTLARLARIDPGLLGPVRHRSAKAQIHLTVIRARAGLVSARTALVNAARGLTKSYGERLQKCGTQQMNRESAKGLSQELRDALEPLLAEIESLNARIAEYDRRIEQIAKEVYPQVALLKQVKGVGTLIALTYVLTLDDPHRFRRSRDAGCFVGLRPGRRNSGMSQPQLHISKEGDRYLRTMLVQGAHYILGPFGEDSDLRRWGMRLAERGGKNAKKRAVVAVARKLAVLLHKLWVSGEVYEPLRNNHKVVGRVA

SEQ ID NO: 115735 - protein, 346 aa, unidentified
MIAIGIDVHKRKCTIAEQGEDGELKMRPSIENTREEWLQLLQELPPTAEIALEVSTSGYFAMSVLEAAGWRDRTHWVHTAGIDSLRKQKTDRLDARRLARKLSVADREPLPEAWFPPPEIRELRLRARQRCWLAVMRAQVRNRTQSLLQLHGLRSGRNPFTPRGQAWLAKQAMPTATRESLEQLGRLQAFLQQEVETSEAALAESTKNISQISRLRSIPGLGRILAAVVWSEIGDLARFASADALVNYTGLVPSLYQSGEVSKAGPITHQGSVWLRWALITGVNAALRGRSPFAERYRRLKQRKPGNVAKTAVARSLARCVYGVLKSECDYQEERWGRKLGSLVEQ

SEQ ID NO: 115736 - protein, 344 aa, unidentified
MTSAVTIGLDIAKSVFHVHGVDAAGQAVVRQRLMRRRVLVFFEKLQPCLVGIEACSSSHYWARELIARGHEVRLMPAQYVKAYVKRGKNDAADAEAICEAVTRPTMRFVPVKTPEQQSVMMLHRVRLMLNRQRTQLSNSIRAHLSEFGIVAPIGRRGLDQLLAIVADEKDPRVPADARLCLKMLAAQLIVVKQQILENDRRVRASARSTNTGRRLMEIPGVGPLLASAFVATIADPAAFKTGRDLAAWIGLVPKQNSSGGKDRLGGITKAGNRYLRQLLVVGAMAVIRYAERHGTRRPWLVQLMQRRTTKIAAVALANKMARIIWALMTSGERYREPAVAALAL

SEQ ID NO: 115737 - protein, 342 aa, unidentified
MDHYAGIDVSLEYSSVCVVGAGGKIIREAKVASEPEALIAWFRSLGFDLARIGLEAGPLSQWLYAAMKQAGLAVELLETRHVSDAFKAMPVKSDRNDARNIAQLMRLGWFRPVHCKSMDAQEVRALLTARKLVQSKLLDVENSLRGILRGFGLKVGKTTRTSFASRIEELVEGHPNLQEIGQALLRARAVLLAEFNGFEKRVRATSRLHEKARLLMSTPAVGPIVSLTFACAIDDPSRFTASKQAGPLFGLTPKKYQSGETDYTGRISKRGDASVREALYEAAHIMLTKPIKGCAQLKSWAMRIARRAGMSKAKVALARKLAVIMLRMLKDNVPFNPAAKAA

SEQ ID NO: 115738 - protein, 352 aa, unidentified
MTDLAELVDHVIGVDPDRDRVTAAVVSVTTQGELAAATFPATRRGYGQALRWAKTLTVDERRAWAIESTGSYGAGLAATLAEKGEFVIEFDHPSTRASKDGAKSDSLDAVRAARETLGRKTWATPRSRGLREGLRTLIVARDSAKLARVAAINVLKALIVTAPVDLREDLRGLTFGQLVDRCIRLRPDTATEPEHAATKLSLRSTATRIKQLTTECRELELAMLPIVREICPALLNEPGIGTLVAAQILISWSHAGRCRNEAAFAGSAASHRWKPPQVRTRRGIVLSRGGDRQLNRALHTAILARVKVHPETRDYLARRIAQGKTKREAMRCLKRYYARHIFRLLESTPTPT

SEQ ID NO: 115739 - protein, 338 aa, unidentified
MSIIAIGLDLAKNVFAVHGIDEAGKAALIKPAVKREALMQLIAKLPPCLIGMEACSGAHHWARQFQAFGHTVRLMAPKFVAPYRLSGRKGKNDAADAQAICEAVQRPHMRFVPIKSEDAQGRLSIHRVRQGFVEQRTATINRIRGLLSEFGIVLPLKAEVVRREAGLHLEDLPGWANTAIGDSLSELHHLDGRIAEYDQHIKVMAQSDERGRQLMAMPGIGPTTASALLASIGNGHDFKCGRQASAWLGLVPGQYSSGGKQRLGRITKTGDSYLRCLLILGARAVLISSKNKTDRLSRWAQSVAERRGYWKAVVAIAAKNARMAWAMLSKDEAFKPLA

SEQ ID NO: 115740 - protein, 427 aa, unidentified
MNQSKNDETQNNYAAFIAIDWADRQHVFSLQVAGQTTKENGTLEQKPEVIGPWVAKLRERFGGRPVAIAVEQSRGALIHALLSYDFIVIYPLHPTTVAKFREAFKSSGAKSDPLDTDQILQILTKHRELLKTLNPDTEQTRLLARLVQDRRKTVDLRTSQVQALTAALKEYFPQALELVNGNLTSRLACDFLIKWPTFEAFQQAKPSTIKRFYYGHNIRSPEVMEKVLGLARTAQPLTTDSAIVQSGSRLSRMYAQIIRTLNPVIVDYEERIEKVFHDHPEANLFNKLPGAGPALAPRLLSFFGTDRSRYEAAGNVQSFSGIAPVTKSSGKTRVVYFRHACPKFDRQTFHEFARLSVSNCQWARNYVDYYTAKGKRFHTIIRALAFKWIRILFRCWKNRTPYDETKYMDNLKKRGSIFATLHLKQKS

SEQ ID NO: 115741 - protein, 417 aa, unidentified
MNTFSEYAAIIGLDWADKKHDICLKLPDGNELEFSTLSHSAEAIDAWAMNLHKRFSGQPIAVCIESRKVPLIYALLKYDFLVLFPVNPQTLARYRRALRPSRAKDDPTDAQLLIELVLRHEEKFKPWTPERSEVRALAQLVEIRRSVVADKVRCTNRLIAALKNYYPQVLDWFEDKDTAVFCHFLQHWPTLESAKRAREATLRKFFSTHNVRYPKVIERRIKAIKGAAVFTTDLGVIEPNRLLALALVAQLTLLLEQVRQFDRQIAERFSQLDDAALFESLPGAGKQLAPRLLVAFGEDRTRFDKADSVCQYAGVAPVTERSGNKSWVHWRYSCSTFLRQTFIEWASESIRLSFWAKAYYQQQREKGKTHQMAVRALAFKWIRILFRCWQDRKPYDEAKYLLALKAKGSPLVAELAK

SEQ ID NO: 115742 - protein, 416 aa, unidentified
MFAVGVDVANGRSMVAVLDGMRNMVAKPFEVVHTAQGFATLVEKLRQLDGEVRIVMEHTGRYYESFAMSMHRAGFFVSAVNPLLIKNYQGSISVRKVKTDKADAQKIAQFALDKWTILPHYTPMDTIRYNLKTLHRQFQLASKTKTALSNNLIALLEQSYPGANRYFDSPVRTDGSQKWVDFVDTFWHVDCVAMSSEHAFVERYRKWCKRHGYVFSEQKAIQLHADARQKIPLVPKSDTCKLLVREAVSQLNAVSRTVETYRAEMDRLASQLPEYETVMGMTGVGKSMGPQLMAEIGDLRCFAHQKSLVGFAGTDPIKEESGDKVSQSAPSSKRGSPYLRKTLFVIMTILLQLQPQEDPVYQFLDKKRSEGKPYYVYMTAGGTKFLRVYYGKVRDCLKAKGLWEVPASASQEVNPG

SEQ ID NO: 115743 - protein, 342 aa, unidentified
MQVTTIGLDIAKNVFQVHGIDAAEKVVVRKQLRRRQVLEFFKALPPCLVGMEACATAHYWARELTKLGHRVRLMPAKDVKAYVKRNKNDAADAEAICEAVRRPTVRFVQIKSTEQQGRLMLHRARDLLMRQRTQVINAMRAHLAELGIVAAQGRDGIKELLKIIASEADARLPVDAHTSLVVLAAELQAMQTLIGSIEKRIMVQHRLSEASKRLKSIPGIGLIGATAIAATVPDPKVFGSGRDFAAWIGLVPREDSTGGKQKLGPISKRGDRYLRRILVVGACAVLRYARHKPEKYPWLTKLLARKPFKVVAVALANKMARIAWALLAKGDTYRVPALAAAA

SEQ ID NO: 115744 - protein, 408 aa, unidentified
MERVYERCCGLDVHKERVVACVRTPGPRRSRGQVRTFGTTTSELLRLCDWLSENEVTHVAMESTGVYWKPVFNILEGVCEVLLVNAQHIKAVPGRKTDVKDCEWIAELLEHGLLKPSFIPPEPIRDLRDLTRYRKTLIRERASEVNRIQKLLESANIKLASVATDVVGASGRAMLKALISGQLDPQHVANLAKGTLRAKRGHLVEALTGRFRDHHAFMIRQMLTHVEELEQRITECSARIEACMSPFALERSLLETIPGVGRITAEALIAEMGVDMTRFPDSAHFASWAGLCPGNNESGGKRRAARVRKGNLWLKTALVEAALAAKKQPNTYFAALGRRLGGRRGAKRATIAVAHAIGVAAWHILAGAQPYRELGPRHFDNLASDRLRRHYVRRLRELGFNVALEPAA

SEQ ID NO: 115745 - protein, 316 aa, unidentified
MPDVVIGVDVSKRWLDVSLAGGRARRVEMEAGALAALAAEAQERGALVVFEATGAYDAPLREALEAADVAYARVNPAQARPAQARAFAQGCGILGKTDAVDARVLAEMGARLDLSPTEPLAPARRALRSLAVRRRQLVEMRKQELARRDGLGPSPMQASIERHIAWLDGEVAALDSDIAALTAADPEISACARLLRSAPGVGPVVAAALLADCPELGKLGRRQLAKIAGLAPLARDSGQYKGARAIRGGRPDLRARLYNAAFSACRCDPEFKALRTRLTAEGKPFKAIIITAAHKLLRRLNAMIKSGQPYAPQPSP

SEQ ID NO: 115746 - protein, 310 aa, unidentified
MMIAPGFVGIDVSKRHLDVFDAACDTPIRLANTAGAVAELAQGWAQRDAFVLFEATGRYDLDLRHVLTTAGVRFARVNPARARDFARSAGFLAKTDAVDAQMLAVMAQALQPPAAEAVLEARERLACLNKRRDQLVATRQQERTRERECRDPVSRQSIAAHLAWLNAAIVAIEAQIAASIAQEPDLEHDRRLLVSVPGVGSVTAATLLALLPELGRRSPKQLAALAGLAPYNNDSGIRRGQRSIRGGRKRVRDALYVAAFIATRHAARFRAFFKVLIAAGKPRKLALVAVARKLLTVLNAILRDRQPFHA

SEQ ID NO: 115747 - protein, 347 aa, unidentified
MRKIAYLSMDVHARNIVMGEMNGNGKFLGNRPFTTSENNIIDALKAVKAKRKYLVMEAGPLANWVAQTANPYLTEVFISDPRENALIYKSSIKYDKIDTKKLCRLLRLNEFNEVYRPENDERAIFKAAVQHYLDLRDQLVAIKQKTKAMFRQWGVIDVFTKSVYSTSGRDKFLAQVNHQAIYLQLKRLYELMDLTTAMKQDSEKSMKSLGRNYPEIKEFKKMPGIGDAGAHTFDAFIQTPHRFEKTNRMWRYCRMGVTDRSSDGKPLGFKRLDRSGIGELKAVSHRAFMVAMKSDNEVKRFYLQSLQRTHNHKHARLNTQRKILSVMLAIWKKGQPYRAELFLDPSI

SEQ ID NO: 115748 - protein, 483 aa, unidentified
MAACKSPARKPRKPHQPAALPSTPAELASLPVQHTHAAGIDVGDATHGVCVDATPDGSDTTREIPAHTPGLRELIAWLKHCGVTTVALEASGVYGHVLFLTLIEAGFTTVMTSPAFTRQIKGRPKTDRLDCQWIQRLHKHGLLPSVFQPDEATQTLRHYVRQRANHVRLSGEHIQRMQKALELMNLKLTKVLGDITGVTGLKIIRAIVAGVYDPQVLAKLRDRRCKKAEPEIATALTGRYRPEHVSELRNCLTMWDHYQDVIADLDTEIAAHLRTMKRESSLPPLEPKPRVRGKKPHDPKFDVRTALYFAIGVDLTAIEGIDAVHALTLVSELGTDFTKWPTVKHFTSWLGLCPNWKKTGGKVKSSKTRKGKNRAAGALRLAAWGLMRSKSYLGAFLRRKRSHMGAQKAITATAHKLARIIYNLMRYGVAYMKKEEAAYAEEVRGRTEKSFHRRARELGYEVRKIEPPLADAEVEAPQNASSA

SEQ ID NO: 115749 - protein, 343 aa, unidentified
MGEVSTIGLDIAKSVFQVHGVDGTGAVVMRKRIGRSKVLEFFASLSPCLVGLEACPSAHYWSRELQALGHTVKLMPPSYVKAYLKRSKNDANDAAAICEAVTRPSMRFVPIKTQEQQTGLMLHRTRQLLVRQRTMLSNAIRGHMAELGIISAKGRNGTAELLQIIGDAANDLIPPVARFCLDLLARQYLNLSAEVASVDKRIQAWHRSCEESRRLEEIPGIGPIVATALVAEIGDWGAFRSGRSLAAWIGLVPKQHSTGGKERLGRITKQGNRYLRWLLVAGAMAVIRYARQHGTKRAWLTRIMDRRPAKVAAVALANKIARMAWAIMVHGERYREPKLLLAA

SEQ ID NO: 115750 - protein, 383 aa, unidentified
MKSVCGLDVHKDSVYLCILSEFGELIEKVFGVLTYQLEEMRDLMLHHHVVEVSMESTSVYWIPIWRVLSPHFKLNLANPYFIKQLPGRKSDVKDAQWIAECTMKELIRGSFVPPEIIQQLRQYDRRISDLNEEIVRKLSKLDAVLQRCNIRLSNYVSNVDSKSYKAVVRAISQGITDPEELVKLIHGRIIKHHGMDVITASLKGVVSLAEIDMISQLRDELDMAEAHKEKCQARMLEICEREFPEELKRLQTIPGIKERAATSLIAEIGTDMNKFETANHLASWSGLKPRNDESNKKIKSRSITHGNVYLRKTIIECAWAASRTKDCFFSRFSFHQTQVRKKNKMKVLVAVARKMLIAVWHVLHDNTIYIDFTTDRKTSRTKG

SEQ ID NO: 115751 - protein, 358 aa, unidentified
MASIASTSRVVIGGIDTHKDLHVAAVIDTAGVLLGTEAFSTTRAGYRALVRWLRGFGDVRLVGIEGTGSYGAGITRHLGEAGIQVLEVDRPDRSDRRRRGKNDTLDAENAARAALAGRRTSIPKTKDGTVEALRVLRLTRTTAVKSRRVALQLLGNHIVAAPEELRDQVRNLTRMQLIRTCAAWRPDTSGFRDPVVATRIALKSLARRTLELNDEIADLDQLITTLVGELAPQLVAATGIGVETAGQLLVTAGDNPQRLRSEPAFAMLCAAAPLPASSGKTQRHRLNRGGDRQANSALHLIVITRMRVDQRTKDYVARRIAEGHSKLEIIRCLKRYVAREIYYLLKPPPKENVKSRAA

SEQ ID NO: 115752 - protein, 314 aa, unidentified
MMSNNSQYVAVDVSKAALDIAMPGANRVWRSTNTLAGIAALRRRLALLDHPHIVCEATGRYGRLLARQMGTAGIAMSIVNPRQVRDFARATGQLAKTDALDAGIILRFADVMQPARTPPTPENQARLAEQVRRRRQLVDMLATEKQRLSGLDDTDTLASIREHIAFLQGQIGQCDARIRAEIAADATLTRKAMLLESIPGIGATTAAVLIAELPELGIADKKQIAALAGIAPMNRDSGQWRGQAHITGGRLSVRCALYMATLPAIRFNPTIRDFYQHLRAGGKAPKVAITAAMRKLLIIANAIVQQDKPWANLA

SEQ ID NO: 115753 - protein, 308 aa, unidentified
MKKIITVATAGIGKMQAQGLTVGVDLGDRSSCYCVLNEQGEIVQEEKVATTPKAMRERFAEVPRCRMALETGTHSPWVSRLLSELGHEVIVAHAQRVELIAKSRRKNDRMDARTLARLARIDPQLLSPIQHRSAEAQAHLTVIRARASLVRARTSLINTIRGVTKSTGERLRGCNPRKVGERAQELSPELQHALGPVLSEIDSLSDRIREYDERIRSIAESSYPKVELLKQVHGVGTLVALTFMLTLEDPHRFSKSRDAGCYAGLQPGKRDSGDSEPQLHISKEGNKYLRAMLVQSAQHILGPFGADS

SEQ ID NO: 115754 - protein, 347 aa, unidentified
MIIIGCDLHTRMEQIAVLDTETGELTERRLDHESGEARAYYEGLKEPALVGVETTGYALWFAEMLSELGHELVVGDAAKIRKMEVRKQKHDRRDAEHLLNLLMRGDFPKIWLPSPEERDVRVLVEHRHQLVELRTRAKNGLQAMALSYGLRRRSRLWNAAGREELQKLPLREGMARRREDLLRLLAQLEQWVKQLDRRIGQEVARREDAQRLMTHPGVGPLTALGTVLVLGPVERFPDAKHVTSYVGLIPEEDSSGGRQRFGKLTKQGNRLMRFLLVEAAQIASRFDPGLGRVYRRLAFRKGAASAKVAVARKLTIRLYIMLRDRIDYQEFCRRGSHAGMLVSKPLV

SEQ ID NO: 115755 - protein, 325 aa, unidentified
MTKEVAFLGIDVSKKKLDCALRRETKYLTKSVENSPAGFKVLRQWLEKHGVERAHVCMEATGVYWEEVAQDLADAGHLVSVINPALAKAHAQSCGIRTKTDAVDARVLASFCHDKQPPAWQPPPANIRALRALVQRHQALVAMQTQEKNRLESAREDVRASIQTHLTWLAEELGRVEKAINKTIDDDPDLRGKRELLDSIPGFGERSISTWLAFCADPGRFNNARQLTAFAGLNPQLHESGTSVRGKPRLSKIGHAFLRRALYMPAMVTLYKTEWGTRFRERLAAAGKPPKLIIGAMMRKLVHVAFGVLKSGKPFDPTLHGACAA

SEQ ID NO: 115756 - protein, 417 aa, unidentified
MTDGKKASPCRYVALDIHKHYSVIAAVNREGEIVLDPVRVEHEDLEARLNKQLLPSDQVVIESTTNAWHIYDLLEPLVARVLVANPIRVKQIACAKVKTDIRDTLILARLLAANLVPTVWVPPVEVRNLRYLLSQRRRLVGMHTQTVNRMGSVAHRHHLNHPRGKRFIEKNTEWQQDDELSDTEKFQLELDMATGEHLDGQAKKIAEKIASLSHQDPWAESVAYLMQLPGFGVITGMTVLAAIGDITRFESSGKLSSYSGLTAGVEQSGTKDRGKGITKEGRKELRWAMVEVAQRAVKSDPYWKSRFQALERRMHRNQAIVAIAHQMLELVWHVLTHKQAYRHFSEERIAYKYLTWGWQLNEEARGGLTRQQFARYYLMRLDIGHDLKRIVLNPKYPRKLASEAEVLALKPELNRTK

SEQ ID NO: 115757 - protein, 315 aa, unidentified
MQVGKLIVGADVAKAELVIHHDDRDEIIKVKNTKPEIKKWLKQQPLNTAIAVEATNVYHLDLVELAHSLDFEVYVIDGFQLSNYRKSVGVRVKTDPTDARLLSRFLRNEGEDLRPWTPPPAVYGKLQSLLRRRAALVTARTAMTQSWANEALLKAAFTTFVKSIDRLDLLIQKKIKEVLREAGLHEQVARCQAVEGIGFLTATALVMAFMRGEFKSSDSYIAFLGMDLRVIDSGQKNGRRRLTKRGCSEIRRLLHNAAMSASRTATWKGIYEQHRNAGKATTQALVILARKLARVAFALMKNQDEYVTKGGKAAC

SEQ ID NO: 115758 - protein, 330 aa, unidentified
MKNYVDVIGIDVSKLTIDAHIHNRAVHRVFSNTPKGYKALLSWVEKYILEQPYFLCFENTGHYSTNLSTYLLENDIDYVEESPLAIKRSSGIVRGKTDRLDAALIARYAWLYKEEFVLSSPKEQDIQELGRLLAFRDQLVRDRTGKISSIKEMQILLSSPSTDACCKIIKKTIHHLTKQIVALENRIKIILKKDETLEKNYELLVTIKGVGLILSCQILYHTSNFKRFDGWRQFSSYCGTAPFQHSSGTSIRRKNKIHQIGDRKMKTLLTLASVSAIQFDKELKHYYNKKVTEGKPKMVAINNVRNKILARAFAVVKRGTPYVPMQQFAA

SEQ ID NO: 115759 - protein, 463 aa, unidentified
MHKQEKSSQAAPWTGLKVIHPHAAGLDLASDEIWAAAPPDSTDEPVRVFGNLTPDLAALADWLTACHVDTVALEATGVYWIPVFEYLEGCGFAVFVVNARHLKNVPGRKSDRMDCQWLQELHSVGLLRGSFRPEAEVVALRAYLRQRADLIEHRSAHIQHMQKALAQMNVQLTQAVKDITGVTGMAIIRAIVAGERNPHTLAALRQPGVKSSEAHIVKALTGHYRPEHVFALKQALALYDFYTERLVECDAEIERQFSNLKPTVPPDDLPPLDTRDKRESHSKNGPAYAARTLLYQWIGVDLVAISGLNESTVQTILSEIGTDMTKWPTAKHFCSWLGLAPHNDISGGRVLRSRTLKTHNRAGQAFRMAAQSVSRSPNSAFGAFYRRMRGRLGAKQAITATAHKIARTFYAMLKQHVPFHELGGEEYERRAQEREIRNLRKRAAKLGMALVSAAAPQVGTAVS

SEQ ID NO: 115760 - protein, 347 aa, unidentified
MMYVGVDVGKSKCRAAMMSQEGKITEEFDFKNDSEGISRLASMLTVDDRVVMESTGAYWLNLYNHLDELHIPVVLANPLQTKAIAHGRIKSDRVDARILAHLLRSDLIPECYVPPKEMREIRSLVRHRLSTVKLRTMTKNKIHALVDRNGLKHEFSDLFGKSGVQWLKSLELSSLDRLMLDNHLLLLESLNMQVEKVDVEITARATLDEDVRLLLSLTGVSVYTALLIKSEVGAIDRFPNYKKLVSWAGLAPSLHQSGSVEYHGNITRQGSRMLRWIMVESARVASVHDPRLRVFYERVKARRGDQKAVVALACKMLKIVWFMLTKREPYESANEKGYSKKLNSLNN

SEQ ID NO: 115761 - protein, 344 aa, unidentified
MDYFAGLDVSVKETSVCILDDAGRIVKEVKVASEPQALLKVLGNPTYHFKRIGLEAGPLSQWLFSALADAELPVICVETRHMQAVLKAQINKTDRNDARGIAQMMRVGMYRPVHVKTLRSQKLRMLLTHRKLLQSKAIAIENDLRGTLRNFGLKVGLVGAARFEARIRELVEGLPDLAVLVEPLLVVRQVLRQQLAVLHRRMLAVVRDDEVCRRLMTTPGVGPLVALTYRTTVDVPARFQKSKSVGAVFGLTCSRYQSGEIDWSGRISRCGDEMMRVMLYEAAQTLLTRSTRWSWLKAWAIQVARRRGKKKAIVALARRLAVILHRIWVDGTEFRWTREAGPAA

SEQ ID NO: 115762 - protein, 354 aa, unidentified
MKRTTKYVGLDVHQATTVTSVRDSRGRVIARDVVATEATALVEYFARMRGSIHVAFEEGTQAQWLHDLLVPVVDRVVVCDRRGEPRAGNKADRVDADKLSRLLHSGSLRAVYHGSTDRITLRELTRAYRSVVEDATRVMQRLKALYRARAIRARGRRVYAPKHRREWLEALPDRGARFRAEALLTQLDVLRTLRPKAKAATLAEARRDPAWEVLRSIPFLGPVRVALLLATLKTPWRFRTKRNLWGYGGLAVVTESSADYEFVRGRVVRRRRQPLTRGLNPNHNRVVKEVFKGAATAATGRSGALRDFYEAMVARGMRPEMARLTLARKLAALTLRLWKTGERYDPAKLTVQST

SEQ ID NO: 115763 - protein, 665 aa, unidentified
MYFSGLDAHLRYVTVAVLDRLGGVALETTVPTREPDRLLAVLAPFRPLEVVVETCPFWPWLYDLLVPAGIGFHLAHAKALRAIATAPQKSDAVDARLLARMLLSGLIPEAYPRSADQRELLRLLRHRTALVRFRTRLAGRIHSQLHQQRLSLPREKLLRRATRAWLEATAWPRLTVEQRAIVTTHSELIDHLTPLIRALERRIAAAAAGDATAPLLATIPGIGPYRSLLLAAELVPISRFPRAEHLVSYAGLAPVTRSSGGHTHHGSIPPAANRWVRGALVSAEVALALMLLVGAGLFLRSLTHLQQVDTGFNPSGVASGMIMLPEAAQAQGQDANKDREAAFYRSVVDRLLSSPGVRSAAAIVPLPFSGDNWGASFTIEGRQELPGDPGPHGDVRYITPAYFAAMGIPIRRGRAFTDQDAGTLNRVAIVDEELGRQYWPNEDPIGKHIRNGSRSPWATIVGVVGHVRQNELSGDSKKGAYYFPMYQSPVPLAAFIVKGGQGANAIREAVRAAEPTQSVFDLKSMDQRIAESLGPRRFAVTLLAAFAIIAVGMAALGIYGVISYAVTQRTQEIGIRMALGAERSEVLKLILGHGLRLAAAGVVIGLIASAALTRIVTNHLFHVSRFDPATFIATALALISVALIASYIPARRAMGVDPTIALRYE

SEQ ID NO: 115764 - protein, 460 aa, unidentified
MAKHKQAKIVKKGVVDALAQINRNAAGIDIGAEEMYVAVPPDRDEESVRTFPTFTVDLQRLADWLRDCHIDTVAMESTGVYWIPLYEILEERGFQVCLVNARHLKNVSGRKTDVLDCQWIQQLHTYGLLSPSFRPPEQIVAIRSLVRHREMLVQYRSAHIQHMQKALTLMNLRLTNVLSDITGVTGLKIIRAIVAGERNPKLLAGFREPGCKKSEAEIAKSLEGHYKREHLFALKQALELYDFYDRQLRECDAELEALYQQFDPPEDPGTPPPAPRQAKRRKNQAHFDLAPALYRMTGVDLTQIDGLDALTVQKVLSETGTDMSKWPSEKHFASWLRLCPNNKITGGKVIQTGVQPTQNRASTALRVAAASLTRSDSALGAYYRRMRARHGAPSAITATAHKLARIIYFMLKDRKPYHDFGADYYEQQYRTRVLRNLNRQAARLGFRLEPAVRSPVRGVS

SEQ ID NO: 115765 - protein, 362 aa, unidentified
MMQSTTIIAFDQHAATTVAAVLLPNHRTPALHSLTSDSSTIVRFVERVRRQGTVTCCYEAGPCGFELQRALTAREIPCAVIAPALIPRRPGDRIKTDRRDAGHLAILYRAGALTAIHIPTDQEEAARDLLRCREDIRADLLRARHRLSKFLLRHGRRFTGTKKAWSKRHDAWLRAQTWPIAALDQTHAAYLRAVDEAVGRLRAVEEDLRGLLDLEPLRPRIERLRCFRGMNDLTALTIAAELGDARRFASAPRAMAFVGLVPSEHSSGTKQARGAITKTGNTHLRRILVEAAWHYRHRPFVGAALRRRQDGAPPPIIAQAWAAQQRLHRRYYRLAGRGKSNQQVITAVARELTGFVWAALIQ

SEQ ID NO: 115766 - protein, 346 aa, unidentified
MKQYAGLDVSLKEISICVVDGNGKVVVRGTLPTEPEAVAGFLAKQRITPERIVHESGQLSIWLQRGLEKLGLPVTCIDARRAHKALSAKLNKSDRADAEGLANLARTGWFTAVHVRSETSDRLRTLIGARERLIRLRKDLEGHIRGVLKTWGIRMTGIGQGRLRQGFRDQLAAAGETDLTLAMIADGFITTHQMLCAAAHSLENEIKAIAKESLLARRLMTIPGVGPIVSLNFIALVDDASRFRRAADVGAFLGLTPRRYQSGEMDYSGRISKCGDARMRSLLYEAAGCLIHQVKRFSSLKSWAVRLAGRKGFKKAAIATARKLAVLMLTIWKDGTEFEWKKEAFA

SEQ ID NO: 115767 - protein, 427 aa, unidentified
MDTSAAIIAFSELDHLAGFDWASEKHDLCVVDRGGRIVLELEFPDTAEGWAQLARKLQPLGRVGVAIETSRGPAVERLLALGVTVFPMNPKAAERFRDRKAPSGVKDDLLDAWSFADALRTDGHAWRPLQPEDPQTQLLRILCRDEIGLIEQRTAFVHQLKQSLREYFPAALEAFDDWTLPAAWELIVQFPTPQALVQAGKRKWQKFLHTHHLYCPQTAQKRLEIFGRADQFASLSASVTAAKSLLAVTLAKQLRTLEGQIREYRRRIEQAFAEHPDGGVFDSLPGAGEKLAPRLLGEIGTNREVFESAESLQSYAGTAPVTKASGKSRFVYVRWACNKVLRATVHLWADESRKTCAWAAAYYQRKRDQGKSHAQALRCLGQRWLKILWRMWQDGVPYDEALHLRNQVAHGSWVIALLPTANPEPAQ

SEQ ID NO: 115768 - protein, 420 aa, unidentified
MKVVYQTCCGVDVHKSFLVATIIKTTSGVEPSYQKKRFSTFNNSILQFKEWLVKNQCRDVCMESTGKYWVPVFNLLEDEINITIANPKWVKAVKGNKDDTKDSKWIGDLFRLGLVPGSYIPCKPIRILREFTRYRYKLTSCRTSEKNRYQNALTVCNVALDSVVSDIFGKSATSVIDYLIEQPDNSINHEEIASRLLRSLKRKSDSVIESIEGYQMTDSQKYRMCLIRAHLDYITSTINDIDTMLNSLIAPYENAVQLLCTIPGVDRNSAITVISEIGTDMTPFSNSKRLCCWAGLTPGNNESAGKKKSVRITRAGVYLKPALVQVAHAAVKSDKSPYYKQKYERIMKRRGKKRAIIAIARMILTAIYQMLSTGEAWNPTDLFKIDMPEPMKEKQKEKAIKQAMKLLIREGKISESQLAS

SEQ ID NO: 115769 - protein, 351 aa, unidentified
MKRFIGLDVHASSTTAAVIGESGRRLTSQVLETNGAALVGFMKSQPGQVHLCLEEGIQSGWLTEILQRHVHRLVVCGLGKKKRGPKSDIRDAFSLAEDLRKGAVEVVVYKEIGAFGKLRQLNRVYQICVQDTVRAQNRIKALYRARGILVIGKTVASGSKRSELIETLPSRYWQAARLIYDQYDYAVDLGDRSRAALMEELGRHPIAKTLQTCPGLGPIRVAQILATVVSPHRFRTKRQFWSYCGMGIMMRSSSDWVQSPDGKWVSSIVNKTRGLNRNHNRALKGVFKGAATTVICQRPGGELREAYERLTAAGTKPNLAKLTLARKIAASSLAMWKREEEYKEQKPTPLK

SEQ ID NO: 115770 - protein, 454 aa, unidentified
MRPQPKKPPEKKTVLSLQCIEPNAAGIDVGATEIYVAVPPERDPQPVRRFATFTEDLRQMAAWLQQCGISTVAMESTGVYWIPPYDILEAAGIAVCLVNSQHVKHVPGRKSDVSDCQWLQYLHSVGLLQASFRPDSAICALRALSRHRASLVEVATIHIQHMHKALTQMNLQIQHVLSDITGVSGLAILDAILEGRRDAKQLASLCHGGVRAPQETVIKSLVGHYRPEHLFTLRQSLAAYRHYQQMLIECDQEMEQHLRQLQGNADSGNPPLAPAALASKRRKNQFHFDMRKELYRILGTDLTAVPGISSLTAHTILAEIGPDLSRFRSSTAFASWLTLCPGNKKSGGKVLSTKTRKSNSRVSLALRLAAQTLHKSQSYLGAFYRRMRSRLGAPQAITAAAHKLARILYHLLTTRTAYDESVFAREEKKQAVRQENRLRKHAKAIGFQLVPIPA

SEQ ID NO: 115771 - protein, 391 aa, unidentified
MIYVGIDVAKDKHDCFITNSDGEVLFKSFTIANNREGFETLFQRIQSVSDDLTKVKVGLEATGHYSYNLLGFLLNNGLPTFVINPLHTNLYRKSLSLRKTKTDKVDSHTIASMIMSDVNLKSYSDTSYHNEELKSLTRYRFDKVKERAKLKSSVSRLVCILFPELEKLVPQLHIASVYALLSEFPSAHAVASAHLTRLTHLLSESSKGRYGKDMAIIFREAARNSIGSNMPAKSLELKHTIKLIRELTSEIDEIEIEIKSIMDEINSPILTIPGISYRMGAMIIAEIGDFNRFNSADKILAYAGMSPSTYQSGQLDNCYSHMEKRGSRYLRYALYNATKYVCHWDPTFAEYLAKKRAEGKHYNVAISHAVKKLVRVIYAMEKSGQVYNKAS

SEQ ID NO: 115772 - protein, 429 aa, unidentified
MKEKANFNQFAALLGLDWADEKHDVALRTPGAATVEHSTFAHTPEAIAAWVGSLRQRLGSGPIAICLEQSRGALLNALSSHAGLVLYPINPQTLAKFRTALHPSGKKDDPVDAALLLQLLEKHGDQLSPWQPEDSATRQLALLVEARRGFVDRRTALINQLQSVLKSYYPQAFELMGEELGSSMATDFLKRWSTLAAVQKAKPSALRAFYYGHNSRSAELLTERLRLIKNGLALTNDTAVLAAQSLAAESLAVELAALRPVIARYDQQIERLFAAHPDAPIFASLDGAGAVMAPRLLAAFGTDRDRFADAQAMPRYSGTAPVTEKSGKQKWVHRRWSRPIFVHQSFLEFAGHSVRFSAWAKRCYEGLIQKGKGHWAALRVLAVKWQRILWRCWQDRRPYDEAIYLQSLHQRGLARYADLVVAGARTHGE

SEQ ID NO: 115773 - protein, 420 aa, unidentified
MTIRETTPAPAVLVAIDVSKARNDVLIETPGAARRRRLVVPNTRIEHDHFIELLKGLGAPVTAAFEATGNYHRPLAFRLLEAGVSLRLVSSVALARTREALHNGWDKNDPKDAQVILHMLKIGLTQTYVDPLLTGINDIQELSKTHEMIARAKTELWHRLLTHYLPLYFPEVARFAGNSRSDWFLAFLEAYPTPANITALSKDAFVEAAWSVVGKKVSKASLLGDIYDTAAASIGLPVALDSLAIKMFRVVIAEGRSLIRQRHMIEEQAHAILAANPDYQRLRQIPGIGPIIALTVLAEAGDLRRFGHYRQFLKFCGLDLATYQSGQFRGQTKLSKFGNARLRRAFWVAAQVAIRQRDNSFRAKYERYIARDRDNANLKRKALTAITAKMARTAYAIIKSGSDYRPFFEGPMPSGRTSRI

SEQ ID NO: 115774 - protein, 311 aa, unidentified
MNQEGEVVAASAVATTKKDLSRVFGTLRPSRLALEVGTHSPWVSRHLKAMGHEVIVANPRRTRLIAESSNKQDRLDAETLARLARVDPKMLFPIRHRGEAAQADLAMIRARAALVEARTRLINTARGLTKSFGERLRACDAGYVDGRLAQDLPAALREAIEPLLEQAAELSARIQQYDERIQQMARKQYPETALLTAVAGVGVLIALTFILTLEDPHRFPKSRAVGAYLGMKPRRRQSGGRDPELGISKEGDVYLRKLLVQGAHVILGRNGSDSDLRRFGQRLISRAVRERRRKRAWRWRGNWRCCCTTCG

SEQ ID NO: 115775 - protein, 409 aa, unidentified
MERIIERGCGLDVHKKSIAACVRIPGAKGQRTQEVRTFGTTATELLALRDWLQGHGVTHVAMESTGVYWKPVFYVLEEVLTCVLVNPVHMRQVPGRKTDVQDCAWIAQLLEHGLLRGSFVPPVPMRELRDLTRYRKTIVQERSRAINRLHKVLEDADIKLASVATDVLGVSGRAMLDALVGGTTDPDTLADLARGALRKKLAALRQALSGRFRAHHAFLLSQILAHIDYVEEAIEAISQQVGLLLAPFVEELERVTTIPGVKQRTAEVVIAEIGVDMSVFPSAGHLASWAALCPGNNESAGKHRSGKTRRGNPWLRTALTEAALGAIRHGRGALAARYRRIMRHRGHKKAVIAVAHAMLVAIYHMLTRRTTYQDLGDDYYDRRHAERAKHRALQTLERQGYRVSLEPVA

SEQ ID NO: 115776 - protein, 339 aa, unidentified
MDLHCGVDLHGDNGYYGIVDEGGKRIFKKRLPNDLDEVLRALKPFREDLRHGIVIESTFNWYWLVDGLRENGYQPRLGNPAAMEQYNGLKNTDDETDAFFLAEMSRLEILPEGYIYPKEDRPIRDLLRRRLMLVHQQTAHILSFQNLIARQRGEEISGNSIRKLEPEEVKGFFKDERLILMGQTNISAIRFLDSQISEIEKAVLKEAKLRPEYERLQTVPGIGKILALTIMLETGEIGRFAKAGNYTSYCRCVKSHRLSNTKKKGENNRKNGNRYLCWAYVEAANFIRRYCPEAKRWYQRKLSRSKQIVATKALASKLCKACYFIMKDQVDFDVKKIFG

SEQ ID NO: 115777 - protein, 483 aa, unidentified
MLDSYFAPGIDIGAEEIYVAVPPDRDEESTRRFSSFTGDLHALADWLGRCRIQTVAMESTGVYWIPLFQILEERGFKVYLVNAHYLKSVPGRKSDVSDCQWIQYLHSVGLLRASFRPPDAICALRTLWRHRGSLLEMAAEHILHMQKALCQMNVQLHHVLSDITGTSGQAILDAILAGKRDPVELAQLCHSRVKSPRDKVARALVGDYRQEHLFTLKQSLEGYRYYQKLILELDQETARLMQALPSATEHPIPPRTKATAYQRKANDPRFDLRSELYRIAGVDLTDIPGVSAATAQVILTEIGTDVSRFRNASAFASWLGLCPEKRVSGGKVLSCKTRQVKHRAATALRMGANSLCRAKGYFGEFFRRMRAKLGTAQAITATAHKIARILYHVLSTKEPYAETVFHRCDEQARQRAEIRLRKQAAHLGFHLLPIPITGELKLVPQEPVYGTARRSAEALREMIRPSRKKWAPRLLPVGRPSVS

SEQ ID NO: 115778 - protein, 367 aa, unidentified
MKKISTVATKQAKNFPQQKLTIGLDLGDRWSWYCVLDEAGKIRLEQRVSTTPKAMGEVFGGMPRCRIALEIGTHSPWISRLLSALGHEVIVANARKVRLIAESRKKDDRLDAQTLARLARIDPQLLYPVKHRSVQAQADLTVIRARAGLVRTRTALVNTARGLAKSYGERLRGCNVRNLNPEKAEGLSPELQAALEPLLKAIESLSERIVEYNERIESLAQHSYPQVALLKQIKGVGTLIALTFLLTLEDPHRFRKSRDVGCYLGLQPGRRNSGQSEPQLHISKEGDPYLRTLLVQGAQHVLGPFGVDCDLRRWGLKLAERGGRNGKKRAIVATARKLAVLLHHLWVSGEVYAPLHNSSRTTVATAA

SEQ ID NO: 115779 - protein, 316 aa, unidentified
MTTVPEIFVGIDVSKHQLDVAVRPSGEKWTVANAPEAFGALIKRLKALHPTLIVLEATGGLEAAVVAELAYAGLPVAVVNPKRVREFARASGRLAKTDQLDADVLAHFAEAIRPPVRPLPTAESDRLAALVTRRRQVIDMLTAERNRQHTVSGAMRTRIATHITWLEEEVQNLEDELRQFIDQNPAWHATDELLQGVPGVGPVTAMTLVADLPELGQLDRQEIAALVGVAPMNRDSGNRRGKRRTQGGRAHVRSVLYMAALSASRFNPVIHAFYENLIQRGKEQKVALTACMRKLLVILNAMVKKQQPWRYVEKAN

SEQ ID NO: 115780 - protein, 365 aa, unidentified
MRIDVGVDLHKTQMTVYVRTGKDEGESSQYSVTTEGYREFLKALGKWRSKGADIRVAVESTGNTRYFMHQLEARGYPVVVINTMKFKVITQSVKKTDRHDAYTIAEFLSKDMLPESKLCSEKSEEVRRLLKVRSMLVRTRVSIKNQIHGLLVSRGMEDTRECLQSKRGRQEIQDTLAEAGNGLVVQPLFDTIEALGEEIKAIEAEIEKLMAADKAVKLLQTIPGCGPVTAWTIRAYTDDIRRFARYKQYSSYAGLVPWVECSNETVHYGKITKRGPEELRTAFVQLVMGIRRSRSTLSWRLMVQYESMKRQKGTGKSIIATARKMSKIVWYMLMREEEFKTSLMVDTKLDSVIQSMREKALCESA

SEQ ID NO: 115781 - protein, 355 aa, unidentified
MNQEKYIGMDVHQATISVAVMEGRGKLIMECILETKAATILEFIQGLHGSLSVTFEEGTSAAWLHDLLKPHVADLVVCDPRKNALLKEGSKSDRIDARKLADLLRLNQLNPVYHGEHGVRTLKELGRSYLTITQDLTRVMSRIKALYRSWGIPCSGTTVYAPLHRAEWLAKIVEPGVRRRAERLHQQLDLLQPVRQQARRDLLLESHKHQGVRLLRQIPAIGPIRAALLVALLQTPDRFRTKRQLWAYSGFALETHDSGEYRSVRGKLRRNRERMTVRGLSDNHNPDLKNLFKGAAISASSRPGPLYDFYAALLEKGMRPTMARLTLARKIATITLTIWKKGVDFDAKELHRQAA

SEQ ID NO: 115782 - protein, 349 aa, unidentified
MALTIVEEARSVTGGVDTHAGAHVAAALDPVGGLLGVREFPATAAGYACLLGWLGGFGTVCLVGIEGTGSYGAGLARHITAAGIRVVEVDRADRQDRRRQGKSDPLDAVSAARAAQSGRARGAPKGRDGAVEAIRTLMVARRSAAGERTRTINQARALVLTGPDDLRARFAGHTPAALITGLASLRPRAGDVAGYATRIALRELGRRAQFLDGQLGRLDELIVPLVTARAPGLLALYGVGPHTAALLLIAAGDHPGRLRSEAAWAHLCAAAPIPASSGKVTRHRLNPGGDRQANHALWRIVFTRLGSDPATRAYAERRTAEGKSKAEIIRCLKRYVAREVYPHLRTAGG

SEQ ID NO: 115783 - protein, 363 aa, unidentified
MADSTTKTVGVDLAKQVFAICETNHGGHVIRRLELRRDAFCHYLSQLPAASVVAMEACSGAHHWARLCQRHGLIPKLIAAQLVTPFRKSARNKNDRNDAEAIATAARQGNMRFVAVKDVDQQARLCWHRVREGYKTESLAISNRLRGLLAEFGLAIAQSDSALQRALADDRLRAQLPSTLLPLIDDLHTHWQQVKQRIAAIDRQVAAHAKADARSVRAQQLVGVGPLTADALVASIGNAHEFTNGRQLAAWLGLTPTQHSSGSKAHLGGISCRGDNYLRTLLIQGARSCLQQAKLANPQTATAEQIWIKSLASRLPFGKVLVAIANKHARQLWAMLRRGEDYDSEAWLQHPMVQRSRKKAIAA

SEQ ID NO: 115784 - protein, 421 aa, unidentified
MDQPFQYFVGIDWGTQTHRVAVLDGDGRAVEQYDAAHSGDGLVALVNKLKQRTGCEPALVAIGIEVAWGALVETLVESGFTLFSINPKQVDRFRDRFTVAGAKDDARDALVLASSLRTDRQSYKRVDIDCSELLRLRELSRFEDELKVELRRATNRLWQQLHRYYPQMLAISPAADDRLMWDLLTAVPTPAEGARISSLRVQRILKANRIRKLSADEVLSALKTAPLALAPGAAEAACEHVLLLLPQVKLLDEQLREVGNRIKRLLSAMTETITGTDQPPCDAGLILSIPGIGPAVAAALLTEASRPIRERDYEALRCYAGTAPVTRQSGKRRTIGMRHACSPRLRNAVYHWATSSLSCDSKSRQQYDSLRTSGHHHARALRGLADRLLGVLIALLKTQKTFDRTRRDGGSAKNLPVVASA

SEQ ID NO: 115785 - protein, 377 aa, unidentified
MFVSVDASSGVATPEEAPSVGSSAPQPWRAVPEPDRVRYFKDPDGCLNNMVRIHKVGPMKQTEHNRKAAGIDTGKDRLDIAVHGSSERLAVANDGAGHERLIAWLEARRVRRVGIEASGGYEKTVVAALRLAGVQVIVFQPKQIRHFAGFQLLRAKNDRIDAALIAEATASHKENRQAPDPRLEGFAQALTLIEQITEDIARWKTRLEGCRQAEQRAWVGAEIKRLVRARDIERARLLQQIKGHQDLAERYRLILSVPGIGLPTALTLLIRMPELGRVTREQVAALAGLAPFDHDSGRFRGQRRIAGGRGRVRKALYAAAFPAAQRWNPQLVALYNRLKTNGKEHKKTLVACARKLLIMVNAVVTRGTPWIKAGQPA

SEQ ID NO: 115786 - protein, 400 aa, unidentified
MFSRRNGLTLFYLFEFEQNVRNPTRRSIQNIQPGDKTKGDFSLFIFKLNGMKRTVKQVAGIDVSQKELVVCLGRMYDNWTPELYASKTFPNTEKGFDAFVQWVNKLSDTGLTVRYVMEATGVYHESLAYCLHKQGLEVSILLPNKISNYVRTLEVKTVTDKTASEAIALFGLERKLDNWKPASPLYKKLRQLTRERDQLVQARTSAKNQLHAEQSEAEPNKSTVARVKKQITLFNKQEQEIKDELAVLVKQNETVKQKVALITSIPGVGSLTAVTVLAETNGFELIRNKRQLTSYAGLDVKEKQSGTSVKGKPRISKKGNRFLRKSMHLPALAAIRHDERFKTVFTRLVSKHGIKMKAAVAVQRKLLELIYIVYKTEKQYDKEYLKKSGSNKMLLPEQAD

SEQ ID NO: 115787 - protein, 398 aa, unidentified
MEAIVQRSAGLDVHKKVIVVTVLLEQSDKTVKEETREYGTHYQACEELSDWLLSQDIELSVMESTGIFWKNIYAALEKRGLRVSVVNARHVKQVPGRKTDVKDSQWLARLARYGLVKGSFIPPKDLRELRIIARYRTKLKGMLASEKNRVHKTLDDAGVRLGNVVSDIGGVTATEIIAGLVEGKAIDELLACTRGQLKNKKDDLRAELEGELSARHLFLLKNIQAHIAHLEKELCDIDDYLFSAMQPYQQQWEILQTIPGIDAVGAALLIIELGVDMEQFGSREQCCSWAGMCPGNNESAGKRKSGKTPKGSKQLRYLLCEAANAASKTECQFKHKYKSLMIRRGHKKAIVAVGHKILRVIFSRLKTGEVYQDPQINYEELVVKKNAPRWIRMIRKYS

SEQ ID NO: 115788 - protein, 418 aa, unidentified
MKVVYPICCGVDVHKTFLVATIITSQGITPHYSKKRFSTFNNSILQFKQWLINNDCFDVCMESTGKYWVPIFNLLEDTIRITVANPKWVKAVKGNKDDTKDSKWIGDLFRLGLVPGSYIPTKPIRILREYTRYRSKLVSCKSSEKNRFQNAFTVCNVALDAVVSDMFGKSASSITDYLISSDSFDPDYCSSLLQRSLKKKADTVVESIEGYQMTKEQKERIVMVRSHLEFVQQSIANLDEKLDKMVARYESAITLLCTIPGVDRASAITIISEIGTDMSQFANSKRLCCWAGLTPGNNESAGKKKSVRITRAGVYLKPALVQVAHAAVKSNISPYYRVKYERISKRRGKKRAIIAIARMILTAIYHMFVTGEEFNPSDLYKVDMPQEMVAKQKEKAIKQAAKLLISLGLIKATDISVA

SEQ ID NO: 115789 - protein, 349 aa, unidentified
MTIVGGLDVHRQQITFDYVDDDGLVRWGQIRPATRKMLRGWLAEHCADGDGEFALEGCTGWRYVCEELGAAGVVAHLGDPAEIAALRGPKKRAKTDRADARLLRTLLLQGRFPESWIPPAHVVEIRTLGRLYCALMDERRGWQQRIHAQLFHQGCPPITALLSVAGRDALARAELSAAGRQYVDTALRRIDELSAEIEPLRTQLIGFARRQAGCRALQARHYGIGWLCAVIIWAEIGDARRFASSDQLVRFAGLDITVYSSDSKRSPGHLSRQGSPELRWAAFEAAKCAARRGSPDYAYYHRVAARPGNGKDPTLAVERKLLRRCYHALRELGDAALAPPVAEAKEVAA

SEQ ID NO: 115790 - protein, 317 aa, unidentified
MSQILNAAIAVVGIDIGKNSFHIVGHDERGAIVLRQKWSRGRVEARFANMPPCLIGMEACVGAHHLSRKLKALGHDARLMPAKYVRPYSKGQKNDFRDAEAIAEAVQRPTMKFVATKTADQLDLQALHRVRERLVSQRTGIVNQIRAFLLERGIAVRQGLRFLRIELPRILTMPSDVLSPRMVRVIEGLAGDWRRLDERIDGLSGEIEAIARQDTGCERLMSVPGIGPIISSAMVAAIGTGEAFSKGRDFAAWLGLVPKQMSTGDRTILGKISKRGNRYLRVLFVQAAWVVLIKPKIWERHGLKPWIEAAKKRLHQI

SEQ ID NO: 115791 - protein, 345 aa, unidentified
MDHIGIDLHKRESQICIETELGEVIEKRIRTERGRFEAVFGGRPRAKILVEAMTEAEWVARCLEELGHEVIVADPNYAAMYASRSRRVKTDRRDAATLADACRLGAYRVSHRASDRQRHVRAELAVRDALVRTRVKCVALTGALLRRHGIHLPSGNVDGFVARVERQAMPEEQRGEVAPLLALTRTASVEIEAADRRIAEIAAQDPVIQRLRTVPGVGPVTATAFVATLDTWERFAGPHQVEAYLGLTPSEKSSGEKQHKGRISKAGNSRVRWLLVEAAWAILRSRRDDTEPLRRWAQRVALRRGTKVGIVALARKLAGILYALWRDGTTYEKREGRAVKETTAA

SEQ ID NO: 115792 - protein, 318 aa, unidentified
MTQTSTFTAGIDTSKYKLDIAIHDSGPVWQVKNTAPGWRFLGTELIKLGVTRVGIEATGGYEKGVVQHLRAKGLTVLVLQPIQVRSYARAHLRRAKNDHLDAVLIADCTAHLIDQPRVAPNPHLTALAGHLTYVEQVEEDIVRHKTRLEHTDEPSLRRMVLADIAACKKRRADVMARIITALRAHPDLAKRFGLILSIPGIGKRTALALIIRMPELGQISREEAAALAGLAPYDDDSGKHRGPRHIAGGRARLRRSLYAAALPAAFRWNQALTGLYQRLHAKGRTHKASLIACARKLIVYANTVVARGTPWLKTAPAI

SEQ ID NO: 115793 - protein, 325 aa, unidentified
MEKLYGGIDIHKDKLAGCIMDKDGNITREHIFPSSKKAVERFLCDVPNSDITIAIEACGMWRGVYKVLTELGYKVKLANPKKTHDIACTKKTDKVDAKILADLLRTNYLPEVWIPDENVLRLRDLTRHKSNLTRLRTMVQQKIKGYLLRKGVKYGKLWNKEALSKLAEEDQDIKNFVNVYHSLKDEEKEVMGRIRRFARNMKETNLLMSIPGIAEFSSLMMLAEIGDIRRFKSPKELVSYTGLCCGIYQTGSTERTVHNNAVNKWLKWIVYECSGKAILLDQRFQKYFSKVQQRKGYQTGRRAAARKMLTIIWYMLTNGEPYRAS

SEQ ID NO: 115794 - protein, 336 aa, unidentified
MPLYCGIDLHSNNHVVCVIDEQDKRLLEKKLDNDSELTLRALSRYKNRLKAIAVESTYNWYWLVDALMEAGHQVELVNTAKVVQYSGLKRTNDRYDAFHLAHLMRLGILPTGYIYPKAERGLRDLLRKRIQLVQDRSSHLIRFKFLVQMHTGQSIRADRIKARKFQLPVIGDGNVQLALQSHLAMIRAFTTQIKTLEKSILSQVDPVVCFECLKTAPGIGDILAEVILLETGNIDRFKGPGNYASYCRCVDSRRESNGKKKGENNRKNGNRYLAWAFIEAANFAVQRSDKARRFHLKKEKATNAIVARKALAHKLARGCYWVMRNQEAFDQDRVFG

SEQ ID NO: 115795 - protein, 339 aa, unidentified
MLIIGCDYHPSVQQIAWVDTETGECGERRLMHRAEAEQFYREVKGKQVRVGMEATGHSRWFERLLAELNFELWVGDPAQIRVKQVRKQKNDRRDAEHILKLMLKDDFPRIWAPTPENRDLRQLVLHRHRLVGMRTRVMNQLQAVAMNEGIRRKRGLWSEKGREQLKSLSLMPWTERRRQELLELLDQFDPSIDELSQAIKQEAERMPEVKRLMTHPGVGPITALAFVLVIGTPDRFGCGKEVASYLGLIPCEDSSSDRWRLGHITKQGNKLLRFLLGQAGQSVASCEEQWHRQYAHLTIRRNKPIAKVAMARKLAVRLFWMWRKGWNYEQLKQFGSHVG

SEQ ID NO: 115796 - protein, 361 aa, unidentified
MKEYIALDVHKHYTLAEREGVESGRAQQTRIEHQPGSLRRYLDGTIPGTTVALEATGNWYWLVDEIEQAGCIPALVHPLKAKLMLGSINKTDKLDVHGLNRLQRVGTLPCVWIAPAGIRDLRELPRTRMFLTQQRTRLKNRIQATLAKYGLGVVGCSDAFGAQGRRQMEALLPQMPAQARLVTGELLELLEAVDAQIQEHEKRIGDLVKVTAAMQRLMSLPGVGRILAVVIALEIGEVNRFASAERLASYAGTTPRVHASGDKMRFGRLRTDVNRYLKWAFVEAANCVHLHQRHYPHRHVTRLYQRIASRKGHAKAIGAVARHLAEASYHLLSRQQDYREPGLRDRDRSQGNVSATAAWTR

SEQ ID NO: 115797 - protein, 311 aa, unidentified
MTPSSSPRFFIGCDVGKAHVVVFDSRTRQTSILDNSPAALAAFAATLCDDCLVVCEATGRYEAALLDALAQAGRSAHRADARKVKAFIRSYGTLGKTDAIDAEALARYGQERHPLLRLWQPETAARQQLHALVTTRHSLVADRTAWSNRAKAPATAAIDSFIQPVLACFETQIAAIDAAIAALIAGDAALHRCVTALRTVAGIGAHTAAALAALMPELGQLDRRQAAALAGLAPHPNQSGASNRYRRTRGGRPEVKRLMFMAAMAAVRHDPGLRQFHHRLIAAGKKPIVALVAVMRKMIVICNARLRPAPA

SEQ ID NO: 115798 - protein, 366 aa, unidentified
MLHKLNSAETLIQRTTTEGSSMTTMNYIGLDVHKKTISYCVKDVSGRIQQEGKIGSTRRELDCWMKTLPQPWAIAMEATIFSGWIYDHLLPHATQIKVAHPLMLRAIAAAKKKNDQIDASKLADCLRCDFLPECHMMPRAIRDRRRTLRYRHLLVRQMVQMKNRVSGLLMETGVEYNKQRLHKVSYFRELLSANGEVPPSLRPLLKLSRETIERCQKTEYALVSSLQRDPVLADRIKRLRTVPGVGPITALTWALEIGDVTRFGSIKKAISYCGLCGEERSSADKAMRMPLSKQRNKHIQRALVEAAKLAPRQNHELAVIYDQERQKGNSNRATLAVARKMVAYLLAVDRQQRDFVPAEERRTTAA

SEQ ID NO: 115799 - protein, 442 aa, unidentified
MAVRKRLEIEFPNAAGIDVGASSHFVAVPADRDERPVREFAVYTEDLQVLADWLKACAVDTVAMESTGVYWIALYELLERSGFRVLLVNTRHVKNVPGRKSDVLDCQWLQQLMSFGLLAGAYRPDDEVCVLRAVMRHRDNVIQGQARQIQHIQKALVQMNLQLPEVLSDVMGVSGQAILRAIVAGERDPRVLAKLRDARLKADEAQIAKALQGNWREEHLFMLEQALALFDAFQVQLAGCDAKLEALLNRLRCGDGTPQGKSKAKSRAKNAPKFDLRTALYRWCAVDLTRIDGLEVTTVLKVLAEVGPDLSRFASVKHFCSWIGLCPGTKISGGKRLSGQTRCSSNRVKQALKMAAANLIRSQSALGAYYRRLCARMDKPRAITAAAHKLARLIYLMLTRGEQYVDRGQAYYEERHRQRVVASLQRKAASLGLRLTPCDNPS

SEQ ID NO: 115800 - protein, 418 aa, unidentified
MKEDSKAIASRRYIALDIHKHYCVIAGVDREGRVQLQSVRIEHVDLESWLKKNLQGSDWVVIESTTNAWHVYDLLEPLVEKVLVANPIQVKQIANARVKTDVRDTLILARLLAANLVPEVWVPPVHVRQLRQLLSQRRQLVETHTQIVNRMHSVAHRHHLKHERGKRFNEKNTGWQKDKILSRVEQFQLELEMENRAYIEKQISRIGKEVAKISQKKPWSESMLYLMQLPGFGVITAMTVLAAIGDIQRFATCRHLTSYSGLTPGLEQSGTKKRAKGITKEGRKELRWAMVEVAQRAVKSDPLWKTRFQELQRRMHRNQAIVAIARQLLELVWVVLTRRQPYRHFSHERIAYKYLTWAWQMDEEMRDGLTRQQFTRYYLMRLGVGHELSRIALDPRHPRKLASEAEVLALRPELLQIE

SEQ ID NO: 115801 - protein, 413 aa, unidentified
MDVLHPRCCGLDVHKSSISACILLREAGRVEKHQRRFGAMTQELQELAEWLRQFGVTQVAMESSGVYWKPVWNILEGQFRVVLANAQHIKNVPGRKTDQKDAEWIAQLLQYGLLRASYIPCEIIRDLRDLTRMRASLSQEASRISSRIQKVLEAANLKLASVATNVLGKSGRAMLEDIISGENNPEHLASLALGHLRAKIPQLRLALEGKIRFHHRFLLRRLLDQIQFLEHEIALLDERLEDIGRQRPDLAQAVARWDTIPGIDQVAAWALLAEIGDNMAQFPTAEHLASWAALCPGNHESAGKRLRGTTRQGSPWLRRMACQCAWAAARTKNTYLSSQFRRLAARRGKKRAIIAVAHTLIVIAYHLQKNQSNYEDLGGNYFDLLHSDGLKRYLVKRLQQLGNKVTLEQMEAA

SEQ ID NO: 115802 - protein, 324 aa, unidentified
MKSKSSELFIGIDICKARLDVADDANSLPWSVANNDAGIASLVERLHTLHPTLIVMEATGGLETLLYAAVTTAGLPAVVMNPRQVRDFAKALGTLAKTDALDARILARFGAAIQPAVRPMKDDTTQELTALVTRRRQLLAMLTAEKTRLQQAAKWIRKDINAHIASLENRLQTIEGHIATIIKKTPGWKEKDSLLRSVPGVGNVLSMNLLSSLTELGTLNRREIATLVGVAPLNRDSGNFRGNRRVWGGRAQVRAALYMAALSASRFNPVITPFYQRLIEKGKQPKVALTACMRKLLVILNTMVKTQTAWNPNQFSTLDFNHGC

SEQ ID NO: 115803 - protein, 310 aa, unidentified
MGTNVFVGVDVCKDNLDVAIGAGKDIVTFTNDQKGVDALVKKLSRINPALTVFESTGGYELLATSCLAEAGVAVVIVNPRQVRDFAKSAGILAKTDAIDARVIARFAKAVKPEVRPLKDQQTSELTALVTRRRQIIEMIVAENNRLKLANKRNIKDIKDHIRWLEKRLDKIESDIGKMIQSSPIWRCKDDILQSVPGIGPVTSATLICDLPELGVLSPKKIAMLAGLAPLNCDSGKFKGRRRIWGGRGSVRSILYMATLAAIRCNPAIKGFYQRLTDAGKCHKVAATACMRKLLIIVNAMLRDQTLWQQN

SEQ ID NO: 115804 - protein, 341 aa, unidentified
MKITRVGLDLAKDVFQVHAVDGEERTVVRRQLKRRQVLGFFARLDRVAGCVVGLESCCGSDYWARELIKLGYDARIMNPAFVKPYVKANKNDARDAEAICEAVGRPTMRFVGVKSLEQHDLMLLHRQREQYVKRRTALANQIRGTLGQYGIVVSKGLGSLRRALPRLLEDAGNGLTALAREAYAESYRELCEFDEKVARVEGKLEHLARQDPRCVRLMSIPGIGFLTATAWVALLGDGAQFAKARQCAAFLGLVPRQHSSGGKERLLGISKRGDRYLRTLLVHGARAALRTAGAKEDRRSRWIREVAATHHANVAAVALANRNARTAWALLRSGETYQVAA

SEQ ID NO: 115805 - protein, 393 aa, unidentified
MPRKRILVKSIDTSISYQVIGIDLAKHLVSACLITGAGEIFGIDRLTYDDLLKSAERMSPTLFCMEPCPEVHYLAEKLQGYGHHTKVIDGAAVKEYIKTHFCGQKTDLNDAQAIAFLSLDTNLPEITPKNTSNSVLSSIQAVREQFRKEYIQSFVSLKGICQRWGLPISKGVMNKNKVEELVSESKKIPQEVKDWLLELLQSCRELQKRLNKISKYLKEYADNDEICQKIMSVPGIGPITATRLKATIGDIQRFEKPKSIVAYYGLVPKSKATGHNEKKGGITRRGDRVARSLLIEGAGVVLNLAAKGFLRSKPLNKWIEKKRKLKMPWGKLCCALAAKMLRIVRAILIQGTSFNAKIAGVARCSLPKESRNNVMGNNKLSEIPSPNGSVYIH

SEQ ID NO: 115806 - protein, 423 aa, unidentified
MKLTYKVCCGVDVHKTFLVATIITSSFVLPQYQQKRFSTFYSGLLAFKQWLLDNDCKDVCMESTGKYWVPVWNVLEDSMHVVIANPKWVSAVKGNKDDKKDSKWIGDLFRMGLVPGSYIPPKDIRILRECTRYRSKLVAMRSSEKNRFQNAFTVCNLTLDAVVSDMFGKSSTDILNYLLETDTVDPDHCVSLLRRSLKKKASDVVEAVNGFNMTAEQKERVRIVQGHFADIDKRISQIDQIIAKLTAEYEGTISLLCTIPGIDRRLAITIVSEIGTDMTEFGSSKRLCRWAGLTPGNNESAGKKKSVRISRAGVYLKPALVEAAHAAVKATQKCPYFRIKYERIMKRRGKKRAIIAIARMMLTAIYAMVSTGEIFNPCDLQKFDMPEELKKKQIISDAKDAVKLLVSLGLVTEGSISLEALVG

SEQ ID NO: 115807 - protein, 413 aa, unidentified
MRLFVGDDWAEDHHDVELMDAGGRRLAKARLPEGVAGIARLHAMIGEQLGEDADEDDAGQVAIGIETDRGPWVAALIAAGYTVFAVNPLQASRYRERHGVSGAKSDAADAHVLADMVRTDSHQLRPVAGDSALAAAVKVVTRTHKTLIWERTRCTQRLRHALRDYFPAALEAFEDLDAADTLELLARAPEPASAAKLTTAQISAALKRARRRGVAAKAERIQAVLRAAHLGQPDVVAAAYAASVRALTAVLITLNEQIKTLHGQVEAYFGQHPDAEIIASQPGLGGVLGARVLAESGDDPTRYASAKARKNYAGTSPITRASGKKKTVLARHVHNDRLIDALMSQAFTALRVSPGARAYYDLQRARGSGHNPALRQLANRLTGILHGCLKTRTLYDEATAWPQHPTATEKTAA

SEQ ID NO: 115808 - protein, 449 aa, unidentified
MPKPRGQLSGLPVINDRAAAIDIGSRFHVVAVPPELCDQPVQTFQAFTGDLQRMADWIVSLGIKTVAMESTGVYWIPAYEILEARGLEVIVANARESRAVPGRKSDVNDAQWLQRLHACGLLRPSFRPNGDIAALRAYLRLRERHLDYAAAHIQHMQKALTFMNLQLHHVVTDVTGATGMRIIRAIVAGERDPGVLAAMRDRNCKSSVETIRAALVGNYLPEHTFALQQALALYDFYQARVDECDAQIERTLAMLTADQPLPREPLAKARNRAQQPNALSFDVRSLMYQLTGVDLTQIHGIGPYLAVRLVAECGTDLGRWPTAKHFTSWLTLSPGCKVSGGKVLSSHTRKTTNRVAALLRLAAVTVGKTSTALGAFYRRLAARIGKAKAVTATARKIAVLFYNAMRFGMQYADPGADHYEHRYKERVIKQLHRRAAEFGFSLQPAEGVS

SEQ ID NO: 115809 - protein, 348 aa, unidentified
MQSKSQIRSIGIDLGKTTFHLVALGSRCQVVVRKKFSRSQLLVYTANLPSSLIGMEAGVGSHFLGRALREQGHEVRLMPAQFVRPFVKSNKNDYRDAEAIAEAVERENMRFVPIKTEDQLDLQALHRVRERLVSRRTSVINQIRAFLLERGISFAKGPARLRREIPEILENADEKLSTRMRRLLDFLWQEWKHLQLQIESLSEDLEKIANSDAACARLQQIPGVGPLVATAVVSAIGNGAAFHKGREFAAWLGLVPGQWSTGGKAKLLGISKRGNPYLRKMFIHGARAAVLRVKREGSYLGQWIGGLESRAARNVVIVATANKLARISWAVLSSGENYRPRPALAVAS

SEQ ID NO: 115810 - protein, 407 aa, unidentified
MEVFLGLDWAEDHHDLCLLDPSGAVLATRRIPDGLEGVAMLHALVADHVEAPGEIIVGIETDHGLLPTSLIAAGYQVYAVNPMSVSRYRDRHHSSRAKSDKSDAKLLADLVRTDRHNHRRAAPDTELLEAIKVLARGHQNLVWTRQRLTNQLRSGLREYFPGALAAFEDLHHPDTLAVLGKAPTPTQARRLRTTQIQAALKRGGRRRNLERRAQEIHAALQLPQLRAADLVEDAYGAATAAQTRIIGDLNEQIAVLEAKLEHRFSQHPDAELLLRLPGLGVILAARVLAEFGDAPNRYVDAKARRNYAGTAPITKASGTSEVVLARLVRNKRLFDACYQWAFCALNASPGARVYYDAHDPGPKTGKTARRKLANKLVGILHGTLTHRTAYDEAIAWQHWQATKPDAA

SEQ ID NO: 115811 - protein, 342 aa, unidentified
MMSAIGIDTHKATLVACAIDELGTAADEAQFRNDPAGHHELAAWVGRVAPGATIGIEGSSTFGAALARMLVAAGLAVRDVPPHLTRHGRSATRRAGKSDPGDALAIARVTARETGLPPVRLDDRSRHIGLLLEAREAFVHDATRSRNRLHAHLLVLAPGYGERIDRLVSGVALDRASRLLRGRPGLEAELARDLIAELRRLDGRVARLTRRLTMLVGPDPLLGLPGIGILTAARLIAETGDVRRFRSPDAFAALAGLAPIPASSGQIQRVRLSRGGNRQLNRAFYVIALTQVWHHPPAKAYVARKRAEGKTWREAMRCLKRQLVRTVFRLLQEGQLGLAEAA

SEQ ID NO: 115812 - protein, 351 aa, unidentified
MQIIGIDVSKDTLYVALAESKDARNDKVIASHKFANNETGFKLFVDWMKKKKADAGTVCLMEATGVYHEHLADWLHRHGVTVVIELPNKIKHYAKCLNVKTKNDKVDAGVIARYGLHNAWTPWHPMTESLYQMRALLRQVQSMTKERTRCKNQLHALMHSAHAPGTVVGNLMDIIANYDRLIESYHDEVVRLAKEDEAFYARVEMVCTIKGVRVITVLTVLCETDGFQLCQSARQAVSYAGLDVSEYQSGTILKDKRISKKGNARIRHALYLPAVVAGTTGGPMSLMNLYKRVKQKHPTAKKVAIVAVERKLLMLIYTLWKKQEPFDPEKDGKPPIHNAYRSTQAVGSQNQ

SEQ ID NO: 115813 - protein, 339 aa, unidentified
MKVTTLGIDLAKSIFRVHGVDDRGTVVLRRQLTRKQLLTVLANLPPSLVGMEACAGAHYWAREIEKLGHTVRLMSPQFVAPYRKSQKNDGNDAAAICEAVGRPSMRFVPVKSPAQQDVQAVHRIRFQLIKWRTALANEMRGLLGEYGIVVAKGIGPLRRQLPLILEDSENQLSGFFREMLGEMAERFKLVDQRIRQYDLKIEHVFRQDERCQRLARVEGVGSLIATALVAAVGNAHDFKSGRELSAWLGLVPRQHSSGGRNVLLGISKRGDRYPRTLLIHGARAAVRVVERRRDHRSIAVNRLKLRHGANVAAVALANHNARVLWALLTRGEEYRPRCA

SEQ ID NO: 115814 - protein, 437 aa, unidentified
MGKEDEETTMSGKETVQAEPEFVAFVGIDWADQKHVWCLQKANSRQREAGELEHRPEAVEAWVGELCRRFGYGPIAVAVEQVKGALVYMLRKYECLHLYPVPSTMSASMREALYPSGAKDDPRDADMLLELLVLHRDKLRRLTPDNEATRRVQNLVEERRKLVEEKTAQLNRLTGYLKVYFPQMLEWFAKLDSKLVCDFLERWPSLEELQKVPSAELKKFFRHRRGRHGELTEWRMQGIGQATPAIRDRAVIEAKQTVVQVIAQLLRTLLEGIATLERKIAEAAEVHPDFFIFQSLPGAGAALAPRLLAAFGSQRDRYSRAEEVQKYSGIAPVTERSGKKKWVHFRWACSKFLRQSFHEWAGHSIAQSVWARAYYQRQRERGKEHHAAVRALAFKWIRIVFRCWQDRVAYDETRYLTVLAKRGSHLTSAFVDVAVSM

SEQ ID NO: 115815 - protein, 429 aa, unidentified
MNNPYISVGIDVGADFSYVCIMMPSYELFCKPFKVVHTDLSSMNKAVSTIKKAEVEFQMKSQIFLESTGIFHFPLFCFLRASGFEVSVINPLIIHSTKNMDIRKVKNDKFDSKKIAKVGLDPTIRKSLIPDGFVLNLRFLCREYYSLSDDRTALINKLSGYVRLVFPAFIGIFSQLAGGASLAVLNYTQSLDHLLSASDDEIIGIIAKAARKGKKYAAEKYIAILDAATVSKTLSMQLPNVFTLIHSIINHISLIDQQMDDILKTINSILDDNHDHVFVRQIQLIDSIPGVGFLSAVTIMCEIGDFKAFKNPKQLFSYFGVDPSVNDSGKFKGSRNHMSKRGSRFARRVLYSIALASIRNKPNSQPMNAVLQAYYQGKVVSKFKKVALGAIMHKVCNIIFAVLRDDSSFVLRSPKEHICLHALSASNAA

SEQ ID NO: 115816 - protein, 354 aa, unidentified
MTETAVDMQVVVLGVDTHQQSHHAAIIDTLGQPLADQEFSATAAGYRQLLEWARTHGRLEQAGVESSASYGAGLARELTANGVEVIEINAPDVRARRAHGKSDQLDAYAAAMAVLTGRASGHAKDTSGVTESIRMLYVARRMAVDHRTQLGDQLRDLCTTAPDEFADQLKTRTTTPQRLALVESWTAPASLTDPRAAFVFAAKSIAGRYRQTHREVTTLTRELKTLLKALVPTVLALPQVGPITAARLLITIGQNAQRMRTEATFAKLVGVAPLPASSGKTVRHRLNRGGDRGANSALHMIVVGRIKSHAPTRAYLARRENEKTKKEIIRCLKRYVARELYKAFTTDLGALDNL

SEQ ID NO: 115817 - protein, 408 aa, unidentified
MPNRIAGIDVHKRVLMVVVLDPEQAGIVGKRRFGATTAELTHLKAWLQEQTADEVVMESTAQYWKPVWLTLEGHFRLRLAQAWSNRAPRGKKTDFKDAERLARRHQAGELTLSFVPEAAQRQMRDLTRRRTQLTRDRVRIQNQVESLLEETRIKISSVLADLFGSSGLRILTALAGGENDPATLAALADARVQKSPQELTDALTGTVNLVQRKLLAQHLEHLRLIDRQMEELSGLTAEALHDEQDAITRLTQIPGIRVQSAQQIVAEAGSKAESFHSAGQFSSWVGVCPGKQESAEKNQSSRSTKGNSYLRRVLCQAAQAAVRTNNSFFQQKFRRLLPRLGYVKAIWAIARHLSVVIWKILHDGATYKEFGGPPTPQAAKRRLQRLKKELRAMGYSDELQPMPSAHPA

SEQ ID NO: 115818 - protein, 455 aa, unidentified
MKVKAVSALRSKRGLHRVSGVEPQVVGLTPQTTDERKTDTMKTYILRDPKPVEPQKSTRPPRPKPAAAVTAAGLLPRPSATIKDPVLFIGLDVHNDSIAVSLAPSDATEVRRYGIIGGEHEDVLKLAKKLAEAHPGTTLKFCYEAGPRGFALCRCLQAHGWDCMLVCPSKIPRKPGDRVKTDRRDADQLARLFRAGELTGLYVPEPVDEAMRDLIRARFQVGKAQHRARQQLKMYLLRHNLRYGGKSSWTPAHLRYLAKIKMPFPVQQIVFQEMLEVISEATARLERYDQEIERAVPGWRWEPVVRALMSLRGMALLHAATLVAELGDFNRFAHPGQLMGYLGLVPSEHTTGTDRQQGGITKMGNAPARRALVEAAWQYRAPARLSPHLKKRQEGLPKAITDISWEAQRRLHHRYNHLTRVGKKKSQVAVTAVARELSGFVWAIARQVKPHPAKP

SEQ ID NO: 115819 - protein, 390 aa, unidentified
MIYVGIDVAKDKHDCCILGPDTEELFPVFTIRNNSDGYGELFHKIESVSKDKSQIKIGLEATGHYSYNILGSLLDHGYHTFVINPLHTNLYRKGQSLRKTKTDKVDARSIAEMLVTDKTLKPYTDTSYHSEELKSLTRYRFELVKERAKLKTSVSRLVNILFPELESLVPTLHMNSVYRLLQELPGAYFIASSNLTHLKALLADASKGHYGREKAIEIRETAKSSIGSLMPAKSMELRQTIRRIDTLTSDIKEVEQSIQKIMDECGSPITTIPGIKYHMGAMILAEIGDFTRFSNADQVLAYAGLAPSTYQSGQLISSYARMEKRGSKYLRYALFNAAIYASVWDERFRLYLSKKRAEGKHYYVAISHVVKKLVRTIFRMEITHTSYQPL

SEQ ID NO: 115820 - protein, 347 aa, unidentified
MNQIIRIGMDTSKHFFQLHGVDTAEQPVLRRKLRRKEMVGFFAKLPPTEIGMEACGAAHYWGRVLRELGHTVKLIAPQHVKPYIKRNKNDGRDAEGLCEAMSRPTMQFVPVKTEEQQAALMLVGMRERLVARRTQLSNAIRGYAAEFGLTAAKGLGKIEPLLAEIAADEALPVLARDLFAMHGRECVQLQAELKKIEARLMAWHRANTDSRRLAQIPGIGPVVATTLVMKAPDPRLFPSGRHFAAWIGLTPKDHSTAGKTRLGTITRAGDEMLRSVLVAGATAVIQQAKQGRGHPSPWLLALLARKSSPKLAAIALANKIARIAWKLLVTGESYHAGGKPIASAHAA

SEQ ID NO: 115821 - protein, 342 aa, unidentified
MKAITTSGLDIAKSVFQVHCVDTQGNVCLRQQLKRRYMLAFFQKLPSCLVGMEACASSHYWSRELQALGHKVRLMPPAYVRPYVKRQKNDATDAEAICEAVTRPNMRFVEIKSVEQQSCLVLHRTRQLFIRQQTSVTNAIRAHLAEFGIVAPVGRTVDQLLKIVADIEDKRLPEVARACLAALGAQLQALKAQILKFDRQIRAWHRSNETSKRLDEIPGVGPALATALVASIPDPKAFRSGRDFSAWIGLVPKQNSSGGKERLGSISKRGDRYLRSLFTIGALAVIRYAKIHGTTHRPWLTALLARRPPKVAAIALANKLARMAWAMMAKGERYREPAALAA

SEQ ID NO: 115822 - protein, 351 aa, unidentified
MLIIGCDFHTRFQKIAMMDTTTGELVTRRLEHGTGEAERFYAALAAPVRVGIEATLATQWFEKMLRHYGHELWIGDAAEIRAAMVRKQKTDDRDALHILDLLMQNRFPRIWVPSPAERDVRQLVRHRHKLVRFRTSVMNQLHALAMGQGLCLRKKLWTTVGRQKLESLTLDPWASRRRRELLELLDQLDPSIGELDRAVISEAESRPTAVCLMQQVGVGPVTALAFVLTVGPVSRFPNSKKLVSYLGLNPSEESTGGRQRLGAISKQGNTMLRCLLVEAAQTSARLDPELRRNYQRLKLRRGNSGVAKVAIARKLAVRLYWKLREADRPNTAARMQGSPVTPVVGESLSAN

SEQ ID NO: 115823 - protein, 343 aa, unidentified
MNEISTIGLDLAKNVFQLHGVDTSGRVVLRRQLRRGAVEPFFAKLSPCTVGMEACASAHHWARVIGRYGHQVRLMPPAYVKPYVKRNKNDGRDAEAICEAVSRPTMRFVPVKSVEQQATMAVHTTRALLVRQRTMIANSLRAALSELGIVAAQGLEGLRELMGKLEASSEEIPEIMRGALLALAKHWQALDADERALERQISKAARGDREARRLMEVPCVGPIIASTVLAKVADAKLFRSGRDFAAWIGLTGRDHGTGGKHRPGHISKKGDRMLRTLLINGASSHLRQQKRRGVSDPWLRDLLARRPYKVVMVALAAKTARVIWAMLVKGEPYRNRTSAPAAA

SEQ ID NO: 115824 - protein, 338 aa, unidentified
MLHSGIDLHKRDLVIATVDSSGTVVKSGRVPAARAPVAAYFRGLGAEQRAVVESTATWYWLADLLRAEGVSLTLGHSKYIKAISYAKVKTDAVDAATLAQLLRSDLVPEAHMISPELREPRDLLRQRLVLVAKRTRCQNAVSGLLAQYNVPSVAELPALLRFQAALHSEQRALLTRQIKPLEQLLQPTLVPNDQVQRLLWIPGVGKIAAFTLYLEIDGIQRFGAVRPFFSYCRLVPGAKNSGGKTRHKRTKDGNRYLKLASSHAAVRAIQYYPEIQRWYLAKRRTKGPMIARALVAKELARIVYYVLRHEEPFNGTFKGQPLSRTKQSQWPRRASPSV

SEQ ID NO: 115825 - protein, 355 aa, unidentified
MTSTKYIGLDVHKESISIAVLNFAGKVVMECVIETKASTILQFIHGLRGDLQVTFEEGTWAGWLHDLLKPHVTELVVCNPRKIALLKDGSKSDRIDAHKLADLLYMNKIKPVYHGEHGLRMLKELSRSYLTISKDLGRVMNRLKALYRSWAIPCAGTQVYAPHYRSEWLSKIGEAGVRRRAELYYQQLDALRLVRQQARKELLVEARKHRATKLLRQIPGMGPLRAAHLVALMQTPHRFRTKRQLWTYSGLGLETHDSAQYRVVEQQLQRSKKSVTLRGLNTNHNHDLKDIFKGAAMRASTAAGPLHDFYEALLAKGRKPTMARLTLARKIAAITLIVWKKEIRFDANYLKPQAA

SEQ ID NO: 115826 - protein, 395 aa, unidentified
MLKRVLKATVRGSGQSSHARLVNGLTSTKGSVGVGARRPDGAHRSRITRALQPRFHPPRVAKPPSRLVSIVMGLDQHRGQITGEWIDTETGEVQRTRVVPADRAAVRRFLWRFGGKELEVALEATTGWRFVVEELRRVGAVVHLAEPAETAGLRGPKKRAKGDRADARHLRELLMLKRLPESWIPPAHILDLRARVRLRHTLSEQRGEWQQRIQATLYHHGCPQRRSLMVGDGREWLAAQPLPTTAREQVTVALTMIDALERQITPLDRELRAYADRQAGCKALMVHYGIGPLVAVTILAELGDCTRFSSSRLAVRYAGLDITVYQSDQRRAPGHLSRQGPPALRWALFEAAQSACRRGSPDRDYYTETAARLGHNRPCLIGRPQAPQAQLPHAA

SEQ ID NO: 115827 - protein, 366 aa, unidentified
MKEVAFLGVDYHIKTITIAVYLNKKKKFYETIRLNNDDKTTKKYMKKLSTQFDLKMCYEASCSGYVFQRKMQALGYHCDVIAPSLTPRKPGDRRKNDIRDAKKLAQNYANGLLTIVHPPTQEEESIRSLIRCRIAMKESAKKAKQQINSFLLSQGCRWSKSKWTKQHHLWLSKIEMPNAYLQQVLDEYLGHLSYLESRLQYLEQQIKQIANSELYAPSVKKLRALRGIETLTAMVLIAEITDFRRFPNPRSLMAFLGLIPGEDSSDDTRKDVSITKAGNRRCRNILTESAQHYVKKPRISVKMKQLFSQVDAHSAVTSKKCMYRLHKRYWTLVMKGKARQKAIVAIARELVGFIWAIMQPVSCAVA

SEQ ID NO: 115828 - protein, 352 aa, unidentified
MDKGNKLDFGGQHIYVGMDVHKKSWSVSIYTEQFEHKTFTQPPEVGKLTNYLQRTFPGATYHAVYEAGFSGFWLHDHFREQGIDCMVVNPADVPTKDKERAGKTDRVDCRKLARSLRNGDMKGIYVPPRVKVEDRTLVRTRQSMVRKQTRCKNQITSILFFYGINIPEESRWSRRFIHWLESIHMERASGDVALKAHLEELKHLRQIIANLNRAILSLSKTEEYRADVLLLKSVPGISTLTAMILLTELADISRFPSLDKLASYTGLIPDIKSSGETEYSTGITFRRNAALRSLLIESSWVAVRKDPALMMAFNKLSLRMKKTQAIVHIARKLLNRIRFVLKNRQKYVPAVI

SEQ ID NO: 115829 - protein, 365 aa, unidentified
MDQISRIGMDTSKHIFQLHGVNAAEAPVLRKKLRRKEMVAFFEKLAPTVVAIEACGASHHWARLLQSFGHSVKLIAPQLVKPYIKRGKNDVADAEALCEAMSRPVLGLDPGMRFVPVKTAEQQAALMLVGVRDRLIRNRTQLSNAIRGYAAEFGLTAAKGLAYLGLLLDRIQADESLPARARELFAMQATEYTQLQAQIDEVDAKLMACHRADECSRRLAKIPSVGPIGAMLLRMKTPEPELFRSGRQFAAWIGLTPKDHSTAGKVRLGVITRAGDEGLRSVLVAGATAVIQQARRGGRASPWLAELLKRKAPKLAAVALANKTARIAWKMMGPGKTTPQKPPPPCWPALLRDQPDTGSTSTQPC

SEQ ID NO: 115830 - protein, 376 aa, unidentified
MSKIRFVGLDVHAETIAVAVAENGGEVRSHGVIPNRLESIRKLIGKLGPVGTLKACYEAGPTGYVLYWQLTQLGVACEVIAPSLVPTKAGDRVKTDRRDAEKLARCHRAGELTAVWVPDAAHEALRDLVRAREAAKKDQLKARHRLGKFLLRHGRRPKEMKPWTKKYLEWIKTHVHFDQPALEATLADYLEEVDHVAARIVKLEKAIDEAVQTAPAEIRAVIEALQALRGVAQTTAATIVSELGSLSRFRSPRQLMGYSGLVAREHSSGNRVQRGGITKTGNGHLRRVLVESAWAYQHRPNVTGFLLRRQKNLALSDEVKKIAWKAQQRLNKRYKVFAARGKNKNQIVTALGRELLGFIWAIAVHVEQQQHLAKAA

SEQ ID NO: 115831 - protein, 320 aa, unidentified
MQGARTFIGVDVSKQELVIAGHDTAGVTPGAIANSRTAIRAWLKRLPCDSVIAMEATGGYERLLAQLAYEQGLAVYVLNPRQVHHYGVSLGNRGKTDRLDAQVIARYVAMEYPRLHRYEPVPKELMKLQQLQGQRATIMRARTMLNLSLQRRIDLKTSRAAKALKALDEWIRDLDTQLVAGIKGHAALSQQFDLLTSITGIGPQSGAALSVLLTRMRFINSDAVVAYCGLDPRPKDSGRRRGVRQLSKQGDKGLRALLYTAASSACRTAAFHAYYQSLRSRGLKGTEALVALARKLLRIAFAVSKSKKPFDPTRSQLKPG

SEQ ID NO: 115832 - protein, 422 aa, unidentified
MEDERNWFVGVDWASETHHVRVSDARGRKLGARAFAHSGEGLAAMAAWILAVTGAPPEAVFVAIEVPYGPVVESLMERGFRVHAINPKQLDRFRDRFSPAGAKDDTRDAEVLGDALRTDPRCFRALQPLDPVVVELREASRMAEDLKQERNRLGNRVRELLWRFYPQMLGLTDDVAAPWFLDLWRLIPIPEKATRVREVTVDRLLKRHRIRRLSAADVLEALRRPAILLAPGTVSAAVSHLAAVAKRLDLVNRQMLAVDERLDSLTESLAGAQEGAEGQGPEPRDVTILRSLPGVGRIVLATLVAEAFEALQRRDYQALRCLSGVAPVTKRSGKSRIVLMRQAAHVRLRNAVYHWARVAVQHDPRSQAKYAALRARGHGHGRALRSVADRLIGVACAMLKAKTIFDPTLASERALNLGKPTC

SEQ ID NO: 115833 - protein, 373 aa, unidentified
MPRYSTAFGMDVHLRSTTVCALDAETGEAVTRRFRGNPWGEVAEWMSGFPGPSLAAYESGYLGFAPQRELSGLGVDCVVAAVSKVPRSAADLSSKNDRNDAARMAKAILSHDITPVWVPSPEIEGLRDLAGAHDAATARLAAAKQRLLAFLARRGYAYGGTTPAGNPRRYWTYDFLRWLDKVRPADDGGIRALAALRNEVEAADETREAVLAEYRAAVAAGPLSAEVEALQSIKGCGFALAAAFASEVGDFSRFRSGRQVTAYFGLAPKQRSSADSVRLGGISGAGNALVRRLAVEGSWRYAQAGHQPKLMPKGSGVPLEIRMHGRKGSERLLRRREEMLERGMPQAKANAATAAELVRWLWALGAMCREATE

SEQ ID NO: 115834 - protein, 343 aa, unidentified
MTVDYYVGIDVSLEASSVCVVDGSGKIVREAKLSSEPEALIAWFKGLPFGLARIGLEAGPLSQWLYAGLKQAGFAVELLETRHVRDALKAMPVKTDRNDARGIAQLMRLGWFRPVHCKSAPAQETRALLTARKLVQGKLYDIEMSLRGILRGFGLKVGRTTKAGFASRIMELTEHHPALKAIAKALLAVHQVLLRELNGFEKQLCKLARGDNRVRLLMTAPGVGVIVGLTYVAAIDDPARFASSKAVGAHFGMTPKKYQSGEIDVTGRISKIGDKGVRAALYEAAHVILTMPVKGGGLKSWAARLAKRAGPQKAKVALARKLAVILHRMLADGTRFDMREAAA

SEQ ID NO: 115835 - protein, 390 aa, unidentified
MDVLYQSCAGIDVHQANIVVCILHGPLTSTRPNREMATFDTTTKGLRACHDFLSQFHVEVVGMESTGVYWRPVWHALCDDFELILAQPAHMKAIPGQKTDKKDAHWIAKLTRIGLLPRSFVPNETIQELRELTRQRKHYVESRNRETNRIHKILQSGGIKLTTYIEDIMGLSGRNLLQLLVDGTPITPRIVHQSVYTSLKKKVPQLLEALDGYFSDHHRFMLKQSLEIYDFYQKQIELLEERINVYLSQYEKHVEILDSIPGIDVITASVIISEVGVDMSQFPTAGHLASWAGLCPGNNESAGKKRSTKIRHGNSYLKKCLCQAAFAVKKQKGSPLADRFYQIQSRRGSQKATIALAHQLLKIAYILLKEQITYPEFLAQKKTTRDELVA

SEQ ID NO: 115836 - protein, 360 aa, unidentified
MDVGQMVADRDVVGGVDTHKDLHVAAVVDELDRVLESRCFATTRHGYKQMLTWMRSFGQLRRVGVEATGTYGAGLLRYMQNAGVEVLEVTTPDTHDRRKRGKNDDLDAENAAHAAFAGRRTVTPKSRDGMVEALRVLKACRKTAVAARRVALQMIHNTVVCAPDDLRETLRKMTRMQLIRTLAAWRPNLTDYRSVGSAYRITLKSLARRYLELHDEIVDLDTMIVAIVDELAPALVARNSIGHGCAAQLLLTAGDNAERLQSEASFAALCGVSPVPASSGKTIRHRLNRGGDRAANSALHIIAIGRLRTDLRTKAYIAKRIAEGHSKLEAIRCLKRYIAREVFSLINQRKREINQSRNAA

SEQ ID NO: 115837 - protein, 392 aa, unidentified
MRYVGIDIASEKHFVAVVDEASEVLLKSTPVGEDESGYSKLFQLLGESSETLVAMEATGHYWKNLYAALAARGFAVALLNPVRTRRFAEEDLQRTKTDAIDALGIARFAAQKRPPASRMPDSATEELRELVRHRDRLVQEFGDKTRQLHRLVDLGFPEFKRYVRQLDSALATAILADYPTAQAFAQARPRGLANLKYDGHHLVGLELATTLIEAAKHSVGAHHGYAYRLQVKHACQDLDLLRQRLRDIDRDIETKLDEHEIGSLLTTIDGIGPTTAAKLIAELGNPADFSSPAALAAYVGVVPATRQSGKALGTRAGLTSIGHAELRHALWMPVLTAVRVNPWLRQHYRRLRANGKLPKVALVAAMRKLLHAIYAVSRDRQPFSPRLAGVPA

SEQ ID NO: 115838 - protein, 399 aa, unidentified
MLAVGIDISKSKSVAAILNQDGSMHTSPFEFHHTQPELDAFIKYILNSNQSATILMENTGHYHYPVLKAFQEAGLPVCIVNAYQIKKFGDMDLRKAKTDKKDAVRIARYALEKSYSLVPYTSMEQKYEDLRFLARQYNQRMLTLKTNKVFLLNLLDETMPGITNILPLTTRTPETSLSVLFINRFKSYDRIKKMGKNRFLDAFEKIARKSRNRQTKTYGLAIYEAALRNITTRGENEYTLAAQDQCLELVCESQKAADSIILKMQTLAETLPEYAVLRSMAGVGDRLGPLILAEIGDIRRFHSGKALNAYAGNDAPPYQSGTFESHNRHISKRGNAALRKYCFEVMQALKLTRPQDDPVYLFLLKKEQEGKPYNVAKMAGVNKFLRIYYARAMETLKQQ

SEQ ID NO: 115839 - protein, 463 aa, unidentified
MTTELFFGVDVSKGYVDICCINQSGSRLGEILRFDDTAVGHKEVEKNLTGLRSKYPEAKMTFGLESSGGLERNWATFFRKYANPFNERVFVLNPLAVKKFLDRSLHRSITDKTAAQGIAQYLRFGIRPEDVPSEESLLGQLSLYRHLRNVIDRSAQMQNEMQSLLPSVQPELVQFCRNGLPDWILEILQKWPTAPALANAEISELDEIPYKKIEAQKLIANAKISVGSQRDSFTGITVSNLAGEILHTEKMIQRMKDELVKSMDHDEGAKIMESIIGIGAWSAACLRLEIGKIERFHSAEALVAYSGLDPRICQSGDSTKHVGISRMGRRQIRAILYPLVLTAIRHNPAIKEFYSRLRAKGKKHMISATACMRKMLHIIYGCWISGKLFDREYENKKCSNKPISKSKESNEQSMETRKINVIPLDAPISRREASKRRKATIMPQTGICRRERGPDVASEIHSK

SEQ ID NO: 115840 - protein, 312 aa, unidentified
MYYIGIDVSKKVLSVFNGKKDLKFINKEGLKSFKKYLKKKYNFSDLIIIFESTGIYSQYLKEFCAENSIKAYMVNPKKSHNFARALDIRPKTDKIDAQIIYQFHKLIEAKDIKIPEIDQQAKALASYLTSYEFAVKQRVALSNHLESLRDKQLIALIKKELIRAKRLEDKIFNDIKEYIRQNQNLREDYQRLLTISGVGEKTALALLTLFKTYQGTNRAQITALVGLDPTRRESGTSVKGKVKISKNGKGIYRKIPYLPTICATVHNRKIRIFYQRLLAHHKPKKLAIIASMRKILLIAHAMYRDKTEYVAT

SEQ ID NO: 115841 - protein, 318 aa, unidentified
MTQMTHTTALYVGIDVSQKTLTIALYPTDEVWTIDNTSQHHTALVQHLAQLPIQRVLLESSGGYEKAVVSALQQAGLPVVVVPAQRARYFAKSMRGDLKTDRADARMLAYFACCYPVQPVAPCSPVQAELKELWARREQLVQQVEREKKRLHTVQSEAVRASLERMLAVLKDEIAQIEARVEALMASDAALAQKAALLQTAVGVGRVVAYGLVAELPELGQVSHRAIAALAGLAPVRCESGDWVGRARVRGGRPRVRRLLYQAAVVAVSHDGRWRAEYAGLLGRGKVKKVAFCAVARQLLVVLNAMVRDGRAYERVSE

SEQ ID NO: 115842 - protein, 308 aa, unidentified
MTSTGERRWEHRWPTTEAGVAALLTQCGPQSRVAVEASSPTWAFVDRIVGSVGVVQVVDTRKTRIKAGYAAKTDRLDAQRLADALRRDSVVGIYYPPPAIRDLRELCRYRCHLARLQASVKQRLHALLMRQGIPTPRALFTQRGARWLDAQPLDGWAGQELRGLRQVLADVRTQLVPLLTAMRTIVASDPIAQALDRRPGFGPVLSVTVRAEIGAIARFPDGRHLASYAGLVPRVERSGGRPWSGRITKTGSAWLRWTLIEAAIHQFRRQDDFGRWARRLAIRIGGLKARVAVARGLCDEVFLAWPRL

SEQ ID NO: 115843 - protein, 340 aa, unidentified
MSHIAMDVHQKRSVSACQTPAWKEPKLVRCFTTRASLAEMLSELPRPWIVCLEATRQSPAVVRWLRELAVDEIHLVDPKGLKAFLQGKPKSDARDAKEMLALLQIGRLPKAYLAPPAVQELRALTRVRGYVRRGSTSLRNQLRALLNQHGLEVPARDLCGVGGRAQLAASIAALGAHGQTAAQQLSPLLWATESALDVLDAAVCEELARQPVARALMALPGIGPVMALALVAELGESERFEDPEHLISYAGLAPRANDSDEHQGARHLPQRCNKRLRHLATQAAQAACRSRQDSHARRAYQRLRGRGLHPNTAKIAAARELLKDIFYSWKRAITVTEAAA

SEQ ID NO: 115844 - protein, 402 aa, unidentified
MNAVGIDVSKGKSMVAIMRPFGEVVATPFEIKHTTSDINSLVKFINSVEGESRIVMEHTGRYYEVLAHQLSEANLFVSAINPKLIKDFDNDSLRKVKTDKADSVKIARYALDKWQNLKQYSVMDELRNQLKTMNRQFGFYMKHKTAMKNNLIGILDQTYPGVNTYFDSPARSDGSQKWVDFASTYWHVDCVRKMSINAFIDHYENWCKRKKYNFSKSKAEEIYGKAKELVPVLPKDDITKLIIKQAVDQLNSASITVESLRTLMNETASKLPEYPVVMAMKGVGTSLGPQLMAEIGDVSRFTHKGAITAFAGVDPGVNESGSYEQKSVPTSKRGSSDLRKTLFQVMDVLIKTHPQDDPVYQFLDKKRAQKKPYYVYMTAGANKFLRIYYGRVKEYLASLPES

SEQ ID NO: 115845 - protein, 322 aa, unidentified
MSASAVFVGIDVSKAHLDVAVRPTGDEWRSQNTETGVNEVVERLKKLAPDLVVLEATGKLESPVASGLVVQGVPVVVVNPRQVRDFAKSTGRLAKTDVLDARAIAHFAEAVRPEPRPLPDEQANHLSSLLSRRRQLREMLTAERNRLGSADRKMRRRLKVHIRWLNRELLEIDDDMDGAVQESPLWRVKDDILKSVPGIGTVVSITLISELPELGALNSKEIAALAGVAPLNRDSGTLAGRRTVWGGRARVRTALYMAALVASRYNPVIREFYLRLCERGKPKKVALTACMRKLLLIVNSMIKNKQMWNPAIAEIRGMPISA

SEQ ID NO: 115846 - protein, 363 aa, unidentified
MPMLAELVDAVVGVDTHRDTHHVEIALPTGAPIATCTISNDTRGFTGLLAWIAEHAPGPAGQARLAVSIEGTRSYGLGLSRAVRAAGLAVIEAEQPTRKTRRGRGKSDPIDAHLAVLGALQLDVDRLPTPRADGDRDALRILLGARHDLTVTSTGQINRLRALLRDGDDADGQLARGALTATTLTTLARRRLPLHADRAHAVRHDEIRRLALAVRDAHRALTANRAQLQTIVDDLAPGLTERHGIGPVSAAQILVSFSHPGRVHSEAAFAALAGVSPLEASSGRTVRHRLNRGGDRALNRALHTIALTRMASCPRTRAYVARRTAAGKTPREIRRCLKRYIARELYRALTATMITTKAPKPPA

SEQ ID NO: 115847 - protein, 413 aa, unidentified
MDVLHPRCCGLDVHKSSISACILLREAGRVQKHQRRFGAMTQELQELAEWLRQFGVSQVAMESSGVYWKPVWNILEGQFTVVLANAQHIKNVPGRKTDQKDAEWIAQLLQYGLLRPSYVPCEIIRDLRDLTRMRASLSQEASRISNRIQKVLEDANVKLASVATNVLGKSGRAMLEDIISGEDDPEHLASLALGHLRAKIPRLRLALEAKIRSHHRFLLRRLVDQIQFVEHEIGLLDERLEEIAQQRPELSQAVARWDTIPGIDRVAAWALLAEIGDNMAQFPTAGHLASWAALCPGNHESAGKRLRGTTRQGSPWLCRMACQCAWAAARTKNTYLSSQFRRLAARRGKKRAIIAVAHTIIVIGYHLQKNQSNYEDLGGNYFDRIHSDGLKRYLVKRLQQLGHKVTLEPMQAA

SEQ ID NO: 115848 - protein, 340 aa, unidentified
MTITTVGIDLAKNVFAVHCIDQNGKAVLVKPKVSRAALSELIAGLPPCVIGMEACSGAHYWARLFRQYGHDVRLMAPKFVSPYRMAGKTGKNDAADAIAICEAVQRPHMRFVPVKDESQQAMQCLHRTRQGFIQERTATYNRLRGLISEFGVIAPQSTDALRHVVSDHKETLPVQVRLCIDDLLTHVTNIEEKIAEYDRVLSRVAKTDHRSQQLMELKGVGPTTASALVASIGNAHDFKNGRQLAAWLGLTPSQYSSGGKSKLGRITKAGDAYLRTLLVQGARSVMVGAENRTDPFSRWVCSLIGRRGYWRAVVAIAAKNARLCWASLHYGDDFRLYSTT

SEQ ID NO: 115849 - protein, 426 aa, unidentified
MESVHRSCVGLDVHKKSVAACVRRLDSSGKVHKHFRQFGTMTGELEELVAWLKSHEVTHVAMESTGVYWKPIYNLLEERFEVLLVNAQHIKHVSGRKTDMKDCEWIAQLLQHGLLEASFIPERLQRDLRDLTRSRVKCVEQRTGVANRIHKVLQDANIKLSSVATEILGVSGRSMIRAIIAGEEDPEKLANLARQSLRGKIPQLKEALRGKVRDHHRFLLETLFEQLISTEETIEKYSKRIDELLGSEPFVERAEEDKPLPFGEATTLLRTMPGISRVAAHAILAETGTDMSQFPSAGHLCSWCGISAGNNESGGKQRSAKIPKGNRWLRRILVETALSAGRSKNTYLSAQYRRLASRRGRKKAAVAVAHSMLESIYHMLKRHVEYQDLGPHHFDTLEPDRLTRYLVKRLENLGHKVTLEPRAMSA

SEQ ID NO: 115850 - protein, 344 aa, unidentified
MLNDTLVGVDIAKAVLQLALSSRPGRFDAHRRLTRDQFLPFVAQLPPAVFVLEACGMAHHWARKIRQLGHEVVLLSPHLVRPYVRRNKTDRTDATALVEAYRHGTIRPVPVKTPEQQLLTSLHRLRAGGVRQRTARLNTLRGLLREQGFFIPVGAKQVLPAVWSIIEDAESELAMPLRALFAEVCAEIREIERRIERVEDQLQALARELPAVQRFLKIPGIGLIVATALVGFVGDLRRFPSARHFASYLGLTPREYSTGLRHRLGRISKRGDAYLRMLLIHGARAVLTRAAESERPDRLRAWVLALRGRAHHNKTAVALANKMARIAWALSVRDTEYRIVPAAA

SEQ ID NO: 115851 - protein, 389 aa, unidentified
MKIYVGIDIAKLNHFAAAISSDGEIILEPFKFTNDADGFQLLVSKLESFDKNSLIIGLESTAHYGDNLVRYLVTELYQVCVLNPIKTCQMRKNNVRKTKTDKVDTYVIAKTLMMQDNLRFVSFFDLDMMDLKALGRFRQKTIKQRTRLKIQLTTYVDQVFPEIQYFFKSGLHQHAVYALLKEAPSPKEIASMHMTHLANLLKVNSHGHFTKEQAKELRVLAQKSVGANDSAISIQITQTIQQIELLDSQLEKIEAEMTDIMKFNDSVIMTIPGIGYINGGMILGEIGDIHRFSNPNKLLAFAGLDPSVYQSGNFQAKTTRMSKRGSRVLRYALVNAAWNVVRNNATFKAYYDAKRAEGRSHYNALGHCSGKLVRVIWKMLTDNVEFNLK

SEQ ID NO: 115852 - protein, 386 aa, unidentified
MTQPYDPTKPPVALEHDGTLVVVIEMSQASWLVAAIVPGVARRPLQKLKPDQEALLRLLTRWREEAAEAGKPVTRTALAFEAGRDGFWLARWLRARGVEAHVIHANSVAVAREHKRAKTDRLDTILLLRAFLGWLRGEPAHCRMAAIPSLADEDDKRPSREREHLVGERTRLVNRLKAVLVRLGIRGFKPTLRKAAGRLDALRTPDGEPIPPNTLSEMRRDLERLRLIREQIAAIEAARLERLARAPATGPDAMVRLLARVRGLGIDTADMLVREVLARDLRDRRAVARYAGLTGTPDESGRRRREKGLSKAGNARVRRGMVQLAWRFLLFQKDSALAQWYRSRTESARGGVRKVLIVALARKLLVELWRLVVAGQVPRGVLLQPA

SEQ ID NO: 115853 - protein, 341 aa, unidentified
MNHYVGIDVSLEASSLCVVDANGKIVREGKVASEPDALIAWLRGLKLELTRIGLEAGPLSQWLYAAMRQAGFAAELLETRHVHTALETMPVKSDRNDARGIAQLMRLGWFRPVHCKSMAAQETRALLTARKLLQTKLHDLELSLRGILRGFGLKVGPTTPVHFEGRIRELVAGHPSLEVIADGLLAARVALRRGFDRFEKQVRDAARRDTRARLLMSIPGVGAIVSLSFAAAMDDPARFKSSKQVGAYFGLTPTKYQSGETDIDGRISKIGDASVRAALYEGAHIILTKPLKGCTALKSWAMKIAKRSGMKKAKVALARKLAVIMHRMLADGTSFRNAAAV

SEQ ID NO: 115854 - protein, 391 aa, unidentified
MFYIGIDIAKHNHEVSIIDDNGKALGKSFSISNSQKGVDKFNTYLDSFNITSENCVIGMESTGHYWINLFSFLVNLKFNVFVINPIQSDAFRKMYIRKTKNDSKDSYIIAQIMRFGEYSSSNISDENIFALRQLSRYRTSLVDECSSWKRKIISILDQVFPEYSNLFSDTFGVTSKELLSKYPLPENMLELSTEELTNLLNKASKGKLGNEKAQEIKESAKNSFGVSFAKQTFSFQIKQIINQISFIESQLKELDNEISNMLKELNSEITTITGIGDTLGACILSEIGDISRFEKASQLVAFAGLDVAVKQSGEFTGTEMKITKRGSPYLRRAIWLAATVASFKDPALSIYYKSLIARGKKHLTAIGAVSRKMCNIIFSVLKNKKAYTPNI

SEQ ID NO: 115855 - protein, 350 aa, unidentified
MYYVGMDIHKRFSQVAVIDESGEVKDRRRLNHTPKEELIEYFNQFPLDTQVVMEPTCGWGWLSDGILDLGLEVILAHPSKVRLIAESRNKSDKVDAVVLAQLHRTGFLPQAYLAPPEIRKLRDLFRCRCGLVRMRTSLKLQIHALLDRLGILHSFSDLFGKTGRAFLENLKLESPYRENLDRQLRVIDLLSKEIKQIEEVIKSRVKEDPQAKRLMTIPGVGFILAYLFHSEIGDVNRFPSKEKLSSYCALVPSVRQSGGFVQRGHLVKTGNTLLRWGFIEAAQSAIRFNPELKYWADRIKAKKGAGVAICAVARKLVHIVYQVLSQKRDYQPRGIRTHRSSRPGSNLVTK

SEQ ID NO: 115856 - protein, 402 aa, unidentified
MNAVGIDVSKGKSMVAIMRPFGEIVSAPFEIKHTASGINSLVELINSVEGESRIVMEHTGRYYEVLAHQLSEANLFVSAINPKLIKDFDNDSLRKVKSDKADAVKIARYTLDKWQNLKQYNVMDELRNQLKTMNRQFGFYMKHKTAMKNNLIGILDQTYPGVNTYFDSPARSDGSQKWVDFASTYWHVDCVRKMSLNAFIDHYQNWCKRKKYNFSQSKAEEIYGKAKELVPVLPKDAITKLIIKQAVDQLNSASTTVESLRTLMNETASKLPEYPVVMAMKGVGTSLGPQLMAEIGDVSRFTHKSAITAFAGVDPGVNESGTYEQKSVPTSKRGSADLRKTLFQVMDVLIKTHPQDDPVYQFLDKKRAQGKPYYVYMTAGANKFLRIYYGRVKEYLSSLPES

SEQ ID NO: 115857 - protein, 414 aa, unidentified
MKLFVGIDVSSEQLEACFMNMEGDSLDTLLVKNNLAGAQYLRDRILSHADKLPATEIHVGLEATSVYSWHPAMYLHEDEALKARKTKVFTINPKLINKFREAYADLDKTDRLDAWIIADRLRFGRLTTTIVMQERYLALQRITRMRFHLVHNLTREKQYFLQNLFYKCNAFRSEVDSSVFGHAIMELLSEKYSLDEIASMEIAALADYLQEKGKNRFPDPEGVAACIQKAARASYRLSKVMEDSIDLVLGTSIQSIRSIQAQLKELDKAIEKMLDGLPGAKCLRSIPGIDLVYAAGILSEIGDIERFDDQAAVAKYAGLVWRKHQSGPFEAEETKRIRSGNRFLRYYLVEAANSVKNRDSEFGAFYRKKFKEVPKHQHKRALVLTARKLVRLVDALLRNDQLYTPKRKVMTAKD

SEQ ID NO: 115858 - protein, 351 aa, unidentified
MIIIGCDFHTRFQKIAMVDTEIGEITKRRLEHGNGEARAFYAALPGPARVGMEATMNAQWFERLLQEYHHELWVGDAAQIRAAAVRKQKTDDRDALHILDLLVRDKFPRIWIPSPENRDLRQMLRHRDKLVRIRTSVQNQLHALAMSQGLCRKAKLWTKAGRKELEGLPLDPWASRRRWELLQLFDQLDPQIDELDKVVIQEAEKRPAAVHLMTQQGVGPVTALAFVLTVGPVERFPTSKHLVSYLGLNPSEDSSGGRQRLGAISKQGNSIMRHLLSEAAQTAVKFDPELRRDYLRLKFRRGISGVAKVAIARKLAVRLYWKLREVAQPNTAARMQGSPTSPMVEATPSRN

SEQ ID NO: 115859 - protein, 401 aa, unidentified
MKRLSGGIDVGSGSHHITILDEEDNVLYNQKISHKLNVFTENIKLFKQIEKRERGKISFALEGKNGYSAPFDRILLAQGFTLYNVDNFKLKRFREAFAGEWRDDQRDSLMLSKMLKLKDHINSPREKVFIKIEKPSPVTESLKLLSRHQQTLIDEKIRMMNRLRKKLLEVCPQILESGKLKNKKTIAILAKYPDFSKYKRITLCSLLKIKGIGKKGAFFLLKRLNHIEYMPGLTDIYKTIILSYAQRILELQKEIEDIDKKLDEIGEKNKEVNHLKTIPGVATKLASRLIGETGDINRFPSEKQLAIYCGVACVDNDSGKVTKARAVYKANKICKQTLITMAGCSIRSIHQCKAYYLKKRAEGKAHNHTLRCLARQLIKVIYRMLTEDRDYIVRKELKKVA

SEQ ID NO: 115860 - protein, 364 aa, unidentified
MDVHTTNFTFCCYTADSDRGFAVAQTEPDYRQVIKYMERVQKQRGEECKFVCGYEAGCLGYSLYHQLTRCGVDCVILAPSTMHQEKGKRIKTDRRDAENIARRLAFSLYSPVYVPTTEDDAVKEYIRMRDDIKADLKRVKQQIIAFTTRHGFAFDGKSYWTQKHLKWLETLVFEHPLYKETLQEYLILYYMLDEKVAVYDTRIEEMSHLEHYEENVQKLCCFRGVAAHTALSLLVEVGDFQRFRSAKHFAAYLGLVPGEHSSSDKQIRTSITKAGNTHLRRLLVEAAQSYNRGAIGKKSAALKARQGGNPAEVIAYADKANERMQRKYYRIAFKSRHNIAKTAIARELACFVWGMMTGNISNAA

SEQ ID NO: 115861 - protein, 342 aa, unidentified
MKSATTIGIDLAKNSFSVYGVDDKGKTVLSRTLTRAGVVRFFANLPSCLVGMEACASSDYWARTIESLGHEVRRIHPQYVKAYLLGAKNDTNDAAAICEAVQRPNMRFVPHKSPEQIDIQCIHRTRQGYIKSRTALVNQARGLLAEYGIIIRQGISAIRNQLPLIIADEENALSGLMRRNIASLYESICFFDSQILEQDKLLKTVAKENEACQQLMQVPGIGIMTATILLTVAGVASNFKNGREFAAFLGLVPRQNSTGGKTRLLSISKRGDCYIRTLFIHGARSAITRILAGQTPKYRPNPWVIELIARRGRNKACVAMANKAARIAWSMLAQGTEYRHAA

SEQ ID NO: 115862 - protein, 454 aa, unidentified
MSRRKKKAKKFLVTNLPAQLRHVNLDAAGIDIGSDRHLVAVPAGRDPVSVREFGTFTSDLEALADWLAQCHISTVALESTGVYWIPLFEILESRGFEVKLVDARRVKNVPGRKSDVLDCQWLQELHTYGLLAGAFRPPDQVCVLRGYMRQREMLVQAAAMHIQHMQKALQQMNLLLHNVVSDITGTTGMKILKAIIAGERNPKVLASHRDPRCQNSAETIAKSLVGNYREEHLFALTQAVELYEIYQSKISACEVAIARHLAAQSASTDEPPPPSGKRVQAKNIMRGGINVRDQLFKLTGVDLFSISGLGADTLLTLVGEVGVDMRAWKTEKHFTSWLALCPGTRTSNRKTLSTKTRRSSNRAAAAFRIAATSLGRSKTALGAFYRRISARVGRPQAVTATARKLAVIYYSMLKFGTQFVEFGQATYEQKYQQRRLKAFKQQALAFGFQLVPIK

SEQ ID NO: 115863 - protein, 326 aa, unidentified
MQGKEASEQETKANSNVGIDVSKDWLDVHVLPAEQRLRVPNTCEGVRQLKRWLKRFDLALVVVEATGKWHRHVQRSLVASAIRVAVVDPFRVRMFAKAQGIFAKTDRLDARVLALFAAMMTPSVRPPAPQALADLAELVTARMSAVEAQTALKNQRSAATVKFLLRQLDRRIERADKDIAALDAAILKRIEADQGLARRYAILTSIPSFGFVTAAVLIACLAELGSIIAKQSSMLAGLAPIADQSGKREGVRVIFGGRPRVRRALYLAALSAARFNADIRAFYKRLRAAGKRPKVALVAVARKLVVLANTLISQDRLWQPHPPKYA

SEQ ID NO: 115864 - protein, 351 aa, unidentified
MQYIAFDSHKRYTWALVQDEEGKVVEERRIEHIPGALAGFLERWTPGSPVAVETVGNWYWITDEIEAAGMIPRLVHARTAKLMSGKVNKTDQLDARSLNRLQRSGTLPTVWIPPRELRDQRELPRTRMVFVRMQTALKNAIHADLAKYNLRAQGVSDLFGVRGRIHLKEMVNELPCETRYVTQLLLAQLGEVQETIQGIERRMHSVFAQSAQLALIQTLPGVAFILGVVILTEVGDVSRFPTGSHLASYAGLTPRVHASGGRVRHGRTRFDVNRYLKWAYAEAANATMIRRRHDSRHVSKLYERVRRRRGHQKAIIAVGRHLAEATHAVLTTGEAYRDPTSLHPEEPMREA

SEQ ID NO: 115865 - protein, 450 aa, unidentified
MWRKGKIKKTGTPTFQCMNPNAAGVDVGATEIYIAVPADRDSQPVRCFSTFTEDLHAAADWWKASKIETVAMESTGVYWIPLFQILEDRGFTVLLVNARHVKNVPGRKSDVSDCQWLQYLHSVGLLRGSFRPDQEVCTVRSILRHRDSLVQMAATHVQHMQKALDQMNLQLHHVIADITGFTGLAIIEAILAGERDPHALAALRDGRIKASADTIAKSLVGDYRREHLFTLGQSLKAFRHYQELIGACDREIEKSLETFESKVDPESPLPKSLTDVKRLKGDPRFELRTHLYRVFGVDLTQIPGVNVLTAQTLLAEIGPDLSRFASAPTFTSWLGLCPDNRVSGGKVLSVKTRKVKNRAATALRIAATGLYRSQSYLGHYFRRMRAKLGAPKAITAAAHKIARIVYLMLTTRRPYEETIWVKNEAANRVRVEARVRKQARDLGFQLVAAS

SEQ ID NO: 115866 - protein, 378 aa, unidentified
MTIHRNDDCPGLEEGMRISVGVDLHKTQFTVAARGAETLHGQYATTKEGYAAFLEQLGRLRKRGAEVRLAVESTGNARYFKRQMAQEGYPVVVINSLKFKVINESVKKTDRHDAATIAEFLEKDMLPEAWLCDEQTEALRRLLKTRSVLVRARVTIQNQIHGMLVSIGMEDKKAGLQSKRGRQEMLDALKSAGYGLEVHALMETIDMLSERVKMLEQEIAKKVRGDRDVQLLRTIPGCGLLTASTIRAYTDDIRRFVSYKQYAAYAGLVPWVQRSNETVHYGRITKRGPEALRTAFVQLVLGMVRNRRKTGSYRLMHDYTAMKGSKSTGKAIIATARKLAKIVWSMLMEGKAFDPSSMRDRRIWEKADAMRTSIAQSA

SEQ ID NO: 115867 - protein, 349 aa, unidentified
MVVIGLDAHKRTHTVVAVDGTGRKLGERTVSTSPAGHLELLRWVRRWRERTWALEDCRHLTRRLERDLLAAGERVVRVPPKLMAGTRRSNREPGKSDPIDALSVARAALREPGLPTARLDGLERELRLLVDHREDLVVDRTGHQERLRWFLVELGIAEPPARSLDRAVVLDRLAAELADRTEPVARFARDLLIRIRELTAAVDALEREIRVLASQVAPSLLALTGCGHLTAAKLVGQTAGITRFRSRAAFARHNGTAPVPVWSGNTVRHRLNRGGDRQLNVALHRIAITQLQRPGPGKEYLAKRMAAGDTKTEAIRALRRRLSDEVFRRLMTDETDRIQALTALTVAAA

SEQ ID NO: 115868 - protein, 409 aa, unidentified
MDPLLERCAGIDVHQATMVVTVRVPTPGGGRAIHTQTFGTMMVDLLTLRDWLQAHGVTHVAMESTGVYWRPLYFLLEDDFTMLLVNMKHLTHVPGRKTDVQDSEWLAQLLECGLLRGSLVPPAPIRDLRELTRYRKRQIEDRAQEVNRLHRLLEDAGLKLATVMTDIMGVSGRAMIDALLRGATNVAAIAELARGRLRAKLPALQQALGGRLRPNQAFLAGHILAKIDFLEETIDHLTVEIDRQVVPFEPAVARLMTIPGVARRNAITILAETGGEMSRFPTAAHLCSWAAMCPGHDESAGKRRTGKTRDGNRYLRGALVEAGLACTRARGTALQARYYRIKRHRGHKKAVIAVGHQILEITYYLLRDETTYHELGADYFTRRDRDRTTRRHVKQLEALGYVVTLNPAA

SEQ ID NO: 115869 - protein, 317 aa, unidentified
MLAPTVFVGVDVAKATLDVAVRPAGERWSVANDEPGIQSLVARLLPLGPVLVVLEATGGFEHAAAAALGAARLGVVIANPRQVRAFARAIGQLAKTDAIDAQVLALFAERVQPTPRPLPDEAAQILDALLTRRRQLVEMLVAEKNRLSAARRPVRHGIRQHIRWLERQLGDVDHELEEAVQASPLWRAQDDLLQSVPGVGPVLSRTLLAELPELGRLSRKEIAALVGVAPLARDSGTWRGRRAVWGGRAPVRAVLYMATVAAARCNPVIRVFYWRLRAAGKPAKVALTACLRKLLTILNAMVRTQSPWRPRALEVTT

SEQ ID NO: 115870 - protein, 480 aa, unidentified
MAATKKAKADTDGNSAGAAAEHGGDGAEVAEDLVQVVERAAAIDVAKGSGMVCTRVPGSRPDRRRQKVWQVGATYGAVTALMDHLRCEGIQRLVLESTSDYWRIFYYLAEAAGLEVWLVNARDVKHLPGRGKSDRLDCVWHCKLNERGMLRRSFVPPQAVRDLRALTRTRARLAQDQARYQNRVEKILEDALLKISVVISDLFGASGRRFLDALVAGERSPAALAALGDTRLKATRKELEDALTGRFRDIHAFEISTHLRLIDAINDEITQLDEAIGQQLAAIPGTAPACVACGLAGGDHAPGCAGEGTTPLGLAERLDEITGVGAVNARAVIAELGTDPSQFPTPGHAAAWARLTPRTMQSGETTRPGRTGKGNRYIRGALGQAAMATARTDTRLGAMYRRIARKRGKQKAIVAVSRLICEIAWILICDPAARFEELGPDYYSPRSPARQTRDKIREIERLNPGKKVILADAGPEAGAA

SEQ ID NO: 115871 - protein, 357 aa, unidentified
MESQEVKYVGVDCGKKSIEVVRINSENSLERRQFSTTESGINNLLQWLTLNDIVGLEAGSQSFRIAKSILNKGIQVIVLNPGNLATIYQSLKKTDKEDSLKIARLIQRHPIEELPTVPIPNDEEEDNRRLCSEHENWTKQLTQGKNRLHSLFTQAGLTQITKKHLRTKANREISVALLPSRYQKEAERILKVLDLVEQNLKLIEEEIKEALKKNKAYAQTIMSMPGVGMITSLAIMSYMGNCKRFSSAKQAAYYVGLVPRVDISGDSAYYGRIVNRGCHSIRRVIVQAAWSLVRSQYGGKLKEFYQRLYLKKGAKKSIIATSRKMIEILYTMIKTGELFDSMPEKVLNRKLTQYGLM

SEQ ID NO: 115872 - protein, 364 aa, unidentified
MVDGICFAGLDVHARKTAGAAVHLGSGEVFRAQIVGGPVEAIGWLQSLPGPVRAVYEAGPTGFGLARTARAAGLEVMVCSPGAIPRQPGDRIKTDTRDALKLARLLAAGQLRPVTVPTVELEALRDLVRARENLRGDLMAARHRVSKMLLRRGLVYGGPGHPWESRRHAAWLGSITLSDELAQVVLGEYLACHEVLLARRDRLDGLISGQAQHPEWASLVSRFRCMRGIDTLTAIGLIAEIGDFGAFDHPKQLASFLGLVPGEQSTGEKRRQGAITKAGSSHARRLLIEAAWHYRRHPAVSLTLKRRQEGQSPAAIQTAWRAQLRLAGRWAHLDARRGKRRTTVAVAVARELACFIWEIARQPD

SEQ ID NO: 115873 - protein, 354 aa, unidentified
MKRTAKYVGLDVHQATTVVSVREDTGRVIARTILPTDAPAILEYLRGMRGAVQVALEEGTQAQWLHDLLVPVVDRVVVCDRRGKVTRGNKDDQHDADELAELLRRGGLRAVYHGNPQRAALKEFARTYQTLVEDATRVMLRLKALFRARGIKTPGRSVYRAAERPMWLAQLPEPGVRFRAEALYAELEVLLTLRPNAKTARLAEARRDPAWTVLRTIPFLGPVRVALLLATRQTPWRFRTKRHLWAYAGLAVVTRTSAEYVLHEGQPQRRRRAPMTRGLNRNHNRLVKEVLKGAATAATARPGALQALYQGMLARGMREELARVTLTRKLAALTLHIWKSGEHYDPARLTQRAR

SEQ ID NO: 115874 - protein, 411 aa, unidentified
MNPVVGLDVAKGESQVQAFLDKKKPYKRSFKVAHTIEGLESLHQYLREIENVTGIRPPVVLESTGHYHTPVVQYFEERGYLLIIVNPLISYRAKSSSLRKVKTDLIDARHLCELYYKEDLEPYKKRGIQLLNLRNLSRQHANITGIYVQTKLQFQAVLDQVFPEYRGVFGDLYSVVSLLTLLEFPTSEDISAVEEETVANRINALCPSRSRKWANTKAEKLMAASARNPFQRTLYQSHILSLEMYIKMLLEYQKHLSKFEEEINALAKEIEEYKIIQSIPGIGEKIATTIISEIGEIDRFNHPKKLVAFAGIDPSIFESGKFKGSVNRITKRGSGRLRHALYMAVRCAIRDCRKKKTTDEIIPRNKRLREFYDKKREEGKPFKVAVIACANKLLQWIYALLQNNSTFQDLT

SEQ ID NO: 115875 - protein, 329 aa, unidentified
MPETNPAEVIIGVDTHKHTHAAVALTAVGARLGTITIPVNRKGYQELETWARSFGPVRAYGVEGSGSYGAGLSRFLQAGGHTVIEVNRPNRQLRYQHGKSDPLDAEGAARAVLSGQADARAKPGTHAVEMIRHLKVARDTAVKSRTQAMITLKALIVSAPAALREQLEGLAGKMTLIRHLAALRPDALTSPTASAKAALRALARRWLALDAEIKAHEAHLDTLTTACTPTLRAAYGMSTGTAAEMLILVGDQPDRIRSEGAFAKLCGACPIPASSHKTIRYWLNRGGNRQANAALYRVVIVRMRSHPPTLAYVRRRTREGKTKLEIIRS

SEQ ID NO: 115876 - protein, 338 aa, unidentified
MALYCGIDLHSRDCWLAILDEGLKVVQEAKVGNDLEAILHVLEPYREDLEGVAVESTFNWYWLVDGLEEAGYRMHLTNTWAVKQYEGLKYTDDRHDARWLAHLLALGILPEGYIYPKKERAARDLLRRRAFLVRKRTSFLLAMRGAFECRTGMRISSNDLKKWKAKDVEAHMEDPAEAFSITCLLEPMHALSAQIKKIEKGALARGRLRPEFAPLETVWGIGKILALTIMYEVGDVARFRKVGNFTSYCRLVNTARLSAGKRKGSGNRKNGNPYLSWAYSEAAHHAVRHHPEAQKYFQRKRAKTNGIIAIRALAHKLARASYHVMRDHVDFDPEKAFA

SEQ ID NO: 115877 - protein, 340 aa, unidentified
MIKVIGLDIAKNVFQVHGIDEAGRPVLRRKLRRADVLRLFSHLEPALVGIEACHTAHYWAREITALGHEVRLMPPQFVKPYVKSQKNDAADAEAICEAVQRPTMRFVPVKSVDQQAVLLLHRTRDLLIRQRSSLISAIRAHFAEFGVIVGQRMRNIYRLLGLLADGGTTLPELARRMLAVLANQLRDVAAQVMAVEAELLAWHRANDVSRRLATIPGVGPITASAIVATVGDAAQFKSGRQFAAWLGLVPQQRSSGGKERLGRISKRGDGYIRRLMIHGARAVVGWRKRRPLSRDPWLGGLLARRPMNVATVAYANKSARVAWALMVRGRIYDTALARAA

SEQ ID NO: 115878 - protein, 355 aa, unidentified
MIIIGVDFHPEFQQMASVETDTGAFQEKRLAHPEEAETFYRALAAGGQKVRVGMEASGHARWFERLLGELQFELWIGDAAEIHSKRARKQKTDRQDAELILKLMLKDDFPRIWVPSWENRDLRQLLWHRHRMVQARTRIMNQLQAVALNEGLRCKKRLWRAGGRQQLEWFRLAPWASRRRTDLLQLLDGMSSTIAELSQAIEQEAEKCPEAQRLMTHPGVGPLTALAFVLIIGNAERFRCGKQVASYLGLVPLEKSSGNRRRLGHITKQGSSMLRFLLVEAAQVSVRSLPEWRSQYFRLMMRRGRKTAKVAMARRLAIRLYWMWREERDYEQPRSSVRMQDSPEQAMVCTRTPSN

SEQ ID NO: 115879 - protein, 320 aa, unidentified
MSESSKSSPPKPTPVRFIGCDVGKALIVVHEAGTGATRTITHRKADLEAFAAGLDADCLVVCEATGGHEALLLDVLLASGVAAHRADARKVKAFIRSYGTLGKSDDIDARHLSLYARERHASLLRWQMPDPDRQKLQALVLARQDMIADRTAWSNRSKAPGAIHAQPHFKAIIKALDKQISAAELAITTLINGTRTLRQATRALADIKGIGTTTAATLIALMPELGKLDRRKAAALAGLAPHPKQSGANDAYRRTRGGRPQVKKALFMAALSASRSNPLLRQTYERMINAGKRPLVALTAIMRKLVVIANAKLRDIPHPI

SEQ ID NO: 115880 - protein, 344 aa, unidentified
MEITTVGIDLAKNVFQVHAINGTGEVLARRALRRAQVMPFFRKLAPCLVGMEACGTSHHWARELTALGHTVRLMPPAYVKPYVKRGKTDAADAEAICEAVTRPTMRFVPIKSVEQQAALALHRTRDLLVRQRTQLINMIRGLLAEFGIDIPKGITHALAFVRRAVAGGAHEVPGLATKVISALAEQAIEAQDRIRQLERDLLAWYRSSDLAQRIATVPGVGLLGASALAATVTDPTQFRSGRQFAAWLGLTPLNNSSGGKERLGRISKMGDQYLRRLLVTGMTSLVRRNKHHPDAADPRVTALLGRKPIRLVTVALANRAARAIWAIMVRGEIYRMPVPGSAAA

SEQ ID NO: 115881 - protein, 329 aa, unidentified
MNADATSGIDVSAKTLDVSVLRADSDKRKRRKFSNDGQGHQQLIDWLRPFGVTRVVCEATGVYHLDIAFALTAAGVPLMVANPRQVKRFIEARARNTQTDVIDADELAEYARRMDFVPWKAPSINGFELHKLGRAIGQLTKRHTAMLNRLHAARASVHTPKSILKSAEREVQFIERERVKLSKEALRLVKADPDLTRKFELLVSAPGIAEVSALAILAELIVLPPNLAGKAWVKYAGIDPMSKRSGTSVNTNAHIAKRGNARLRGALYMPAMTARQRDPHMRDFADRMIANHKKPIEAIVAVQRKLLLSIHAMFRTNQTWIPQPTPKTA

SEQ ID NO: 115882 - protein, 410 aa, unidentified
MSESPYAFYVGVDWASETHQFTVLTPERRLEAERRIEHTGRALSEMADWLTALADGEPARIAVAIEVPRGPVVETLLERGFHVFAINPKQLDRFRDRHSPAGAKDDRRDGFVLADSLRTDRPAFRQVHVDDPLLIQLRELSRAEEELQTELRRLSNRLWEQLQRFYPQVLRLSPAVDEPWIWALLQLAPTPVAARALRRATLARLLARHRIRRVTAETVLAELHSPALRVAPGTTEAAREHIALLLPRLQLLHEQRGRCARRIEQLLDALEGSDAEHRDVTVLRSLPGVGRVIAATMLAEAARPLAERDYHAVRTQGGVAPITRQSGKSVLVSMRYACNHRLRNALYHWGRVSAQHDPSTRRHYRALRQRGHGHARAIRGVIDRLLVVLMAMLRTGTTYDPARRRVPAAA

SEQ ID NO: 115883 - protein, 482 aa, unidentified
MKATPKEPAPKATGQSTQPNWHQMNRKQRRDMERKIQRADLSLQLVHPNAAGVDIGNESHYVAVPPDRDSQPVRHFGCTTAELRTMADWLKQCGIRTVAMQSTGVYWIPVYDLLEQAGLEVYLVNARETKNLPGRKSDVQESQWLMKLHTYGLLRNSFRPSQQIRRMRTYWRQRKDLIESAGRHIQRMQKTLTQMNIQVANVLSDVSGVTGQAIIQAILAGERDPQKLAAFRDPRVKASEKEIARSLEGTWQEDLLFVLKQEQAGYEFCQKQMAECDRQLEQYLRQLEDRSQGATLPEEMRKDRLQKRKGNKPKFDLRQQLFRMAGTDLTQIDGIDVMTAATILSEAGWDMIKWQDEDHFVSWLRLSPDNRISGDRIIGKGRLPTTNRVTVALKLAASNLRTSQSYLGAQFRRFRARLDTPVAIKAMAAKLARLVYRMLRYGTKYVDRGAQFYEVQQRTRQIKHLKQKAAKLGFHLVQAPAA

SEQ ID NO: 115884 - protein, 350 aa, unidentified
MENIALIGIDLGKNSFHIHCQDHRGKAVYRKKFTRPKLIEFLATCPATTIAMEACGGSHFMARKLAELGHFPKLISPQFVRPFVKSNKNDFVDAEAICEAASRPSMRFVQPRTESQQAMRALHRVRESLVQDKVKTTNQMHAFLLEFGISVPRGAAVISRLSTLLEDSSLPLYLSQLLLKLQQHYHYLVEQIKDLESQLKRKLDEDEVGQRLLSIPCVGTLTASTISTEIGDGKQYASSRDFAAATGLVPRQYSTGGRTTLLGISKRGNKRSELCWFSVRYSYKTGTPVWQVGRLGQGVVVSEKQLCRHLCSGKQAGQNSTGTDGATANLRSIKAEIHQFKQSFIWFCEY

SEQ ID NO: 115885 - protein, 387 aa, unidentified
MYYCGIDVAKHKHAVSLLDEKGQVVKAVFGISNTRLGFDQLLETLQVQPGPIRVGLEATGHYWLALYDELTRKGYPVTVLNPLQIAAYRKTGIRKLKSDASDAVWIADYIRVANLGPTTPDLPVLLQLRELSRFRFRLSEQIGDIKRKLLTILDRVFPEYERLFSSVFLQASRAVLQEAVSAHEFADFDLQELTTLLAEASRGRFGQEKAEKLLQQARQSVGVAFLADAARMEMSCLLAQIHLLEEQRSQIDQAIAELMQQIPQHITSIPGIGPVTGAAILAEIGDIHRFESLDKLVAYAGIDASVYQTGQFQASETHMSKRGSPYLRQALWLAAIAALLHDPSLKAYYQKKRDEGKHHGTAVGAVCHKLLARIFVILKEQRPYVIR

SEQ ID NO: 115886 - protein, 438 aa, unidentified
MSNKVIFNLDELFISVGIDVGADFSWMSIALPNQQFVGKPYKILHNSIDSLATAVSKIKEAEESYSLESRIFLESTGIYHYPLFCYLRDKGFNCSVINPIITKNSTNINIRKVHNDRFDSKKAALVGLKPNLKVSLMPSDLALNCRNLSREYYDLMDNRSAYVNKLQGELRMAFPQYLGIFSKVTINTSLTLLETYTSPSAFLEADKQEIIDIIKSTARFGLTYAQNKYNTIIQAATDANQFGYIIDSNIKRIRLYISFIRKYDEAINSILESLHELVDANEDTDFVKQIHLIETFKGAGFLSAVSIMGEIGDFSAFSKPKQLFAYFGLDPAVKQSGKFEGTKVQMSKRGSAIARRVIHTLTLQSISISRNGEAKNPVLREYYIKKCDSKPKLVAMGAVSHKVCNMIFAILRDNKPFKIIAPHEHIKQYNAAKCDIAA

SEQ ID NO: 115887 - protein, 397 aa, unidentified
MDAAGRRLAAARLPEGVAGITRLHEMIGAQLGEDAGAGEDAGAGEVAIGIETDRGPWVSALVAAGYTVYAVNPLQAARYRERHGVSGAKSDKADAHTLADMVRTDAHQLRPVAADSPHSEAIKVVARAHKTLIWERTRHTLRLRYVLREYFPAALEAFDDLAAPDTLELLAKAPDPASAAKLNRSQIRAALKHARRRDIDMKTTRIQAALRSQQLGRAPVITAAYAATTRSIAAVLATLTEQISTLRGQVETHFGRHPDAEIILSQPGTGVLLGARVLAEFGDAPGRYADAKARKNYAGTSPITRQSGKRKITHARFVHNDRLVDALMSQAQSALLASPGARAYYDKQRARGLDHHAALRQLANRLVGILHGCLKTRTLYDEATAWSHHNQDQRTAA

SEQ ID NO: 115888 - protein, 394 aa, unidentified
MRLWVGFDVGKAFHWVCVLDDEGEVLLSRRVEATERDIERCCEQIAALGGPGERRAATDLLGGPAALLEAVLLGRGERLFHLPGMAVNRARDGYRGESKSDARDARVIADQLRMRWRSLQEVRPREDEAAELRALVAYRRGLVEDQARVITRLRALLLEVFPGLEATLDLSTDRALLATTRVATPSAARRLGTSRLARWLKDRGVRRSEELAGKVIVAAKEQRRELPAAQAKAALVSEMAAEVLRARGRVAAVDARLEELMAARPEAEVVRSMPGMGPLFTAEFLSEVGDPSRFASADALAAAAGLVPATRQSGGASFQRRARRGNRTLKNLFYRSAFSCTVHHAPSRAYYLRKRAEGKPHHRAVIALARRRVNVLWAMLRDGKLYQEPILDAA

SEQ ID NO: 115889 - protein, 456 aa, unidentified
MDTLHRVCAGLDVHKDTVVACVRRLDDRGRPHQEVKTFGTTTADLLELLDWLLGQQVPIVAMESTGVYWKPIFNLLDGPVEVLLVNPEHIKKVPGRKTDVKDCEWIAQLLQHGLLKASFVPPRLIRDLRDLTRQRSQLVGEKASVSNRIQKVLEDANLKLGSVASDVLGVSGRDMLRALIAGVDSGEALANLARGRLRDKLPQLRKALTGRVTEHHRFLLGMHLDHLTHLEALIGRLDQRIGKEMEKDRPPEPPEPKPPGVSPEPASAEKPGTPVDVQGSSAQAAKDSGGLGLWQSLWLLVTIPGINRRTAEVVLAEIGTDMSRFATPQHLASWAGLCPGNNESAGKRRSGRTTHGDKWLRSILVQAAWAASHTKATYLSSQYRRLARRRGKKKALVAVAHTLLVMCYEVLKKGEAYHELGADYLDKLEPDRRTNQLVRQLEKLGHKVTLEPKAVA

SEQ ID NO: 115890 - protein, 348 aa, unidentified
MRQETKVYVGLDVHKEFCQACVMNESGRVISNSRFSSTKTGLDSFLKQFEDAKFVLESTGIWEFIYEGIEERGFEVVLAHPLKVRAIAEARVKTDKVDAQTLAHLLRADLIPRSHVPPRDIRNLRQLVRQRAYLVRHTTSLKNRIHAELLRHGVRRPGDIKSAFTKGHVQWMRSLRIPTIESNLNCLEGIQSQIENLNSLLLDEFNSRKEAQLIATIPGVGYYGALLILAEIDDVHRFSHPNKLCAYAGLVPKVHQSASSVWHGRINKDGSKYLRWILTEAVHSHIRFCPESNLSRFYSRVAKRRNDQKAVVATAKKLLCTIYWMLKREERYHSQGSDLGEKAASSNA

SEQ ID NO: 115891 - protein, 424 aa, unidentified
MNCTQNERINQVSEQTLVIGVDIASELNYARAFNWRGIEKGKVFKFFNNLEGFQAFNEWAHQVMSANKLTNLIVAAEPTGHYWFGLADYLKDEKLKLVLVNPFHVNRAKELDDNHPSKTDAKDPKTIAKLVIEGRYMEPYIPEGVYADLRIMYNCRQKVTKAMISLENQLKRWFRIYFPEYLSVFGNLSGQGSMAVLEKAVLPEDIISLGVDGINKLWRERKLRAVGMKRAESLYEAAVKSIGRREGSVGGRAEFRMLWEDYCHKMEQMEKLNIELESLLHKVPQAEEVLKMKGIGVVSVAGFFAEVGDLRRFESPKQIQKLAGLAIRENSSGKHKGQTTISKRGRARLRAVLFNAAIALVGRNGAFKSIHEYYIGRKANPLKKKQSIVAVSCKLIRIIYAICRHKEAYDEAKMLRDIRREQLA

SEQ ID NO: 115892 - protein, 338 aa, unidentified
MTLYCGIDLHSNNSMVSLIDEQDRVVSEKRLDNQLETIDRFLLPFREDIAGVVVESTYNWYWLVDGLMEQGYPVQLANTLAIQQYNGIKYTNDATDARFLAHLLRLNILPTGYIYPKATRPVRDLLRRRLLLVKQRTAQLLSLQSMIGRHTGRRLSGLQVKQLKRDDLAGHFGSEPALYAAQHHHRLIQQLTTPIEDIEAFVLARCRDSVQYSLLTSTPGIGKILGMTILLETGPIERFPHVGQYSSYARCVLSDRISNGKSKGKGNTKNGNRYLGMAFVEAAHYATIWEPRIKRYYQRKCRKVPVMVAKKTVANKLTRACYHMLKNGTPFDVTRAFG

SEQ ID NO: 115893 - protein, 417 aa, unidentified
MALKIVYPICCGIDVHKSFVVAFIATTDDKGVTTYKKHRCSTFTGDLRLLAAWLAKNNCQDVCMESTGKYWIPVYNMLEPTCRIVLAHPKYVKAIRGKKTDARDAKWIADIFKHGLVSGSFIPPFEIRQLRDLMRYRVKLTNFTTGEKNRAQNCLTVSNIKLDDVFSDVFGKSASAITEQLLQHPDGTFDVAPLIDRRCKASPEMIQAAIDGLMCSEQIEKLKIIRSHMDSLEFCKSNLESAIFSLAEQFHPQIELIMTVPGIQLFSAIAIISEIGVDMSVFPTAKHLCSWAGLVPQNNESAGKKKSTRISRAGAYIKPLLVQCALAICKSEKHPEIKNRYLTLKKRRGHKKAIIAICRMLLTAIYAILQKSEAYDPDLYRKVVSVPDNRSITIEQAVAFVRRHGFIVADADGVLAS

SEQ ID NO: 115894 - protein, 352 aa, unidentified
MAEKFNSVITVIGIDIGKNSFHVVGLDERGAIVLRQKWSRGQVEARFANMPACLIGMEACVGAHHLSRRLRALGHDARLMPAKYVRPYSKGQKNDFRDAEAIAEAVQRPTMKFVATKTADQLDLQALHRVRERLVGQRTGISNQIRAFLLERGVAVRQGLRFLRAALPGILATRCDVLSPRMVRLIEDLAGDWRRLDERIDGLSGEVDALARQDAGCERLMSVPGIGPIISSAMVAAIGAGDAFDKGRDFAAWLGLVPKQISTGDRTILGKISKRGNRYLRVLFVQASWVVLIRPKSWERYGLKPWIAAAKRRLHHNVLAIALANKLARIAWSVLARGRGFEARSIATAQPI

SEQ ID NO: 115895 - protein, 324 aa, unidentified
MAKRTTICAGIDTGKRKLDVAIDGSSLLLQVENTAEGHKVLLEWLRRHKVKRIGIEASGGYEIPVVTGLRRKRFVVVVFQPAQVRAYAKFHLQPAKNDKIDAALIAACTAAVRKIHAAPDPRLQPFAEHLTLIEQIGEDIKLYKNRIETCRDPRIQKLWKEEISRLNKRERAELKALVAAIRQHPDLAQRLDLIYSVSGAGMPTAVAILVRMPEIGTLSREQVAALAGLAPYDDDSGERSGARHIEGGRKRLRRALYTAALPASFFWNPHLIALYQRLRAAGKVHKSALIACARKLLIFVNTVVARGTPWQNEQPARATNPAAA

SEQ ID NO: 115896 - protein, 363 aa, unidentified
MYYNTIYVGMDVHKNSFTLCAYTIESEMASHFQKTEADYKKVLKYLEFLRTIYGNDTKFLCGYEAGCLGYTLYHQLSARNVDCVILAPTTMLEQRSRKRIKTDRRDAEILATCLAQHNYSPVHIPTATDEETKEFIRMRDDHKLALKKVKQQILAFCLRRGYRYDGNSHWTASHMKWLKALNPEALYKEILEEYLLTYTILSDKLERLDQRIEELASREEYRESVKKLCCFIGVKTHTALSVLVETGDFNRFASAQTFASYLGLVAGEDSSGDDKTQLGITKAGNRHVRMLLTEAAQCYARGQIGYKSKALKSRQSGNSLQVIAYADKANERLRRRYYKMVLAKGKKHNVAKTAIARELACFM

SEQ ID NO: 115897 - protein, 342 aa, unidentified
MEHVSIIGIDLAKRVFQAHGAAADGSVVFRKKLSRGQFLAFLAAQPRCTVAMEACATAHGWGREIGELGHEVRLIPPIYVKPFVKRQKNDAADAEAIAEAASRPTMRFVAVKSEDQQARSMIFRTRDLLVRQRTQLINALRGHLAEHGVVAPQGTAHVKRLADVIGDEAAALPATVRQVGRLYLEQIDVLSGRIDALGKKLRAEAGQAAATRRLQTMPGVGPITAVAIESFAPPMETFRRGRDFAAWVGLVPRQNSTGGKQRLGRTAKMGQRDIRRLLIIGAMAVVNSAARHGAPEGSWLERMLAKKPKMLVAIALANKMARAVWAMMTKQEDYRYPAAVAA

SEQ ID NO: 115898 - protein, 356 aa, unidentified
MMYCGLDAGKKSSHFCIVNEERAVQREGKVRNRVEDLDKVFGVLKPMRIVIEASRKSFWLADQLRRLGHRPVVVDPGKTKAIGASRIKHDKLDARVLAELCQANLLAEVDPPNEQQRLARMPLVARSSMVRARSLLIATAKSLLDSEGIEVPGASSANFPKAVSLASRPLPEAMAAAIHPMLEAIQALTEKIAECEKAIAADARDNPVAQLLRTCPGVGPICSAGYIHAIRDPRRFSSGRAVGTYLGLVPTLYASGGTYRRGRITKCGNRQARWLLTMAANSLLRSRQDSAIKRWGLKLAAKSGRKKAVTAVSRKLAAVLWAMWRKGRPFEHRIADAPRDGAVLQAGGKSRAAAEA

SEQ ID NO: 115899 - protein, 343 aa, unidentified
MLHAGLDLSRKRLDVCLLTEHGELIDHVTAPPDGDGLCALARRVAPFGVPVRGVIESMNGARFVRDTLEEHGWEVLIADAQRVKGLAPLACKTDRIDARVLAELSWRDLVPAIWLPDPTIRRERELARFRLHLVRHRTSLKNRVHATLITFGTPCPVSDLFGHAGRELLDRLAIPDPWRRTVDASLALIDELELQIAQLTVELRRLGADHRYVPLLVTVPGVGWVIAFTIASEIGDINRFASPTKLCGYTGLCPRVMQSGNTDRRGPITKHGPKYLRWALFEVALHACTDPLYRERYERTKKRLGRQRGPKVAQIDLSRKLTEAIWHLLTRNQPFAPAGARFV

SEQ ID NO: 115900 - protein, 482 aa, unidentified
MTPRAEEFEPVEPVRKTRRKRKKRRTKKVRLPASLQQVNLDAAGIDIGAGEHYVAVPEDRDEQPVRCFTTFTMDLYAIADWLKSCGIQTIAMESTGVYWIPLMEVLEERGFEVLLVDPHKLKNVSGRKTDVLDCQWIQQLHTYGLLSGAFRPSDEVCALRAYVRQRAMLIRRAAEHVQHMQKALTQMNVKLKQVLSDVTGKTGMRIIRAILEGERCPATLAAFRDGRCRKDEATIAKALEGTWRDEHLFALRQAVELYDIFQEKIADCDRALEAQLGTFPDAEEAQAPLGKKPKSQASHPLAFDGYGELYRIAGVDLTDVPGLDAPTVLTLLSEIGLDMTRWRDPKAFASWLGLCPGSKISGGKRLSSRSKACANRAAVALRLAAYGLQHSKSYLGAFCRRMKARMGPAKAITATAHKLARIVYTMLLTRTSYVEKGVDFYEQEYRGRRVARPKRNARDLGFQLIPITEKAPAETYAAAAAA

SEQ ID NO: 115901 - protein, 339 aa, unidentified
MQIHSVGIDLGKTIFHLVALGAAGKVLVRKKFTQKQLLTFTANMQASLIGLEACSGAHFLGRALRKQGHDVRLIAAQFVKPFVKSNKNDFIDAEAIAEAVERKNMRFVPIKTDDQLDLQAIHRVRDRLISRRTAVINQLRAFLLERGMVFAQKPAKLKAAMTDILENAEADLTPLMRNLINTLWSEWKLVEQQIEELNDELERISASDAGCTRIRQIPGIGPVVATAIVAAIGNGAAFRKGREFAAWLGIVPRQYSTGGKAKLLGISKRGNVYLRKILIHGARAAVLRIKRDRAPIGAWLDALDSRAPKNVVVVAMANKLARIAWAVLSSGNDYRPVAA

SEQ ID NO: 115902 - protein, 355 aa, unidentified
MFYSGIDLHKNMSFITTLNEKGIVIKQDKLPNDEHTILNYFYSIGKHHKAVVECIANWYWLSDLLNDHGIELILAHAKYLKAISYAKVKTDKVDSATLARLLRINMIPVAHQISPTNRGLRDLMRARLKLVRKNTSCQNSIHRLLEKLNISIPDNRKLHDLSTFDLLVNLPLSSDTQFQMDLLKQQIVLLHKQIKDLEQSLHPRLLPNEDIQRLLWIPGIGKILAFTIYLEIDGINRFPDVKNFYSYCRLVPGSNNSNKKVKHKSGNKDGNKYLKMAFTEASVRSVQYFKEIKQYYQSKARRKHKCIARNIVAGEIAKICYYVLKTKTDFNNTFKGKTLSKRKTMQWPRLTSPDV

SEQ ID NO: 115903 - protein, 345 aa, unidentified
MPIVGGLDIHRKQLTFDYLDTETGEVKRGQVAPADRAHLRAWLARFAGRDDVAFALEGCTGWRYVAEELAAAGVAAHVAEPADTAFARGRKRHAKTDKTDSRHLRQLLAEGRLPECWIPPSLILECRALLETYHDLRAEHTAWVQRIHAVFFHQGAPALGDGALRTDRDLQALRAAAAAHLSPAGQLQVDTALDMLAALEARLDVLRHRLLAAARSLTGARVLASRLYGVGPVTGLAMTCWLGGAGRFSSSRKAVRFAGLDITVWSSDRKGPPGRLSRQGPGVLRWAVYEAGKTHARSSAPDYRYYAAVKDRQDGKRAALSEARKILRQACHILAELGDDALTAA

SEQ ID NO: 115904 - protein, 408 aa, unidentified
MSNQEIIRREQFCQIVKEIHKSNEYLIVGIDVAKDKHHAFMGTVTGKSLLRKLIFENNIDGFSRLLKTVEAIKVQNGLSKIVYGLEPTGNYHKPLATHLIRCESNVVLVTGQAVKYNRQLLDGRWDKNDTKDAANIADLVSRGKGLYYDYPSQSIIEIRALLSLRRRLKKEEHSLRMRIRNNLLAQYFPELDTFYSACESESLAIVGWCLTPDTIASMEFNRFFQMVTKTRRGIAQTLRLRKIHDLAMESIGCPVGPASEYEAELLVEKLKQVRNQIKETNDLIEDFCLEFPEYSYLLTIPGFGPYISARVLASIGDPFRFENRKQLIKMSGYDLCANRSGRTSDKALPVISKKGNSELRYALYQAAKVAAAKVDLFRAYFTQLLIGRERERGIKTKMCVLSWLQKCW

SEQ ID NO: 115905 - protein, 343 aa, unidentified
METIKTIGLDIAKSVFQVHGVDGGGRIVVRRRLTRSRMLPFFAKLPPCLVGIEACNNSHYWARELMALGHVVKLMPAQYVKPYVKRGKNDAADAEAICEAVTRPTMRFVAVKGPEQQSMMMLHRVRLMLNRQRTQLSNAIRAHLSEFGIVASVGRNGVDQLLKIVADPKDDRIPEDARLCLRMLVAQLTVVKQQILENDRRVLASARRTDVGRRLMDIPGIGPLLASAFVATVADPAMFRTGRDLAAWIGLVPKQNSSGGKERLGGISRAGNRYLRQMLVVGAMAVIRFAQRHGTKRPWLLQLLARRPAKVAAVALANKNARMVWALMKSGERYREPSIAVAV

SEQ ID NO: 115906 - protein, 319 aa, unidentified
MGKSKVEYEQVIDKGCGLDVHRDTVVATVMGKGIKTETRTFGTTTSSLNELGEWLQSLKVTDGAMESTGIYWKPVLHVLRAYPLNLIVVNARHIKNVPGRKTDKADSQWICKLLISGLLKGSFIPPENIQELRDLHRYKKKLVGIIASEKNRIIRVLEDANIKLSSVVTDTSGVTASYLIKGLIEGRKDLEKLISECYHRKLQANPQQIKEAINGRLTSHHGFILKSMQKHIASVEAQIAEIDAEIEKYIKDFEKEIELLQTIPGVGKDGAIGIVSEIGVDMDVFPDEHHLASHSGMCPGNNESAGKKKVQKHDMGIKI

SEQ ID NO: 115907 - protein, 339 aa, unidentified
MKVSTLGIDLAKNVFQLHGVGCNGQTVLKKKLTRDKFLPFLMQLEPCLIGMEACASSHHFARVLRQYGHEVKLIPPQYVKPYVKTNKTDAADAEAICEAVARPNMRFVQIKTAEQQAILVLHTERNILIRERTACANSMRAILAEFGIIMPRTLSQLYKKIPEILEEYDNELSPFVRCSVARQLEHLQGVEDQITLIEQELSRWAKTQPACQRVMKVPGVGLMTATYLVASVGNGQQFHSAKQFAAWLGLVPREFSSGGKQRLGRISKRGDRYFRYLLVHGARAVAAVIERHKDNMPWLYRLLNKKAYNVAVVAQANKTARILWSMLVQHTEYRTLSAV

SEQ ID NO: 115908 - protein, 362 aa, unidentified
MAQVRSWAGLDVHAAKVLAATMDSRSGELAVRRLPGSTDEVVRFCAGLPGPVRVAYEAGPTGFGLARALEAAGVGCVVAAPGKIERPATDRVKTDRRDAERVLRLLMIGGLHPVRVPALGEEALRDLVRAREDVRGDLMRARHRLSKLLLRHDVRFDDGGRAWTERHRRWLGAVDLGQRGAQVTLLDYIGAIDALLVRRDTLEATIGELIPDSPWATTVAKLRCLRGIDTLSAVGLCCEVGDFGRFARAAHVMSFLGLVPSEHSSGQTRRQGQITKSGSGHGRRLLVEAAWHYRRAPAKGQALKRRQSGQPAHLLAISWQAQQRLHHTWQRLDHQRGKRRTIVAVAVARELAGFCWAIANAD

SEQ ID NO: 115909 - protein, 407 aa, unidentified
MQLLYARCAGLDVHARQVVACARIVVDHTVRYQRLTVPTTTRGLLELADWLASHEVTHVAMEATGVYWKPVWHLLEGQIELTLANAQHVKNVPGRKSDVHDAQWLADLLAVGLIRGSFVPPRPIQDLRDLTRTRKQLVREIGRHTQRLQKILEDANIKLTETISDIRGQSGRAVLHALIAGETDPERLVALTRGLKASHGQLVDAVTGRVTAHHRFMLKLHVDQIEAIEAGLATLEQRLTEALRPFRAAVDLLKTIPGISDTVAAVLLAEVGDNTGAFPTAGHLVSWAGFAPRLDESAGKRRSMRTRPSATWLKTTLVQAARGAARTKDSYFHAQFARLKSRRGPKKAIMAVAASMLTAIYYMLRDGTEFQDLGAQHFVHHDKDQIAKRLLHRLRDLGVEVEIKNAA

SEQ ID NO: 115910 - protein, 355 aa, unidentified
MKYYTSATEFNCGIDLHAHQMYVCVMDKQGKKLVHTNIKDNDFQYFLKLVQPYQHSLTVCCECMFSWYWLADACQQAGLTFVLAHALYVKAIHGGKNKNDRIDSEKLTHLLRSNLIPPAYVYPAKDRPARALLRQRILYVQNRAELLARIQSHQLAHNRVPARQTGRNRDPWKEQLLAREDHPLRQTALKNDLQMIRHYDLQIASLELELKTITKQTAERDYALLQSVPGIGPGLGLTILYEIGDINRFPTVKDFLSYCRLVKGTVASAGKIKGLRGAKLGNPYLRWAFGEAAVIAKRDHLVIRPLAQRLEAQMGGNKFKANTVLAIKLARAVYFMLKHKTVFDPERLVATLTHK

SEQ ID NO: 115911 - protein, 425 aa, unidentified
MNYKQNEKINQVKESTLVVGIDIGSTTQYARAFDWRGIELEKVFPFSNSREGFESFKAWMQHLQDKYKKLDAIVGIEPTGHYWFDLGAYLEDEGILLVMVNPYAVKQTKELDDNSQSKNDRKDPKVIAKLVTEGRYSAPYTPDGVYADLRIMVANRKRLIREMTQIKNRFARWFAIYFPEYTDVFGDYEAQSSMLLLKKVCTPEAIVELGAEKINQIWRDAKLRAVGMKRATTLCETAKRSIGLKKGSSAAQYEMKLLLEDYEYKKAQLDAVMEEIEKLCRKIPESEQMLAIKGIGVITVAGFLAEVGDVRRFESPRQIQKLAGLSLRENSSGKHKGQTTISKRGRSKLRAVLFNAAIPLIATNPEFKSLHEYYTTRANNPLKKKQSVIAISCKLIRVFYAILANGVTYDAQKMLSDIHRQPQVA

SEQ ID NO: 115912 - protein, 345 aa, unidentified
MNGMYYIGLDVHKKTISYCVKDASGQVHREGKIGATRRELDDWIKTLPQPWSVAMEATIFTGWIYDHLLPHAAQVKVAHPLMLRAIAAAKKKNDRIDAGKIADCLRCDFLPECHLAPTAIRDRRRTLRYRHLLVRQMVQMKNRISGLLMETGVEYNKRRLHKVGYFRELLSTNEEVNESIRPLLKLSRETIVRLQKTEYALLSSLQRDPLLAERIKRLRTVPGVGPITALTWALEMGDASRFRSIRQAISYCGLCGDEKSSADKVIRTPLSKQRNKHIQRVLVEAAKLAPREDHKLALVYATEKQKGNANRATLAVARKMVAYLLAVDRGKRNFVPAEERNHPAA

SEQ ID NO: 115913 - protein, 363 aa, unidentified
MATMTSQRTRVTGGVDTHRDFHVAAALDHLGGVLGTALFPTTPAGYRALLGWLRGFGQVDTVGVEGTGSYGAALARRLSLADVAVIEVARPNRQVRRRHGKTDVVDAIAAARAVQAGDARATPKSQDGPVEALRALKMVQRSGRKARTQALNQLHALILTAPEELRGRLRGLKNRDLIATCAAFRVRAEDDSLAAIFRLSLRELAQRIVVLQEQNRTLTTRMRRITTALAPALVAKTGVGPDTATTLLITAGDNPDRLGHEKSFAALVGASPIPANSGQTQKRFRLNRGGDRDANAALWRIAIVRMASDQPTRDYIAKRRSEGKTKSEAIRCLKRYIAREIYNALPNQALVDSRSITYARLRR

SEQ ID NO: 115914 - protein, 347 aa, unidentified
MTIVEAPVGITGGVDTHLDTHVAAALDPLGRLVGTESFDADAAGYRALLSWLETFGQVDKIGVEGTGSYGVGLARFLRRKGVEVIEVNRPNRQARRSHGKSDPLDAVEAARAVISGRALGTGKTKDGPVEAIRVLVVAKRSARQARVKAIVQMRHLVITAPDQLHSRLKGLTVTALVAESAKLRATRATDPVTAATKASLCSLAHRVQALEAELEELNEQIEALLLATAPELMARFGVGPDTAASLLVAAGDNPERLHSEAAWAHLCGVSPVPADSGRNAGHLRRHCGGDRQANSALWRIAMVRIAHDPETRMYFDRRVKEGRTKRDIIRILQRYIAREVYRYLPRG

SEQ ID NO: 115915 - protein, 339 aa, unidentified
MRLHCAVDLHGDNGFYGIVDDNGKRLFKQRIPNSLPAVLAALEPYRKRLKNGIVVESTYNWYWLVDGLQANGYAVRLANPAAMKQYDGLKNADDESDTFFLTELSRLDILPEGHIYPKEERPVRDLVRRRQLLVHQRTAHTLSFQNLIARERGEEMGSNVIQTLSLDEVETYFTDPRLQLMGKTNIETIKFLNKQIRALERAVLAEAKLKPAFEKLLTVPGIGNVLALTIMLETGDISRFEKVGNYSSYSRCVKSSRTSNDKKKGENNRKNGNRYLNWAYIEAANFMRRYCPEAKAWYQRKARRSKAVVATKALASKICKACYFIMRDQVDFDVKLLFG

SEQ ID NO: 115916 - protein, 354 aa, unidentified
MTLTTTHPIRAVTIGVDTHQLVHHAAAVDQDGRLLGDRKFAAGLDGYRELLDWAASFGIINAFGVECTGSYGAGLTRHLLAAGIDVVEVNKGHSQVRHRVGKSDAVDAEAAARKVLSGECSDPAKDTTGAVEAIRNLHLVRDSAVKARSAACVQLRDVLLTAPDHLRTRLTAKTLEGKATQARALRPDLSRIHEPEQAVKYALRELGRRVHELTAEINEVDKHLTQLVSAVAPNTMALPQIGPVSVAQLLITAGENFERFRSEAAFARLCGVAPIPVSSGKSHRMRLHRGGNRQANRVIYLIAICRLRYDPRSQAYRDRKRAQGHSSAEAIRCLKRFIAREIYYSLKKDLSRAS

SEQ ID NO: 115917 - protein, 385 aa, unidentified
MARRRFPEGLAGITRLHALIAEHLPEPSGPADPAPQVVVGIETERGPWAAALVAAGYRVFAINPMSTARYRERHSTSGAKSDAGDAHILAEIVRLDRAHHRQVAGDSALAEAVKLAARTHQSLIWDRTRQVLRLRSALREFFPAALKAYNELDAADTLQLLRLAPDPDQAARLTKRQVLTALAKANRRNPEMVADRIMTVLRAGEFRQAAPVQAAFAAIIAAQVEVIATLNDQIDTLGEVVADHFGRHPDAELITSLPGLGVILAARVLGEFGDDPSRYVDAKARKAYAGTAPITRASGTKKVVMARYARNKRLGDALQQWAFCSMRGSVGAKAYYKELRARKIGHQAALRQLANRWVGILHGCLKTGQPYNEILAWNHHASAAA

SEQ ID NO: 115918 - protein, 422 aa, unidentified
MMTDTAGTRTRDRSDDGPWVVAGVDTHKDTHHVAVLNAATGAGLGDMRVPATPAGHDQLHDFVRSRGRIRMIGIEGTGSYGAGLARALRAAGAPIREVIRPKRSHRRRGKSDPIDAYAAAGRALAEADALPVAKTGTGPCEQIRVLLVERRSAMKARVAAHRQITALLTTAPDAVRTRFARLSGGELIGALARTRPAPDADTPASATARTLRRLARRHRILTDEITDIDTELRALTARAAPTMLATKGYGVITTAALLVTAGDNPDRIRSEASFAALCGAAPIPASSGRTNRHRLNRGGDRRANWALHQIALVRLSGDPRTKAYAARLTATGKSRKEILRCLKRAIAREAWHLLTHPQPAPRTDDLRRLRHERGLTLTQAAHHLNTHPARISELERGTRPDTTLTAAYRQWLSTQQPQTHTT

SEQ ID NO: 115919 - protein, 454 aa, unidentified
MSKRPRILRSQRKIIGPLEIVNPNAAGIDAGSEFHHVSVPEDRSDEPVRHFGTFTADLKALAEWLIACRITTVAIEATGVYWVPLYEILEERGLNPKLVDSRSLGRRYKKTDVVDCQWIRQLHTHGLLDGAFRPPAAMLPLRAFTRQRKMLIEYAADHIRHIQKALDLMNVKLHLVVSDTVGVTGMRIIQSILSGQHDPVKLAALREPGCKASEHEFVRALTGNYRQEHLFALKQAVELFKVYQTKIADCDSQIATHLSTFDQRHDPAKPLPGKSKSRRKNQPHFDARTLLYQMVGIDLTAIPGLDGSSLLTIIAETGTDMSPWNSGKSFGAWLALSPNNRITGGKPIRKQARVIRPNRAAQAFRIAAQTLERTQCALGAFFRRIRSRQGRQAAIKATAHKLAMIFYTILKNGTEYRDPGVDYYEQRYRENLLKSLTRKATTLGFTLTPVQEVH

SEQ ID NO: 115920 - protein, 349 aa, unidentified
MNKKIVKQVAGIDVAQKELVVCLGRMYDDWAPELYSHKTFPNHEKGFMALVLWVKKLAVEEVPVRFVMEATGVYHESLAYFLEEKGYESSIVLPNKISNYSRTLEVKTVTDKTASEAIARFGLERKLDPWKRPKKLFKNLRQLTRERDQVVQMRTMAKNQLHAEQAEAEPNPGSVTRIKQQIVFLNKQELQIKKELLVLSKQDSQVQQSVKLLCSITGVGSLTATTVLAETNGFELIRNKRQLTSYAGLDVKEKQSGTSVKGKAHISKRGNRYLRKAMHLPALTAIRHDDRFTAIFARLVSKHGIKMKAAVAVQRKLLEMMYIVYKTNTPYDKQYLQRNDEAQNKIERV

SEQ ID NO: 115921 - protein, 310 aa, unidentified
MAPALYLGLDVAKATLELASEPAGIRAHFSTEPAGLAALVAQCQAQPVALIVLEATGGYEAPVVAALATAGLPVVVVNPRQVRDFAKAVGRLAKTDTIDATVLALFGARLQPLPRPLPDAATQELQAVLLRRRQLLEMLHAERQRHATSHGRVRANLRSHIRWLERSLADTEDDLRGLIEASPLWRVQDALLQSVPGVGPTLAATLLGLLPELGHLERRPLAALVGVAPHACDSGTHRGQRHCWGGRPAIRTVLYMAALAAARWNPVLRAFYQRLRAAGKPAKLALIAVARKLLVLLNAMLRDGQPWRYA

SEQ ID NO: 115922 - protein, 346 aa, unidentified
MEHYVGLDVSLKLTAICIVDRTGKIKREGMVSSDPEAIAGFIKSHASHVERIGLETGPTVTWLWTELSKLGLPVICIDARHAKAALKMQINKSDRNDAVGIARIMQCGWYKEVRVKHLHSHAIKALLVSRALLVKIKRDIENQIRGLLKNLGLVIGRAKMNTFSLRAAQLAEARPELAAAVGPLLKSREAIAVQIADLDSKVLRLARNNVQVRRFMTAPGVGPITALCYLATVDDPTRFKKSSSVGAYAGLTARRYASGEVDWTGRISKCGDKLLRGYLYEAANVLLTRVAKWSTLKAWGIRLAKRSGLRKAKVAVARKLAVILHRMWIDGTEFRWSSKEATNQPA

SEQ ID NO: 115923 - protein, 356 aa, unidentified
MQTQYTQVNFAGQDVNVGMDVSNRSWKVAIFLGTEQHKRFVQEPNSKQLMHYLQKNFPGAKYHIVYEAGYNGFWAHDELEALGAECVVVNPADVPTSDKERRHKNDRIDADKLARNLATKTLKPIYVPERSRTEDRMLVRTRNRFVYKQTRVKCQIKALLAFYGYQMPQEMPQRYWSRRYINWIASLRMNRPSGDAALKALLGELEFLRGTILGLIRQIRLLAQDDRYRTSVGYMQSICGISMLSAMTFLTEIVTIDRFKKSEHLAAFVGIVPGEHSSGDQERTTGLVPRGNKMLRYMLIECSWIAQREDPALLQAFERLTKRMSKNDAIIRIARKLLNRIWFVLKHQQRYVTGVV

SEQ ID NO: 115924 - protein, 375 aa, unidentified
MTMMQHRQIRYIGLDVHKATISVAIAEGAGTPTSYGRVPNDPAAIRTLMTRLGDPQAALHVAYEAGPTGYALHRQLAKLGIECMVVAPSLIPKRPGDKVKTDRRDALKLARLLRSGDLTPVWVPDEAHEALRSLVRARADAKADQLRAKHRLSKLLLRQGCWPPIGVRNWSQRYFTWLRQLTFKHLPDQVVFADYLTEVTAAGERIKRLETALQQCAQSSSQVALIRGLQAFRGIGFLGAVTLVAEAGDLRRFRTAPQFMAYVGVVPTESSSGGKQQRGSITKTGNRLLRHVLGEAAHHARHAPRVSSALKRRQADQPRELVELAWRAQVRLHTRYRHLSTRIGALKTLTAIARELAGFIWAAGDVLQEEVLTTA

SEQ ID NO: 115925 - protein, 419 aa, unidentified
MKPWNELTHFAALDWADDHHDLVVVDAKGQLALELTFSHTAAGWQQAQEALVAWPGLPVAIETSAGPAVDQLLQRGLAVYPVMPKAAARYRERKRPSGSKDDRHDAWSLAEALRTDGQHWRALSPLDPLTAELRALCRDEMALIEQRTALVNQLQAALKEYYPAALQAFADWTAPYTWAFVLAFPTPEALAQAGQRKWEKFLHTHKLWRPQTAPARLKTFAEAKAFQGRPAITAAKSLLVRSLARLLQTLEQQLAAYRARIADLFAQHPDHDLFGSLPGAGSKLAPRLLAELAGSNWAEVSQVQARAGTAPVNYQSGKIQRARIRRACTLPLRATLHLWADLSRRYSSWAAAYYQAHRAKGQSHACALRCLAHRWLEIVSAMCRTHTPYDAEHHLREIQKHGSWVLRLLPAQSATKLCE

SEQ ID NO: 115926 - protein, 350 aa, unidentified
MDRYIALDVHMESCTMAVLGPSGRRLKSQVVETNGRALVEAIRGIPGRRHVCLEEGTQSAWLCELLRPHAAEVVVTLPAKRKGPKDDLRDAWALAEELRSGSLRTVVYKAPRRLSGLRDAVRGYTMLTGDLVRVKNRLKALYRSRGVVTDARIYRPEGREAWERQLPESQRRLAGMLGGQLDAVEQSQGEAERWLREEAKQQAVVKLLATAPGMGWIRTAQVVAIVVTPERFRTVRQFWSYSGLGIVTRSSSDWVREGNRWVRAQTIQTRGLNRNRHGLLKAVFKGAATTVIQQLVEHPLHRDYQRMLQAGVKPNLAKLTLARRIAAAVLSMWKHQEGYDPKKQCRHQTA

SEQ ID NO: 115927 - protein, 359 aa, unidentified
MTSMQDLPRRRRVVVGVDTHKHLHVAVALDELGGRIEARSFAADRSGYEQLIDWANSLGHQVIFGVEGTGSYGAGLASAIRRRNIGVLEVLRTDRRDRRLRGKSDTIDAENAARAVLNGQANAVPKSADGTVEMIRLVKVAKDVAVRARTSAMISLKAVLVNAPGELREQLEPLTKMALIRRCAALRPGAVVDPTTAAKHTLRAIARRWLALDAEIKIHEKVLAKLTGELVPELVAAFGIGPDVAAEMLIVAGDNPDRVRSEPAFARLCGVAPIPASSGMTTRHRLNRGGHRQANSALYRTVIVRLQHHQPTQAYYQRRTAEGRTKAEIIRCLKRLLAREIWSYLRPLRQARQPLVLAA

SEQ ID NO: 115928 - protein, 343 aa, unidentified
MEKITTVGLDIAKSVFQVHGVEVQGNIVVRRQLKRRYVLAFFKKLRPCLVGIEACATSHHWSRELQALGHTVRLIPPAYVKPYVKRQKNDAADAEAICEAVQRPSMRFVPTKTAEQQGCLMLHRTRHLFIRQQTAVINTIRAHLAEFGIVAPVGRNGVEELLYVVADPNDGRVPDIARECLEALGKQLQSLKAQILEFDRQINAWHRSNETSLRLDELPGVGPALATALVASVADAKAFRSGRDFSAWIGLVPKQNSSGGKDKLGSITKQGDRYLRSLFTAGALSVIRYAKIHGTKHRPWLSKLLERRPTKVAAIALANKIARMAWAMMAKGESYREPVALAR

SEQ ID NO: 115929 - protein, 345 aa, unidentified
MTIVETRPITGGVDTHLDVHVAAALDANGGVLGVKSFPTTIVGFAELYAWLCSFGTLRRVGVEGTGAYGAGLARSLRAAGVAVVEVDRPNRQARRRHGKSDTVDAVEAARAALSGRAAGVAKTADGNVEAIRALLVAHRSGSEVRIKCLNQVRHLGFTAPDELRERFHGVTVDTLARQAAALRPNPAGDCVVYATKLAMHTLGRRIVDIDADNARLDSELTTLVQATAPSLVELYGVGTQTAAILLVAAGDNAERITSEAAFAHLCGVAPIQASSGKTTRHRLNRGGNRQANHALWRIVFTRMSSDPRTRAYVERRTLQGRSKREIMRVLKRYVAREVYAHLPHR

SEQ ID NO: 115930 - protein, 412 aa, unidentified
MKLMYKRCCGLDVHKKTVVACVQIREEDTVHKEIQTFPTMTSDLLILHDWLVAHGVTHVAMESTGVYWKPIYNLLEASFEILLVNAAHVKAVPGRKTDVKDCEWLADLLAHGLLKASFIPPEPIRDLRDLTRYRKSLIDERVRQINRLQKFLESANIKLSSVATDVMGVSGRAMLEALVTGRNTSPEVLAELAKGRLRKKLPDLRKALEGRFRPHHRFMVAEILVHLDFLDEAIERVSQEVMTCVVPFSRVMEALDQIPGIDRRVAEGVVSEIGTDMDWFPSDRHISSWAGVSPGNHESAGKRKSGRVCKGNTWLRRHLIEAAWAAVRKKGSYLSALYHRLVTRRGKKKAIVAVAHSILVIIYHVLKDQVPYHELGPDYFDKLNTAHIKRHYVRRLENLGFKVILEPLSQAA

SEQ ID NO: 115931 - protein, 306 aa, unidentified
MGKSITDLSSVTTVGLDLAKHVFQVHGVDASGRVIVAKALRRKDVLAFFAQLPECLVGMEACGSAHHWARELIKLGHDARMMPPAYVKPYVRRQKNDAADAAGICEAVTRPSMRFVGVRTLENQAALMHHKLREMLVAQRTQLINALRGHLAEIGVIAAQGLKNARELAWVILAEGDETIPACVRAALAPLVRQLHALDQELARSDQTIAAMARDDEMARRLMTIPGLGPVTAAAMATSVQDVSVFSGPREFAAFLGLTPRQNSSGGKERLGRVSKMGNRYLRKLLVVGAHAVLYHRKPHDDALRS

SEQ ID NO: 115932 - protein, 346 aa, unidentified
MKFYTGQHKFYCGVDLHARTMFLCVLDQRGYPLLERNIKTEPELFLKSIAPYREDLVVAVECMFTWYWLSDLCSREKIPFILGHALYMKAIHGGKAKNDRIDANKIAVLLRGGMFPVAYVYPPKMRSTRDLLRRRMFLNRKRSALITHIKCTFAQYNLPEPEQNVSRVSQREGVAEQIPDPGASRNVQLDLDLLAFYDQTLTKLEQELTVIAKDHDPDSYFRLRTVPGIGKILSLVILYEIHDINRFPSVQDFASYCRLVKPAKESGGKRLGSGGAKIGNVHLKWAFSEAAVLFLRKNESAKLYRARLAKRHGKAKSLTILAHKIARAVFFILKRRTVFQAESFFA

SEQ ID NO: 115933 - protein, 390 aa, unidentified
MHVVAHQPEAPGAIRSDLGAIFVSLELSRSTWLITSLSPCAGEKMSKHGVAAGDIGALLARFSEFKQKAFARTGRSFPIIVIQEAGLDGFWIHRVLQSEGIESHVVDPASIATSRRRRRAKTDRIDGEALLRALLAYKRGEPRVCAMVKAPTPEEEDRRRLSRERKTLIGERVEHVNRIKGLLFCQGVSDYEPLRRDRRQRLDELKTGDGRALPDHLKAQISRELDRLELLLEQIKAVEAGQNTLFAAAKAEAPTPAPVTMLLDIKGIGPEFAAILWMEAFFRSFANRKQIAAYAGLAPTPWQSGAVNREQGVSKSGNPRLRTTLIQLAWLWLRHQPQSALALWFKERVTRNGGRFKKTTIVALARKLLVALWKYVTAGIVIEGAVMKAA

SEQ ID NO: 115934 - protein, 431 aa, unidentified
MSKYLNSIVVGIDVSSEFSFVAVLAPDGSQYRKPFKIFHTSDGFNYLIEQIKKAEEEFSTKPVFFMESTGVYHLTLFHFLKDNKFESFVINPLITNCNKNKNIRKVKNDRNDALSIARLGKFEDIKVSSDSDINIFTLKLLVRDYYKLIDTRSVFKKKLSSSLYISFSGYQNIFSNTCGYVSINILKKYPSPQAVISAPKQDIIDILLSARRGIKWAEEKYLKLIECTKNALIVSLISPRLSISITTSISLYEAIDAEATKLLIEIRSFINSDEMPLTLCKNISLLMSIPGIGNITAITILAEIDNINKFPTSKQLVAFFGVDPAVNESGKFKGDRVKISKRGTRLGRRALYAVALSSIRTKRNGEATNKVLLKYYQENLKGKKSKVGLVAIMHKLIKYLFAVLRNQQEYQVRDPKLHQKMFLENKKRQVA

SEQ ID NO: 115935 - protein, 427 aa, unidentified
MKYNQNTKILQVTEGTLIVGVDIASAVHYARAFDHRGVEIGKLLKFPNDAEGFGQFISWVKAIGERAKKSKVMVGMEPTGHYWFNFAQQLKDQSIKIVLVNPFHVKRSKELDDNNPTKNDRKDPKTIAMLVKDGRYMEPYIPEGIYSELRTAMETRWQIVKQLNTIRNRVKRWLSIYFPEFNKVFGDWEGKAAIAVLRDFPTPVKIIEKGVDGIIGRWKQDKLRAVGRKRAMELFEAARMSVGVREGIIAAENDLKFLLENHEMYLQQYERIMNLVEQLAKEIPGLEEMLKIKGVGLITAAGFVAEIGDISRFEYPRQMQKLAGLNLKENSSGKHKGKSSISKRGRRRLRSLLFQAIMPIVAKNKEFGELHQYYTTRSQNPLKKKQSLVLLSCKLIRVFFALLTKVIVYDPQKMLKDIKRPLLQEAA

SEQ ID NO: 115936 - protein, 345 aa, unidentified
MSTITIGIDPHKASHTAVAVDEFETVVDEIRIRSCPTQAVVLREWADGFRDARIWAVESAQGLGYLLSQQLISAGETVIDVPAVRASRVRALSTGRSQKNDPNDARSVAIAALRATDLAEVLPDDHTRILRLLAKRHRDIGRAKNRECCRLHSLLLEMFPGGADYRLSSMSRVNALLDTFAPVDSMGRQRLEIAHDFVDGIDELTVRLKTSQRRITAAVKASGTSLTEICGLGPITAAIIIGNTGNIDRFPTKARFASYNGTAPIDASSGPKVRHRLNPRGNRQLNWAIHVVAISQLRHDTVGRAFYDRKIEEGKTPKEAIRALKRRLSDVIYRHLVNDARRIGD

SEQ ID NO: 115937 - protein, 339 aa, unidentified
MWYTGIDQHKQFCVITTYGAEGPRVKQARVASTPLELARYFAEFPAPHKAVVESTGGWYWLADTLSGLGVELVLAHATRVKAIAAAKVKTDKVDSDTLALLLRADLIPLAHMIAPAQRGPRDLMRTRLRLVEKSVSAQNSIDRLLEKFNLTSVTELEACYQLQASCHTAQLALLDTQIASLERALYPHLIPNADVQRLLWIPGLGKVNAFTIYTEIDGITRFPSARQFFSYCRLVPGADNSAGRTRHRSGSKAGNRYLKLAFSHAGIRAVQYNPEIRAFFKAKARKKPIRIARTLVALELARIVYHVLARHEDFNGQFKGRELSHRKHAKWPRRASPPA

SEQ ID NO: 115938 - protein, 314 aa, unidentified
MEKITVGIDVSKDRLDVAVRPSGERFAVSRTGAGLADLVARLKVLKPNLIVLEATGGFETVVVAALAAASLPVAVANPAQIRAFAKAIGQRAKTDPIDAGVIAHFGEATGVTPRPLPDEATQQLADLVARRRQIVEMIGSEKQREKLANPRIKKSIGRLVKALERELSSVDTDIDDAVRGSPAWRDKEDLLSSVPCVGQVISRTLIAELPELGTLRHKQIAALVGVAPFTRQSGQWRGKSFIGGGRASVRTALFMGAMVARRHNPVLKAFYERLVAAGKPKKVALIAVARKLLIILNAIVRDGTPWKGTVAAVS

SEQ ID NO: 115939 - protein, 339 aa, unidentified
MDHVAIDLGGRESQICVRRPDGAVIEERRVRTGELPAYLQRRAPSRVIVETCSEAFWVADAAQAAGHQIRVVPATLAPTLGIGARRMKTDRRDAQVLSEVSCRIDLPSVHIPRPEARAAKTLCGMRDGLVRSRTLLVNTVRGWLRTQGCRLATGSVVSFGTRVRAAVGATLPSYLARQLQLIEHLHAAIADADREVRALADGDAVARRLMTVPGVGPVTAVRFIAAIDDRTRFTGAHAVEAYVGLVAGQDSSGDRTRHLGITKAGSPALRWCLVQAAHCAKRTLPAGPLRDWVDAVEHRRGRQVAVVALARKLTGILYALWRDQTVYDPLRTNRAPQSV

SEQ ID NO: 115940 - protein, 355 aa, unidentified
MMEVSSTIKVEREETKMEITTVGLDLAKNIFHVVCFNNHDKEIKKKMLRRNQILEFFTQLPPCQVSMEACAGSHFWGRQLRDLGHEVKLISPQHVKPYLRGNKNDYNDARAIAEAAARPDMPAVGIKSVEEQDMQAIHRMRAQCLRDQTALSNSIRGLLGEYGIVFTKGLATLRKKVPEILEDAENGLSLLFRNLLAHRYQQLVELGDHVAFYTKELERISRQDDACQRLQTVPGFGPIVASAFRSVIGDGRTYARGRDAAASIGLVPRQQSSGGKNVLLGISKRGNKYLRKQLIHGARSVVLQAANKEDPLSRWINRIREERGWNKAVVALANKMARIGWAILRHNTSYQSSTI

SEQ ID NO: 115941 - protein, 323 aa, unidentified
MQGKVSLERSAATRVYVGIDVCKERLDVYVHPLGQSFRVANTRDGLKQLKRRLANLDVALIVMEATAKFHRQAHRNLHASGFEVAIVNPLRSRLFAEATGQLAKTDTVDARMLALLAAMLEPKAKAPPPEALENLQEIVRGRAAFVAQRTALRNQLGTAKTSCLKQQIKRQLKTLERAIESLETEIERSIQAAPALARRFAILTSIPGLGKIAAVTLLANFAELGSCSGKQAAMIAGLAPIACDSGDTRGERHIRGGRASVRTGLYMAALSAARFNADLKSFYARLLANGKQPKVALTAVMRKLIALANTLIREDRLWQPIHA

SEQ ID NO: 115942 - protein, 374 aa, unidentified
MKVYVGIDAHTTNFTLATSVALDEDPVNVNTYPAKVSNIAAYCKNLRKKYGEELEIITGYEAGTLGFSLKRELDKKGIACIVIAPSTIAGTNLNRKRKKKTDKRDAMAIAKCLMTHDYSEVYMPDEEDEAVRDLIRMRQDLKKFQKSTKQQIGALCHRHGYHFNDGKYWTKKHLKWLRDLPIEGILKDSLEGYLRTLDYLTDRVTEIDSRIDEISEQDKYRESVHKLTCLKGIKTFTALAVIVEIGDFSRFIKAKNFAAFLGLVSGENSSSDGQTLLGITKQGNRFLRRLLTEAAKRFSVASTKKSKELLCRQKGNSEHIIAYADKANDRLRKRYYHLVMHNKKCANKATTAVARELACFIWGMMTDNTQTVLS

SEQ ID NO: 115943 - protein, 322 aa, unidentified
MSVSVLGIDIAKQKFDAALLVDGKTKHKTCKNSAEGFETLTLWLEKQGIQKVYACLEATGNYGEDLAIYLHEAGHRVSIVNPARIKGFAQSELIRTKTDKMDAALIARFCLAMKPGAWIPPSPEIRSLRALVRRVDSLIDMRSQEKNRISTAHESVLFLIKEHIAYLDQEIERIRQQIAGLIEQDPNLKRKKELLDSIPALGKATIPHILAELDDLEKFNHVRELVAFIGLAPKETLSGSSIKGKPRLCKIGHARLRKALYMPALVSIQCNPVMIAFYNRLKDKGKNGKVIVCAIMRKLVHVIFGVLKSGKKYDPNYKPAFA

SEQ ID NO: 115944 - protein, 366 aa, unidentified
MKKISTVQVFGSEIFKEQQLTIGVDLGDRWSFYCVLDEAGKIILEQKVPTTPEAMKQAFGKIPRSLIAMETGTHSPWVSRLLTELGHEVIVAHAQKVELITKSNRKDDRHDARTLARLARIDPELLGPVRHRSAKAQIHLTVIRARAELVSARTALVNAARGLVKSYGERLPKCGTYQVNEKLAEGLSAELRDVLEPLLREIESLSERIQEYDERMEKIAKEVYPEVSLLKQVKGVGTQIALTYVLTIEDPYRFAKSREVGCFLGLRPGRRNSGESEPQKKISKEGDRYLRTMMVQGAHYILGPFGEDSDLRRWGLKLAERGGKNAKKRAVVAVARKLAVLLHRLWVSGEVYEPLRNSQRAMRAVA

SEQ ID NO: 115945 - protein, 398 aa, unidentified
MTESSDYESVQIFISVDVGKDTHHAVAVNRSGNRLFDKALPNDEAKLRSLIYDLKQHGQILLVVDQPATIGALPVAVARSESILVGYLPGLAMRRIADLHAGEAKTDARDAAIIAEAARTLPHALRTLKLADEQIAELSMLCGFDDDLAAQTTQASNRIRGLLTQIHPALERVLGPRLDHPALLELLQRYPSPGKLASLGEKKLATQLCKLAPRLGKRLAADITQALTEQTVVVPGTNAAAVVLPRLTLQLITLRKQIDEVAQEVEQRGLAHPLYPVLTSMPGVGVRTAARLLTEVACRAFASAAHLAAYAGLAPVTRRSGSSIRGEHPSRRGNKTLKRALFLSAFAALRDPISRAYYTRKMSQGKRHNQALIALARRRCDVLFAMMRDGTFYTPTAS

SEQ ID NO: 115946 - protein, 343 aa, unidentified
MKLFIGLDVSLAKTAVCVINEHGKIAKEAQVPSDPQAIVDFANTLQGAVAIIGLEAGPLSQWLHRGLADARLDVVLMETRQVKGALKAMPIKTDRRDAEGIARLLHLGWFRPVHCKSVSAQEVRALLAARKAIQQGMIALELSLRGLLRNFGLKVGAISRGQFDARIRELVDGNSMLQAAAEPMLRARTSLRHELAGLERQVRLLAKDDAACRLLMTMPGVGAVVALTFRSAVDDPGRFSSSKKVGPWVGLTPSRNQSGERDVIGGITRAGDANLRRALCQAATVMIHRGRSTWLRSWAAQVAKRRGAKRAMVALARRIGTILHRMWKDGTEFSAVPLIATSA

SEQ ID NO: 115947 - protein, 326 aa, unidentified
MTLSHSTDNTFVGIDVGGAGLDVAWHRGDSAHYANRPDAIATLVERLRIGPKLTRIVLEPTGGYEKALVKALRQAQLPVEIIHTTRFNAYRQMVGVKAKSDTSDARLLASYAAAPDEIRGRKPGHVELPEDTIREELSELASRRDQLKHMIHAETCRLATVRMAELREAITTHLEALRAEDEQMHQMMLALVHQRADLQRDQRLLKTIKGIGVKSALAFLASVPELGRVDNKAAAALIGVAPFVRQSGTMNAPARIHGGRAAVRSILYMAAVAASRHNPVLRPFYERLIAKGKPPKVALIAVLRRLVVFANAVLRSGQPWKGAIAT

SEQ ID NO: 115948 - protein, 421 aa, unidentified
MPNIEIGVDSMVKENFIYVGIDLHKETHTAVMIDCYNQKLGEITFPNRPAAFPKLVTKVKKCNTDGKEVVYGLENAYGYGRALAVWLIDKGYLVKDVNTAISHRQAKHRGAMYRKSDSDDAEAIALATLNMLDKLPDACPNDAYWSLGQLVHRRDNIMKQRTRLVNQLHEQLCIAYPSYKSFFNDISRPTALYFWEHYPSRKYLRGKSVEDLRKELVPVSHNRCSTKNCEKILDAAASDKVKNNAYQDARDMVTLSIVSDLQHYDSQLAEVDKMLEQMYKMLGCTLTTIPGVNVITAVKILAEIGDIKRFSNANKLAQFAGIAPLHLSSSGKGKDVATKQGNRRLQATIYFLAIQMVQLSSKGTPRNPVVRAYYEKRKAEGKTSQQALICISRRLISIIYGMLKNGTEYRMPVVENAGENR

SEQ ID NO: 115949 - protein, 409 aa, unidentified
MNNLVCKGAHMKMNLSLELRVSVDVGCHSHSVAIGLSTGEILDEFSIAHEPEGFRQFFSRIEKQERKFGYPVSVAMEGFNGYARPLDTLVRARDYRLFNINNLKLARFKEIFPGAAKTDPIDARKGLELFQLRDHLPMAKDVLQEVRKTPRENEILKRLSRRRRRLVNERVRVLNNLQADLQAVCPGLLKITADAGNLWFLRFVTSTDDFRKLARVREVTIRKIPGIGAKYAGLILSWQKQAQFGHDVEWVGEMIQEDAARVLELHDKIQTIEFRMEEVAQGSEIARTLLTIPGFGDICTAELAGEIGTIERFGSEASLALYLGMTNLDNSSGKQKGSKPPRQVNVRAKAAMMIAVDRHRKKVPQSQKYYEKKRTQGKKHNQALRALGRHLCRIIFKMLKENRGYLLPS

SEQ ID NO: 115950 - protein, 334 aa, unidentified
MRTSQKITGIVTTIGIDIGKNTFHLVGFDQRGTIILQQKVSRGQLERRVANIPRCLIGMEACSGSHHIGRQLAAIGHDVRLIPAQYVKPFLKGHKNDYRDAEAIAEAVQRPTMHFVTIKTPEQMDLLALHRVRSRLVGRRTGVINQIRGFLIERGITVRQGPMPLRKALSEILSSDTGALSPRMVGLIADLAQDWRRLDERIAAVSAEIEALAEQDDSCQRLMTVPGVGPIISSAVVAAIGNGTGFKQGRDFGAWLGLVPKQESTGDRTILGKISKRGNKYLRTLFVQAAHVVLERRPSAAMRGLWPWVERATVAPRGWLHVIRLTSNIRTETK

SEQ ID NO: 115951 - protein, 349 aa, unidentified
MTPFEGASVAEASTIGLDIAKHVFQAHGADSSGRVVFRKRITRAKLMQFFASQPRCLVALEACGGAHYWGREIGKLGHTVRLIPPAYVKPFVKRQKNDAADAEAICEAAQRPSMRFVPVKDEAQQANSVVFRARDLLVRQRTQCINALRGHLTEYGHVVPQGTAHVDTLVALVEDATSSVPESARTILTVLIGTFRALQTQITQLDAEIARRAKADPVARRLMTIPGIGPIAATAITALVPAPEGFRTGRDFAAWLGLTPLQKSTGGKQKLGAISKMGERTIRRLLILGASAVVRWATQRGAAEGSWLARMLGRKPRMLVTVALANKMARIVWALLVKGGTYRVPAAAA

SEQ ID NO: 115952 - protein, 353 aa, unidentified
MTSTKYIGMDVHKESISIAVRNDVGKIAMECVIETKANIILDFIHGLRGELQVTFEEGTWATWLYDLLKPHVAKLVVCDPRKNSRQGNKNDRIDARELSDRLYMNKLSSVYHGGAGVRTLRELARSYLTISKDLARVMSRVKAIYRSWGIPCTGKQVYAPRHRAEWLAKITEVGVLRRAEFYYQQLDALRPLRHEVRRELLAESKKHPATKLLCQIPAIGPIRGALLIALIQTPHRFRTKRPLWKYSGFAIEMHSSADYRKVQGQLQKSRKRVSVRGLNRDCNHDLKNLFKSAATIASVKPGPFQEFYAALLAKGMRPEMARLTLARKIATIVLIVWKKGVSFDAQYLTPQTV

SEQ ID NO: 115953 - protein, 355 aa, unidentified
MQRKEISFKGQTIYVGIDVHKTTWVVTVMTAVGNYEKRISMPASPQRLFETLKKNYPDATYEAAYEAGFTGFSTYYHLKELGIRCSIVNAADIPTTDDERRNKTDAVDSAKLARCLRNGDLRGIYVMPKESLDARGVVRVRKIFLNQLSGYKVRIKHLLYNNGVGYPERFARSNTHWSRAFMKWLCEDVKLLSEDRVALNLLLEQVEHLRLSVLNATRKLRELSQLPFYRKNFNHLMTIPGIGVVTAMTILTEIADTGRFPNERAYTKYVGFIPDSHESGDHKVKGEMTGRGNNHLRKAYIEAAWVAIRRDAGLCAAYIKYCQRMEKNEAIVRIARSLAHISLALVKNDKDYISA

SEQ ID NO: 115954 - protein, 260 aa, unidentified
MHYLGIDVAKAKLDCCLLLELSSCKRKTKSFSNNDSGFTELVHWLDKQRISASDTHAVMEGTGVYHERATIALHDAGMQVSIINPAQARDFAKGLAIRSKTDGLDSLVLARYGALVQPTIWIPPTPQARALQALLSRVDAVHQDLLREKNRQEKADATDTPELIRQSLADSIMFLQTQLKKLRQGIDDHINRHPELRDDAALLITIPGVGIKTSQHLLSVIHLHHFHTAERLAAYLGVVPIQRQSGSSVLGRPKLSRVRA

SEQ ID NO: 115955 - protein, 396 aa, unidentified
MVVSEVKPGECEFHKRRFGTTRSQLRELNQWLTEVGVQEVVMESTARYWRPVWVALEETGIKRHLAHAHSNGARRGRKSDFRDAERLVHRLVAGELVLSYVPEDEQQGWRWLTRTRYRLVCERGRVQSQIEGLLEDAQIKLSRVITDLLGASGRRILEALAQEQGSHDAAKLAQLGHAKLRASREELTDALDGRWLDRHRFLLGLHLDRIRQLDSQIEQIQQQTAAAMQACQEAVARLIQVPGIRTEGALQMLAEIGPTAAAFPSPEQLASWVGVCPGQQESAGQSYSQRSAKGNWQMRRLLSQAAHAASHAKGSFFESLYRRLVVKIGPPKAIWAVAHRLCRLIWKILHEGVQYHEQGAPTSSSKSIRRRQLKLTAEFRKLGFQVQFTPINPSHP

SEQ ID NO: 115956 - protein, 375 aa, unidentified
MCERAVLTNRPSLDLSPFVLEGHGACRGAWDRSGVFLNPNSCMGFEPGPSKEGSWMMAQNDLVVAGIDVAKDKVDVCIRSPSLQRTFVNTIGDRRELTSWLRRNKVGKAVMEASGGYEREWAKVLRNAKIEVRIVDPKRVRSFAQSAGRLAKNDTIDAEMIAWFAETFGEVPGQTYDAAREQLHQMVHARQALKDMQSKLTSQGEHAAPAAVQRIHARIVKTIAVELVKIEAEITALIQATPHFAELAEIIESVPGIGRVTSAALIAAMPELGKASGKIIAALLGVAPYDDDSGRRRGERHIEGGRRRTRNVFYMACLGAATQHNPVLKAFYDRLLAKGKLKKVALTACMRKLISILNVMIAHREKWDAKRYAVN

SEQ ID NO: 115957 - protein, 333 aa, unidentified
MDYFVGVDVSKKNLDMALVQDGQMLLQDRIENNPKAVRSFLTGLIKGRSISPDQIVLCLEHTGLYNAHLLEVFWQKGIRICLEPAVKIKGAQGIERGKSDKIDAQRIAIYAFKNACELTFWQPDRLVIQKLKALLSLRNRLMRSKNQLQVPLKESTGFLDKCIIKEVGKSTLRAIRSINKEIGQVDKMIKLLVKQDSSIANQVEQITSVPGIGQVTALNMIITTGEFTRIKEPKKFACYAGVAPFEHRSGSSIRGKTRVSQKANMAMKTLLHMAAMSAITCSSELRAYYTRKVAEGKNKMSVLNAVRNKLISRAFACVNQKRTFQKEYSNVLA

SEQ ID NO: 115958 - protein, 481 aa, unidentified
MVIFYPANDRIELWPVFIGHQLDILLGKGFSFSRRCTIWFSVFIIGTILQPKGEATMRISQTAQKIKLNQVMDISVDVHKDTLNFFFETGGKEYSDECSNRTTVIAKRLEAYHQIAAEHGIKTLRIICEPTGQYHNKLFRTARKMGFFTCFVNAESVAKFRVIETNDTGKTDTKDPRVIRTLGQLDKVIKHRMISEEYIVLRKLNKIYDEVDGTIVSLRCRLDRLLVELFCDYSFKKDFLYTASGLALIEAYGCNPYRIIEAGYVGFCVRMRKAAPRIQKQTLGRLWEDAQSSVLNEQPEEYLQTLEMHLRQLIHDWLEQIRRKEEMVQKMVEVLNRLRGEDPKIPPSTSGVINDKNMARLLGETGPLSDFTNGRMLMRYGGLNIRMRQSGKYQGQNKITKRGRPLLRKVLQHIVLPLVREGCLYGQYYSRKKEIEKMPGNKAMTCVARHFLKKFYGWYKSGEAFNQQRFFSCETQYRKAA

SEQ ID NO: 115959 - protein, 343 aa, unidentified
MAHYVGLDVSLKQTSICVVSDTGSIVREGVVGSDPEAIAAFVRSKAPDTVRVGLESGPTATWLWTELKRLGVPVICIDARHAKAVLKMQINKSDRNDAVGIARIMQTGWFKEVRVKDLDCHAIKALLTSRALLVKIKRDLENQIRGLLKNLGLVIGRAKFNGFAARAAELIANRPELVAVVSPLLKAREAIEKQIDDLDRKVLKLARQDALIRRFMTVPGIGPITALCFKATIDDPTRFKRSRSVGAYIGLTTRRHASGEVDWSGRISKCGDAMLRSYLFEAAGVLLTRVPKWSAIKAWGMRLAKRNGLRKAKVAVARKLAVVLHRMWIDNAEFTWSNKEAAA

SEQ ID NO: 115960 - protein, 395 aa, unidentified
MFFLGIDIGKNNHVASMIDDTNKPVFKAFSFSNTTDGGESLLAKFEKHGVTAENLTVGLEATGHYWLAVYSFLQEKGFKQYVINPIQTDGWRKGVEIRKRKTDNIDSLLIAELVRYGDFIEARLPEEAVLSLKNLTRFRTYLVDSIGDLKRKAICVLDQVFPEYQTIFSDVFGATSKEILVQFSSPAELEDLSVETLAELLAKFSRKQIGSDKADELSNAAKTSFGVTFCRDSFSFQLRMMIEQIKYIESQVKDTEAEIKRIMKALGSPIMTIPGIGKTTGAVILGEIGDISKFDNAKKLVAFAGIDATVRQSGEFEGTQNKMSKRGSPYLRRALFQSALVACTGKNPDPVLSAFYHKKIAEGKHHNTAVGAVARKLCNIIHSVLTNNRPYEVRT

SEQ ID NO: 115961 - protein, 344 aa, unidentified
MPCFAALDVSQETTAICVVDDNGTIIAETTIATCPDVITSYLRDRAPNLSRVGLETGPLAVWLWNELAARQLPVLCIDARHANAALKMRPVKTDRNDAAGLAQIMRVGWFKQVRIKSHNCYQVRSLLTARETLVRIRVKIENELRGLLRTFGVLFGKRVGGFTGRAHEIICGELEASPEMRIIAETLMKARASVCDQIKVLDTRLAAIARANPTVKLFMTTPGVGIITALSVVSAFDDASRFKRSSSVGAYLGLTPRRYESGETSRNGRISKQGDKMVRKHLYEAATTLLTRNLRSSSLKTWGMKLVKVSGFKKARIAVARKLAVVLHAMWKTNTPFRWTQSAA

SEQ ID NO: 115962 - protein, 339 aa, unidentified
MDHVAIDLGAKKSQICVRGADGRIVEEKRWPTGDLEAYLAGRPTSRVIVETCAEAFCVADAARKLGHETRVVPATLVKTLGVGARRLKTDQRDARALSEVSCRIDLPTVHIPKAESRDRKTMCGMRDALVGARTKIVNNVRGWLRSRGRRIERGARASFRQRVEAAWQGQVPSYVERQLQVLDVLNVQIKAADAEVKSWAEADETCERLMTVPGVGPLTALRFVAALDEVKRFENAHQVESYLGLVPGESSSSERQQRLSITKAGPRSLHWVLVQAAWALHLRCRKSEAIPLQLWAHRIEQRRGRRTAIIALARKLAGILYALWRDGSVYDGRRGAKMI

SEQ ID NO: 115963 - protein, 437 aa, unidentified
MLGTLRINQIMNTATNEFAATIGLDWADQKHDLWLQPTDGSRPEYFKLEQTPEALHAWVAKIRERFSNRRIAVAVETSRGPVISALMAYDFIVLFPVNPKGLKSYRDAFSISGAKDDRSDAQLLEELVRLHPDKLRALEPDTELTRKLAGLVENRRHLIDERTRLVNQVHATLKTYYPLAERLLEGQMNTLLAADFLIRWPELESLQQAQPETVRAFFYKHNSRSAKKTEERLEAIQQAKALTTDPAIIVPARGLMVALASMLRPLHQAVARLDKEIDQAMNQHPDAPIFRSFPGAGPALAPRLLVAFGTNRDRFEKAADVAQFYGVAPVVAQSGNSKTVHVRYRCPKFGRQTFHENAACALKKEPWAKCYYDQQKERNKGKHHQACRALAHKLVRIYFSCWKHRQPYEPNRYLSALEKHASPLHRKLEKLTAATCE

SEQ ID NO: 115964 - protein, 396 aa, unidentified
MISVGIDVSKGKSTVCIMKPCGEILESPFDIGHTADELDSLISLIKSFDEETRVVMEDTGHYHLPVATYLSSHNIFVCCVNALRMKKFCSQSIRRAKTDKIDSIKIASFGITYWNELVKAYPSNVIYDELKFLARQYYQVTGMLVKSKVNFSNLLDQVMPKINDVLSNQGENHKLTEFVSRYIHFQNILDMGEMKFTSDYCKWAKKKGYRLNERKAAEILALAQNGIPTLPNSQSVKIAVSEAVKLIHSIEESRNTILAQMQDLCNTLPEYSVVKEMDCIEDTLAPRIIAEIGDVRRFKNKHSLIAYAGIDAPPYQSGAFHASERHISKRGNSYLRKTGYEIMQSLIKHKPADNAVYDFIQKKRSEGKCGKEAMIAGLNKFLRVYYGKVMEFYSEH

SEQ ID NO: 115965 - protein, 342 aa, unidentified
MGTITTIGLDIAKSVFQVHGIDATGEVVVRRRLSRGRILAFFEKLPRCLVGMEACNTSHYWARELIALGHDVRLMPAQYVKPYVKRGKNDAADAEAICEAVARPTMRFVAVKTPEQQSTMMLHRVRLMLNRQRTQLSNAMRAHMSEFGVVGPVGRRGLEHLMAVIADREDLRIPADARVCLEMLAAQLAVVKEQILENDRRIRASARETEVGRRLMEIPGVGPLLASAFVASIADPTVFKSGRDVAAWIGLVPKQNSSGGKERLGSISRAGNRYLRQMLVVGAMAVIRHVERHGTKRRWLIQLLARRAKKVAAVALANKTARTIWALMTNGERYHEPTVTLP

SEQ ID NO: 115966 - protein, 390 aa, unidentified
MIYVGIDIAKLNHFASAISSDGEILMEPFKFTNDGDGFSLLESNLASICDDKDNIIIGLESTAHYGDNLVRYLVASFYKVCVLNPIKTSTMRKNNIRKTKTDKVDTYIIAKTLMFQESLRFVTFYDLDLMDLKQLGRFRQKTIKQRTRLKIQLTSYVDQVFPELQYFFKSGLHQKSVYALLKEAPTPKAIASMHMTHLANLLKVNSHGHFTKEQAKELRVLAQKSVGASDSALSIQITHTISQIELLDSQLEQVEAEMADIMKFNDSVIMTIPGIGYINGGMILGEIGDVHRFSNPNKLLAFAGLDPSVYQSGNFQARRTRMSKRGSRVLRYALINAAHNVVKNNATFKTYYDKKMAEGRSHYNALGHCAGKLVRIIWKMMTDNVEFNLD

SEQ ID NO: 115967 - protein, 380 aa, unidentified
MELLKCGVGIDMAMQKFDACFSVIDTEQRVTVKATRQFENNPKGFVSFLEWVKKHSKQPLPVVFLVEASGVYHEQLAWYLYRQDQAITIILPNKAKRYKEALGIHSKTDKLDAKALAQMVCEQRLKLWQPVSKSIYRLRTITRQIERITNHITSFQNQLHALEHGMFREKMVEKLVFNNIALLEKQKEQLIAAIETMIKGDAELNERYEQISAIKGIGLLTYAVLVAETDGFALIENQSQLVSYAGYDVIENQSGKHTGKTKISKKGNSHIRRALHLPAFNAVRCEQKPFSTLYERVFENSKIKMKAYTAVQKKLLILVYTLWKKKEAYQPNYVLEISKEDELVSLFRLKKNSPKPCLGLHKMNIHRSIAVCSLSVGTKI

SEQ ID NO: 115968 - protein, 456 aa, unidentified
MQEKELSMKIVHPNAAGIDIGSKSHWVAVDQNPAHVLEFGVYTRDHQCLIDHLKLHRITTIAMESTGSYWQTLFYALQKAGFEVILVQGGQTKNVRGKKTDVLDCLWIQKLHALGLLSSSFLLSDYLQTLRTYYAHRDHLVAQTAMYISKMQKALRLMNIRLDIAIRDIAGKTGRAILEAILQGRRDPDYLASLAHFRVKKTQQEIAAALQGNWRDDLLFELRSCLAFYDIYKKEMDACDQKIQALLQQYIPHPEPLVLKNEPPLKTIHKKLNKNAPAFNVRQLAFAHLKTDLFQIPGVSHSTILCFLCNMGNDIRRFASAKQFASWLRLVPNNKLSGGRIISSRTPKGKNRLAIALRQAANSIGNQAAHPLAPFFKRIAYRKGRNAAITATARKLAIIFWNMITKHQPYLQYDALTLSEQRKNAQVKNIKKRLFRLNLTETEMISLFKKVSFPVT

SEQ ID NO: 115969 - protein, 368 aa, unidentified
MNEYKLKAAPTAVSKEQNSQKNPKANRILIGVDAHLKSYEAARKIDNGAVGVAQSFRSKEAFLLYVEKQREQAEEVVVLYEAGPLGYTLYRELKASDIECLVCAPRSGEQKRKRRKNNSIDARTLSSDLFNYLNGNEQALQAVRVPSEAQEQARVESRQHDALVEERKRIGAMGNSLLLSQGYGSWSNWWRPKAFERLSKGVAPWIVKHLGRWVGILRELDQQIQQAKAELTQHYQGPRPKGMGAPSLAQLNAEVLDWTLYSSRRKIGCLAGMVPSEWSTGEGQRLGAITKVGVPAIRRIITEMVWRMILFQPEYKPVQKWREVLEGPNRGLKKKAVVAIGRQLIVDIWRLQTGRITAQELGLIMIQA

SEQ ID NO: 115970 - protein, 346 aa, unidentified
MGIDAHKRTHTAVAIDEAGRKLGEKTTQMTTTEANLELVRWADGFGPERRFAVEDCRHLSRRLEADLLAASEELVRVPPKLMAHARDAARTYGKSDPIDALAVARAALREPKLPVARLDGPSRDLRLLVDHREDLVRDRTAQINRLRWHLHELDPSWDPAPRALVRFKHLDALAARLEGLEGTVAFVARDLVGRIRELTVAANELERRIVEAVSLLAPALLRLTGVGALTAAKIVAEVADVRRFRSKDAFARHNGTAPLPVWSANKVRHRLSRTGNRQLNAAIHRIAVTQMRIHDDAKTYLERRMMMGNTKTEALRALKRRLSDVVFRALLTDADDTSMAALEPAA

SEQ ID NO: 115971 - protein, 308 aa, unidentified
MTTIYAGLDIAKQNLQLHLQDRIHDLPNTTAGHRRLLKLLRAYPAIQIVCEATGGYERQIVACLHAADIPVSVLNPARVRHFARALGQRAKTDDIDAAVLSDYGVKLQPKPTAPRTDLEQQLTALIRRRAQLLDLLISQRQQLQRLTLATLKRQARSLVRKLLADIRHIEAQLQELRAQEQVMDQRVTQLEAITGVGTLTALGVLAELPELGTLNRKQVAALAGLAPHPRDSGQWHGRRSIGGGRAQVRRALYMAALVAARSNHQLKLFYQRLRAAGKPAKVALTAVMRKLIVLMNQILKNPNFVLQN

SEQ ID NO: 115972 - protein, 324 aa, unidentified
MPQSHAVNVGVDVGQEQLVVAVDGEAETWTVANDAVGHDALIARLRPRAPTRIVLEATGGYERAVVAALGSAALPVIVVNARHVRDFARATGQLAKTDAIDAQLIARFAAKIEPPVRPLADAALAELDALMLRRRQLIEMLVMERIRLHQAIGRPQAAARLSLRKHVRYLEQELGRTDRELGTLIEASPVWRVQDALLQSVPGVGPTTARTLLAELPELGRLSRQAIAKLAGIAPLNADSGKWRGQRRIRGGRAVVRSALYMAALVAARHNPMIRAFYQRLIARGKAKKVALIACARKLLTLLNHLLATGAHWHPTPVAPQPFA

SEQ ID NO: 115973 - protein, 341 aa, unidentified
MQAIGIDTHKATLAACLVDDLGMPLSERTFANDPAGHEALLAWARDAAPLVIIGVEGSASFGASAARFLVEAGREVREVPPQLSRRERAGTRRAGKSDPGDALTIARVTARERDLPPVRLADPSLELKLLVGAREDLVAEATRVRNRLHADLRVLLPGYGATAANLTAVRHQATVALRLRRLAGVQAELARGRLARLRTLAAEERSLAAQIAGRVEGHPLLALPGAGALVTAKLVGEVGDIGRFRSADAFAALSGVAPIPASSGQTQRMRLNRGGNRQLNRALHTIALTQASHHPPAIAYITRRRAEGKTWREALRALKRQIVRTVFRLLGIGARSSSIAA

SEQ ID NO: 115974 - protein, 330 aa, unidentified
MKLTRVGVDLAKNIFQLHGVDRAGRPVWCKRLKRNRWIREIEQYVEPGVEIGMEACGGAHHWARLLQSKGYRVRLIAPQFVKPYVKSNKTDANDAQAVCEAMSRPSMRYVAVKSIEQQDIQAVHRVRASLISERCAKANQLRGLAYEYGLVAPREIAALLDERVRELDKEIRAIGGENEAVGRVQQIRGIGPLIASALVAMIGDARQFKNGRHVAVALGLTPRQHSSGSKERILGISKHQPATTGVYAYMRHPQYVGFIAIMFGFLLQWPTILTLVMFPLLVWMYVRLAHAEEHEALREFGRAYEHYAAVTPRWIPHGLGHQHPTTHPGA

SEQ ID NO: 115975 - protein, 413 aa, unidentified
MDVLYPRCCGLDVHKSSISACILIQVAGRVQKHQRRFGAMTQDLQELANWLRQFEVAQVAMESSGVYWKPVWNILEGQFTVILANAQHIKNVPGRKTDQKDAEWIAQLLQHGLLRPSYVPCEIIRDLRDLTRMRASLSQEASRISSRIQKVLEDANVKLASVATNTLGKSGRAMLEKIIAGQDDPEYLASLALGHLRAKTPQLRLALEGKIRPHHRFLLRRLLDQLDFVEHEIVLLDERLEDIGQERPELSQAVARWDTIPGIDRVAGWTLLAEVGHSMAQFPTAEQLASWASLCPGNHESAGKRLGGKTRKGSPWLRRMACQCAWAAARTKNTYLSAQFRRMASRRGSKRAIIAVAHSLVIIGYYLQKNQRNYEDLGGDYFDRMDSDGLKRYFIKRLEKLGHKVTLAPIKAA

SEQ ID NO: 115976 - protein, 375 aa, unidentified
MKEKVRFLGLDVHAETIAVAVAEPDGEVRSLGTIANREESIRKLIKKLGSADQLRACYEAGPTGYVLYWQLTQLGVECVVVAPTLVPTKAGDRVKTDRRDALKLARSHRSNDLTAVWIPDGDSEALRDLVRTREAAKQDQLRARHRLSKFLLRMGRRPAVGMKAWTEPYMAWVRQVQFERPAQQATLEDYLHEVDHMAARIKRLEQGITEVVKLASPQIQEVVKGLQALRGIAEISAVTIVAELGNIARFDTPRQLMGYSGVVPSEDSSGKRKRQGSITKTGNAHLRRIVVEAAWSYRHRPAVGPRLRKRQEGVPEPIKEIAWKAQVRLSKRYARLAAAGKDQRKIVTAVGRELLGFIWAIGTRAEATVKQQMAT

SEQ ID NO: 115977 - protein, 341 aa, unidentified
MLIIGCDYHPSVQQIAWVDTDTGECGERRLTHCVEAEQFYRELKSKGVSVRVGMEATGHCRWFERLLGELNYELWVGDAAQIRAKQVRKQKNDRRDAAHLLKLMLEDNFPRIWVPTPENQDVRQLILHRHRLVGMQTRVKNQLQAIAMSEGIRRKRGLWSKKGRAQLRALPLAYWTSRRRQELLELLDGFEPSIDQLSQAIEQEAEQLPEVQRLLTHPGVGPITALAFVLVLGTADRFDCGKQVASYLGLIPCEDSSAERWRLGHISKQGNPLLRYLLGQAALSVARCDEEWHRQYAHLAMRRNRSIAKVAMARKLAVRLFWMWRRGWDYQQLKKFGSHVG

SEQ ID NO: 115978 - protein, 322 aa, unidentified
MQSEPMIIGVDVAKDDLQLAVHAGSTASRRLPNQAQAIQDWLATLSPGSVVAMEATGKYHALLAELAHLAGMQVYVLNARDVYFYAKALGTRGKTDRLDAQVIARYAAEHRATLRSWHPAPELLEQLQEMLKRRRMLTDQSVTVRLSLRGVKQLQAVNELLEQAFTSALDKLDAQVMALVHSDQQLSSDVARLQTITGFGMQASVLLAALFNRIEFDNADAVVAYSGLDPRPCDSGTKHGKRRLSKRGPGILRRAMYLAAFAACHSKALGSVYQALRAKGFATTESLIILARKLLRIAWAVWRNGKTFDASLVGAQHACIKT

SEQ ID NO: 115979 - protein, 445 aa, unidentified
MHYKRLLALIDSVSSYLSVGLDVGADFTWMSIALPNGSFIGKPFKIVHSDPGSRDLAVAKIKEAQETYSLKSRCFLESTGIYHIPLLCFLRDKGFDCSVINPIITKNSTNISIRKLHNDKFDSKKAALVGLNVSLKTSIIPDDSVLDLRNLIRDYYYFKDLQSSVALKLTAELKVSFPAYAKVFSKVTTQSSLKLLSSYPLAEDMLTAPKDDIVKIIRSTARFGEAYALRKYDAIIAAAQDAAVFGRALPSNAVRIRLYIDTYQEYQKHLDALLKALHETVDQLQDTLIYDQICLLQSLRGIGFLSAVVLIAEMGNFKLFSSPKKLYAYFGLDPAVKQSGKLNGDRVHMSKRGSSLARRVLHMAALNNVKVDKGSGTPVNPVVYDYYTRKCSGKKKPVAMGAVMHKICNIIFAMLRDNKPFEVITPEEHCRRFAAEHPDKIQKAA

SEQ ID NO: 115980 - protein, 496 aa, unidentified
MRKKKQRYIRGEREERFKRKIKGIQKEEILGVSIDVSKDYHKALIFDFEGRVINHPFEFDVFQVGYDHFKQRVKEAIKQREAKKVFFALEPTGSYHENLARHLKEDFKEVYFINPSATYANRAQDMLLGLKTDDIDLGAIGDLLIRGKGYEYNLEEAGVYLSLKEETFWREKKLKMQTQLKNQIKARLNKVYPGIMSEYNDNKPLFSKFWESRVARGLIKCRLTPHQIKSMKVEELQRSFETEDYLLTARWAEKIIAYLKRMLPPVDEVLTIELDFINRDLHLLETLEGELSQVEETMVEEVKETDSAFLLGKIKGLSEVMIASFAGAVGRIANYQRGKQIFSKSGLACKVNQSGKRNIKGLGIRRMGSKVLRCVLYKMTTSAKTHNPYFGLYYSYLTEEKGKLKKKAHIATANKLVRVMFAMLRDKAEFNPPTAKIDYLEMLFDQRRRERRERRKKEKELSPSPFFGPKGIRASERDSFSRRVTIVKKEKVSTAS

SEQ ID NO: 115981 - protein, 393 aa, unidentified
MVCVGIDVAKDKHDCFILSSEGVVLADVFTIPNNREGFETLLQRIQSCSFPADKIKVGLEATGHYSYNILGFLLDKGLATYVINPLHTNLYRKSLSLRKTKTDRIDARTIAAMLMSDVDLKSYTNTAYHNEELKSLTRYRFDKVRQRAKLKQSVSRLVNILFPELETIVPTLHMASVYALLSELPGAQQIADTHLTHLKTLLDDASKGRYDREKAVEIREAARRSIGSRMPAKSLELRHTIQLIRELDNEIAEVEDSIEEIMNSIQSPITTIPGMGLRMGAMILAEVGDFANFDSPDKILAYAGLSPSTYESGKLSLAGAYSHMEKRGSRYLRYAIFNATKYVCIWDPTFTAYLAKKRAEGKHYNVAISHAAKKLVRVIYALQKSGQAYRTAT

SEQ ID NO: 115982 - protein, 408 aa, unidentified
MTNKVVGVGIDVSAYKLDIAILNTDAELLSTDQVESNAEGFKKLFRILSKQLNAVQIVFEATGIYSNKLVRFLNELHFSFECINPLVARQLSTGLRQNKTDRVDAIKLARIAISDSFQPSYVRDEAYEKLYQLDRWYENENRNIVIFKNRFDKIQQQTFPVKGFPVSKDQSLFYELFIIFPHADWVLRSSLKQVTEKLKVHLSKQHPRTNWGKYAKLLHSYAVKAVPSVISDAPNSKYLIQLGHQILTVMDTKAQLIKNMIEIGSTFPAFKYLCSIPGIAETSAIRIIAEIGDISRFDNTNQINAFIGIDLRHFESGLFTGSDTISKRGNKIARKLLYQCVFQIVQTCTLTHKKCHIADYYYYQTKKQSSSPKKTAIACIHRLLRTIYGMCKYGESYQYKFHKNQLIQ

SEQ ID NO: 115983 - protein, 409 aa, unidentified
MQVVHSCCAGLDVHKKSVYACVIRCDADGRKHQQIRSFSTMTQDLLALGDWLKEAGATHVAMEATGVYWRPVWAVLEGQFELLLVNPHHIKVIPGRKTDARDCEWIADLLQHGLLRGSFVPPTEIQDLRDLTRYRTELTQAQNRVANRIQKLLEQANVKLSSVASNTLGLSGRRMIEAMIAGEENPEKLADLAQRALRKKIPELRLALSGKVRNHHRFMLKEYLDEWTALGTRISRIELEIKRRIVPFERAVTLWQSIPGIDWVTASNLAAEIGVNMGQFPSPQHLASWAGLCPGNNESAGKRMSGKTRDGNQWLRRTLCQAAWAVTRKKDCYLSAQFRRIAARRGMKRAVMAVAHSMLVIAYHMLKTDRAYKELGGTYLERINKDQLQRYYLKRLQRLGLTVTIQPVA

SEQ ID NO: 115984 - protein, 351 aa, unidentified
MLIVGCDYHPGVQQIAFMDTETGEFGERRLEHGDGEAEKFYRDLQQTGISVRVGMEATGHARWFERLLEELHFELWIGDPLEIRATRVRKQKTDRHDAQLLLKLLLEDRFPRIWVASWENRDLRQLLWHRHRLVQMRTRIMNQLQAVALNEGVRQKKRLWGQTGRAQLESFVLAPWASRRRQELLELLDRLNPSIRELNAAVEQEATRRPEVRRLMTHPGVGSLTALAFVLIVGTPQRFACGKQIASYVGLVPTEESSGGRRRLGHISKQGNSLLRFLLVEAAQATVRSDPDWRRRFLHLAMRRERVIAKVAMARKLAVRLYWMWRKEWDYEQVKRFGSHAGQPENPLGVK

SEQ ID NO: 115985 - protein, 482 aa, unidentified
MKKRNIYQNRSQELLSLFKEAGNSAKVMCVPIDVAKKDHVVMFCNGYGDILRKPFSVKNSPEGIKYLAEQVARSCRHRGISLNHVFFGGEDVNAYAENFVNTLRSKGWLVAGVNAHDAKKQRANLQASTDRLDLMGIATMLLNCRANCCPAQSGVYRNLRTLVRHRRKLVVMSTEVKNRIHTVVDRIFPGFLDESKSGIIAFTKSSLYLMEDRFSPSQIRRRRRQKLIEILKRFGTSKPESTAAKLQQYAAQVLHTSVEYISTLQLSLAQHVKHLRCLHESVEHLEREIAVNLAQTQGAFLTSIRGIGIVLAAGVTAEIGDPNEQKPLNNLVSYSGIIPRVKQSGGPEGKTYTVAVAKRCNRILKDYVVKSALHLGLHGPKDLMVDYKRRDASGQHADFGIGRRYLRMAMCLMRTSQIYMPYRLLKAEAKLEERASYYLMTWPYLRGKWKKLGALKAAFSKDRPLGQWRRIIQELYDIELKL

SEQ ID NO: 115986 - protein, 341 aa, unidentified
MDKELYFGVDVSKKTLDLAYYDGETIDWKNAHIQVSNDDAGFKKIGSWVAKVGKDFDTFLFCMEYTGLYNQNFRLWLESKEYIYGMVEPRKMHRFEPDLDDDQRSLDRIKTDELDAFRIAIYCEQNHKKILRNPSKLPSPVYFKLKRLLAERKQNTKQSTLYKQQLHDICAYDTNLSVERKKLLLKNMQENQKAIDKEIDSYMNEDTSIRKNYNLLTSIPGIGRIIALETIVLTENFTAISNPRKYACYIGIAPFKKESGTSVRKKTGVSKKGFSEAKADLSIAVLSAIRNNPSIRDYWIRKRKEKCGGIVLNAVKFKLVLRMFAVIKRGTPYVETDAYKN

SEQ ID NO: 115987 - protein, 422 aa, unidentified
MTALVQPGLFIGIDWADKKHDCYVIDQNGNAFHQEFRQLPEEIEAWVGEMLKRAGGKPIAIMLEQSNGPLVHALMFRDDVVLYPINPKQLARYRESYPGGGKNDPTDAKYLARMLHERITTLTPWRPDDEKTRLLAHLSQQRRKLVDGQTKLRLQLIAQLKAYYPLALELFGKEWQLPLLMSVLRRWPDPRQLRRADRRLIRHVLQDHAVRNEEKQNEVINRIRSAQLLTRDDALITPAAMAVELLAHQIQLVQKTIGEFELKIAEAMKQHPSAHLFTSLRGAGPALAPRLLCAFGSQKERWADADSLAAFSGIAPVTRRSGKQLHVQRRYACPKYLRQTFHEFADSARIYCPWTRARYSMLRDRGMKHHAAIRKLARSWIRILFQVWQTGTPFDCDRYVTKLKQRCPAIIRYLPQADCAIQ

SEQ ID NO: 115988 - protein, 371 aa, unidentified
MYHLSHAVQMNGCQNYCKLMKTETTAFNPKLYIGIDVHKKSWTFHYQTDLFDGKTITQPASPGKLVEWVQKHYPTHEVTCAYEAGFSGYSAARLFQKQNWNVLVLNAADIPMPQKQSIVKTDKIDCRNICKQLKNEALKSITIPEEQRESFRSLFRERNNFVMGLRHIKLNIKSYLMYCGITIPEEFDNASWSKNFIEWIKNQSNEYETGALKISYLLKRYEFMYQETLSVSNQIRLYARKHYKKDYYLLMSVPGIGGITASAILAELGDLRKYNRFDDLASSVGFVPGIYSSGDKTIVKGITPRAKSLLRSYLIEASWQAVRFDPVLQEYYRSHYGKQPNKIIVKVARKLLSRIHAVIKTELPYQIGVIK

SEQ ID NO: 115989 - protein, 280 aa, unidentified
MNKYKETFGVDISKDVFDVHGSNQGHDQYKNDEIGFKKFLKELPKSSLVVMEATGYYHYRLAQFLYKNGVVVSVVNPLSIKRFIQMKLAKVKTDKSDAKAICEYALINEVPIYNALTDTQSECLQLFRLLDTYLKQRTATKNKIHGEAVLGIPSKFVYRSLIRNKKQLNKEVTAIESKILSLVKEDQQEQLTLLTSIPGIGQKTALFLIVVTDGFSKFETASQLCSYVGITPTIRESGSSVRGRARISKVGIESFVIYCFYVLSMPVNTTRHAERYMSES

SEQ ID NO: 115990 - protein, 349 aa, unidentified
MEFYAGLDVSLETTSVCVVDREGKVIREGKLASDPDAIELFLAEWGIHLKRIGLEAFSFSGWLFTGLEEKGLPVVCIETRHAKAAMNAMLNKTDKNDARGIAQMMRTGWFRAVHVKSGEAQTLRALLVGRKAMLGKVIDMENMIRGLLRPFGLKVGQISTGQFDARIRELVAGMAKLEAIIAPLLDARYEMRLQLAKLHRLAVVAAREDKAVRRMMTVPGVGAVVALTFRATVDDPTRFKKSANVGAHFGLTPRRYQSGETDYTGRISKCGDEMTRTMLYEAAIAILTRIPKNFKLRLWGLRLMKKRGLKRAATAVARKLAVLLHKVWVDGTVFRYGAGMKRGRIAAAS

SEQ ID NO: 115991 - protein, 301 aa, unidentified
MEGEKRRFAGIDLGKREYTMAIIGKTGKMSIHKGKTCIKGRAALYKLLEKGDKVALEAGNLAFIMAREIMERVGSEVRVLNSAKLPFIWDAPTKTDKEDAMKLAHLVEERRDEKLPVVPLPSEKEMERRKILASYGKEMGDRTRLINRLHATFVHQGHTTVVKKDLATAGRRSEAVEMLKGLEREEADWILKYLDLHERRIKELKKKITGEAKIDEGMQRLQSVAGVGPVVAYAFAAHVGDGSRFSKGAQVSNYIGFVPRLDYSGTIQRHGHITKHGNGYLRGLIIQAAWAMVKCRSGGAL

SEQ ID NO: 115992 - protein, 365 aa, unidentified
MSKRIVSMGKSVSCPARSTETSTDSQRARVFCGIDVSRETLAVAVLAPDQPIEHRAFANTAGGHKGLIAWLGKKRAVVRVSLEATGIYSLDLALALDGAEDVELAVLNPKLVNRFAQTLRRSKTDKADAEVLAEYSLRMPFQAWRRPGQTALALRAIGRHIEALGLEHTRALNRLRAAEGTLTAARCVVADLRRCLAGLERRMVKLRREARKVIDGNEQMREQFRLLVGMPGIGEISGLQILGELVLLVPEMKARQWVARSGLDPVHRESGSSVHKPARISRAGSRHLRRALYMPALSAVRCDPHLKAFYEALLCRHKTKLQALIAVARKLLHAIYGIFKSRTPYDGQKLFPALRIGCAIESTSR

SEQ ID NO: 115993 - protein, 316 aa, unidentified
MKNEVFVGIDVSKQHLDVAVRPQGRHFITPNDDRGLKQLLKRLTALKPQFIVLEASGGYELLATAALAEAQLPVALVNPLAVRQFAGATGKLAKTDKIDAQVLAHFAEAVRPELRPLPDQEQQLLKAALQRRVQMVKMIGQEKNRLEKTFIPQLRQDIQAHLAWLQQRLAQLDRDLNDQIRRSPLWRDRDRLLQTIPGIGPAVSRAVMAQLPEAGRLPGKKAAALVGVAPYNRDSGRFRGKRMIRGGRSYLRRMLYMAAVVAARWNPVIRTFYQRLLAAGKPKKLALTACMRKLVLILNAMLKNNQPWNQFINQVP

SEQ ID NO: 115994 - protein, 527 aa, unidentified
MNPGRCPDTLSKVIHSRAERASKAERSEAVNNFAAMHFESNLRSGQNGSGRKVPGRTRSACPDPARIEPRTPVGPGAFVTKSERTTPCEGLRIRTTHDKSQGPRASKTMNEPICWESITHYAGFDWAKDHHDVVIVNQQGKIVQDLTFDHSAEGWAKWKEVVAAYPHLAVAIETNQGAAVEQLLQSGVVVYPVNPKSAERYRDRKAPSGTKTDFLDAWSLGDALRVDGHGWRALKPLDPLIHELRLLCRDEVELIGKRTELVNQLQAALHEYYPAALKAFDDWTATPSWKFVQQFPTPELLQKAGRGKWEKFLHVHHLYRPEINEKRLEIFSKAHEFCSSAAVTRAKSRLALAVIKLLQALEIQLEDYRKEIRRLFNEHPDHDLFGSLPGAGEKLAPRLLSEMGSDRSLFESAQALQCYVGTAPVSFQSGQVHQVYVPFLCNKSFRHAVHLWADLSRKFCSWAQVYYQQLRAKGKTHATALRCLGQRWLKILWKMWQTKTCYNPDLHMANQLKHGSWVLTIKAGGTK

SEQ ID NO: 115995 - protein, 368 aa, unidentified
MLIIGCDFHPSGQQVYAVETETGEIVADRWLAHEGEEVRKFYRDLAGGARVGVEASGNMLWFERLLEQCGHELKVGDAAAIRAKDPRKQKHDRRDAKLIWRLLVSGEFPEIWVPSLAERDLRQLLVHRDKLVRMRTRIKCQLQHLALNQGLQKKRKLWTKEGRKVLEGLELEPWTKRRRDDLLQLLDSLEEQCKQLDMAAELAAKASPQARLLMTHVGVGPIISLGMVLTLGDVSRFRNSRKLISYLGLNPSEESSGDRHQLGSISKQGSSFMRFLLVQGAQTAARADDGLARQYRRLAVQKHRGIAKVMVARKLAVRMYWMLRTNTPYPEVVVRMRGSSSHPVVQGPTCLSERPASPAQAVSRKAES

SEQ ID NO: 115996 - protein, 403 aa, unidentified
MNSVGIDISKGRSTVAVMRPFGEVVISPFEVRHTDSELSELARQLKSLDGETRVVMEATGNYHTPVAKLLHDAGLYVSVVNAKLVHGYGNNDLRRVKTDKKDSVKLANYGLDRWLALTRYVPEEDTRLLLKNCYRQYRQDSKVQTVLKNNLISLLDTVFPNVNRLFSSPAREDGSEKWVDFVAEFWHCRCVSEKSEKAFANKYQRWCRKYGYNFNEAKAHTIHAEASGHIGVMPMSETTKLLVEQAVAQLRATSTALAALKHEMQALTSMLPEYPVVMDMFGVGPTLGPQLIAEIGDVRRFYSKKALVAYAGLDAPPNDSGDVTGRHKSMSKIGASSLRRTLFLVMSVYLQTAPLDEPVYQFMDRKRAEGKPYRVYMMASANKFLRIYYATVKAYLESLEHTA

SEQ ID NO: 115997 - protein, 429 aa, unidentified
MNCTQNKKIEQVKETTMIVGIDVGSEKHYFRAFNWRGIELTRKPIAFSNSMEGFNSFYNMIVELMQKSELEEALVGIEPTGHYWFALGQFMGEKDIKFVMVNPHHVHKTKELDDNSPSKNDRKDPRVIAGLVRDGRYFYSYMPTGVYAELRNASNRRFVLVEEQTRAKNRLQKWIAVYFPEYKGIYTHIDAKGGMLVLKKAPTPEEIVRLGVEGIIKIWKDAKLRGNGHKKAMLILAAAMRSIGLKAGLTEARMEIQDLIEDYELQTKRLERVNDLIKGLCQQVRYADKLLEIKGIGITTVAGFIAEVGDITRFDSTKELQKLAGLELVADSSGKHNGKTKISKRGRKRLRYLLFEAAISVVGKNEEFKEIHRYYTTREKNPLKKMQSLIAVACKLIRVFHAILTKGIRYDASKMLKDIRHPGEQLKAA

SEQ ID NO: 115998 - protein, 351 aa, unidentified
MPRTSTVHAVTAIGIDMGKNTLHMIGLDTRGAIVLREKVSRGRIALRLANLPPCLIGIEAGMATHYVARELAALGHDVKQVPPTYAKPFRQGQKNDFRDAHAVAEAVQRPTTRFVPAKTDEQLDLQALHRVRSRLVSERTAVINQIRGFLLERGIIVRQGLRFLRQVLPDILAKRTDVLSPRMVRILADLASDWRQLDGRIEPVTDEIETLAKSDDSCRRVMTVPGIGPIISSAMVAAIGSGAAFAKGRDFSAWLGLVPKQMSTGDRTILGRISKRGNGYLRMLFMQAARVILLRPANWPKHGFGVWLARAAVRLHPNVLAAALANKLARITWTVLAQQRSYEARLTKAAA

SEQ ID NO: 115999 - protein, 466 aa, unidentified
MGNGSGVSRGDRNRNARLARLRVLVPVGNAVVGIDLADRKQMVVVTDHDSKVLARKTFRCRAWDLGVALDWAGKQASVKGFAGVTVACEPTGHRWRVLGELAGARGMPFVCVQPMLMSWARRSEDLTVDKTDEKDAVIIARLAAQLRCYVPEPVDETWGRLRHLGARREQLLVDAGSQVQQMRALLECVWPAALATAQQPFRSCTWTATMSVLLDRDAGDLAPTRRLGLARLESAVRREVLRQGRQKPCLRIVRALFSALTDPAGVIAHRRGALERVALLLGDWQQTHQRLIDVETRMTAILNEHKLTELVTSITGLSAIGAAAILAETGDPHRFATARALVKHAGLAPREKLSGAFVGRTKLTGQGRPGLRLAAWRAVWGAQRANPVYAARFAHLTTREHNKLTVTQAQAVIAAAILTCTPSSPPAAAGIRSSPPTAPDIPPRYPSPPDTSRRSSSSVGASPTRH

SEQ ID NO: 116000 - protein, 375 aa, unidentified
MSKIRFVGLDVHAETIAVAIAEQGGEVRSLGIVPNRLESIRKLIGKLGPAKDLKVCYEAGPTGYVLYWQLTQLGVDCQVIAPSLIPTKAGDRVKTDRRDAEKLARCFRAGELTAVWVPTTEQEALRDLVRRREAAKKDQLRARHQLGKFLLRHGQRPTGMKAWTKAYLEWIKTHVHFAESALEATLADCLEEVDHVAARIVKLEKAIDEEVKKAPPQMRAVIEALQALRGVAQTTAATIVSELGCLTRFATAPDLMGYSGLVAREYTTGNRVQRGGITKTGNSHLRRVVVEASWAYQHRPNVTGFLLRRQKNLELSEEVKKIAWKAQQRLNKRYKAMAARGKQKNQIITALGRELLGFIWAIGVHVEKQYLSPAA

SEQ ID NO: 116001 - protein, 371 aa, unidentified
MGAYYVGLDVHSRETVFVIQDPTGAVIGRGALPTTPEAFARMCHQYQLPAGTRVALETGTSAFYVARALSALDLKPIVIDAHEVRLKAHRPGQKSDRRDAFELCDGLRRDLYRSIVHIPSPAISTLRTALSRRRHFIRIQTAEVNATKRLLRGAGWLGGKRGSLRNASGWERLIDALASEPTLQTHTRFHYAVWQQAGEQVRAIDHLLGDLGRGFRDDVRRLETVPGVGPIVALTAVAVFADVERFGSAKHAASYAGLVPSTYQSADRDCHGHITKRGSAELRTMLCEAAHHARRPSHPLHPYFLKLCARRGYKSAVVAVAHRLCRVLYALLRDGTDFQPSRLGIEEGPFTQTVTRRFRLTPKSAGRLALV

SEQ ID NO: 116002 - protein, 347 aa, unidentified
MRFYPNQHRHTCGVDLHGRNLYLCVLDQQGEVRLHKRIRCEPELFLQAIAPFRDDLVVGAECIFCWYWLADLCADHGIPFILGHALYMKAIHGGKAKNDKIDSRKIAVLLRSGAFPFAYVYPPLMRSTPDLLRRRLHFARKRAELLTHIQNTFTQYNLPRPAGRLTCPANRKGLPELFDDPAIQTSLNADLSLIDHYDGLIPNLERAVLEQVRIHDPDNFRRLRSIRGVGKILGLTLLYEIGDIARFPSVQDFSSYARLIKCGKESDGKKTGTSGHKIGNVHLKWAFSEAAVCFLQYNQPGRNYLQRLRRKHSKGKALSVLAAKLGRATYFILKQQTTFDMNRFIAN

SEQ ID NO: 116003 - protein, 377 aa, unidentified
MSKIRFVGLDVHAETIAVAVAEPGGELRSVGVIPNRLESIRKLVGKLGPVQDLKVCYEAGPTGYVLYWQLTQLGVACEVVAPTLVPTKAGDRVKTDRRDAEKLARCYRGGELTAVWIPDAAHEALRDLVRAREAAKKDQLRARHRLGKFLLRHGQRPTGAGTAWTKKYLEWIKTHVRFEQPALEATLSYYLHEVEHMAERILHLEKAIDEAVAQASPDIRAVIEALQALRGVAQMTAVTVVCELGSLARFPSPRQLMGYSGLVSREHSSGNRIQRGAITKTGNAHLRRVLVEASWAYQHRPNVTGFLLRRQKSLALSDEVKRIAWKAQYRLHKRYQAFTARGKNKNQIVTALGRELLGFVWAIAVHTETQMKSRQAA

SEQ ID NO: 116004 - protein, 376 aa, unidentified
MNEKLRFLGLDVHAETIAVAVAEPNGEVRSLGMIANREDSIRKFIRKLGSPEHLRACYEAGPTGFVLYWQLTQLGVKCDVVAPSLVPKKPGDRVKTDRRDALKLARSHRSDDLTAVWVPDEGSEALRDLVRAREAAKQDQLRAKHRLTKFLLRTGQRPPLGVKAWTEKYVEWVQQVRYTHPAQEATLLDCLNEVQHMEERVKRLEQSIVEVIQLAPAPMQEVVRGLQALRGIAHISAVTIVVELGNITSRFESARDLMGYSGAFPSEDSTGKRIRRGGITKSGNAHLRRIVVESAWSYRHRPAIGARLRRRQEGLPAEITEMAWKAQNRLHKRYMTLMARGKEQRKTMTAIARELLGFIWAIGIKAEAACKQQMAA

SEQ ID NO: 116005 - protein, 322 aa, unidentified
MGTLSFCGIDVSKDRLDAMVLPEQQSSCVGNDPAGWAQLVEWLSDFSIAAIGLEASGGYERGVMRALLAAGLSVRQINPFKLRQFANASGVLAKNDRLDARMIASFIAVMPTRAAQRRTPGIEQMSEIVTVRRHLSDQKIAAENATKLLEDAMLQRLSRRRIAQLASDIAQLDNRLAEIVAADSALSRRYQVLTSMPGVGLVLACTLIALLPELGRMSRKQIAALVGVAPYDFDSGKLKGKRCIWGGRAPVRHVLYMAAMSAGNWNPTLKAFRHRLKTAGKVPKVTIVAVMRKMITTLNAMVRDDVAWADHLAGRRSAPTAR

SEQ ID NO: 116006 - protein, 313 aa, unidentified
MATSIYVGIDVSKDRLDVAVLGEDRGWQVDNTPGGIAQLVKRVQEIRPELNVVEATGGYQRGVAQALFEAGLPVAVVNPARVRQFARACGLLARTDKLDAQVLAEFGQRVQPRRYASKTEAEKQLSAMLVRRRQVEEMLKAEQSRERTISQSVRPSLERIIACLKEGKKNLDTLIQQFMTNQEAWQEPSKILGGVPGVGRVTTSTLLAELPELGKMNGKKIAALVGVAPMNFDSGKKRGYRKTKSGRSDVRRVLYMSTLVATRYNPLIQAHYQQLLKRGKEKKVALTACMRKFLVILNAMMRDRQPFRCAPAI

SEQ ID NO: 116007 - protein, 327 aa, unidentified
MAEPTPLFVGLDVHKDSIAVAHAQGESTAPPLFLGALGTRQADLDKLIRRLQAKTPALVFAYEAGPCGYQRYRDLTAQGFDCRVVAPSLIPKKPGDRVKTDRRDAVALARLLRSGDLTPVYVPTVDDEAIRDLCRARDAARLTLKNAKLRLKAFLLRLGLHDVGRADWTAAHRRYLAKVVCPTPAQQIVFQELVRAVDEQVDRLQRLEAELQELAPAWRLDPVVQALQALRGVQWLVAITVVAELGDLTRFDSPRQLAAFVGLIPSEYSSGPARRQGGITKAGNGRARRALVRGFAASSLVTRRSHGVIPFRDCLSSAALFPEVSSV

SEQ ID NO: 116008 - protein, 346 aa, unidentified
MVETTIIGLDVAKQIFQVHGVSADGKVAVKRQLRRSDVLRFFGRLTRCVVGLEACGGSHFWAREIRALGHDVRLIPPAYVKPYVKRGKTDAADAEAICEAVSRPTMRFVPIKTAECQAGLMVLKTRDLLVRQRTQAINAVRGHLAELGIIAAKGLAKVGTLIAVVRDENDQRLPPTARTALKLLADQIEVLTERVDALGREIVAEVRRDDTMRRLSTIPGIGPITAATIQALVPDPSAFTSGRHFAAWIGLTPKMHSSGGKEQLGKISKMGNPSLRSLLVVGATAVLRHARRGATISPWLTALLARRPAKVAAIALANKMARIVWALLTKGGTFIRKNRAAEHAAA

SEQ ID NO: 116009 - protein, 399 aa, unidentified
MSRIWTGTDCGKTHHHCLVLNAEGDVLLSRRVANDEPELLRLLGDVLELAGESPVTWALDMTGGEPALLIALLVSHGQELVYIPGIAVNRATDSYRGAGKTDARDARVIADQARMRRDLEPIRPSDEATIELRLLTDRRIDLVADRTRTINRLRSLLTSMFPALERAIDLGGTTGPLTLLSGYQTPAAIRRAGTRRLTTWLANRKVRNPEALAAKAVEAADRQHTAVAGERAIAKMVHALAQEVSALNEKINATDKLIEGRFREHELAEVILSIPGVGPTLGAEFLAGIGGSMDAFPTADRLASFAGVAPVPRDSGQVSGNLHRPQRYHRRLQRVFYTSALISIRSDPNSRRFYDRKRAEGKRHIQAVLALARRRVNVFWALIRDRRCYTITPPVPQAA

SEQ ID NO: 116010 - protein, 303 aa, unidentified
MASDDGALEARFANDEEGHGRLVARLRELSPQLVVMEATGNFQLELSIVLASAKLPMAVVNPRQVRDFAKALGILAKTDAIDARTIASFGATVKPEAQPLPDDQALELEAMMTRRRQLIGMIASEKNRLQALFGPAKKSWAEKSIRDTLSHLIKQLNQLDKDLHKRIERSPAWKAKDDLLKSVPGIGKVTSLTLSIDLPELGTLDRKQIASLAGLAPLNRDSGKSIGKRRIWGGRASVRTALYMACVASLRCNPVIQALYARLTQVGRKPPKLALVACMRKLLTILNAMVRERRPWNPAVTGA

SEQ ID NO: 116011 - protein, 403 aa, unidentified
MNSVGIDISKGRSTIAVMRPFGEVVISPFEVRHTGSELSKLAKQLKSLDGETCVVMEATGNYHASVAKLLHNAGLYVSVINAKLVHGYGNNELRRVKTDRKDAGKLANYGLDRWLTLPRYIPEEDTRLLLKNCYRQYRQYSKVQTVLKNNLISLLDTVFPNANRLFSSPIRGDGSEKWVDFVAEFWHCRCVSEKSERAFTSKYLRWCRKHGYNFREAKAHTIYAEASGHIGVMPKFETTKLLVEQAVAQLRATSTALAALKHEMQSLASQLPEYPVVMDLFGVGPTLGPQLIAEIGDVRRFYSKKALVAYAGLDAPPNDSGDVTGRHKSMSKIGASSLRRTLFLVMSVYLQTAPLDEPVCQFMDRKRAEGKLYRVYMMASANKFLRIYYATVKAYLESLEHTA

SEQ ID NO: 116012 - protein, 332 aa, unidentified
MNLNPQGRVAKRDVRPNAGIDVSKQYLDVCCDGDELRLGNDASGWGELIAKLRAVQADLIVLEASGGFERGLVCALQQAGLAVARINARQARDFAKSMGALAKTDRIDARCLRDFADVLARHDSRDKYILAPADPQREVLAALMLRRSQLIDMRVAETQRLGQANERAARSIRAVIKTLERQIQDIERDVDKHLDRHFKDQRKLLASVSGVGAATTLALVAALPELGKLGRRAISKLVGIAPLANDSGQRKGQRHIWGGRAQVRTALYMATLSAMQHNPAIAPMYQRLIQAGKPRKVAMVACMRKLLVILNAMVRDGAVWDATRYAPASQTT

SEQ ID NO: 116013 - protein, 406 aa, unidentified
MFIGWDWASETHDVTVMDDTGKRIDRWEPAHTEEGFAKTLARLRKHGNPAGLPVAIETTRGLAVDRLLAAGHPVVPVHPNAFHAMRARWGASKAKTDAGDSMKLADYLRTDGHLLPRLEPTEQATLDLQALARQRADHVEAKVAAVNQLAALLDEHWPGGKTVFASLDSDIAMAFLERYPTPASAARLTAGRLEAWCKRRGYSGKKPGSVLIERLRATPKAASRLSEAITGQLVRVQVQLVQGIRGTIRTLDKAIAEATEAHPYAPLFATMPRIGKVSLGQVIGEIGPILERAQTCEQLIAEAGVVPVTRASGKSRTVAFRFATNRRARVALTTFADNSRHGSTWAAKIYNDARARKKRHPHAIRILARTWLRVMWACWRDGTCYDPATHQANRKINTPADKPLAT

SEQ ID NO: 116014 - protein, 353 aa, unidentified
MTEYVGIDWAYRRAAWCAMSAGGVIGAEGFTPADEDGLAKLVLRLGSDVKACLEMMSGAVWVRDRLRSAGWQVEVADARRVKGVAPLACKSDRVDARVLAELCRRDLVPALWIPSLEERELRERLRRRMHLVRLRTSAMNRIFGLGTQWGLRLSAERLRRQGALELLAQRGVPAVWQRSIQEALAVIDLLEARIAPLEAELAPIARADRDVALLVTIPGVGEMLALTLAAEIADVSRFPSPGKLVGYAGMAPGVKQSGQSSRSGLPLSKAGSRTLRWAAVEAAQHAWRESNPWHQLYSDVAKRSGKNAAKSAVARKVLIASWHMLSRCEPFKPSRPRGGARTVPASSISVLAA

SEQ ID NO: 116015 - protein, 404 aa, unidentified
MLFVGDDWAEDHHDVYLMNDTGDRLASQRLPEGLAGISRLHALIAEHAEDPAQVVIGIETDRGLWVDALTAAGYQVFAINPLAVARYRDRHHVSGAKSDASDAKLLADLVRTDRHNHRRIAGDSPDAEAIKVLARAHQNLIWARTRHSNALRSALREYYPAALETFENLADRDALAILGRAPTPADAKRLSVSKIRAALKAAGRQRNLDTRALEIQEKLRTPQLAAPAAVTAAFGASTRAAVGIIAELNRQIADLEAELATHFEAHPDADIYRSLPGLGVILGARVLGEFGDDPNRYTDAKSRRNYAGTSPLTIASGKKRAVLARHVRNRRLYDAVDQWAFCAITHSPGARAYYDQRRAAGDLHHQALRALGNRLVGILHGCLRHQTHYDEHKAWAHRPAAAAA

SEQ ID NO: 116016 - protein, 345 aa, unidentified
MELHTIGIDLGKTVFHLVGLNLCGEVVVRRKFSRKQLLHFTANLQVKLIGMEACGGSHFLGRALREQGHEVRLMPAQYVRPYVKTNKSDYIDAEAIAEAVGRPKMRFVPIKSDDQLDLQSLHRVRERWVMRRTAVINQIRGLLLERGITLRQGRGHVDAALPGILEDASAMLSGTLRMLLAQLKLELDHLQMRIDEADAIIKKVAGENEACRRLVAIPGIGPVTATAIIAAIGNGAAFKKGRGFSAWLGIVPGEYSTGGKQKLLGISKRGNPYLRRLFVQGARAVLQQRAKQSSGLSAWLAQLTARTHSNVAAVALANKLARMAWAVLAKNEPYRPPMLVGAATA

SEQ ID NO: 116017 - protein, 379 aa, unidentified
MTTTIDTRDVCCAALELSKTSWVCAFSAPGDSKAAVHKIRPGDANRLIDILNSSNEKAQCHLGRQLQIVLCYEVGYDGFWLARVLIARGIRTVVFDPASFLMPRRGRRAKTDRLDAEDMTRTLRTWLSGDREVARDVQIPSVEQEDAKRIERERKYLVEERISIVGRIKGLLALHGIWLSGKRVRKDLRERLDTMRTGDGRPLAPFLRREVDRMLHHYDFVSQQIEEVVADRKEALADNSGRFPQAEKVRRLTTLDAVGETTATVLVAEVYHRSFETRRHVASFVGLAPCPYRSGDTDRDRGISKAGTKLARQTLVELAWFWLRYQSNSWLSLWWHERFGDKGMRGRKVGIVALARKLAIALWRFVEDGVVPEGATLKV

SEQ ID NO: 116018 - protein, 413 aa, unidentified
MLKICYNTCCGIDVHKKMLVATIATTDERKVTTYQTKQFSTFTKDIKKLKQWLIDNNCKDVCMESTGKYWIPIFNILEDSCNVTITHPKYVKAISGKKTDTKDSVWITDIFKHGLVEGSFMPPLEIRQLRDLMRYRFKLVNCKSSEKNRFQNSLTVSNIMISNIVTDTFGKTSKSILELMLSKEDNVTLEEITPLLRKNLKSSPQEILDSVEGNLTHEQNSKMKVCLSHYDKILECINDIEQAVLPLITPFQKEINLILTVPGVKDVSAITILSEIGADMSVFKDSEHLCSWAGLTPQCNESAGKKKSVHVSRAGIYLKPLLIQCANNAIRDKKCPYFRLRYDAIKKRRGHKRAIIAIARMLLTCIYQMLSKNEPFNNEIYEQLTHKNFKSKDKKLNINNAIKFLESQGYKVS

SEQ ID NO: 116019 - protein, 343 aa, unidentified
MQSISTIGLDIAKSVFQVHGVDEAGQVVIRRQLKRRHVLAFFQKLPPCLVGIEACASSHHWSRELQALGHAVRLMPPAYVKPYVKRQKNDSTDAEAICEAVTRPNMRFVPTKTVEQQSCLMLHRARHLFIRQQTAVINSIRAYLAEFGIIAPVGRRGVEQLLDVVADRADHRLPEIARACVAALGSQLRALKAQILEFDRRIIAWHRSSATSRRLDAIPGVGPALATALVASVADAGGFRSGRDFSAWVGLVPKQNSSGGKDRLGSISKQGDRYLRSLFTAGALAVIRYARIHGTGHRPWLTGLLARRPAKVAAIALANKLARMAWAMMARGQRYTEPAALAA

SEQ ID NO: 116020 - protein, 374 aa, unidentified
MSILAVGVDISKNYFQIHAVNENGKVELRKKATRDNFINTLNQIPKCKIYMEACGGSNYWGARIKDLGHEVKLISPQYVKPFVKSNKNDRNDAEAIVEAGIRPSMRFVELKAQWQQDIQSTHKIRERLVTERTALVNQIRGLLQEYGIVIPQGINKIRKELPKIVEENGFSGLMKGNISDLYEELTGIDGKIKKYEERIKSILKDNEICQELIKIPGVGVLGATMLIVELGNTSVFKNGRHFAAFLGLVPRQHSTGGKDTLLGISKRGNVYLRKLLIHGGRAVMRFVGNKKNRESLWLKSLEERAGMNKSAVAWANKIARKAFAIAHSKGKYVQDHIPKLNNSKSVPLKNSSEGQIFKKVTISENNNSSALKTA

SEQ ID NO: 116021 - protein, 345 aa, unidentified
MSKYCGIDLGNKHTSICIMDSRRQVLKEVEVATDSAEFAKAFKGFRKLKILVEASPLAEWLCTEVEALGHSVTIVCPRKAKVALESQGKKKKTDRRDARNLAELCRSGWYEAVHRKSAEARANRSYLTARKQLVEGSTALASSIRGILRAHGLRLTARSDEGTFSEKVVTAAKQLPPLVRGAIDQLLQAYELLHAQQRAMYKTLQSAVKSDPITARLATIPSVGAATAAAFVATIDDPKRFSSGEKVASYLGLVPSIYQSGETEYRGRITKTGDKLLRWLLVESAHNLLSCSKTECPLKEWGHKLEAAKGVGKARVAVARRLCILMWTLWTNGEEFHAESLKQAA

SEQ ID NO: 116022 - protein, 394 aa, unidentified
MRVVGVDIGAETHVVAVVDEDGRTLLKPTPVTEDAQGYARLLELIGEAADSLVVMEATGHYWQNLFAALAAHGFAIALVNPLRTRRFGEEELRRTKTDAIDALGLAHFGRQKRPQPTRLPDRATEELRELVHLRDRLVQDIGDRVRQLHRLVDLGFPEFTRHVPDLQSMLATAILRAYPTATAFRGLSVRVLADLRYDGRHRVGEALAAALVAAAAASVGRHHGEPYCLQVRYACEDLDLWRGRLRSVERDIERLLRAHEVGTLLTTIPGIGPQTAARLVARVGDPAAFRSAGALAAFVGVVPGLRQSGKRQSQRAGLHPLGHGRLRAQLWMPTLSAIRFNPWLRAYYERLIARGKVRKVAVVAAMRKLLAAIYSVAKNRRAFVPHLSPQETPA

SEQ ID NO: 116023 - protein, 483 aa, unidentified
MKPKPPEKTQKATGRPTPSHWHEMNRKQRRETTRKIQSDDLSLEVVHPDAAGIDIGNESHYVAVPPTRDSQPVRWFGCTTAELKAMADWLKQCGIRTVAMQSTGVYWIAVYDILEAAGLEVYLVNARETKNLPGRKSDVQESQWLMKLHTYGLLRNSFRPSQEIRTMRTYWRQRHDLVRSASRHIQRMQKALTQMNLQLANVLSDISGMSGQAIIKAILAGERDPHKLAEFRDPRVKASKAEIARSLEGNWQEDLLFVLQQEQDGYEFCQKQMAKCDQRLEQYLQQREDRSQGASLPEEKRKERLRKKKKGNAPGFDLRVELFRMTGTDLTQVDSIDVMTAMTIISETGWDMSKWETDDHFVSWLRLCPDNRISGDKIIGKGRLPTNNRVSIALKMAASTLRVSNTYLGAQFRRFRTKLGAPIAIKAMAAKLARLVYRMLRYGMKYVDQGAEFYEAQHRKLQIKQLKWKAAKLGFQVVEAPAA

SEQ ID NO: 116024 - protein, 369 aa, unidentified
MNKVTYVGLDVHKDTIAVAVAEDGRSGEIRFFGTIAHSADSVLRLTKQLVAAGNTPSFCYEAGPCGYGLHRHLTKLGFECAVVAPAMIPRKAGDRVKTDRRDAEMLARLWRAGELTPIWTPDEEQEAMRDLIRTRKQAMDAVKVAKQQLLSFLLRHGLRYENGSYWTKRHRRWLAELRRFRFSYQQLAFEELKRAVDQAEARVATLDQAIDEAVRDWHFSPVVDALRALRGVNTIIAATVVAEIGDITRFENPRQLMAWLGLVPSEHSSGSTTRRGRLTKTGNALARTMLVEAGWSYRHPPKEGQPYLKRSAHLPQEIKDIGWKAQTRLCKRFRHLSNTGKPQPRVLAAIARELAGFIWDIARKTPLSA

SEQ ID NO: 116025 - protein, 408 aa, unidentified
MNAVGIDVSKGKSMVAALRPMGEVALLPKEYPHSEVGLEQMAYAIIALGEDTRVVMEATGRYHEPVAAALYEYGIYVCVLNPLFIKQSGGGSIRKVKTDKADAMKIAKYGLDNWVDLREYTPMDTVRQQLKLCSRQYNLYMKTVVSLQNNLISLTDKTFPGVNEMFSSPERTDGHQKWVDFVMTFWHCDCVCRVSEKAFTDRYQKWCKRKGYHFSTEKALDLYAGSCGHFTTLPKNDNTKLLITTAAQQLLASKTTLAALRAEMSRLAKQLPEYDTVHAMYGVGETTAAQLIAEIGDVRRFPRRSSIVGFSGVDPAVNQSGKHEAQSTPTTKRGSPHLRKTLYQIACTYLRKAPADEPVYLFLDKKRSEGKPYFVYMTAAQNKFLRIYYARVKECLEAFVARQAIPQD

SEQ ID NO: 116026 - protein, 366 aa, unidentified
MEVTTIGIDLAKSVFAVSGADSRGRVVIRRQLRRAQVLGFMRGLPRCVVGMEATGGAQYWARQFSALGHAVRLMSPALVMPYRKGNKTDRNDADAILEAVSRPSMRFVTVKSVAQQDLLALHKVRAQLVKSRTALCNQLRGLLRERGVAVRMGVAALKRGLPAALADESSELSGEMRELLSEMSQWLGTLEQRIASCEARITQKFKHDERCVRLAEVPGVGPLTATALVAAVGNAQRFKNGRELSAYLGLVPRQHSSGGKTVLLGITKRGDRYLRTLLIHGARSALRQCKLKGDARSDWARRISAARGPNVAAVAMANKNARILWALLSRGDRYRSSRVLTRAVLRPGSPPPVKRARGAKLRVAKD

SEQ ID NO: 116027 - protein, 422 aa, unidentified
MLEETQEREEIIERVAALDIGKAELVCCVRVPGAPGRTRRVQEVTTYKTMTRALLGMVDRLRELGVTRVVMEATSDYWKPPFYLLEAAEFETWLVNAKDVKHLPGRPKTDRLDAVWLCKVAERQMLRPSFVPPPPIRVLRDLTRYRWDQVAIRTAEKQRVEKLLEDAQIKLSVVASDIFGVSGRDMLAALISGQRDPRALAQLARGRMRGKITDLEEAFTGRFDEHHAFLLTKMLTRIDQVSHDITDLDECIAADIASFAPALERLDEIPGIGPTAACVIIAEIGVDMSRFPTAGHLCSWARFAPSIKESAGRKKGNAATGHGNRYLARVLGEAAVAAGKTDTFLGERYRRIARRRGKKKAIVAVGRSILVIVWHLLSDPEARYHDLGSDFYDTHRSTAAQRRQHVRQLEALGFKVTLETAA

SEQ ID NO: 116028 - protein, 349 aa, unidentified
MEITKIIYGIDIASESFTVSQGVLYQDFQSNVSFTRTFKNNISGFKSFIKYTESLQKKFKAGPQTQLWFVMETTGVYYEKIAYFLNDNKYNVSVVLANKMKNFGKTLTTKSKTDKIDSRTITTYGLEKQLQKWESPSEEMKQLKDLTREINDLNKLVTMCKNKLHAKQHSYMPDPSIVKRLKEQIKFLKRNITQVKKQIDQIIKENKRIEERVKNISILKGVKTYTIISVVSETDEFKLVNNKRQLVSYSGLDIIQDQSGKTEKKTKISKQGNSDIRKALYMAALSALKHDKNCKLHYQRLIKRYNYKNKKRAVMAIMRKILIIIYTLWKNDEAYDPEYYKNERIALQN

SEQ ID NO: 116029 - protein, 382 aa, unidentified
MRTVSGLDIHKDSIFMCILDEQGKKTEEKFGVTTREIKRLGSVMRSHIVSEVCMESTGIYWIPVWRLLENDFQLRLVNAQFLKQLPGRKSDVKDAEWIATVLLKELVRDSFVPDGNIQSLRQYGRRINEINKDLVRCQQRIDMILQRCNIRLSNYVSNVDSKSYRKVVDALIKGESSSCELVKLVHGRTINRFSKSIIEDALEGDVKQSDRDLLKQYTQMLDLYQLQKQQCVDSMIQKCRELYPKAFSILLGICGIDKLSAAIIISEIGDNMKLFATAAALVSWAGLRPRNDESAGKIHSRKITHGNKYLRKALMECAWGASRNIGSVFYCRFWHLKEMKKHHNAIIVAIARQLLTIIWTLLSKEEKFDSEYHLKKHIPSIA

SEQ ID NO: 116030 - protein, 354 aa, unidentified
MSQKRSSEVAVIGIDIGKNSFHLVGQDRRGALVLRQKWSRGQVEARLANLPPCLIGMEACVGAHHLSRKLRGLGHDARLMPAKYVRPYCKGEKNDYRDAEAIAEAVQRPTMKFVATKTAEQLDLQALHRVRERLVSQRTGIINQIRAFLLERGIAVRQGLHFLRVELPGILAKRTDVLSPRMLRVIEDLAGDWRRLDERIESLSAEITRLVEQDPACQRLMTVPGIGPLTSSAMVAAIGTGDVFSKGRDFGAWLGLVPKQMSTGDRTILGSISRRGNRYLRKLFVQAAWVVLVKVKPQQWERYGLKSWIEAAKKRLHRNVLAIALANKLARIAWAVLHNGRAFECVKTNAPRPA

SEQ ID NO: 116031 - protein, 412 aa, unidentified
MNVRVEKACGIDVHKSFLVATILNCEGIKETKEFNTGLEDLINLREWIMAKHCQRVAMESTGIYWTPLYTCLEGKVETIVANPRHIKNIPGRKTDDLDSEWIAELCLNGQIKPSYIPSKGIRELRDLTRTRTKTIQTMTAFKNRVHKVLEKANIRISGVLSEIFGIAGLQILNGILNKKNIDDVLKDVKRIGKKKAAIKESVRGELSQTDIWLIQECLEIIDFLKKKINLLDSMINQQIKKEQKQNQMEILMTIPGISYTSASAILAEIGDINVFPCPKSLVGWSGLAPSLNESAGKSSNGHITKKGSKYLRRMLVQCAHVIARCRPNKLRFFFQRILMRKGKKIAIVALARKLLSIIHHLLKNNENYIEDELKPKKIRLPKFQSISELSLDEMIDIISKAGFTVEEISSNG

SEQ ID NO: 116032 - protein, 434 aa, unidentified
MMRGNEQEPSLKEKRRCAMKMPPPAPSSEGAVIKYVCGIDIGSQCCVGCICRPDKSVVIKSITFANAREGWQIWEEKLKQLDAPAGEILIGMEATSRYGENLYQELEQRGYVLRLLHPGQTHHFHQQRGLRAKTDRLDAMTIARALLSGEARMGYVPDEQVATYRELVRLHTQLADTAASYQNEIQALVVVLFPEFTQVFADPCLPTALAVLKAFPSAQALVEAGVEALVQVLRAQPAAHYGRPTAKKLVALANQSVSSGRARAGRSTSLRILCDQLEHTQANLARLNTEIEQLLNTDPGVKGLQQVPEFGPKTLAVLRAELGDVQRFSRIDEVIAYGGMDIEIKESGLWKGKAKLSKHGSGLLRRVLYMSALRCIHRKESAFGAYYQRLVQRGLKKGSALMAVMRKMLAVAAHLLMHEDEEYDRSLVCGSAAG

SEQ ID NO: 116033 - protein, 440 aa, unidentified
MKNNALYVGIDFSRNYAQVAVKDAQGHALGHSQRLPNTYPGYQQFKALLLEMLQEESAERLVIGGEATSYYWLPYYHQLACDPAWQSIPMDNYLLNARWVRWFKKRHSPTHKDDDIDAGEISEYVRIDPPDTTWQYDENWLSLRFLTRLRFHLAHSLTREKNLALLYVFLLYPSYKAKHPFSDVFGVTSQRFLSNHELMDELEDLSVEDLTAELEILSGGSLPTPAQTAQDFLQVFDNKFPLPDALRVPLQDGLRFLIETIRHLHKQVHLVNDRIAQQVHNGDYPEVGYLQSVPYIGPVLASGIAVEIGSLTRFSEQPVWDKHKRCYRKRSNSEINDAVHKFAGLWWRHHQSGDFSAADQHLSREGNPYLRYYVSQAAESMRLHIPSFTRYYLQKKAQATRHAHKRALVLTASKVLDLCVTLLRHKEYYQAKENCGTSVG

SEQ ID NO: 116034 - protein, 353 aa, unidentified
MIHIGIDLHSRNMTLVAINDNGKFLAEEKMTNTPLNLGRFFEQFNQPIQAVVECTSYWYWVADWCTEHDIPLTLAHAKMLKAISYAKVKTDAVDARTLAELLRVGLIPEAHQCRRDQRDLRELTRGRLRMIERRSSLQSSLWQLAAKYNVIVQDVGWRYLDRLGDFLQQQLPEVAWMEAQLLLDQIRLTQNHIIALEQAIEQQTGFHENVERLKVLPGFGLVCAWTVVAEIGDIARFPSDKQFVSYCRLVPGSKDSGGKRRHRSKNKDGNRYLRIAFNQAAIVAYRDYPVVKEHFKKVKRRSGKHVARTVVGKELARIVWQMLSKGEEYKGYKGRMTKITTQNYWPQPISPGA

SEQ ID NO: 116035 - protein, 351 aa, unidentified
MNYIGVDYHKKYSYMVVKNEDGRVEGRGTVNNTKEEVQRFLEPYRPGMAVVEATRNWGLIYDWLDEVLDDVALAHPLKVKAIAEARIKTDKISADILADLLRADLLPRAYAPSKQTREFKNILRQRMFFVRIQTMVKNRIYDILDRHPDELRRAPEVSDLFGAVGMQWLSQTALPGEDNKLLTSELGLLKFLKEEISQSNSTVRELAKKDPRARLLQSIPGIGPFFSVLILYEIDDVSRFRDDKKLCAYAGLVPSTYASGGKVFHGRITKTGSKWLRWAAIEAAQTAVRSDSEFSAYYQRIRVRKGTNAAKVATARRLLTIVYRLLRQGRFYERRTTGPRNSATPVALVTP

SEQ ID NO: 116036 - protein, 355 aa, unidentified
MTSTKYIGMDVHKESISIAVRNAAGKIVMECVIETKASMILQFIDGLHGDLRVTFEEGTSAAWLYDLLKPHVRKLVVCDPRKNASMREGNQNDKIDARRLAELLRLNHLSPVYHGEHGLRSLKELVRSYLTITKDLGRVMSRVKAIYRSWAIPCTGKQVYAPRHRAEWLGKITEPGVRRRAEFYYQQLDALRTVRQQVRRELLAEGKKHPVWKRLCQIPAIGPIRAAVLLGILQTPHRFRSKRQLWTYSGFGIETQSSADHRRIDGQLERVKKQSSIRGLNRNCNHDLKNLFKGAAVVASSKPGPFEEFYSALLSKGMRPEMARLTLARKIATIVLIVWKRGVCFDAQHLKPQTA

SEQ ID NO: 116037 - protein, 404 aa, unidentified
MNAVGIDVSKGKSMIAVMRPFGEVVASPFEVQHTAGELRKLVAFLKSLTGETRIVMEYTGKYSDVIARNLHETGLFVCMINPILIHGYANNSIRKVKTDKKDAVKIANYALDRWLDLPKFSPAEDIRLLLKTYNRQYNHYMKLKVSLKNNLISLMDQTFPNINTLFTNRPRKSDGHEKWLDFAAQFWHCECVSKMAEPAFTERYRKWCKKTGYHFSEEKARIIYSAAGEQIGILPKDELTKQLVVLAVCQMNNVMESLAVLLEKMNKLASSLPEYPVVMEMHGVGEVFGPQLIAEIGDIHRFRNKGSLVAFAGIDAPPYQSGTFESHNRSISKRGSPALRKTLFQVMSSILQSSSADNEIFLYLDKKRAEGKHYYVYMIAGANKFLRRYYACVKAHLDSLDRIS

SEQ ID NO: 116038 - protein, 412 aa, unidentified
MEVMHHCCCGLDVHKDTVVACVRRTLPSGRVDNQVRTFGTTTAGLLELGDWLVEQKATIAAMESTGVYWKPVWNLLEGRVELMLVNAREVKQVPGRKTDVKDCQWIAQLLSCGLLKPSFVPPVAQRELRDLTRTRTSLLQDKARIANRLQKTLEDANIKLGSVASDVLGVSGREMIRALIDGKLPPQQMAELARRQLRSKIPQLTDALSGRVSEHHRFMLKFQLDHIEQFEQQIAALDRRIQEVMSPLEQTGMKLLDEIPGIDCRAAQNILAEIGTDMSRFPSADHLASWAGMSPGNNQSAGKRRSGRMNDGNRWLKATLNQCAWAASRKKDSYFAAQHRRIASRRGVKRATMAVAHSQLCVCFELLKHGQAYHDLGRDYFERTDEQRIRRNLVKRLERLGYAVTLDKKNAA

SEQ ID NO: 116039 - protein, 378 aa, unidentified
MDESSKIMYVGLDVHKESIAVAYAPDDRGAEVVSLGAIGTRQSDIDKLIRKLQSKGAATLVFVYEAGPCGYGLYRYLTGKGFACHVVAPSLIPRKAGDRVKTDRRDAMTLARLMRSGDLSSIYVPGVEDEALRDLSRGRDAAMQDLKRSKRRLKSFLLRQDIRYEGRATWNAAHLRWLAAVVCPPPPQQIVFQEYLRAVTEQQERRQRLEDELHEAVKGWRLYPVVEAIQALRGVELTGAVILMTELGDITRFDNPRQLMSYLGLTPTEYTSGDRRRQGGITKAGNSHARRALVEGAWAYRYPAKVSRHLQLRLEKLPAEVQTISWKAQVRLCKRYRQLTARGKHVNQVVVAIAREMAAFAWAIARLVPVATPPPVAP

SEQ ID NO: 116040 - protein, 369 aa, unidentified
MSSSTVPSTSSAPRTRRPAGEVVLGVDTHRDVHVAAVLSASGAVLATDEFPATAAGYRDLLKRARKWGTVRRAGVEGTGSYGASLSRYLLAQGVDVFDVNRMDRADRRRRGKSDPLDAQNAARAVLSGRARARAKSGDGPVQIARMYKLTKVSAVKARTQAINQLKAVLVTADPVLREELAGLGNAELFRTCAQFTDARGREEAGAESVVQATRITLSLLAHRIGRLSEEIRNVEARLTRLVEGHAPQLLDVVGIGPDTAVALLITVGDNPPRLDSEASFAALCGVSPVERSSGRRQFRRLNRGGDRQANAALHRIVFTRLRVDPRTQDYYERRIKEGKTRREIVRCLKRYAAREVFHLVRQLQSGPRS

SEQ ID NO: 116041 - protein, 465 aa, unidentified
MVGRCLVPRVRMCRLTGVPRGTSVCVTSAHSRVCDEGARAWALAGVESERSGAMDVLYERCCGIDVHKKNVVACVLTPGGAGTPAKEVRTFGTMTADLVALLGWLEAAGCTHVAMESTGVYWKPLYNLLEGQVEVLVVNAQHIKAVPGRKTDVKDAEWIATLLRHGLLRASFIPDRDQRELRELTRYRTALIRERSAEANRLQQTLEGANIKLGDVASNVLGKSAREMLAGLVAGEEDVVVLAECAKRRLRSKIPELQRALEGTVGPHQRFLLAQQLAHIDYLDEAIADLCGEVARRLAPFEEAIVRLDAVAGIGRPTAEVILAEIGTDMSRFPSAGHLASWCGLVPGCNESAGKRKSARTRKGSPWLRAALVEAAKGASRTKTSYLSAQYRRIAARRGAKRAAVAVAHSIIEIVYHLLSTGEVYHDLGATYFDERDRRVIERRLVHRLERLGFDVTITPKESAA

SEQ ID NO: 116042 - protein, 437 aa, unidentified
MSTTFARLIDPTFEDDHHPFRHYDASGEPLEDRLYLPCGIDPHSQVCGVAFVHPLPQRQEVLLERHLHNNCLEDVTWLMETGDRLAQPFQATPLYVFEATGPYWKPYRNFLHQAGRATATICGRQSKHARGTGTRKTHNDLKDAYTVAKVFKQGESHASRIPPEPLASLREYTRQHLFFVEAAVAMQNRMYTLRYQLHPEFDALFSEPILATTLALMQAELVSPEHLKTCPLNVLTELVRQASHGKLGAPLALALVQSAHTSFAVPTASEALSFNLRLLAEAYDSLDRVILPPLRQRIQTGLTQLPFQHYLDEIPYFGPIVIGSYLGELGWPAWFRTVDSAVAWFGLDPSVSISADKPAGVTHLTKRGSKYGRRIMWLVARNWAQYTPEGHALVHKEMHENGLAYDGAICVLAAKLVRIAFAMLRDGSHFDRQRAFT

SEQ ID NO: 116043 - protein, 327 aa, unidentified
MPIIGIDVSKNKLHCALLSEAGKLKSKVFSNSPEGHIVLLQWAERLGQCQVVRLHAVLEATGVYHEAIAVALHRAGARVSVVNPAQVKHFAQGLAVKSKTDASDPVVLARYGALVKPPPWEPPPPEITELKALITRLEAIEANMRRELNRIEKTTITGVPTAVRESLEKSVSFLKEEKARLEKTIREHIDQHPTLKQDRHLLESIPAVGPKTAWRMLTLFRARTFTRAPQAAAYVGLVPIEHQSGTSVLKRPRLSKAGDARLRAALYMAAVVATQYNPDIRRLYQRLIARGKTKMSPLRAAMRKLVHICFGVLKHQRPYQPQSVKYP

SEQ ID NO: 116044 - protein, 492 aa, unidentified
MPQLNKNATIKWPAESKGVRRSKSRRVSKSRRSSADPTEGLQVGNPHAAAIDIGCSEHWVAVPAGRTERPTQRFGCCTAELNRLADWLKECGVDTVVMEATGNYWVVLYDILEERKLNPVVVNPRYAKNMSGKKGDIADCEWMQKLHTYGLFSNSFRPTQEIRVLRAYLRQRETLVGAAAQEIQHMQKALTEMNVQLANVISDISGETGLRIIDAVLGGERAAGVLAKLKGPRIMASLVTLERSLEGHWKEEELFRLEQARLSYAHFQEQLQQCQQRIEQQMQTIQGRVPLEGQGRAPRTMSAADKAAEPVPGQGDGRKSKSFDLGVELKRVLGVDLTQIDGVGPVAAQVILSEVGTDMSRWRTEKHFASWLGLCPDHRISGGKILGRATRPVVSRARNALRLCAYTLTHSKSWLGAKYRRLKHKLGAPKAIVAMAHHLARLIYRMIKNGQDYVDKGMEVYEAKYRENRIKWLKKQAKELNLELHEMQALAS

SEQ ID NO: 116045 - protein, 378 aa, unidentified
MKNSVLYVSLDVHKESMEVGLAKPGVHGEVRHYGKIGGDLDSLDKVIRKLESQGTELRFAYEAGPCGYQIYRHLTAKGYECLVAAPALIPRRPGDRVKTDRRDALSLARLFRAGELTQVKVPDAEDEAMRDLVRAREDAKAAERRAKQRTAAFLLRHGHRFPGKATWGRGYWRWLQQLSMPYPAQQIVLQEYLDAVQEATARVQRLTDQIRELLPQWRWHPVVQSLMALRGVSLLVATTVMAEVGDLSRFTNPKELMAYLLTPSEHSSGAMVRRGAITKTGNGHARRVLVEAAWAYRLKARISRHLWRRLTGLPKPVCDLAWKAQLRLCSRYRRLRARGKHQNTVITAIARELAGSFWAIGQLVAPRAAKTTTIPRRL

SEQ ID NO: 116046 - protein, 332 aa, unidentified
MYYIGIDLHKQDLVMAVEDEHGPVGRARRIACRDVDAILAAVERWRPFRAVVEASASYRWLYDLLSPQGEVVLAHPLRLRAITAARAKTDRLDAALLARLLRANLIPAAYVPPARYQTLRDLTRCRARLSYGATLAKNQVHALLARANVHPPFKTPFGKRGRRWLAGLDLGLAGNLTRDELLRRLEHYGREVAALDGHLERLAAEFPEAAALEVLHGIGRYSALLIVAEIGEPERFRNTRQVGAYAGLTARVHQSGNTEHRGGISKQGSRWLRWILVQAAMKLVRRDERLENFYQRVRKRAGRNVARVAVARKLAGICWVRLRAWRRESAAA

SEQ ID NO: 116047 - protein, 315 aa, unidentified
MAMVVADSKRLIGVDVAKAELVIWDDESAELIAIPNTKAAIKKWLKGLSGAMSVAIEATNIYHVLFTDLAFEFGHTIYVVDGYALSHYRKGVNVRAKTDAIDAQLLARYLKNEGQDLTPWAPPPAIYRQLLSLFRRRAGLVQARTSLSQGWANEPLLRAAFKTHLRAMQRLELLVEKMIKGLLEKAGLMPQVKRCMKVEGIGFLTAARLTATFQRGNFSGGDAFIAFLGMDLRIAQSGQKKGQSKLTKRGDPEARRLLHNAAMSACRTAVWKSYYEERLARGFSTTASLVMLARKLARVVFALLKSGDEYRSKTA

SEQ ID NO: 116048 - protein, 393 aa, unidentified
MFYYLGIDVGKFSHSLCLLTEAGKKTIFQINNNREGFEKLRIKLSELNCDKNILVGMEATGHYFLNLYDWLLQCGFDSEQIALLNPLQVKSFRNTNLRGAKSDNVDSERIAVLLKFGEFKRCNVATDEMMNLRELTRLRADLVANIGDLKRKIISVMDRVFPEFMTVFSNRFGKTVMSLLDNYTPEEMAELSLEKLTDVIKNLSGRGRGISQKKIQALHEASRNSIGITFGRQAFKIELDILSTRLKVFKEQVEKLENEIQLIAEKFDSKIFTIPGIGATTGAAILSEIGNIQNFSLAVKLIAFAGLDPKLKESGKYQGRTPISKRGSKYLRNAIWYSAMVACRVDDKFKKFYQDRRNKGKSHRYSVTAAANKLTKVIYHVLKNKCEYDSKLV

SEQ ID NO: 116049 - protein, 303 aa, unidentified
MNFHGYSEFLKAPSSQGERLDQMIVAMESTGCYHINLFSFLSSQGIRTVVVNPLLISNFAKLSLRKTKTDKKDAVTIARFLLDRHEEISQFSISQDHQDLRDLSRERESLCHLISATKVEIKRALRTTFPKLESVGNLYTGVMLRFVQQYPSARLVRGVKRKAIAKALRGPHVGDKLTFTAEDIVNAAQSSVAMVSPAKEIIVQGKIATLLHLQERLEELTKLLTDLCKATRVEDLKILQSIKGIGPNTAAPFLGEVGEVKNFTSSKKLIAFAGLDPSIHQSGKFTGASKLSKRGNRHLRRAI

SEQ ID NO: 116050 - protein, 350 aa, unidentified
MEAQLASASLTRAAIIYRGGVQFTTLSTLGIDIAKLKFNVCLINPSGKLRHKVFPNTSTGFAQLREWLAKQGIEQLHACLEATGTYGESLALFLYQAGHTVSVVNPAAIKAFAGSRLSRTKTDRVDAELIARFCLAQAPPAWTPLPQEVRELQALVRRLEALVEMRVAEENRLEAGIMVEAVTASVEELITHLSAQIKHTEKLIREHIKDHPKLKEQSELLDSIPGIAQTTAAAILAEITDITQYRSARQVAAYAGLVPRERQSGSSVRGRTRLSKIGNARLRKALYFPAITALRCSPFFQAWAKGLQERGKCKMSIIGAAMRKLIHLAYGVLKTGKPFDPEWAREAQIA

SEQ ID NO: 116051 - protein, 346 aa, unidentified
MAHYAAFDVSDKETAIHVLDEHGKLVWKGKRPSEPEALAAALRQHAPELVRVGLETGRLTPWLFHALKGLGVPVVCLDARHARAATALQRNKTDARDAETLAQLVRTGWFREARVKSWAAHAVRHLVGARAQLVGMATDLSNQIRSLLRTFGLRVTGLAGGTFERKVREQITGSPEVAAVAEPLLAAWRAMRDQIAALDRKLIEAARSNATCRLLMTCPGVGVVVATSFAAAVAAPDHFRCSRAVGAYLGLTPRRHQSGESDHSAGVSKRGDKLLRSYLFEAAACLLIRVQRPSALKAWGVGLVQRLGFKRAAVAVARKLSVVLHAMWRENRPFQAWPTPAVAAAA

SEQ ID NO: 116052 - protein, 335 aa, unidentified
MEHCGIDLAVRSSSICVTEESGKILEERVVPTEEEAFTEFFGGREQMSCLVEASPLAEWAAKVLEGLGHRATVIDTRKAKGVIRTKKKTDRLDSRNLAKMSRTGWYTAVHRKSARARAMRTYLQARQGVLATALAQGSRIRGLLRAHGIKLGQVADSRYEQRVRQLTMEEAPQLWPMLQPLLRLRAEAMRSAREMQKQMASQMSQDEVGRRLMSVPGVGPLTASVFMATLDEPQRFGSGDQVAAYIGLVPSVQQSGEKDFHGQITREGDRLLRSHLFEAAHTLLTRKKGTSRLKKWGLKLAKKKGYSKARVAVARKLAILLHHLWITGETFQATA

SEQ ID NO: 116053 - protein, 377 aa, unidentified
MKNVRFVGLDVHAETIAVAVAEAAGEVRSLGMIPNRAESIGRLVRKLGKPEQLRVCYEAGPTGYVLYWQLSELGVKCEVVAPTLVPVKSGDRVKTDRRDAEKLARSYRAGDLTPVWVPDAGQEALRDLVRARWAAKRDQLRARHRLSKFLLRQGRRAPEGITAWTERYLQWVKTQVSFAHQAQELTLSDYLHEVEHAAARVARLERSIDAAIETLPLKMRAVIDALQSLRGVAQINAVSIVAEVGELSRFEHPRQLMGYSGAVCREHSSGPRIHRGPISKAGNAHLRRIVVEAAWAYRHRPAIGKTLAARQQRSSAEVIELAWKAQERLHRRYARLMARGKNKQQTITAVGRELLGFIWAIGVQVEQELSAPVHRAA

SEQ ID NO: 116054 - protein, 402 aa, unidentified
MNAVGIDVSKGKSMVAIMRPFGEIVSTPFEIKHTASDIRSLVELINSVEGESRIVMEHTGRYYEVLAHQLSEANLFVSAINPKLIKDFDNDSLRKVKSDKADAVKIARYALDKWQNLKQYNVMDELRNQLKTMNRQFGFYMKHKTAMKNNLIGILDQTYPGVNTYFDSPARSDGSQKWVDFASTYWHVDCVRKMSLNAFIDHYQNWCKRKKYNFSQSKAEEIYGKAKELVPVLPKDAITKLIIKQAIDQLNSASTTVESLRTLMNETASKLPEYPVVMAMKGVGTSLGPQLMAEIGDVSRFTHKSAITAFAGVDPGVNESGTYEQKSVPTSKRGSADLRKTLFQVMDVLIKTHPQDDPVYQFLDKKRAQGKPYYVYMTAGANKFLRIYYGRVKEYLSSLPES

SEQ ID NO: 116055 - protein, 354 aa, unidentified
MKCTIKHVGLDVHQATTVACVRADSGRVIAETILPTEAAAVVEFFRGMRGTIHVAVEEGTQAQWLYGLLTPVVDRVVVCDRRGERPQGNKGDRVDAAALAERLRRGELRPVYHGSAERATLQELTRAYTNLVEDGTRVMQRLKALFRARGIRAPGKGIYHPSHREGWLARLPERGVRFRAEALYRELDVVRELRPQAKAAMVAEARRDPAWPILTSVPFLGPVRVAVLLATMKTPWRFRTKRNLWAYAGFAVVTKTSAEYGWEGGRPVRRRRRPLTRGLNPNHNRVLKDVFKGAATTATARPGPLQDWYQARVAGGMPEALARVTLARKVAAIALRLWKNGERYDPAQLTVQAR

SEQ ID NO: 116056 - protein, 318 aa, unidentified
MGVKDGTVITAAGIDVSKAWLDVALWPDDGTLLHIERSEAGWFDRLAAWLREQGVSRVGLEASGGYETEVMDALQARGFEVIRYNAYRIRMFAKANGRLAKNDRADAGILAHAAGVLPVKHARARQPQLDPLVELLNYRRRLQDWIGDCTNQLEHLRDKVLRRQTTARRAKLHREVTAIDKQLAATLAASGASRELVQRLRNVPGVGPVLSAALVALLPELGTLSRRKVASLVGVAPFDNDSGNRRGERHIQGGRARLRRILYMATLSATQHNPVIAAFAKRLAGKEPKVIITACMRKLLVILNAMVRDAKDWSPNAA

SEQ ID NO: 116057 - protein, 391 aa, unidentified
MAEDASRPAQAAIHTALGAIFVSMELSRKAWLITSLSPGGGEKMSKHSVPAGEVCGLLRRFAELRRKAAARTGRDFPIIVIQEAGLDGFWIHRVLQSEGIESHVVDAASILTSRRRRRAKTDRIDGETLVRTLMAYKRGEPRVCSMARAPTPQEEDRRRVCRERRTLVGERVTHVNRIKGLLFAQGVFGYEPLRKGRRERLEDLRTGDGRPLTVRLKAQIIRELDRLEVVLAQLKAVEAERNLLLKLTSDEVASPAAMLVRLKGIGPQTAVVLWSEGLFRQFDNRRQVAAYAGLAPTPWQSGSIEHEQGVSKAGNPHLRTTMVELAWLWLRNQPTSALSLWFRERVRRLGGRIRKTLIVALARKLLVALWRYTTAGVVIEGAVMKAAPATI

SEQ ID NO: 116058 - protein, 384 aa, unidentified
MSSSAAAVSPAARTIIYLGMDVHKDSITIAVLPQAAKTPTRLERLPNDLPKLKKWIERVARDGEVRACYEASGAGYVLHRALVAWGYACDVIAPSLIPKRSGVQRKHDKRDAADLARLYRAGELVAVRIPSEADERVRDVVRCRETFQREILKSRHYILKFLARRGFVFREGTNWCTPHLQWLQHLTTDGAPLAEHDRLVYREYHALLMYKLQRRDELDRQIEQLALLPALAPMVERLQCFRGISLHSAMVLATEIVDWRRFERPSQLACYLGLVSREDSSGDRTRLGSITKAGNSHCRHVLVQAAWSYRHRPQTSVDLKRRQQGQPPSVIGHAWKAQQRLHQRYNHLTYRKRPQIAVVAVARELVGFLWAVMQDGAPSAHQAA

SEQ ID NO: 116059 - protein, 362 aa, unidentified
MTTQDKNSITIGLDLGDRRHRFCVLDGNGKVTEEGTLANSRECLTELSSRYPGALMVMEAGCHSPWISRYLEEAGCEVVVSNPRKTRAIYQHERKSDRRDALMLARIARMDRALLYPVRHGSEQAQEDLLRIKLRDSLVRARVGLINAVRFTLKSLGYRITNPSTERFHKVIEGEIPESVKNVIAPSVQAIEELSLRIKVLDREIMTLAHNYTETAWLQQIPGVGPITALYFVLKIGEPARFERVRDVGAFLGLCPRRDQSGESDPQLRISKRGDVYLRRLLVSAAQYILGPFGPPSALREYGLTLAAGGTARAKKRAVVAVARKLSVLLLTLWKNQSAYEAFPGHEDKMRTSDRERLRSIV

SEQ ID NO: 116060 - protein, 391 aa, unidentified
MVCVGIDVAKDKHDCCILDSDGTVRADCFTIPNNMDGFKQLLQTIRDCTKKSDKIKVGLEATGHYSYNILGFLLDNGLPTYVINPLHTNLYRKSLSLRKTKTDRVDARTIATMLLSDVDLKSYTDIAYHNEDLKSLTRYRFDKVQERAKLKQSVSRLATILFPELEQLVSSIHGTSIYALLGEYPGAKQISEVHLTKLTNLLTTASKGRYGKEKAIQIREAARTSIGSVMPAKSLELKHTIKLIQELASEINEIEDSIQKIIDELNPPILSIPGMGVNSAAVILAEIGDFSNFSSPDKILAYAGCSPSTYQSGKLTNCYAHMEKRGSRYLRHALYNATKYVCYWNPVFAEYLAKKRAEGKHYNVALSHAMKKLVRLIYALQKSGKAYLASA

SEQ ID NO: 116061 - protein, 364 aa, unidentified
MHELRQAPEQITLGVDTHAEVHVAAALDQRGRLLGTYAIPTTVAGFAELLRWAAQYGELAHAGIEGTGSYGTGLARWLRARGVTVVEVDRPDRRTRRRRGKSDALDAEAAARAVQAGIATAQPKAGTGAMEMLRTLRVARQSAIKARTQAANQVHALVVTAPDVLRAQLRPLKVPQLVVTAGAFRPQAQLTTPTAATKLALKSIAIRYQHLSAEIDALDRHLEQLVPMVAPALVAIKGVGTDIAATLLTVVGDNPERLASEGAFAHLVGVAPIAASSGKITRYRLNRGGDRQGNRALYLLAVGRMGWDPATRAYVERRTAQGRTKPEIIRCLKRYIARELYPILAAITSTLLPADGQVSSSKSA

SEQ ID NO: 116062 - protein, 365 aa, unidentified
MDAIYIGVDFHARQQTICYLKTETGELVITELRHQDKEQVCAFYQQFQGQVIVGFEASGYSPWFETLLEQLGHEVWVGHATEIRRRARWRQKNDRRDAELIWDLMVHHEFPRLHRPAFPSREVLRMLRYRQKLIKLRTMAKNSLQAIALQAGLAKGPQLFTAAGQKQFRTAALSPVLHWQREHWFELLQPLNQQVLETMVWFKAQSKGDASVTRLRTHPGLGLLTAVCLVHTLQPISRFRNARKVAAYAGFDPVERSSAERQRFLGISKAGSRLLRYLLVEAAQTAVRNDEDLKRFYKRLAQRRGRPKAKVAAARKLLIRAFIMLRDEIDYAEFRRRAVAARLARTGQRPNVPEVLIGQPASSEQ

SEQ ID NO: 116063 - protein, 359 aa, unidentified
MNDISQAAIVRVGVDLSKKYFQVHAITQLGEVALAKAYSRDRFFTWCSELPAGCMVAMESCGGAHHVARRLRAMGLDARLIAGSFVTPYRMAGKSGKNDANDAAAICEAAGRPQMRFVPTKTCEQQGQLAVHRLREGYKEERTACLNRIRGLLTEFGLVFPQSPEALRAAIQEVLEDASNELPSVARLALERANSHYTELSKEIAWCDERICAHVKSDERAKKAAQLLGIGPLTASALVSTVGDFKQFHSARQFGAWLGLAPSQNSTGGKAKLGGITKRGDTYLRTLLIQGAKSAVMSAGKRSDRISKWLLQLKERIGWQKTVVALANKNARILWSMLTRGTTYDPEHIPTYPGAVSIA

SEQ ID NO: 116064 - protein, 399 aa, unidentified
MYDTSDIGVFLGLDVGKGEHHGHGLSPAGKKVFDRRLPNSEPKLRAVFDKLKAKFGTVLVIVDQPANIGALPLTVARDCGCEVAYLPGLAMRRAADMYEGEAKTDARDAFVIADVARTNPRALRQITVADETEAELAMLVGFDDDLAGESTRTSNRLRGLLAQVHPSLERVLGPRIHHPAVLELLGRYGSPQQLRRAGTRQIAQILKPKAPRMAERLATEITEALAEQTVIVPGTAATEVIVPSLARQLSEILQQRDAMQARLAALLEAHPLSQLLTSIPGVGVRIAATLLVTIGDASAFPDADHLASYAGLSPATKSSGSSIKGEHAPRRGNRQLKRAMFLSAFAALHDPASRTYYDRHRNSGKTHTQALLRLARRRITVLFAMLRDGSFYESRPATA

SEQ ID NO: 116065 - protein, 412 aa, unidentified
MPKIIYPICCGIDVHKSFVVACIATTDEKLVTTYKSKRFSTFTGDLRRLADWLTQNNCHDVCMESTGKFWIPVFNILEATCHVVLAHPKYVKAIKGKKTDKRDAKWIADIFKHDLINGSFIPPADIRQLRDLVRYRFKLTNYTTGEKNRAQNCLTVSNIKLDDVFSDVFGKAASAITERLLENNEPFDVKPYLTKNHKASVEEIQLAVDGVMCANQAEKLRIIRSHMDSLEYCKANLESEILVVAEKFLPQVNLVSTVPGIQTFASIAIIGEIGADMSVFETSRHLCSWAGLAPQNDQSAGKKKTTRISRAGVYIKPLLVQCANCAIRSKTNPEIANRYNAIKKRRGHKKAIIAIARMMLTAIYNILKKNEPYNAELYRKADAPPQNRQVTPEQGLCILQRQGYVILPPVPA

SEQ ID NO: 116066 - protein, 345 aa, unidentified
MKITTVGIDLAKNVFQVHGIDERGKAVLCKQLRRAQVAVFFGNLPPCVIGMEACASAHHWARTLQDYGHMVRLIAPQFVKPYVKTNKNDVADAEAICEAVSRPNMRFVPVKSIEQQAILSVHRVRQGFVKARTAQANQIRGLLGEFGLVIPQGIYNVAKRVPEILEDASNELPMPFRHLIDRLTEHLKELDRQVKEFEQEIIAWHRNSELSRKLEKIPGIGPLAASALVASIADARSFKNGRQVSAWLGLVPRQSSSGGKPTLLGMSKRGDAYLRTLLIHGARSAILAAKNKVDNTQGWLTNLLKRRHPNIAAVALANKNVRTVWAILAHGREFKADYVPTRMAA

SEQ ID NO: 116067 - protein, 270 aa, unidentified
MTFRPHALHLKAELFVKSSRVHVRDDGFTRCNFHLKFFIMVYRGIDISKSSFVAAYPSTNGNPTKTFPNTTAGMRELIGTLAVAEHHCVMKATSNYGCCCTCYIRTVLPSVLPPPQKKQIKHFSRMMMPVTKTDEKDAYMIAMYGEKMNPPIYKMPSQATIRILTTEGFTYFDNAKQLSRFIGICPTYQQSRTSVNIREHINRNDDERLRSLLYIAFWTALRYNSRECYIRLKANEKPFKVALIAVTNKLVRPVLTITTINSIYRWICPG

SEQ ID NO: 116068 - protein, 688 aa, unidentified
MRSLIIILVCLGAVVGAPPSTYAQERSHVPRVGYLALGRLATPTVFAQKMREQGYVDGQTAAFEYRFADGRHERLLPLARELSEGGADVIFAFGDEAIAAAQIATKTIPIVMFACDAVTTGFVASLARPGGNTTGVTCITTELSGKRVAVFHEMLPRLKRLAVLYNPENKSKPMDFAQTRDAAISLGIGVDGFEAREPEDVDRIFASLAARKPDGVSVLDEAFTMLNARRIVELARRHGLPSMHSFREPVDAGGLLSYGPSQSEMTAIATTFIAKILKGAKPADLPVQQPTRFELVNLKTAKALGLEIPPSLIAPRRRGDRMMGWMAPLRHRRAKLVFRRITRNREPSMNEITTIGLDLAKHVFQVHGIDAQGRTVLRKRLRRGQVLAFFSRIPRCVVGLEACATAHYWARELGALGHEVRLMPAQYVKAYIKRNKHDAADAEAICEAVQRPTMRFVPVKTAEQQATALLHRGREQLVRQRTMLVNALRAHLAEFGIVAAQGLRNVGELIAIVRDDGDRRLPDVARQVLQVLAAQLEQIEAAIAALEKQLMAWHKANAVSQRLASIPGIGPIIATAIATTVADPGVFRSGREFAAWLGLVPRQNSTGGKTRLGGITKRGNRYLRRLLINGASANLLRSKATKADPWVIGLRRRRPPLVVAVALANKTARIAWAVMLREREYQPRAVAA

SEQ ID NO: 116069 - protein, 355 aa, unidentified
MSQEKYIGMDVHQATISVAVMDGNGKLVMECLLETKAETILEFVQGLRGTLSLTFEEGTSAAWLHDLLKPHVSRLVVCDPRKNALLKEGNKSDRIDARKLAELLRTNQLKAVYHGEHGIRTLKELGRSYLTLSKDVTRTMNRIKSLYRSWAIPCAGTGVYAPRHRAEWLAKIVEPGVRIRAERLYQQLDGLQSIRQQARRELLQESHQHPAVKLLRQIPSIGPIRSALLAALLQTPHRFRSKRQLWAYSGFAVETHDSGEYRYVRGKVQRNRERITVRGLNDNHNRDLKNLFKGAAISASTRPGPLHDFYVARVAQGMRPTMARLTLARKVAAITLTMWKKGVSFDPQQLSRQSV

SEQ ID NO: 116070 - protein, 315 aa, unidentified
MNRDHESFVGIDIAKQHLDVCVLPKRRTFQLPYGEKGLKDLIDQLLQMKPTLIVVEATGGYERRLAAELLQAGLALAVVNPARVRHLAKGHGTLAKNDRIDAYNLALFAQIVRPVTREKTSQKQAELNDLVARRRQLVEMIVMEANRLETLADGCVRQSVVTIMNLLQEQRQEIDDKIARHLRSDDQWNGKVQLLRSVPGVGPVTASTLVAELPELGELNRRAIASLAGLAPFDHDSGGRHGRRFIHGGRKSVRVVLHMATLTATRCNPLIKTFYNRLIARGKTFRCAMVACARKLLILLNSLVKENRSWTPLPG

SEQ ID NO: 116071 - protein, 363 aa, unidentified
MSSENFVALDTHCSFCEMAAVTKTGRLLKRERCDTAIPPLVALLETVRRPRILTFEEGPLADWLARNLRQHVDKLIVCEPRRNALIAKDGDKDDPIDAEKLAQLLRGGYLKEVHQAGSLDRALLKQHVSFYHDRVRERVRQGHQLIAQLKRHGVFASIAQIMDEEERRRLYRKLPQRKLLIDHLELVRQVYELMLQQEEVLRGELVRLARREAAVRRLTQVPGIGWIRAVTFFVYLDTPERFKSKSALCRYCGIGLERRRSGDGPLRIRVVQRANRRLKNVLLGAAMSAVASGDNPFADKYQYWTKEEGEHPSTARRNTARAIASVLLSMWTNGSEYDPALVRGVGRPGPQRVKSRTSKRRSS

SEQ ID NO: 116072 - protein, 338 aa, unidentified
MTQFTFFVGVDIASASFMACVGVVPWKLTVKPEKFENIEDGFASFLNWLKNYNLTPEKTVICMEATGVYGEGLAYFLFASGYTVAVEPPLNIQRKFPANASKTDELDCQYIAEYACRYVDKLAFWKPRADILEKIKVLLTTRQHFSVQLTGHKNALIAVNRKKVTSELAQQVHQDMIEQINKHIKAIDKEIRRLIDDDPTFKQTFLLLMSVPGIGLQLAAYLLIHMQETLDPKVLAAFIGICPIKHESGTSVYTTPTSRHYGPPVIRKLLYLGACSVRTHKKLFQQYFFRKVAEGKHKKVALNNIENKILKIACAVVRSQKPYIPNYVSVNPLVLKKA

SEQ ID NO: 116073 - protein, 416 aa, unidentified
MNAAGIDVSSRKSTVAVLRPFGEVVRLPFDVAHNTEGLASLAEQLKALDGETRVVLEHTGRYYEPVAKALHEAGLYVSAVNPLLIKEYGANSLRRVKTDKADAVKIARYALDNWADLRDYTPMDTIRYDLKTLNRQFQLASKQRTASANNLIALLEQSFPGIRKCFDSPVRSNGTQKWVDFAHTFWHVDCVRKQSLNTFSDRYRKWCKRHGYLFKQSNAEEVYSLAKSAVVLVPKFKVAKVLVQEAAKQLTSISRSVETYRAEMERLASTLSEYPVVMEMYGVGKSFGPQLMAEIGDVRRFERKQSLVAFAGIDPMPNQSGDKNVRSNKSSKRGSPYLRKTLFNVMGIYLKCAPPDEPVFQFLDRKRSEGKPFYVYMTAASNKFLRRYYAQVRDYLATLEDLPPVDMDSTGLKTRD

SEQ ID NO: 116074 - protein, 364 aa, unidentified
MKIVGCDLHAGQQSIAMMDSETGELTEKVLKHEGNAVREFYGSLQGPVVVGIEATGAMQWFLELLEQLGIECRVGHPAKIRAAETRQQKHDRRDAEVILELLLMKNRFPDIWMPSTEQRDLRSLLRDRHQWVKMRARLQHTLQAIALNHALRKGKALWTATGRQALQDLALPDYTAQRRDELLRLYMQLEQRIQQLDKQVEKEAQGRPQARRLLTHPGVGPVTALATEVFLGDPHRFDTANQVASYIGMIPCEHSSGKRRRLGKLTKEGNSLLRYLWTEATLHAAVKDPELKRFYRRKLVQKGMGKARVATARKLGIRLWIMLRDEIDYEEFCRRGKLPQKGKTHAGMPDFNSGPARAVTGSTE

SEQ ID NO: 116075 - protein, 316 aa, unidentified
MATNVAARIVGIDISKAHLDVYVLSAGESARLDYTDEGLAELTGGLGDPADTLVVMEATGKLEARCAVHCAQAGFQVAVVNPRQVRDYARATGRLAKTDAIDAEMISRFAKAVDLQASPLRSEEEKHLDELVTRRRQIVDMITSKKNRLETTVVKTLRHRIEVHIRWLERELRSADGDISDVIEMTPVWRAKEALFKSVPGVGDVLARTLIAEVPELGSLNRREIAALVGVAPMNCDSGKMRGKQMIWGGRREVRRVLYMAALTASTYNADMSLFHQRLIADGKPWKVAITAVMRKLLIVLNTVAERGTPWEHRIA

SEQ ID NO: 116076 - protein, 321 aa, unidentified
MQGKVHDDAMAAVYAGVDVCKERLDVYIHPLGERMAVANDVGGWRCLQRRLARLPVALVVMEATSKYHRSVHRRLDAAAIPVAVVNPLRARLFAEARGRLGKTDAIDARMLALMAEQLAPRPTTPLSPEAEAVQELVRARVAAVAEKTAIGQRREVTATPFLRRELAARRASLERHIARLEAEIDRVIAADPDMARRKAVLLSIPGIGPVTAATLIAGLGELGSLSDKQVASIAGLAPHPRDSGAHQGQRRTGGGRSWLRSSLYMAAVAAVRSNPDLKAFHQRLIDNGKPFKVAITAVMRKLLILANSLITQNRTWTPTAP

SEQ ID NO: 116077 - protein, 316 aa, unidentified
MSESTVEKFVGIDVSKTALDVCVQPSGQALHVAYDEAGIGRIVECLQEARPALIVMEATGGLEIRLASELASAGWPVAVINPRQVRDFAKATGQLAKTDRVDALVLAAFAKAIRPQARPLKDADTRALNDMVSRRRQLIAMRVQETLRLGTAASRPLQKSLNKHIAWLDKQIAEVDGDLSKRLRGSDVWRAKDDLLRAIPGVGAITSLTMLAKCPELGTLNRREIAALAGVAPLANDSGRHRGKRFIWGGRAEVRAVLYMATVSAIRCNDTIKTFAERLKKAGKPPKVVIVACMRKLLTIMNAMLKNNAAWDPKIA

SEQ ID NO: 116078 - protein, 343 aa, unidentified
MQVIIGVDPHKASHTAVAIDAKECRLSAKKVRATRAQVSQLLEWAEPFPTRTWAIEGADGLGYLLAQQLVATGEHVLNVPATLASRTRLLGTGHSSKNDPNDALSVAVTALRTSGLRQVRPVGHSEVLRLLAKRNSDIGRQRCRVVSRLHALLLELDAGGIAKEIKASDVDRFLAAVHPTTPAEQIRYDVALELLADIRRLDEQLKASHKRIAAVVAASGTTVTDIFGIGPVIAAMLIGYTGDITAFANRDRYAAYNGTAPVEFSSGGRTVHRLSTRGNRNLNHALHLAAICQIRHTHSDGRAYFDRRVADGKTKKEAIRALKRQISNSVYRQLVADTARTRG

SEQ ID NO: 116079 - protein, 348 aa, unidentified
MATYCGVDFHSRQQKVAYFDPATGEIQLKELRHQGDEVRKFYEQLPRPVIVGLEATGSSLWFEKLLGQLGHEVWVGHATEIRRRARSRQKNDWRDAELCLDLMVKNEFPRIYRLSEESLEILRRLRYRHRLVKMRTIARNGLHAIALSAGLSLKAKLLTKSGRSKLAGLELSPVCNEQRREWLDLIDQLNHRIARLESEIERIGGADPRVQLLRTHHGLGPLTALALVHTLEPVTRFSTSRKVTAFVGLEPREESSDEKVRWRGISKAGSRLLRFLLIEAAGTAIKYDEELRRFYFRLLHRRDWRKAKVAVARKLLVRAWIMLRDQIDYAEFLKRGVAVGSARKGHRL

SEQ ID NO: 116080 - protein, 404 aa, unidentified
MAKYHVGIDVSKHKHKACIRSLAQDSYSGVFSFDVNRQGFEKFSGTLKKLSQNKEDFVIGIEATGSYGVTLAYFLLSHGYRVVEINPYRANQFRKAQGKKAKTDHIDARSLAALLSLENHKPLSIPDPALDNLRELTRFRTDMIQERTALVNQLHETLTTLYPELYQVLAKLDSPTCLALLIAYPGPEYISRAGEVKVAEILAEVSRGRAGKVEAKALLEAARNTVGVLQRQPALAIKVSILGQRLIALRTAVEKVEKEITRLFKKLPYDPKDFPVGNISSLAALISEIEDIHRFSTLKQFLSHFGWCPQSFQTGNYNREHPRMSHAGNKYVRRLIWMLSIVSIRIVPRYRAYFQRRVAEGKSKMHIIVAVGRKLLSVFYAILKKGIPFDPNWEVNCQFALARH

SEQ ID NO: 116081 - protein, 315 aa, unidentified
MKYHIGIDISKREFHVCFEKGGTIEKFSTDFAGIDAFLNRLQERKMTKGKTLIGMESTGSYHLPVAYQCMKAGYIVHVINPLITKTQNQTNLRRVKTDSADAVLVRNCLLNGAGYPFQETAETIKLKTLVRQRARFSMLRHRTRLRDEEVVNRERYLDVKITALDKELYDFLDEKIRRLDAQLRTYESPTQKLLKSIPGVGPQTAVTCLSEVGNIHRFPDGQKLTAWLGLDPRVHQSGTSINGKGYITKRGNKLLRTRLFNAASVAVLHENMFQKFFLQKRSEGKAYRVALCAVMRKMVHVIHAVWSRGTPFINS

SEQ ID NO: 116082 - protein, 319 aa, unidentified
MDILGIDIGKTRFDVCLLSADAKHTANFPNTEAGFAQLASWLAKWRPVPASGLHACMEATGNYGLDLAAFLVSDGVTVSIINPRQIKAFGDAELARNKTDQLDCALIARFCLAQRPPAWQPPMQHMRHLREMVRRCAALKENRTQELNRQKAGCASPVVQASIARHVAQLTAEIDAMTAEIRALLATEAQLETDFALLRTVPSIGDVVATLILAEIPNIRDFTPKALAAFAGLSPAEHSSGARQKNIGISRIGNARLRAGLYMAALSALRHNARLQDFVARLKEAKKPKKVILVAVARKLLVMAQAVLKTQTAFNPQLP

SEQ ID NO: 116083 - protein, 413 aa, unidentified
MAEFRGTTPELIRLAQWLKVRKVESVAMESTGVYWIAPHEVLEAEGLEVLIVDTRQLARVPGRNKKTDPTDCEWIQRLHSCGLLAGSFRPQEQVCMLRTLVRDKSTLVGESGDWLRRMQKNLDQMNVRVHRAVSDLDGVTGMAIVRAIVKGERDARELARLRDRRCRKSEVEIAEELSGHWREDHLFSLGQSLKMYDAVQEQIAAYDNEILRQMAQMEAEQRRGTAAPLPRNPQKGRTIKSRGQEPMRQALYRMSGVDLTQIDAIGVETIQVVLSEYGPDLSRFPTEKNFISHATLAPRVPKSGGKPVKKKKRNSASTRVAAALRMAALSLRHSETALGAYYRSIARRLGGDVAVFATARKLATLIYRLIRWGQPYVDEGAAVYEKSYQQRRIKGLTAKAKELGFHLTPITSA

SEQ ID NO: 116084 - protein, 341 aa, unidentified
MEEYIGLDVSMKETAVSIRRDGQRIWRGKCASDPAVIAQLVRKRASFAKRVVFETGPLSVWFYHALCSEGLPAICIDARHAKAALDMAPNKTDANDADGLAHLAEVGFFREVRVKGFDSMLTRTLVAARRHLVRITTALSNQIRGLMKTFGLVVPAGKGSNFERNVRRLLADHPGLSEIMLPLLEAWRTTRLQSVELGRQLVAQARQEKACQLLMSIPGVGAITATAFVTAIENPDNFRRSRSVGAWLGLTTRRYQSGEVDYDGHISRRGDRHVRSLLYEAAMVILTRSRADSDLRTWGLKLKERIGFKRAAVAVARKLAVIMHAMLRADTSFVRVAKVAA

SEQ ID NO: 116085 - protein, 399 aa, unidentified
MRHTEQAWAGIDAGKGHHHVVVIDREGTRLLSRRVANTEPDLIELIDTVRSSADDLTWAIDLTDGPATLVIALLLTRGHRLLHVPGIAVNRAADTYRGEGKTDAKDAAIIADQARMRRDLRLLRLNDPTIAELQMLTTHRADLAGDRTRAINRLRGRLAAACPALEAALDFTNQGPLLLISQFPTATAIRTAGPDELHRWLRSQHVRSAATLAARAHAAAASQHIRIPGEDTAGLLIARLAATVLELNTQLADLDTRIAGRFHTHPDAAVLTSMVGIGELLGAEFLAATGGNLETFASADHLAGYAGLAPTPRDSGNRVGNLHRPRRYNRQLQRVFYTSALISIQRSPASRAYYQRKRADGKRHRQAVLALARRRVNVLWAMIRDQRCYEEPISASTAA

SEQ ID NO: 116086 - protein, 379 aa, unidentified
MARIRDMVLREADTTKVPTIYMALDLGRRRWTVGLLLPGDRDARLFQIAGGDREGLSRLIRHRREMIGAGVRVVSCYEAGRDGFWLHRWLREQGIDNRVLDPASLEVPQRRRRVKTDRVDTLGLLRVLLRLDRDETEMTRVVWVPSPPIEDARQQTRERERLVKERTAHHNRILGLLAAQGVTSIKVGGRDWLDQLTAARTGDSRPLGAALLGDIRHEVERLVLIERQIEEVEAARRAALKSDTPLAARACKLKRLKGLGEVFATGLTHEAFWRDFANRRQVGGAFGLTPWPWDSGDTHGDQPISKVGNRRARTLAIECAWMWTFHQPGSALTRWWRQRFAGGGKRQRRIGIVALARKLMVALWRYLKEDLIPEGAVFA

SEQ ID NO: 116087 - protein, 341 aa, unidentified
MKITTVGLDLAKNVFQVHGINAAGDIIVRRRLRRTRVREFFADLKPCLIGMEACGTAHFWARELSALGHDVRIMPPFYVKAYVRRGKNDAADAAAICEAVTRPTMRFVPIKSEDQQAALMLHKARALLIRQQTMLVNALRAHMAELGLIAPQGRGKVEDIIAVIAEDEDESIPDLARAALKPLVGQLRAAENGTTALDAEIKAWHKDNEASRRLATIPGIGFLTASAIAATVPDPSFFRSGREFAAWLGLTPRQNSSGGKERLGRISKQGNRYIRRLLVIGATSMLRYARTKSAPGADWVNGLLARRPPRLVTVAMANKTARIAWALLAKGETYRAPVAAA

SEQ ID NO: 116088 - protein, 369 aa, unidentified
MGEYSEAFVAFDVAKKKHAVAIAEGGRTGEVRFVGEVENSPAAIERTIKKLGKKYDRLHVCFEAGPTGYGLCRQVRDLGHDCMVVAPALIPKRSGERIKTNRRDAVTLARLHRAGELTGVWVPDVVHEAVRDLVRARETAGDDLRRKRQQLLSFLLRHGRIYEGGGHWTLAHRRWLARPSFEHMAQQIVFQEKIDAIEDAAQRLRRLDEQLRTIVPTWSMARVVEAYQAMRGASFLVAVIFAAEIGDVRRFDTPPQLMAFLGLVPGERSTGDTVRRSSLTLAGNRRARRALVEAAWTYRYPARVSEALRLRLEGLPKAVRDIAWKAQIRLCTRYRRLYAAGKKPPVVVAAIAREMAAFLWAIGREVAPS

SEQ ID NO: 116089 - protein, 317 aa, unidentified
MSKHSIVFAGIDIGKRKLDLALKGSKARLEVENEPAGHDKALSWLKRHKVERIGVEATGGYEKNVVRALRRAGLVVVVLQPLQVRAYAQFRLKLAKNDKLDATIIADCVASIEEIHAAPDPRFEAFAASQTLIDQLNDDIVTYKTRLESAPDETARMFWKQEILARQAQARNARKQLRAAMREHSDLAAKLDLIVSVQGVAEKTAMAVLIRMPEIGALSREKIAALAGLAPYDDDSGDRTGQRHIKGGRTRLRASLYAAAFAATFHWNPQLKSLYQRLRAKGKKHKIALVACARKLLVFINTVVARATPWQASLATT

SEQ ID NO: 116090 - protein, 338 aa, unidentified
MTVAFIGIDLAKNVFQLHGVDANGQAVLKRRLRREGLLAEIAELEPCVIGVEACTGAFYWQRQFEALGHTVKVIAPQYVKPFVKHQKNDQNDAEAICTALMLPNMKFVPTKSEEQQDIQALHRARRRLVNHRTALVSQMRGLLLDRGIPIALSIGRARRAIPEILGNQTNGLSAMSREIIGDLFDFLGQIDAQITTFDRHIDAVFKSNEDCRRIARICGVGPKTATAVVAAVGDGREFKNGRHLAAWMGLVPRQHSSGDKRLLMGISKRGDRHLRTLLIHGARSVVRVAQRKTDPFSQWVNSLRERRGMNRAIVAVANKNARIIWAMLNRNEEFRAHA

SEQ ID NO: 116091 - protein, 410 aa, unidentified
MDVIVGRQGALDVHKAQVTACVRVPGADGERVEHVEQFATTVGGLLVLGDWLKAHAVTHVVMEATGDYWKPVWHLLESDFELMLVNAREVKQLPGRKTDVSDSAWLCRLAEAGLLRASFVPPKPIRDLRLLTRYRRTQIAERKREAQRLHKALEDTGIKLDCVATDILGKSGRAMLDALVAGTTDPAVLADLALGKLRKKIPALREALEGRFEALHALLIGAILAHLDFLDEQIEQLSEAIEEQIAPFAPAVDLLCTIPGVGQRTAEVIIAEIGTDMTVFPTAGHLASWAGQCPGNDQSAGKRRSGRTRKGSKNLNFALKDAAMAAIRSNDSYLQALYRRKKPQLGHGRALGAVKHSMICACWHMLSTGELYNDLGGDYYTRRNPQRQTRRLVAQLERLGHTVTLQEAAA

SEQ ID NO: 116092 - protein, 334 aa, unidentified
MEKITTVGIDLAKAVFSLHGVDRTGRMVLRRTVRRDQLVKLVAGLSPCLIGMEACSGAHEWGRRFQELGHTVRLMAPKFVVPYRKSGKNDGNDAEAICEAVGRPSMRFVPVKSAEQQALLAMHRVRQGFVVERTATINRLRGLMSEFGVVLPLRSITVRRQAATAAENLPELARRAIGDLLDQLRVLDERIGGYDREIETQAKLCEPAQRLMKIRGIGPTTALAIVATVGNAREFKNGRQFAAWIGLAPGQYSTGGKTRLGHISKRGDAYLRNLLVQGARSVLHTAATHRDPVSRWALELQPRRGYYRTLVAIANKNARIVWALLAKNESLRTV

SEQ ID NO: 116093 - protein, 317 aa, unidentified
MIVSQMVSNSVGVDIAKSSFDLVHHEAGEFKHFQYTPAGIAQCIAWLGTLKPSLVLMESTGGYELPLLNEFLSNSISAAVINPKRIRDFAKAKGRLAKTDKIDAAIIAEFAATFQPPPQTELAELSIKLKGLAARRRQLVEMRTQEKNRKEHARDKSIAKSIEVIIAALNREIAKIDKQIKSDLDQSPKLKQTSRLLQSMLGIGNHTAMMLACQLPELGALNRRQIAALVGLAPINRDSGQFRGKRMIGGGRVHVRRLLYMPTLVAIQHNPQIKAHYDGLVDKGKRKMVAVTAAMKKRLVILNSMAANEIAWNQNYA

SEQ ID NO: 116094 - protein, 325 aa, unidentified
MTNETREPVYVGIDVSKDSLEVALADKAASVRFVNDEQGVKALLEHLAGHHVAVVLLEATGGLEKRCAHALYLAGMTVVVANPRQAHEFAKSMGYLAKTDGIDARILSHFARTLHGSERFDKLLFKMATPQQEQLQALVTRRSQLVQMRVAESNRLNLAHALSAKSIQAVIKLLDKQIKTLDEDIGNRLKQHFAQKLKLLEGFKGIGEGTKAVLMAALPELGQLNRREIGKLVGVAPLNHDSGKMRGKRSVWGGRADVRSALYMAALSAVRFDPTIKAFYERLRAAGKPPKVALVACMRKILSILNAVIKSNTAWEQRCPQASTA

SEQ ID NO: 116095 - protein, 346 aa, unidentified
MEHYAGIDVSLELSSVCVVDAQGKIVRETKVASEPEALVAFFASLGFAVKRIGLEAGPLSAWLHAGLKRAGFDTVLLETRHVKAALSAMMVKTDRKDARGLAQLIRMGWFRPVHAKSMGSQEVRALLVARKQLLGRLIDVELSIRGILRGFGLKVGVVTRKGFEGRIRELVTGHITLERIAGAMLSARATLKVEYEKLHKIVLTIVREDAVCRRLMTVPSVGPIVAITYKSAMDDPNRIAKSKAAGALFGLTPKKYQSGEKDVTGGITRAGDEMVRTALYEAANVLLARITRFSKLKRWGMNVAKRRGSKRAKVALARKIAVILHRMWVDGTTYRWTDAQPTAVQV

SEQ ID NO: 116096 - protein, 412 aa, unidentified
MRIVYKRCCGLDVHKKVIVACLLLLEPDGELRSEIRKFGTMTEDLLALLDWLQQAGCTHVAMESTGVYWKPIYNILEGHLEVVVVNAQHLKKVPGRKTDVQDAEWLAECFQLGLLRASFIPPAPVRELRDLTRYRTSLIRERARTANRLQKVLEDANIKLAGVVTDIQGVSAVAMLRAIVDGSTDPEALAKLAKGRLRKKREQLVAALSGRVKPHHRFLIAEQLSQIDYLEEAIERLNAEVGERLRPFELQVKRLDSIPGIGRQLAEVMLAEIGWDMSRFATAKNLASWAGMCPGNNESAGKRRNGKTRKGSRWLRHALIEAAHGASRTKNKYLKSQYHRVAAHRGKKKALVAVGHSILIISYHLLTREQEYTDLGTNYFDERDRSAVQRRCVKRLEKLGYSVQLQPTALAA

SEQ ID NO: 116097 - protein, 345 aa, unidentified
MKIVGCDLHTRYQQIAMLDQDTGELIERRLEHAQGEARAFYASLQGAVRVGVEATGYTRWFERLLAELGHELWIGDAAQIRASMVRKQKTDARDAAHLLQLLLDDRFPRIWRPTMAERDLRQLVWHRQKLVWMRNAVGNQLHALAMGEGVCRKKQLWTKKGRAELEALRLGDWANYRRQELLRMIDQLDLSLKKLDQAVEEQSNQNAAAVLLRTHPGVGPVTSLAFVLTLGPVARFERSKQVVSYLGLNPREHSSGGKQQLGAISKQGNPMMRSLLVEAGHSAARLDTELHKDYQRLKRRRGSGVAKVAIARKLAVRMYWMLRQQASYAQLVRMQGSPWGTLVQK

SEQ ID NO: 116098 - protein, 416 aa, unidentified
MNIVNIKEITSGISKSKLDVCIMNHTGIIAQAEFTNDMSGVRKVLELLADNGCFDVAMESTGPYWYGVYDYLTEHNFRVMLVNPANAKSHIRNKSDKLDSASLAALLMLNQLQPSFVPDSGLRKLRRLTRMRAWLTDMKTAIKNQTTAVVSTYSPELLSIFSDAFGKSGKSLLARIAKGEQITGLSEEKMKQLQNVVDNAFPNLDPWAIQFTSSMISTIESKVKELDSAIASLVQSMPKIKKYVDLMLTITGVGLETAQAIAAEIADIDRFSTPQKLIRYSGLNPTFYQSGSVKVYGKLEKAGPPHLRRALYQAAQTMAFFGPDEFRNYYIHLRDKFGSRGYTVAIVSLARKLLRVIWAMLTDDSEFIGQKATRVESKRKRLASRAKKFTPKIKLPELIIELRNNYPELFRTLSEL

SEQ ID NO: 116099 - protein, 452 aa, unidentified
MVKRSKKRCEELPILHPHAAGIDVGASELFVAVSADRDPQHIRSFPTFTRDLNALADWLQQCGIRSVAMESTSVYWIPVYQILESRGLEVCLVNAQHVKNVPGRKTDVSDCQWLQYLHSVGLLRASFRPPGFICAIRSLWRHRSSLIQMAAEHVLHMQKALDQMNLQIHRVLNDITGMSGLRILDAILAGERDPVTLARLCHGGVKNSEDTIAKSLEGDYRPEHLFALRQSLAAFHYYQQLVVEVDQEIQGQLRSLETATTAEPTVPKRTKASAYQRRRYEPKTFDLRGELYRIFGVDLTNVPGISAITAQTVLCEIGTDVSRFRNASAFASWLGLCPENKISGGKVLYTKSRRVRSRVATALRMAANSLHHAKDYLGEFFRRITRKLGKPQAITATAHKLARILYHLLRTREAYSESVFHRCDEEAIKRAQYRLRKQAAQLGFQVIPLQNG

SEQ ID NO: 116100 - protein, 368 aa, unidentified
MTFYLGVDFHPRTETVSWVNLETGETDTVTLRHEDPEVVRAFYQRVCQPPAVIGLESSGSSVWWERLVEGLGYEVWHGHAAEIRRTAPPRQKNDRRDAEHILDLLLAGTFPRLWRPEPASLEVLGLLRLRHQLVRMRTMASNGLQAVAFSAGLVRKRRLGPKLVADLLARDLGSPALNLKRDVLVDLRAQLSQQIDAVATELTRRALGDRRVALLLTHPGVGLLTALAVVHTLGPAERFARGRQVAAYAGLDPRERSSGDHRRYLGISKGGSKLLRFLLGQAAHVASQRDPALGRSYRNLAYRRGKATATTALARRILIHGWIMLRDGIDYAEFRRRGQQRLASHRPAVPTAAGRNGSAPSSLNPSDR

SEQ ID NO: 116101 - protein, 346 aa, unidentified
MKKSTTIAIDLAKNSFQICKLVRDQVASEKALNNQKLKSWLQKQPSSHVVMEACGSAHHWGRFCQSLGHDVSIIAPKNVTPFRANQKTDKNDALAIAIAARQPNVHSVGVKTIDAQALQSIERVRQHLNDLIVATSNMVRGLILEFGIAIPKGVSAFNKTIPQILENGDSELPDILRPYLHHMYNLHQGLSEQKVQIEKELSYYINRHSECKKLLELEGIGPINALGLYLALGHTGRNFKNGREASACIGLTPKQYSTGGVTTMLGISKKVANKRLRANLIQGALSVVRLLQYRDPKNGKETWLKALIVRAGLRRAAVALANKSIRTAWSMLKHDTQYSTSFKHAA

SEQ ID NO: 116102 - protein, 340 aa, unidentified
MEKRYIGIDLHRNRFSCCVRLASGRTYFTEWALKQLPRFVKKLRPTDEVAVEVTGNTRLFYDAVAPHVARVVAVDTNQFRVISRSAKKTDERDAALLALYLSKGLLPEVRMKDKQHGQLASLTQTRDTLVKLRTALKNKVNNILSARGINLPKEALSSEKRLGEVLSLPFDQIVLIELRVIVDQIRSLNKSITELEKTIGEEGSKLEGHKSLTSIKGIGKITGAILLSVIGDVNDFPDERRLASYFGIVPRVSNSNETERSGRIHKRGSKLGRTALVQSALIAANYSPYLRTFYERVKARRGTGKAIIALARKFLDIIYRTLKNRWVFADFPNFVLAEGS

SEQ ID NO: 116103 - protein, 400 aa, unidentified
MRFYTRQHRHYCGVDLHARSMYVCILDAEGAVLVSKDIAAAPQPFLELIAPYREDLAVAVECMFTWYWLADLCEREGIVFVLGHALYMRAIHGGKAKNDRIDAHKIAALLRGGMMPQAYVYPRAMRATRDLMRRRNHLMRKRAELLVHIQNTNSQYNLPAFGVRIAKPHLRREAASHFAEAAVRKSVELDVSLIDHYDRELPGLERYIESSAHAHDPVALALLRTVPGLGHILGLSIVYEIERIERFPRVQDFLSYGRLVKPTKESAGKILGHSGRKIGNAHLKWAFSEAAVCFLRGNRRAQALRVRLAAKHGKGKSLSIIAARLARAVYFMLKRRTPFDAERFFAHSGSAGTKHSSLNVPTGAALEGARPERSSTKLTVPASTAAELGRKRMRPAAQRH

SEQ ID NO: 116104 - protein, 358 aa, unidentified
MNDATTSEAKMTIGLDLGDRHIQMCVLSADGEVIEESRLVCRPAALHARFLAASPTRVVIEAGTHSPWVSRLLAEIGHEVIVANPRKLRLIYENDSKSDRVDAEYLARVGRLDPALLSPLAHREASTQADLAVIRSRDALVKMRAGLVNHVRGSVKAAGGRISKCSTDTFPKTAADKLPAELAPALAPVLDTIAHLTEQIRAYDRQIERLCEEKYPETKALVQLKGVGELTALAYVLTIEDPARFPKARSVGSYLGLRPRQAQSGAADPQLRITKAGDDMLRRLLVGSAHYILGPFGPDTDLRRWGLSIAAGGSKAAKKRAVVAVARKLSVLLLRLWVTGEVYEPLRNAARDGEMVSA

SEQ ID NO: 116105 - protein, 328 aa, unidentified
MENISFFIGIDVSKTKLDVAILRPDGRFRDKKFDNNTPGHEALVAWLHLHEVSIAHICMEATSIYAEDAALHLTGAGYTVSVINPALAKAFAQSEGIRVKTDAVDARLLARFCQEKRPPQWETAGPIERRLRALVMRHQTLTDMHSQELNRLETARDEQRESIDAHLAWLEAELKLIGKKIKDLTNNDPDMKNRRRLLDSIPGIGPKTTAVLLAFVGEKLRFGEARQFAAFAGLTPRYHESGSSVRRASRMSKAGNVSLRRALYMPAMVALYKTDWGKAFRTRLELKGKAPKLIIGAMMRKLAQVAYGVLKSGRPFDATLHMENACMA

SEQ ID NO: 116106 - protein, 287 aa, unidentified
MSKKNTRNALDTSLSYAVIGLDLAKADCAVAAVPCSDDELGLIDRMDYESLFEQAEKLGPTLFAMEPCCGYSQISLRLQNMGHEVKVISGHAVKNWIATHKSNQKTDLNDATALAKLALYDHDLQPIRVKNVEECRIASVQAIRIQLRTQATKSLVCFKSLCQCWGIVIRRGSLNTKKMAEAVAAVEKLLGAEVVSSLMILRDAYKFTMKQINALDKLLDALVEANEQARTMKTVLGIGTQTAARLAVTTGDIKRFPMPRSYVAYFGLALRNIITGHSGTPSSRQER

SEQ ID NO: 116107 - protein, 321 aa, unidentified
MIMYNNYHGIDISKLTFDIVDKKGKHLSYSNDNKGFLKFLKTTLTDDLCVMESTGIYHLELAKFLHSKSIAISIVNPLRVKRFSQMHLNRNKTDKSDAKMISLYAQNQEVKLWNPAPKIVEQCKDIYQVMEQYIEFRAGLKNKLDALKTKKASKDLIQSIEKQIDTLSSSINELQNKADSLVKKYQPEMLKNISSIKGIGKRTASLLIIASEGFSDFENAKQLSSYFGLAPTQNTSGTSIKGSRKISKMGNPLVRKKLYMCSLQASRHNKSCKNLYERLLAKGKPKKLALIAVKNKLLKQVFAIAKSGLVYDDEYKSYFSI

SEQ ID NO: 116108 - protein, 317 aa, unidentified
MAMQVGKLIVGADVAKAELVIHHDERDEIVRLKNSKLEIENWLRQQPSNTAIAVEATNVYHLEFVEAAHSLGFEVYVIDGFQLSNYRKSIGGRVKTDPSDARLLSRFLKNEGEDLRPWSPPPAVYGKLQSLLRRRAALVNARTAVTQSWANEGHLKAAFKAFVSSIDRLDQLIQKKLKEVLREAGLHEQVARCQAVEGIGFLTATALVMAFTRGEFKSSDSYIAFLGMDLRVSDSGQKNGRRSLTKRGCSEIRRLLHNAAMSASRSPAWADDYKRHLNNGKATTQALVILARKLARVAFALMKNQDEYVTKGVKPAC

SEQ ID NO: 116109 - protein, 393 aa, unidentified
MFYLGIDVGKFSHSLCLIDDAGHHEIWQIKNDKSGFESLRQKLVSLNLLAGAELLVGMEATGHYFLNIYDFLLQLGLPSEQIALLNPLQVKSFRNTNLRGAKSDNVDAERIAVLLQFGNFDHCNVATDQIMNLRELTRLKSDLTANLGNLKRKIIAVIDRIFPEFAKIFQNKFGLTVVALLTDYQTPKEFAALSLEELTALIKSLSKRGINQDKIQKLHEAARNSIGISFGREGFKIELSILLIQLKSLEEQIDFLENKIMEMISEFNSPVFTIPGIGKTTGAAILAEIGGINHFASAIKLIAFAGLDPKLKSSGTYQGRTPISKRGSKYLRSALWYSAMVLCRVDEKFHKQYQDRRKLGKSHRYAVTAAANKLTKIVYHVLKNNCVYDSNLA

SEQ ID NO: 116110 - protein, 343 aa, unidentified
MQVVRIGLDLAKYVFEVHGVDNHGKVVVRKRLRRDAVAGFFANLPACLVGMEASNGAHYWARVLTELGHQVRLISPQFVTPYVKSNKNDQNDAEAICEAVGRPSMRFVPPKSTDQLAVQAVHRIRRRLVADRVRLVNQIRGLLSEHGIVIARDIAQLRRGLAVIVGNINDGLSEMLRALMRELQEELFELDTRIAAYDRRIREIFRTSEQCQRLGKIEGVGPVTATALIAAVGDRSCFKNGRQFAAWLGLVPKQRSSGGRARLFGISKRGDRYLRTLMIHGARAALSRANGKQDPRSLWLSKMRQRRHPNVAAVALANKNARIVWAMLTGDAAYEPALSVKAA

SEQ ID NO: 116111 - protein, 314 aa, unidentified
MQSPKDVGVDVAKEFVVAACADQSSSPRQIPNQAGALRAWLRTLPAGSRIAMEATGRYHGLLADLAHETGMTVYVLNPKDVWYYAKGLGHRGKTDRIDAEAIASYVADHHSKLKPYTPTSPEQRAIDRLLKRRAHLIVLQRAARSTAEDLTECRRQVKALLLRFDALIAEIDRKLQDLTRALEPLRQSRDRLQKIVGIGPLTSLSLASTFQRIPFRNADAVVAYSGFDPRPHDSGRMIGRRRLSKRGPGELRRLLYVAAMSAAQTPIWKPIYERYRARGLSSTASYVILARRMLRVAWSVHSHQAEFDPARLAA

SEQ ID NO: 116112 - protein, 385 aa, unidentified
MANQNDLSRSLVAFEQDNTIIAVIEMSLNSWLVAGIVPGIERHPLKKLSVDEQMLLQLLYRWRDEAVKAGRMITRMVVAFEAGRDGFWLARWLRARGIEAYVIHPTSVAVSREHRRAKTDRLDTELLKRAFLGWLRGEPDHCSMAAIPSLQEEDAKRPTRERENLVGERTRIVNRMKACLVRFGIRNFNPTLRRATERLNALCTPEGVSLPPNTLAELRRDMARLRFVMDQIKEIEAARLQRLERAPAEGPHAMVRLLARVIGVGLETADMLVHEILSRKLRDRRAVARYAGLTGAPDESGSKRREKGLAKAGNARVRRGMIQLAWRFLLFQKNSALSQWYRTRTESAGKKRKTMIVALARKLLIALWRLVTTGEVPAGVVLRAA

SEQ ID NO: 116113 - protein, 412 aa, unidentified
MDRFIERCAGLDVHKASVKACVRVPDGHGGRCSETRTFRTTTAGLVLLGDWLASHQVQVVGMESTGVFWKPVYYLLEDDVECWLLNAQHPKNVPGRKTDVADAAWIAQLVEHGLVRPSFVPPRPIRELRELTRYRKALIYERTRETQRLHKVLEDAGIKLGCVASDVLGVSGRAMLEALVGGTTDPEVLADLARGSLRNKLPALREALQGRVARHHRLLVAELLAHLDYLDEAIQRLSGEIAQMVAPFSPLLALLCTIPGVDRRTAEVILAEIGVDMTRFPTAGHLASWAGLCPGNNESAGKHFSGKTRKGSRWLRTTLSQAANAAARSKGTYLAAHYARIKGRRGHKRAIVAVAHSILVIAWHLLTRNQPYTDLGGDYFLERQHSQAYKNRLVRQLERMGHRVTLDPAEVA

SEQ ID NO: 116114 - protein, 428 aa, unidentified
MKVLYERVAGIDVHKDMIKVAIRSPGEKPWTRKTEILEFRTFYGVLQAMARELRRRGVTHVVMEASGIYTDPVYYALCEQDFEQVAVINPAHAKALKGHKTDARDCARLAELSGCGLLRGSYIPPAELREVRDLTRYRMKTVQARTPEIQRLGKALESAGIKLGSVASSITGTSATAMIEALTGGERRGCVLADLARGRMRAAGKLADLSMALTGRFTGHHALLCRLHRDRIAGFDVAGAGLDERIAGKVTRWQREADLLTSVPGFGDVVAQAWLGEIGPAPHRHFASHEKLASWVTLCPGNNISARKRKHGRTGDAGTCIKPMLVQAAWSAIRVRGRLQARYNRLVRRFGGDKNPAAKKKAITAIAHTLLKIAYQVLKSGTPYQDLGADFCTRRESPEQKQAWLERQLHKLHPGCTVTITISPPEAA

SEQ ID NO: 116115 - protein, 338 aa, unidentified
MYYTGIDLHKITSYLTTVDSSGNIIKEADIKNVDHNFVQYFSELGNENITTVESTTTWYWLNDLLSSLNIPLVLAHAKYVKAIAYAKVKTDKIDSHILAQLLRMDYIPSAHKISNDKRLMRDALRARLKIVQRHTSVTNSMHLLLSKYNIDSPDQLEDIPKFQYEQLAEVETLLSEQILDLEKQLYPSLIPNEDIQRILWIPGIGKMNAFTILLEVDDINRFEDVKHFFSYCRLTPAARNSGGKSKQRSSKDGNKYLKVAFSDAAVHAVRFYPIIRNYHNSLIRRKNKQVAKTIIAKEIAEIVFHVLKLKTDFNNKFKGQDLIERKAFQWPRVVNPFA

SEQ ID NO: 116116 - protein, 345 aa, unidentified
MEITTIGLDLAKNVYQVHAINGVGEVVVRKTLRRVQVLRFFERLDPCLVGIEACGTSHYWAREIGKLGHEVRLMPPAYVKPYVKRGKTDASDAEAICEAVSRPTMRYVAIKSCEQQAALTVHRTRDLFVKQRTQLVNMIRGLLAEFGIEIRRGITHALSLAERIAAGEMPDIPTLAAKMIASLAGQVLDLQTRLREIERELLAWHRSNDIARRLATIPGVGTICATAFAASVTDPHQFRSGRQFAAWLGLTPLQHSSGGKERVGRISKMGDKYLRRLLVVGMTSLVRRAKYKPDAVDPWLAALLSRKPVRVVTVALANKAARVIWAIMARGGIYRAPQPAGAGIA

SEQ ID NO: 116117 - protein, 427 aa, unidentified
MKKADLLSTLFVGIDISSRENVVAVMDFESTKPIASFAVPNNEPGAEEMAKKISTFITPESGLKKLVIGLESTSFYGVHIANYLSTCRELMPFHTEVYCLNPKSIANYKKSYIGLSKNDYIDAFVIADFARVGRITTKPWRGCQYLALQRLTRHRLHLVKALTREKTYMLSNIFLKFSEFTMLDTEEQPFSNEFGATASAVLTEFLSTEEIVDMSMEKLVEFICEKGRNRFPDPQKTAKLLQVAARNSYRLDKCLYEPLTVAIASSFTMISTYNAEIKKVNQAIEKTIKGLNTNAFLSLQSIPGIGPIMATGIMAEIGDITVFKSQESLAKYAGLVWHENQSGQFKADDTSMSKAGNSYLRYYFLEVTSHIKLHCPEYREYYSKKYAEVKTHQHKRALALTARKAIKLIFGLLAKNQLYSRNRVGQA

SEQ ID NO: 116118 - protein, 342 aa, unidentified
MKEVKKMQKSFIGIDVSKLTLDVCIINNEGFQEHQQFENNKKGFRKIQTWLVSTKVFGYANALFCMEHTGIYTRELVEYLLMQDAKVWMESALHLKRSMGMTRGKNDKVDAYRIARYAMTNGDKAKLVMPGNKTLQRIKDLMSNRKRIKKSIQSLKVSVKELKRVDKAAGKELELFSKPALTGLLKSKQAIEERMLELINSDEELKRIFELVTSVRGVGNVLATELMVYTHSFTRMTDVKQLACYCGVAPFSHTSGTSVKGRIGTSNFANMDLKSTLHLAAISSTQYVPELKQYYIRKVAEGKKKMSVINAIRNKLLNRVLAVVKRGTPYVENYSQNNLVMS

SEQ ID NO: 116119 - protein, 355 aa, unidentified
MATILALDLGKFKSVSCFYDTDTQELRFVTVESTPATIGLLLDKAKAEGVACVIFEACVLTGWVSQLCDARSLKRHIAATNGEAWRWKNVKRKTDRDDALKLARLYALGELPESRLPSLADRQHRALLQHRQSLVGRRVAVQNGLRALFLAQGVAMPTGASAWTEAGFAALAAQARPLSECGLEELWRGQLQLMLEELRLLWALLKTTEKRLDAIAAADQRMRILQTMPGVGPRTAEVVANYLGEAKRFKKSGEVSAYAGMVPRQFQSGETDRRGRITRRGPALLRKMLVECAWVSLRYNAWARGVFERISKGQKTRRRQAIVALARKILVRCWAMLRDNQPWHEAAPPPEKTAA

SEQ ID NO: 116120 - protein, 428 aa, unidentified
MNSLNERIKRITATTIIVGIDIAKELHYARITDYRGVDLMKPVKFHNNIDGFESLHAKVEKMRIKHSCDQVIIGMEPSGHYWRALGWYLKLHESKPMLVGVNPYHTKQAKELNDNSQTKSDPKDALVIANLIRNGNYYDTYLPEAEFAELRILNTERQRIMKQISRANNILIALMDEYFPEYSKVWGSVTCPTSLEMLKTYAFPTDVMTASKGRLLEDIKRASNRTQGDKLMCTLIRAAERSVGVKEGLEVTRLRMLSLIDELSYFERKKEVVEAALESVMDKLQLGEILQSMLGVGPIISAAFLGEVGDISRFSNWKQVRSLAGLNLVEDSSGKRKSKTKVSKRGRPYLRHMLYIAGECGCRCNPEMHGLYRFFLDRKKNPLNSHQAYVAVGLKVMRILFHLAKSGERYDPDKALGSVRLEQIASLT

SEQ ID NO: 116121 - protein, 344 aa, unidentified
MARKRILSTLDTSIAYEAVGLDLAKTDVTLAAFDSDHKEPYFIDRIPYDKLYELLANMAPTLVAMEPCSGAHQIAEQIQALGHEVMMISGRHVQAWVKDHCNGQKTDLNDAFAILNLAYDRWLTPIRGKTREECRLLALQASYRQLKGQRTKTMVHVKATLHAWGFPIRTGSFNQKALRELIDANREAFGGKMAETLHLMIDRVRGLDHDIATVLKLLTEATKRDPRASLLRSIPGFGVLTTSRWCAVMGDIARFDSPKQTMAFIGLVPNNRITGHHTETSSGREARGQGRMSKRGDKMLRSLCILGAASLCMLVRKDRLQDCPFVASIKERLASPRPWFKVLV

SEQ ID NO: 116122 - protein, 410 aa, unidentified
MQTLVERGCGMDVHQATVVACLLVVLKNGKVQKQIRTFGTTTRELLSLREWLLSEGCTHVAMESTGVYWKPIYAILEGAFEIVVANAQHVKKVPGRKTDVKDAEWIADLLCHGLLRSSFVPPQPIRELRELTRYRRKLVESRSAERNRLLKLLETANIKLASVATDVFGVSGRLMLQALVQATTTPQEMAELAKGLLRKKIPELKLALEGKFEEHHRFLLGVQLRRLQAVEEDLRLLEQRIQEKLKPYSMQLALLQEIPGVDWTLAAVIISELGVDMSVFGNVSQLASWAGICPGNNESAGKRKSSRIPKGNVYLKTALVEAANAPAKAKGTYLRDKFYRLKARRGYKRAAVAVAHKILVAIYHMFSHQVCYHELGDLYLDKLNQHHVTRNLVRRLQRLGYSVTLEKKAA

SEQ ID NO: 116123 - protein, 357 aa, unidentified
MPAELTSLDFTGQTIYVGLDVGRRSWAVSIYTDCFEHKTFVQRPDPEALVRYLHKHFPQATYRSVYEAGYCGLWPHQALTALGVDCIVVHPVDVPTTGKERKNRTDRVDARKLARTLRSGQLQGIYVPSREAQEDRCLVRMHTLLVKKQTRCKNQILALLSFFGVLIPDEIAESRWSRHFINFLTAVPFASPSGQQSLELLLDELSFVRQQIARHTREVRALASSELYRQQVALLRTVPGISVHSAMVMLTELVELERFKSLDELAGYFGLVPGEDSSGDKEVVTGLTSRRNAFLRHLIIECSWMAVRKDPALMQSFNQLTKRMRKTQAIVRIARKLLARIRFVLRKQQPYVPCVVA

SEQ ID NO: 116124 - protein, 402 aa, unidentified
MKEFNAEQVQVETASALDAVQAAGKAMGYALYVGLDVHKETIAVAIAEAGRDEPVYWGEIANQPKSVRKLVERLSRDYEGQLLLFCYEAGPCGYRLYRQLLELGHDCQVVAPSLIPKKPGERIKTDRRDALKLARALRNGDLTAVWVPDEEQEAMRDLSRARDDMKGQERKARQQLNGFVLRHGHAWPGNRSRWTQAHYHWLESLRFAHDWQQVVLQEYIDAVKAASRRVADLTAQMERVLPQWSLAPVVESLVALRGIDKLAAMVLLAELGDLSRFESPRQLMAYLGLVPSEHSSGAQRRQGGITLTGNRHARRMLVESAWSYRFPARQTAHLKRKAASASDEAKAIAWKAQKRLCGRYRTLTQAGKNTKLVCVAVARELAGFIWDIACREMPKVHQQGAR

SEQ ID NO: 116125 - protein, 338 aa, unidentified
MNQHKIIGIDLAKNIFFLFEINHKGKNISRKKLQRTKLLNHIANLNPCTIAMEACSGAHYWAREFSKLGHQVLLYAPQHVKNQRRKQKNDYNDAEAIAEVALYKRPHPVPHKSVEQQDIQSLIRMRRLMVTERTRLINQVRGLVAEYGIIMSKGKAAFRKAIPEILEDGENQLSPILRELLSRQYERYLYVDEQIKWFDERLNQTAHQFDNAKRLMSIPGFGPLTSQAVAVWLGSGQQFNTGRDASAAMGLVPKQDTSGDKVILLGITKRGNTYIRSLLVHGARAALRRAKFKSDKLSKWMLELQERRGPNRAAVALANKLMRIAWALITKNEEYQPA

SEQ ID NO: 116126 - protein, 407 aa, unidentified
MRVIFGIDVSKSTSTVCELINDSKTITTITNDRPGFLELLKDLKAFTQHPQIIFEATGVYSRRLQTFLDDYGYEYVVLNPLKAKKEMNLGLRHNKTDKTDAYHLALIQKLYNHPVSQLQAEQYHQLNALSRFYDQLTNDIVIAKNRLHKVLQFIFPELESLFSTAKGFNYWSIVKMYPHCELINDLTELEIYTKLIKLPEFQAKKANRFALKLIDLAQKTYPVAPCKSVESDEARYYAQRLIDLDKRRQDLVNQMVRIAKSFPNRDLEILESIPGIAQTTAVRILGELGDLRRFSNPNKINAFIGIDPGRYQSGEMDTSLSITKHGNAVARKILYRAIGQIDQAAKTQHCHIADYYENKKLSSQTKGFKKIAIASIHKLIRTMYALISNDQLYDYDVAKHNQKRLLS

SEQ ID NO: 116127 - protein, 412 aa, unidentified
MEVIYRCCAGLDVHKKSIVANVRRIEEGSRLHTQTRSFGTMTRDLLALFDWLASHGVTHVAMESTGVFWKPVFNVLEGCFEVLLVNPQHIKQVPGRKTDVKDCEWICQLLQHGLLRASFVPPRPQRDLRDLTRHRAQLVAEQTRVANRIHKTLEDANVKLGSVASDILGKSGRDMIASIIRGEEDPRQMAELARARLRAKIPQLQIALEGRVTEHHRFMLKMLMEHLEMLEALIGQLNQRIEEKMLPFSRAIQRLCTIPGVDRRTAQNVLAEVGTDMTPFPSDAHLASWSGMCPGNNQSAGKRRSGKTTKGNRWLRRALTQAAWAASRTKGTYFSSQYRRLARRRGKKRAVVAVGHTILTVAYHLLKHETTYAELGADYFDRIEPERLTRYLVKRLESLGHRVVLKPQADAA

SEQ ID NO: 116128 - protein, 372 aa, unidentified
MAQSSTLYVGMDVHKESIAVAYVAPAYGADVVSLGPIGTRPCDIDKRIRQLQSKSKQLVCVYEAGPCGSWLDRYLTKKGYLCWVVAPSLIPQKAGDRVKTDRRDAMQLARLMRSGDLTPVYVPAVDDEAIRDLSRARADTRRDLKAAKLRLKAFLLRHDIRSTGRATWSPAHLRWLSEVVCPTPAQHIVLQESVQTVTEQTERLGRLALDLHEQGHPWRLSPVVEALQALRGGQCTVAVTTVADLGDLTRFANPRQLMHDLGLTPSESSSGGRRQQGSMTKTGTTHARRAFVEGAWAYRYPATVSRHLQLRLEKLPTAIQAIRWKAQVRLCKRYRQLRATGKNAKQVVVAIAREWRAFMWASAQHIAVTPKA

SEQ ID NO: 116129 - protein, 468 aa, unidentified
MVLHSLNHIFRKSGSSWVEFVRKTGVENLLIVGVDVGKYSHKGMICSFYGDILVKPFDFANSNSGFRTLESKINAVKSRLGAREVVVGVEATGHYHENLVSKCFKAGYRVRVLNAVNTAQVRKRFLNRSKTDNLDLRIIVDSVRSGWGNDSLPPEGVIRDLQKLDRARRSLVNERTRLKNKIRTNVDHIFPEFQGKEIWENGKKRKVKPFSNLFGKASRYIMRHCLHPSDILALGEKGLRELSVKENLKLRDSNIQTLLEFAEDSIARPKEEVEVYLFLLKHELEALELKDKQIKELERKIEDLYVQSEGAVLLSVPGIGVVTGAALYAEMGDLSKIDYAGQLIKMAGTNPVVKQSGGKRATYMAISKQGRRNFRNVVYLIGRSLAENNPEMKKKYHEFIKRGKFPRQAYIALGNRMIRIAFSMIKNQTLYRTNHENYDLHREIKKKLQSANAKRFFERYVKPSSLVA

SEQ ID NO: 116130 - protein, 367 aa, unidentified
MKKISTVGAKQTRNFREQKLTIGFDLGDRSSWYCVLDEAGEVVLEQRVSTTPKAMRAVFGGMPRSRIALETGMHSPWVSRVLSELGHEVIVAHARNVRLIGESRKKDDRLDARTLARLARIDPQLLAPVRHRSAQAQSHLMVIRARAGLVRSRTALVNTARGLAKSYGERLRGCNVRNMKPEKAQSLSPELQAGLDPLLGAIESLSERIYEYNQQIEKIAKESYPQVTRLEQVKGVGTLIALTYILTLEDPQRFRKSRDVGCYVGLQPGRRNSGQSEPQLHISKEGDPYLRTLLVQGAHHILGPFGADSDLRRWGLKLAERGGKNGKKRAVIATARKLAVLLHRLWVSGEAYEPLRNSRAVPLPAAA

SEQ ID NO: 116131 - protein, 338 aa, unidentified
MQYCGLDLGKKSSRFCVVDEKRVVVREGSVRSRVAELQKVFTQFPSMRIAIEASTKAFWIADRLRELGHEPVVVDPGRTKAIGAALIKHDKLDARVLATLCAADVLAKVDQPSEMQRMARMPVVVRDGLVRCRVRLAMMVRSILDSEGIDFQHCALDRFADRVDELASEVPAEIRLAIAPAVEMIRDLSKRIEECSSRLEESMESDEDAQRLMTVPGVGPVVAACFLLAVRDPARFESGRQVGAYLGLVPSLYQSGQTNRRGRITKHGNRQTRWALAIAANALLRTRRPSAIRDWGRKLAERIGRKKAVIAIARKLAAVLWAIWRNKISFEPRLAVAA

SEQ ID NO: 116132 - protein, 350 aa, unidentified
MTTIARRITGGVDTHLDIHVAAALDELGALLGVESFAATAAGYGELLRWLEGFGTLELVGVEGTGSYGAGLTRHLLHHRVAVVEVDRPNRQRRRRKGKSDAEDAVAAARSAQGGDATGSAKTRDGNIEAMRVLRVARSSARSSRTQAINQMRSLVSTAPEELRAELRGLSIYKVLTLTSAYRHTGRTDVTTLTKLTLRMLARRALSLEEEVKEIDRLLKTLVAETAPELHAINGVGTDVASALLVAAGDNPERLKNESTFAKLCGVSPLDASSGKQQRHRLNRSGDRQANSALWHIVFTRMVCDPRTQHYIERRMKEGRSKKEAIRCLKRYVAREVFAALPRSQFALDNP

SEQ ID NO: 116133 - protein, 344 aa, unidentified
MDNHTQYSGFAGVDLAKKVMQIHFVTGDGEITDKQVKRAEFLDFFRNRTKCLIGMEACGASQDWARKLEAMGHEVHLMSPKAVKPFVSGQKNDYNDAIGIYKAMFNGVRRVPVKSTEIRDLQTLRRIRSQVTKDKVKEINHVRGLLAEYGIVMGKSITAFNKGISSALESLKERGDVSPLVAEELQTTVESIKTKIERQKRLDREIEQLARGCKNYENFLKTPGVGPFTAAMLCVLLCDPAIFANGRQFAAYIGLAPRSRGSGGKNFIIGIPSKFNCDSESRAVFVECAQALARYKNKSPWVEGILRRKPKKVAVIAIANKLARQVWAMANKGESFKQMTILTA

SEQ ID NO: 116134 - protein, 354 aa, unidentified
MSQKLNATIAVIGIDIGKNSFHIVGHDHRGAIVLRQKWSRGQVETRLANLPACLIGMEACVGAHHLSRKLQMLGHDARLMPAKYVRPYSKGQKNDFRDAEAIAEAVQRPTMKFVATKTADQLDLQALHRVRDRLVGQRTGVINQIRAFLLERGIAVRQGLHSLRSELPGILATRTDVLLSRMLRIIEDLAGDWCRLDARIEGLSSEIETLARQDEACEPLMTVPGIGPLISSAMVAAIGTGDVFSKGRDFGVWLGLVPKQISTGDRTILGKISRRGNRYLRALFVQAAWVVLVKVKCWERYGLKSWIEAAKKRLHHNVLAIALANKLARIAWAVLNKGRAFECVKTEETASRPA

SEQ ID NO: 116135 - protein, 391 aa, unidentified
MVYLGIDVAKDKHDCYIVNSDGEILANVFTIPNDQAGFNLLLQRLKSVAPDLSKVKVGLEATGHYSYNILGFLLDKGLHTYVINPLHVNLFRKASNIRKTKTDPIDARTIAEMIMSNVVLTSYTAKSYHNEELKSLTRYRFDKVQERAKLKTSVARLVSILFPELEKLVPTLHMHTVYALLTEFPGARQIASCHLTRLTHLLSESSKGRYKQDRAIQIREAARSSIGSVMPAKSLELKHTIHLIEILTEEINEIELSIKRIMDEDPSPILTIPGISYRMGAMILGEIGDFSRFTSPDQILAYAGLSPSTYQSGKLDNAYPHMEKRGSHYLRFALFNATRFVCNWDPTFAAYLAKKRAEGKHYYVAISHAAKKLVRLIFALVRSGQAYSPAT

SEQ ID NO: 116136 - protein, 410 aa, unidentified
MEVVYERCCGLDVHKQSVVACRIAPGPDGTLRKQVRTFGTMTVDLLELADWLTAAAVTRVAMESTGVYWKPIWNLLEGSFELVLANARHIKAVPGRKTDVRDCEWIADLLRHGLLSGSFVPDRDQRELRELTRYRTSLVRERTAEANRLQKTLEGANIKLAAVATDILGVSGRAMLAALLEGTADAATMADLAKGRLREKIPQLERALAGRFGPHQRFMVAEQLAHLDFLDAAIARVSTEVAERVRDDEPAIAHLDTIPGVGRYVAEALVAEIGTDMTRFPTANHLASWAGMCPGNNESAGKRRSGKTRKGSPWLRSLLVQAAHAAARKRNTYLSALYRRLAARRGNSRAAVAVGHAILIIAYHLLQRGTDYQDLGPFYFEERDRDAEQRRLVHRLERLGYKVSLEPSAA

SEQ ID NO: 116137 - protein, 326 aa, unidentified
MHGVDGDGQVVIRRKLKRRYVLAFFAKVPPCLVGMEACATSHHWSRELQALGHRVRLMPPAYVKPYVKRQKNDATDAEAICEAVSRANMRFVETKTVEQQSCLVLHRTRHLFIRQQTSVINAIRAHLAEFGIVAPVGRKGVEQLLDVVANTEDQRIPDVARACVAALGAQLRALKAQILEFDRQIMIWHRSHETSKRLDEVPGVGPALATALVASVADPKAFRSGRDFSAWIGLVPKQHSSGGKDKLGSISKQGDRYLRSLFTAGALAVIRYAKIHGTGHRPWLTALLARRPTKIAAIALANKIARMAWAMMARGERYREPVALAA

SEQ ID NO: 116138 - protein, 339 aa, unidentified
MLIIGCDYHPSVQQIAWVDTETAECGERRLRHRAEAEEFYRQWKGKQVRVGIEATGHSRWFERLLAELNFEIWIGDPAQIRAKQVRKQKNDRRDAEHILKLMMKDDFPRIWAVTPENRDLRQLVWHRHRLVGMRTRVMNQLQAVAMNEGIRRKKGLWTEKGRQQLESLSLMPWTTRRRQELLELLDRLDPNIDELSQAIQQEAEQMPEVKLLMTHPGVGPITALAFVLVLGTPERFGSGKQVASYLGLIPCEDSSADHWRFGHISKQGNKLLRFLLGQSAQSAARCEERWHRQYAHLTIRRNKPIAKVAMARKLAVRLFWMWRKGWDYQQLNKLGSHVG

SEQ ID NO: 116139 - protein, 372 aa, unidentified
MGPTPDNMIRNDTKSELSSLEETRPEFNPGKRLIKLGIDVHQEFYVVVCQEGGANPKPAQRFQKEAFLSWAARLKQKSGVQIHAVYEACGFGFGLQRQLAALGIACQVVCPQKLDEHNKRVKTDGLDAKALCLKLDRFVEGNRAALALVRVPTEAEEQLRAIHRQREQLVKARKQLEAQGRSLMVNHGIEPVARWWKKRSFAALAVPKWMKQLLSNSQPILLGLEEKIRALTVQLERAAPADQPRGLGKLTSVVIEREIGHWNRFKNRRQVGSYTGLCPGEYSSGQTRHQSCVTKHGNPRLRAALVELAWRLVRFQPNYQPVVKWRQTLAKGALATGAARKKAIVAVARQLAVDLWRIRTGRLSAETLGLKN

SEQ ID NO: 116140 - protein, 347 aa, unidentified
MNQIIRIGMDTSKYIFQLHGVDALEQVVLRKRLGRNGMLSFFTKLPPTVIVIEACGAAHCLARELGKLGHTVKLIAPQLVKPYVERNKNDGRDAEGLCEASSRPRMRYVPVKTAEQQAALMLLGVRDQLVMRRTQLSNTIRGHAAEFGLIEAKGLDKLVSLLAAIEQGDGVPLLARDLFAMLARQYAQVQVELKAIEAKLLAWHRANALSRRLAEIPGVGPVTAAALVMKAPDPHAFRSGRLFAAWLGLTPKDHSTAGKTRLGKITRAGDERLRQFLVVGATSVVKQATGKHHRGSRWLLELVKRKTPKQAAVALANKTARIAWKLMTTGESYDGARMPEASVAAAA

SEQ ID NO: 116141 - protein, 380 aa, unidentified
MQEHSPTDPAAPRPDEAVLFVALELSRASWLVAVQAPGGDKISRHKLAAGRSAELLELVGRQRAAAERRTGRAVRVVSCYEAGRDGFWLHRLLVANGIENLVIDPASIAVDRRARRVKTDRIDVEMLLRAMMARARGERRVCAVVRVPTPEAEDARRPTRERAALLAERVRHVNRIKGLCALQGIYDFEPLRPRAAERLDGLTTGDGRPFPERLKAEVRRHLERLGQVVRQIAEVEALRDEPASPLAEGVARLVRLCGIGRHTASILQAEILGRRFANRREVAQYAGLAPSPWASGGTRREQGIGKAGNARVRAAMIELAWLWLRHQPESALSRWFRERVGQARGLVRRLAIVAVARRLLVALWRYATDGVVPEGAVAKG

SEQ ID NO: 116142 - protein, 328 aa, unidentified
MTASLSNYQCARGVNVGIDVAKDTLEVAVRPDNEQWSTKNRVEDFPALIEKLRQIAPERIILEATGGWEAPLANHLAAAGLPVVVINPRQARDFAKATGKLTKTDKVDARGLAHFGEAVKPQVRPLPDEQTQALAALLTRRRQLVEMLAAEKNRLVTVQHRPALKRDVEEHIKWLEKRIDHLDDDLRKQLEESEVWRVNDQLLQSVPGVGDVTSRTLLSQLPELGSLSDKEIAALVGVAPHACDSGQRKGQAHIRGGRANVRSVLYMAALTAIRCNPVIKTFYQRLLAKGKLKKVALTACMRKLLVILNSMIKKQKSWSPEQIPAAQA

SEQ ID NO: 116143 - protein, 325 aa, unidentified
MDEHAQTIVGIDVSKARLDVAVWPGAERFSVGNDPRGIAELVEKVAARTPQAVVLEATGGLETLAASELHAAELTVAVVNPRQVREFARSLGRMGKTDRLDALVLAQFAQSAHSNERLPKLRLRDEAEAELKALVTRRRQLVAMLTAESNRRERAPKVIRKSIVASIRALKRSIAEIEQQVREVMSDSPVQQAKAVLLAAVPGVGPQLTATLLAELPELGNLGRRKIASLVGVAPHPHESGKFYGRRRCWGGRATVRTTLYMAALSGVRFNPALRACYQGLLGRGKSRKLALVACMRKLLLILNAILRDSASWNPHHQLDFQHSR

SEQ ID NO: 116144 - protein, 337 aa, unidentified
MKRYLGVDLHRTQFVVCTRWENGEQEIRQWRIGELPKFVEQLRSEDQIAVEAMGTTARFYDAVVGRVGRVVVVNPHQFKVISESVKKTDRHDAQALALYLEKDLLPEVRMKPKQNRELMHLAETRDLLVKQRSALKGKINNLLAMQGIELKREALSSKIALERVLALPVSGMVQLELRILVEQIRALSESIVELDERLEEEGQQLPGYENLTSIKGIGALSATVLLTVIGKISDFADENKLASYLGLVPKIANSNESERSGRITKQGNKLARTALVQCGLVAKRYSPYLNQFYNRIKQRRGGGKAKIALARKLVKIVYDTLKNQWVFEDFPSFTLAA

SEQ ID NO: 116145 - protein, 335 aa, unidentified
MQIYGIDLAKEKFDVSFFDLTSKKVSNQPSHKVVTNNLKGIGKFFKGLPSDAVLVAEHTGVYGDTLLKCCMDSNVKIAFVGGYVIHRYRATPDRAKTDVLDCALLRDFGERYPDKLKYKTFPEEALYELRQLARHREMLVEQRKQLITADKSEDCRPIRSLAVKRSMDRIKEMLDTEIAETEKEMLKVINGHESIHHNYELVKSVDGVGLITAVELLVKTDNFTKITTARQYAAYAGTAPYEKSSGKMDKGAHISKIGNRRSKTLLYICAESARLHNKEIKLYYERRTLIDKKPRHYVLNAIANKLLRIIFTLVEKGEYYDANFIRQDPRVVKYN

SEQ ID NO: 116146 - protein, 349 aa, unidentified
MRKENQKRANVSENPEQLKYSVGIDIGKESFAVCLCVIDQLQSVKILGSRNFDNTPSGFKNLDYWIQKKQKLPLDLRINMEATGVYYESVAWYLHDHGYNISVTLPNRAKRYLQAIGAKSKNDKADAAGLARMGAEQNLTLWIPPEESLMSLRSLTRQRQQIQESITMFRNQREAHLFSEHQHPSVIKHLNQILKTLEKTLEKLDVSLLETINNDPELNQKVGRITQIKGVGWLTVITILAETGAFHMIRNQSQLVSYAGYDIVENQSGRHIGKTRISKKGNARIRRILHMPAFSVVTCQEPMFKALYDRVYDRSKIKMKAYVAVQRKLLVVIYALWKNEQNYQSKLTE

SEQ ID NO: 116147 - protein, 366 aa, unidentified
MQKGTTFVGLDVHKEAINVAMLLPGESRPVEWQTSNDAAAVRRLVRKLQRSAIGDLRLCYEAGPCGYAVQRTIRALGVSCVVVAPSLVPRKPGERVKTDRRDARKLAELLRAGLLTEVHPPTEADEAVRDLCRAREDAHDDLVRGRHRVSKLLLRYGWTWNGGRKMWGQGHRLWLRSLRFEHKEDQWVLEDYLLALDHLEERLRALDAQIEQTSLDPRYAGVVAALRCFRGIDTLTAMCLVAELHDFMRFESARGLMAYLGLVPSEHSSGGKEHRGEITKAGNGHVRRLLIEAAWHYRHHPSTLSLRKRREGQPARVIAIADRAMHRLHRRFNRMLERGKPRPKVAVAVARELTGFIWAAMRNHTA

SEQ ID NO: 116148 - protein, 363 aa, unidentified
MKTQSNKKTELKKQNFDGKTIFCGIDCHKKNWSISIYIDSSYYTYIHQVPDAEALKTYLTDNFPGAKYVACYEAGFTGFSIQRKLTALGIECIVVNPADVPKTNKDTFSKNDRNDSKMLAEALSKGMLHGIYIPTEELESDRRMMRYRKYVQKNLAAKRNTIKGLLFSSGIKIPENMDNSHVSKNYIDWLKEIDFGYSTVRFTLDQMISDMEYLRRKLLDLNKQIRKLSKEEKYKSLYDILLSVPGIGLITAMTMITEIGDINRFQSFNKFNSFIGLCPSEFSSGEKDRKGKITPRSHKAIRELIIEAAWVAKNHDPALAHKFSDLCKRMTKKRAIIVVARKLLSRIYAVWTTKSQYIKGIQQ

SEQ ID NO: 116149 - protein, 388 aa, unidentified
MPRQRKPNDLSRSLIALDMDTTLIAVVELSLSSWLVAGIVPGVERQPLKKLKTDENALLTLLNRWRDEAVRSGHKISRIAVAFEAGRDGFWLARWLKARGIEAHVIHASSVAVSREHRRAKTDRLDTELLKRAFVGWLRGERDHCKTAAIPTLREEDAKRPSRERESLVGEQSRLVNRMKATLIRLGIRGFNPKLRHAEQRLETLRTPEGEPIPANTLAELKRDMQRRRFICDQIRSIERERLERLERAPDTEPHAMVHLLARVTGIGIETADLLVHEVLLRNMRDRRAVARYGGLTGSPDRSGGTNREKGMARSGNARVRRGMIQLAWRFLLFQKDSALAQWYRRRTEHSPKARKTMIVALARKLLIALWRLAREGVVPEGVAMRPA

SEQ ID NO: 116150 - protein, 311 aa, unidentified
MEFSLGIDISSKRLDCYWSHTNKHQSFENNPSGIARLVAKVKKESPQWLVFEPTGGYEIDLALQFAQAGIQFSMVQPHRLRSFAKSCGKLAKTDKLDAKLMATYGKTMEPKKTILGTKAQQELSSFVTRRRQLVDFLSMERQRLEQWLSPMMKKNIEEHCDYLKEQILAFEHQIQDCINQDTTLQQVSEALQNVRGVGPTSAAVLLADLPELGHIGSKEIAALVGVAPFNVESGNSKRKSSIRGGRLSVRCMLYMMALVAIRHNPVIREFYQRLREQKKPAKVAIVASMRKLLIILNAIARDHFKDQLLQA

SEQ ID NO: 116151 - protein, 343 aa, unidentified
MNFVGVDLHKKTITLCVMVVVGVKRKIVTRRRFACQDTAGIRAFFEEHTPFQVVVEATSNYEWFLQLVEDLADRWVLAHPKKLRIIAESKHKSDRVDARILAEFLALDMIPEAYRPSPRIQQYRVLVRHRHWVQGRITSLKCKLRHKAARYNADIAELFTAKGQEHLAEIAMGMCDRYETRNLLEQLELYQWQLKDCEQQLRQFAKSAPIAEQEARAVLNTMPEVGPVTIDVVLSELGDWRRFRGAKRVVAYAGLDPGFRESAGKARQLKITKEGSKLLRWAMIETAWRLIVKLRYWRTMFEQLKRNTGSEKKAIVGVARRVLCVIFAMLRDGRPYQMVAEAA

SEQ ID NO: 116152 - protein, 398 aa, unidentified
MPELWAGIDAGKSHHHCVVLDADGKRRLSRRVANDETALLELIANVAELAGDDATTWAIDLNSGGAALLLALLVNHDQRLLYIPGRTVYHAAASYRGDGKTDAKDAAIIADQARMRRDLQPLRPGDDISVDLRILTARRTDLICDRTRTINRLRTQLLEYFPALERAFDYSASKAALTLLTGYQTPEALRRIGHSRLETWLRNRKVRNAAAVAATAIEAAAAQHTTLPGQRLAADMVIRLAKAVIALNEEIAEIDTLIESRFRQHRHAEIILSLPGFGPLLGAEFLASTGGDMTPFGTANRLAGVAGLAPAPHDSGRISGNLRRPRRYDRRLLRAFYLSALASIRWCAASKAYYDRKRAEGKRHTQAVIALARRRLNVLWAMLRNNTQYHAQPAPLTA

SEQ ID NO: 116153 - protein, 388 aa, unidentified
MIYVGIDIAKLNHFASAISSDGEILIEPFKFCNDSDGFHLLLSKLESFDKSSLIIGLESTAHYGDNLVRYLVAENYKVCVLNPIKTSAMRKNNVRKTKTDKVDTYIICKTLMMQDSLRFVSYYDLDLMDLKSLGRFRQKTIKQRSRLKVQLTAYVDEVFPELQYFFKSGLHQKSVYALLKEAPTPEAIASMHMTHLAHLLKVTSHGHFDKETAQQLRVLAQKSVGANDSALSIQITHAIAQIELLNDQLDKVETEMTEIMKYNDSVIMTIPGIGYINGGMILGEIGDIHRFSSPNKLLAYAGLDPSVYQSGNFQAKKTRMSKRGSKVLRYALVNAAHNVVKNNATFKAYYDAKMAEGRTHYNALGHCAGKLVRVIYKMLTDDVVFNLD

SEQ ID NO: 116154 - protein, 338 aa, unidentified
MNIVFPGIDLAKNVFQLCGLNQAGKPVYTKRTGRKELLQTLANIPACLIGIEASTGAFYWQREFEKLGHKVKVISPQYVKPFVRGQKNDGNDAQAIAVALMQPTMQFVPPKSPEQQDIQALHRARQRIVNHRTATVCQIRGLLLDRGIPIGSAVSRARRAIPLILEDAENGLSSRMRRTIAELYDLFNDLERRIHFFDKEIETVFRQSEACQRIAKVKGIGPKTATAVVAAIVIVTEFKLGRNFAAWLGLVPRQHSSGDRQVLMNMTKKGDKHLRTLFIHGARAVVRVATNNNDGHMNQWVNQLKERRGFNKTTVAVANKNARIIWSMLRNETEYQVV

SEQ ID NO: 116155 - protein, 412 aa, unidentified
MTVTNQFAAHVGLDWADKKHDVCVQFKNGERVFDVIEHTAEALDAWLTELHQKVKGRIAIALELKKGPVVYALQKYPFITVFPVHALSLARYRQAFSPSGAKDDPQDAELALELMLRYPQKIKAIEPDNADIRLLQQLVEQRRQLVEDKRRFVNRIINTLKQYYPQPLEWFSHRGSLLLCELIIRWPSLQQLKRARRDTIRNFLNAKGGRAMALTEQRVASIDNAIPLTTDPSVIEANALMAAALATQIKVVSEIIKTYDERIETLFDTLPDAGLFKSLPGMGPCMGPRMLAALGDNRDRFNSAEEIQNYAGIAPVTERSGQKSWVHWRWQCAKFVRQTFAEWAAKTVNSSYWAKLYYQGLREKGKSHQSAIRALAFKWIRIIYRCWKARTCYDEAKYLLALEARHSPLLKP

SEQ ID NO: 116156 - protein, 369 aa, unidentified
MHETTTAFVGLDVHKDAIAVAVAEPGRAPARFLGTTPPTLASVRKALSHLGAPAHLSVVYEAGPCGYRLARELCAEGYDCEVVAPAKIPRRPGERIKTDRRDALSLASFARAGELTAVMIPDARDEAMRDLARAREDAVRARLKARQQLKAMLLRHGERYTGKSSWTAAHERHLATVRFAHPAQNVAYAEYRSAVRDSHERVERLTAALRAQVADWRLQPLLAAVCTLRGLELVTALTVLAELGDLRRFAHPKQLMSFLGLVPSEYSSGASRRLGAITKCGNAHVRRVLIEAAWTYRFPARLARELQIRQEGQPKIVRDIAWRAQLRLCTRYRRLQARGVHQNKIWIAIARELTAFIWDIARHVPLATH

SEQ ID NO: 116157 - protein, 413 aa, unidentified
MDVLHPRCCGLDVHKNSISACILVQVAGRVQKHQRRFGAMTQDLQELANWLRQFEVTQLAMESSGVYWKLVWNILEGEFTVVLANAQHIKNVPGRKTDQKDAEWIAQLLQHGLLRPSYVPCEVIRDLRDLTRMRASLSQEASRISSRVQKVLEDANVKLSSVATNTLGKSGRAMLEEIIAGQNDPEYLASLALGHLRAKTPQLKLALEGKIRPHHRFLLRRLLDQLRFVEHEIELLEERLEDIGRERPELSQAVARWDTIPGIDRVAGWTLLAEVGHNMAQFPTAEQLASWASLCPGNHESAGKRLGGATRKGSPWLRRMACQCAWAAARTKNTYLSAQFRRLAARRGIKRAIIAVAHSLVIIGYYLQQNQRNYEDLGGDYFDRIDSDGLKRYFIRRLEKLGHKVTLAPIKAA

SEQ ID NO: 116158 - protein, 360 aa, unidentified
MRSRIWAGLDLGAETTSVCIIDDAGAILHQSVCPTRLECIHNEVRSLRRRRFARIGLEATSSFNVARGLQSLGYSVDLYETRQLSKFLRVRRNKTDAGDAIGIAEAGRLGGTILSKVFLKSFECQALQSRLTIRNHLITQRVATMNLLCRQIEHYGGRIAGPKKSLRFAAQVENEIRRVFGKTSTPLTVALRELLDRWRQLLANQINLDRELKLLARDNEVCRRFMAIPGVGPICALTFYARFARSADIGAYFGLTPRIHQSGLTSRTGRISRMGNKAVRTLLTRASATVMRSSAVDSELREWAIRLEERRGRGRAKVALARKLAVIMIAMWKNDQSFRASSARNVIAAVDASGELDPDC

SEQ ID NO: 116159 - protein, 355 aa, unidentified
MNDAKYIGLDVHQATISAAVLDSAGNLVMEAILETKAEAILQFIHGLRGSLHVTFEEGTCAAWLHDLLKPHVAKVLVCDPRKNALLKAGNKNDRIDARKLADLLRSGLLSAVYHGENGVRTLKELARSYLTLTRDTTRVMNRLKALYRSWAIPCAGQKVYAPHHRNQWLAKITEGGVRRRAEFYYQQLDALQTLRQQVRRDLLAESRKHGAMKLLRQIPSIGPIRAALLIALMQTPHRFRTKRQLWAYSGLALKTSTSGEYRILEGQLKRSKKFLAIRGLNTNHNHDLKNIFKGAATRAAAVPGPFQEFHAALVAKGMKPTMARLTLARKIAAITLIVWKKGVGFDAEYLKQQAA

SEQ ID NO: 116160 - protein, 496 aa, unidentified
MVTKRKTGTTGTNRRRSRSQKFKKAVLGRPQGGIQARVQAVGPEKFGVVAIDCAKARSTWILVDFYGNVLCHPPNVEHNRSAFQLAILMLKQAVEKHDLKDVIVAVEMTGTYHKPPMRAFREAGFETRLVHPFASSYYRQPVHGDQKTDENDLDSIFRAAVNGFGLIEKPVDAIYQQLQILARHRRDLVKKRSKLQCQIRHHLELALPGFGALFDKDDLWSQVTPVPLLEAIAQHGGTVDVVKQAGQKGITQWLSDANVRFHKKTVERVTVWAANAAESDAMAAFHTRVWMSQLADWKQKMLQIHEIESDSASVLVKTPYVLLLSHPGINVVSAAELAGEMGPIENYATAKSICGRAGLFPSRYQSDEVDRGGKLTRFRNARLRAAWMMVADNMVKCNAYWMKKAERWRGEGHKPQDIRARIANRMTRGVFKMVSGRQIYQHASRLDRGYVMKARRSRQKGPQELGTLLVAVLARLGIAPKDEDTLESTSLRVLKL

SEQ ID NO: 116161 - protein, 397 aa, unidentified
MYIVGIDIAKRKHEAAVIDGEGAVIIKPFSFTNNCSGYNRLLAMLAKAKLPLDEVSFAMEATGHYWLALFTRLQKEGFRVQVINPVQTNSIRSFYIRQAKTDPRDALLIAEVIRFGHFSESTLHPENIYELRELCRGRHAIVSMQADVKRKVVALLDQVFPEYETAFTNMFGDTSMAILQTCPTPKELSEMPLEELCHLIEVSSHKRFRMAKAQELQALARNSFGFAMAGDVFSTMIRLYAKHLDFLKQQVREMDRKIAEIMETLDTPITTITGIGPTLGAYILSEIGDISRFSSAAKLAAYAGIDPTMRQSGEYNGVRNRMSKRGSPYLRHAIWLAASSAVLHDPALKLYFQKKRDEGKPYMASVGHACRKMVSIIYAVMRDNKAYVPCIPSEISA

SEQ ID NO: 116162 - protein, 325 aa, unidentified
MDILGIDISKNKFDIALLKDDQYHTATFSNDTVGFAKLQKWLKRLGADHLHACLEATGRYGDALALFLHEAGHQVSVVNPSRIQAYAASQLRRNKTDKEDAKMIAHFCSTQVPKLWNPPSTALRELQTMVRHLEALQTMRQQERNRLHAGMPSTAVREVVKAHIAFMDEQIEELSQQVRDNIDHDPDLKQRKDLLTSIPGIADVTAARLLAEIPPLERFDGAPQLAAYAGLTPREHQSGATVFRRGHLTKTGNAHLRHALYMPALVAMRWNPIIQAFVTRLQQRGKSKMTIVGAVMRKLLHIVYGVLKSGEPFDPNYAVKLRVSA

SEQ ID NO: 116163 - protein, 348 aa, unidentified
MTLVGCDLHSRKQQVAVLDTTTGEVLEQELVHDGDAVERFYRALRPPVTIGIETTGYTQWFHTLMHRLGHTVLVGEAGKIRAMVVRKTKTDRRDARHLLDLLKHDRFPTVWMPDPETRDLRALVAHRVRLVRMRTMVKNGLQAIALNQRLALRSALWTQRGLSQLRALALLPHTKRRRDDSLDLLTWLTSRIDQLDAQIARVVDADSRARRLLTHPGVGPLTALTTVLVLGPIERFPDGKHVVSYVGLAPAINASADKHHLGKITKQGNALLRWVLGQAAPLAARADDDLRRRYFAVLQRRGRPKAKVALARKLLVRLYVMLRDQVDYDEFRRRGRLARAPHTAVAVT

SEQ ID NO: 116164 - protein, 361 aa, unidentified
MGPEPASERKERVLLFLPVCQVLHGWSPVFDAPWELTIQLAVGLDLAKEDVALAAFDSEHKEPYLIDRISYDKLYELLTDMAPTLVAMEPCSGAHQICEQIEALGHEVLMISGRHVQAWVKDHCNGQKTDLNDAFAILNLAYDRWLTPIRGKTREECRLLALQASYRQLKGQRTKTLVHVKATLHAWGFPIRTGSFNQKVLHELIDANREAFGDEMAETLHLMINRVRDLDHDIATVLKLLTEATKRDPRASLLRSIPGFGILTTSRWCAVIGDIARFDSPKQTMAFVGLVPNNRITGHHTETSSGREARGQGRMSKRGDKMLRSLCILGAASLCLMVRNDRLPDCPFVASIKERLASPRP

SEQ ID NO: 116165 - protein, 454 aa, unidentified
MPKKAKIETTATGKKFKVVNPNAAGIDIASSEMQVCVPEDRDCDCNRTFGCYTQDLTQIADWLTSCHIETVAMESTGVYWLPLYFVLKERGFDVVLVNARDVKNYSGKKTDEADAEWLMMLHSYGLLKCSFQPENEARAIRNLTRHRSNLLQSSSREALHMQKAMEQMNLKLGNVISDLLGKSGLAIIKAIIDGNHNPQELAMLAEDNCKASKEEISKSLEGSWSEDHLFELGQAYELYNFIQKQIQQCDKQIEMHLIRYRAELDPLSDGNMPRSKKKIGKKNAVDFDVEKYAFDIWKVNAMAIPGMSAISLLQLIGELGHNFADKFDTCHSFCSWLNLVPNNKVSGGKLLSSKIPKKTNTCGQVFRLCANSLKRNKTTLGYYFRRIQSRCGYNQAIVATAHKIAKIFFTMVKTHTEYDESKTGINEKALLERKILMTQRRLDKLNRQLEVSFA

SEQ ID NO: 116166 - protein, 366 aa, unidentified
MKQVTTYVGIDAHKKDLFIAMLIGTKAAPVTWTMSNDANAVRRLVRRLERDASGPIQVFYEAGPCGYALHRRMTTGRIRCDVIAPALMPRKPGERVKTNRRDARKLAELGRAGLLTVVQPPTPADEAVRDLARARDDAREDLQRCRHRLGKLLLRRGLHYAGRNWTQAHRRWVDSLTWAHAAERAVVDDYLLAIDHSEARLRELDARLAEIAEQTPYREPVGWLRCFRGIDTLTAMLILAELHDFRRFNSARALMAFLGLVPGEDSSGEKHRRGRITKMGNALVRRVLVEASWHYQHRPGVGRGLAARRTGQPSRVIAIADKAQQRLCRRFRRMLAEHKPPAKVAVAVARELAGFIWAALQPPVVA

SEQ ID NO: 116167 - protein, 416 aa, unidentified
MNAVGIDVSSRKSTVAVLRPLGEVVCLPFDVTHDIAGLASLAEKLKAIDGETRVVMEHTGRYYEAVAKALHEAGFFVCAVNPLLIKEYGANSLRRVKTDKADAIKIARYALDNWADLRDFTPMDAIRYDLKTLNRQFQLASKQRTASANNLIALLEQSFPGIRKCFDSPVRSDGTQKWVDFAHSFWHVDCVRKQPFAAFCERYRKWCKRHAYLFKQSNAEEVYALAKRAVVLTPKSKVVKVLVQEAANQLSSISRSVEVYRAEMDRLAAMLPEYPVVMAMYGVGKSYGPQLMAEIGDVRRFERKQALIAFAGIDPMPNQSGDKNVRSNKSSKRGSPYLRKTLFNVIRTYLQCAPQDEPVFQFLNRKRAEGKPFYVYMLAAANKFLRRYYAKLRDYFASLDTLQPVAPIPTILKATL

SEQ ID NO: 116168 - protein, 388 aa, unidentified
MQIITHRHEALSAIRSDLGVIFVSLELSRSTWLITSLSPGGGEKMSKHSVPAGDICALMARFSEFKQKAFARTEKSFPIIVIQEAGLDGFWIHRVLQNEGIESHVVDPASIATSRRRRRAKTDRIDGEALLRALLAYKRGEPRVCAMVKAPTPEEEDRRRLCRERKVLIAERVEHVNRIKGLLFSQGVSGYEPLRRDRRRRLDELKTGDGHALPDHLKAQIGRELARLELLLEQIKAVEAERDALLAAQRVAAPRPAAMLLDIKGIGPEFAAILWSEALFRHFDNRRQIASYAGLAPTPWQSGSVDREQGVSKSGNPRLRTTLIQLAWLWLRHQPQSALALWFKERVGRNGGRFKKTTIVALARKLLVALWKYVTAGVVIEGAVMKAA

SEQ ID NO: 116169 - protein, 428 aa, unidentified
MKYNTQNAKIKSITEKTLIVGIDVGSETHFARAFDWRNYEYSKKPLEFSNTEAGFMTLKAWMADFAEKYGKNVVIPGMEPTGHYWFNLGAYLQDNGMKPVHVNPHHVKKLKELDDNNPNKNDRKDPKTIAALVNEGRFSYPYIPTGIYAEIRSLSNLRLQTQEEITRIKNRIARWFSIYFPEIKDVYKNPDSVSGLMILKEAPLPQDIVKLGVDGINKIWRDAKLRAAGLKRAKTLVTAAEHSIGSQEAPDSARIELKNLLNDYEIYKNREEDLMSLTEEKLSEIPHIDKLLEIKGVGLKTVSGFVAEVGDITRFDNPKQLQKLAGYAIVECSSGKHKGESHISYRGRKRLRYVLYEAAISLIARNEEFKEVHRYYRTRKENPLKKMQSVIAVACKVLRIFYTILTKGVTYDGAKMMQDIKRPQMLAA

SEQ ID NO: 116170 - protein, 364 aa, unidentified
MRDYNNKKVYLGIDVHKKHYSVTAICNGQVVKKDTIPAVPKRLVTYFQKYFPGAQIESAYEAGFSGFHLHRFLEENGSKNHVIHAAGMEIAVGDKVKTDKRDSLKLAIQLSVGRLQGNFVPSKKREDFRTITRLRESFLKHRIRFGCQIKAVLYQHGMIPFDNTQTVSSKWIKSILKMDMSSDIQYTVEQYASLWLHMTAKIKEIDSQLKIQAKQDSHLEIIYQSAPGVGALSARILANELGDMSHFSNENKLFSYIGLTPSEYSSGEHTRQGHITRQGKAILRKVLVQSAWVAIRHDYALFQIYQRISKVRGGKKAIVAIARRLIGRIRSCFKTGQSYRIEKMPEQIKSELIKVNIETGELVE

SEQ ID NO: 116171 - protein, 375 aa, unidentified
MRNVRFIGLDVHAETIAVAVAEPAGDVRSLGVIPNRPESLRKLVKKLGPAKQLRVCYEAGPTGYVVYWQLTALGVTCEVVAPTLVPVKAGDRVKTDRRDALKLARSYRAGDLTSVWVPDTAHEALRDLVRARGAAKKDQLRARHRLGKFLLRQGRRPPTVMKAWTQAHLAWVRRAVHFDHAAQEATLLDYLHEVDHVAARLERLEAAIASAVQSAAPRMRGVIDALQSLRGVALVTAVTIATEVGELSRFAKPRQLMGYSGAVASEHSSGPRTRRGGITKAGNAHLRRVIVEAAWAYRHRPAVGAALRRRQATASAEVKEIAWKAQHRLHGRYRALTARGKCKQQVVTAIGRELLGFIWAIGVHVESHTADVIAA

SEQ ID NO: 116172 - protein, 316 aa, unidentified
MDEILRFVGIDVSKDHLDVHVRPDDQQRRFEYDADGLTDLVKMQTELRPNLIVIEATGGYEQRVVATLAAQQLPVVVVNARRVRDFAKATGQLAKTDRLDAAVLSDFGEKLRPQLRTLPDESREELKALLVRRRQLVDMMTAEKNRQSTAPKRIRRHIQTHIDWLQKQLAGIDEDLAGTIQQSPMWKAKDEILQSTPGIGPTTSTTMLAALPELGSLNRHTIAALVGVAPMNQDSGKFRGRRAIQAGRHSVRRILFMSTLVATKHNPVIRAFYQRLLAAGKPKMVAITACMRKLLTILNAMLKTNSHWNSEHAKTC

SEQ ID NO: 116173 - protein, 338 aa, unidentified
MQVITIGSDIAKNVFQVHGAGNAVLRRKVRRDQLIPLLRDMQPCLIGMEACATAHHWARELIALGHVVKLMPPAYVKAYVKRNKNDAADAEAICEAVTRPTMRFVAVKSADAQSFLMLHRARHLLVQQRTAQISAMREHLAEYGVVAPRGGPMSWSNRSSRQGRWAAPRDGATGSYPLARTIEGLGAQIRKIEIELLAWYRTNQVCRRLLTIPGIGFITATALAATVVDAKVFRSGRQFAAWLGLVPKQHSSGGKDRMGGISKMGDRYLRHLLVVGATAVIRYTRRKATTVSTWANQLLERKPARLVTVAVANKVVRIAWAVMAREENYPATPSMAQG

SEQ ID NO: 116174 - protein, 343 aa, unidentified
MQTLTTIGLDIAKSVFQVHGIDAEGKVLIRRQLKRRYVLAFFQKLPPCLVGIEACATSHHWSRELKALGHTVRLMPPAYVKPYVKRQKNDAADAEAICEAVTRANMRFVETKTPEQQSCLMLHRTRQLFIRQQTSVINAIRAHLAEFGVVAAVGRKGVEHLLAVVTDASDHRVPELARACVAALGAQLRMLKAQILEFDRRIMAWHRSNEISQRLDELPGVGPALATALVASVADPKAFRSGRNFSAWLGLVPKQHSSGGKHKLGSISKQGDRYLRSLFTAGALAVIRYAKLHGTKHRPWLTALMARRPTKVAAIALANKIARMAWAMMAKGERYKEPVALAA

SEQ ID NO: 116175 - protein, 408 aa, unidentified
MKLFVGIDVSSESLDVCYLESNQKVLNQMTVDNSLVGAKLIQSNILLYADNRKYEQIIIGLESTSVYSFHPATFLHQDEALRALNVTVSVINPSKIHRFKKMFEEDKTDRVDAYRIADFLRLEIHQTSLIKEEQYMALQRLTRSRYQLVTQLTECKQHFIENLYYKCNTLKQSIDTSIFGTTMMSLLTEDVSLDEVAEMPLEDLSDFLDTKGKGRFADSEKLAKSIQKAIRSAYRLGAVMADSVDQVLGTYAMLIKTYTKQIKILEKSIADVLETIPEAKSLLSIPGIGPTYTAGILAEIGQIERFDNQAKLAKYAGLYWKKNQSGNFTAQNTPITKSGNHYLRYYLIEAANSVRNNIPTFNEYYKKKKAEVPKHQHKRALVLTARKFVRLVDVLLRNHQLYMPERSV

SEQ ID NO: 116176 - protein, 343 aa, unidentified
MKHYAGLDVSVEETSVCILDETGKICREVKVVSHPEDLLRILQDPAWHFERIGLEAGQLSQWLFDALADAGLPVVCIETRHAKAFLKAQVNKSDRNDARGIAQMMRVNLFRPVHVKTLTSQKRRVLLTARKLLQEKAIAIENDIRGLLLNFGLKVGVVGAAKFEERIHELIRDMPDLAEIVERLLDARRRLREHFAALHRKLLDLARGDAVCRRLMTIPGVGPVVSLAFVATIDTPARFRKSKAVGPVLGLTPVRSQSGNTDRVGRISLCGDGMMRTLLFEAAQTMLRQTTRWSWLKAWALRVAQRRGSRKAVVALARRLAVIMHRMWCDGTEFRWTREAPVA

SEQ ID NO: 116177 - protein, 408 aa, unidentified
MKMLHRRCAGLDVHSDSVVACARLTVRTKASHEVRRFSTTTRDLMELADWLAAQGITRIAMEATGVYWKPIWHILEGRFELVLANAAHIRNVPGRKSDVNDAVWISDLLAHGLIRASFVPPAQVQDVRDLTRTRTQLAREIAQHIQRIQKTLEDANIKLTSVISNIIGTSGRRMLKAMIAGETNPAKLAQLGSTRLKCPRDELTAALDGRLTAHHRFLIAHHLSLIEELERHIEAFDARIEKLLAPLRDAVAQLITIPGVSQVSAQVILAEIGAEMTPFPTAGHLLSWAGLVPRLDESAGKRRSTRVRKGAPWLKPVLVQCAWGAARSKGTYYQAQFFRLKARRGPKKAAIAVAASLLTAAYHMLKNGTFHQDLGADFLVKRDKARIVTKLASRIKDLGYDVSITPAA
